United States Patent Application Publication US 2026/0062700 A1 - sequence listing, part 2

SEQ ID NO: 1869 - protein, 382 aa, Pasteurella sp.
  source 1..382: note = Related to BQFX01000025.1; note = Pasteurella canis
METWSAHQLFNKATDKLDNAASKKLRSYALALKNRKLPVIFTLRHLSHITDVDYSLLRKTVMRRREMANYRMFPVRKHSGGWRYIHQVSRDLFKVQQFINSEILQKLSPHPSSFAFHSNGGIKACASQHCNARWLFQYDLKDFFYFINEKNIYTLFKDSGYRSLLAFELARLCTTTHLPNHLLHYIKQDSHFFNNYNFYNDIKSRIGVLPQGAPTSPMLSNLVAYKLDELLTKLSEEYGLVYTRYADDITFSSIDDYSVQHSRFRLHREIVKIIRQNGFCENTKKTRISGPGARKLVLGLLVDGCEPRLSKEMYKRIERLLYASNKYGIIEVAKNEKFDTPYGLYNHLAGLVSFVNDVDKNRWQEFNDLFSKINNPFDLKTI

SEQ ID NO: 1870 - protein, 381 aa, unidentified
  source 1..381: note = Related to NZ_UEWY01000045.1; note = Haemophilus influenzae
METWSAHQLLKKTSLKFDDITAQSLLKYCQELQNKNLPVIFTLRHLSKITNTDYLVLRKTIMRRRELANYRIFSIRKRSGGRRYIHQVTKELFQVQQFINTEILQKIQPHPASFAFYSNRGIKSCALKHCGARWLFQYDLKDFFYTINEKNIYKIFYKHGYRSLLAFELARICTTTHLPKHLLCYIHQEYNYFNLDSYKFYADSQQGVLPQGAPTSPMLSNLVAFNLDESLSKFANERGLIYTRYADDITLSSYKKSYTKYERFNIHKNIVKIIRQHDFLVNPKKTRIIGPGARKIVLGLLVDGDVPRIPKETYKRIERLLYASNKYGLLETARHEKFDTPYGFYNHLSGLLAFIKDVDNSRWIYLSKLFSNIENPFYKKI

SEQ ID NO: 1871 - protein, 378 aa, unidentified
  source 1..378: note = Related to QEPO01000001.1; note = Haemophilus parainfluenzae
MEIFSAHQLFNKASSKLGDVSAKKLVSYYQNLQTQNLPIIFTLRHLSKITSTHYLVLRKTIMRRRERVNYRIFSIRKRSGGYRYIHQVNKELFKVQQFINSEILQKTLPHPASFAFHSNGGVKRCALKHCGAKWLFQYDLKDFFYTINEKNVYEIFYNLGYRSLLAFELARICTTTRLPKCLKNYINSYSNCINYKFYNNHLLGILPQGAPTSPMLSNLAAFELDTLLTDLAKKHDLVYTRYADDITFSTYLDKRKEKFTIHKDIVKTIVESGFIINNKKTRIAGPGARKIVLGLLVDGEKPRVPKETYKRIERLLYASNKYGLIETAKHENFDTPYGFYNHISGLMAFVKDVDFERWKYLNNVFSKIEDPLNIFIQN

SEQ ID NO: 1872 - protein, 388 aa, unidentified
  source 1..388: note = Related to NZ_CAJZCI010000001.1; note = Snodgrassella alvi
MENWSAHHLFQKSIPILGNRSSQELKNYAISLHRRKLPVIFTLRHLSKITNVDYLLLRKTVMRHREMANYRVFTIKKRSGGRRYIHRVSKELFKVQQFINFEILQKITPHHASFAFHSKGGIHACALSHCGARWLFQYDLKDFFYSINEIDIYNIFKDNGYRPLLAFELARICTTTALPKDFFKLQNYLNYISNYKFNNLQNYKFYNNRSGLIGVLPQGAPTSPMLSNLAAFKLDNSLTELADKYGLIYTRYADDITFSSSSSLPRGKIITDIHKAIINAIRKNDFYENAKKTRIAGPGARKLVLGLLVDGAVPRIPKETYKRIERLLYAIKEYNLLEVAKHEKFDTPYGLYNHLSGLLAFVKDVDIVRWRKFQQLFLEIAPPNNQTI

SEQ ID NO: 1873 - protein, 377 aa, unidentified
  source 1..377: note = Related to FR900422.1; note = Fusobacterium sp.
MEAWSIHHLIKEANRQGNLSKESIIDLQCYAQNLIKNDVPVIFTLMHLAFITNLNYDFLYGTVSRRFDKSNYRMFSIRKRNGKHRFIHAAIKNLHILHNYINKEILKNIPIHPCAYAFNRNGGILKCAQKHCGCEWLLQFDLKDFFFSITESNVYNVFKSIGYKDILAFELARICTTTRLPRSYNMPRNKNAYNYKQYKYDLIGVLPQGAATSPALSNLVAKNLDEELQEYAKNLGFVYTRYADDLTFSTVSLPNNLSIDTIRRQIIKIIRKNHFIENKEKSRIAGPGAKKLVLGLLVDGKQPRISKEGFKRIEGLLYIIKKFGLQSVAKERGFYSTYGLMNHLIGLMAYLKDVDIAKYNKIEPLFSEIKSRYGELF

SEQ ID NO: 1874 - protein, 376 aa, unidentified
  source 1..376: note = Related to JAGZDN010000040.1; note = Akkermansia sp.
METWSAHHLFQEASKQLDCDTIFLLQNYALDLRSKKLPVIFSLGHLGKITGIDYDFLYRSVNRKYESINYNMFSIRKRSGGNRFIHAVNGKLFKLQKYLNEEILQKINPHPSSFAFHASGGIRQCANQHCGCRWLFQFDLKDFFYTIAEPHVFKIFKEIGYKKILAFELARLCTTIRLPKTKSSYIKYNKYVSENTPYFPQNYIGVLPQGAPTSPMLSNLAARRLDEMLYDYSQNYGLVYTRYADDLAFSASVLPPHKSIARIKRDIISIIRRNNFFENNKKIRIAGPGSRKTILGLLVDGEKPRLTKQLRNRIERNIFSIEKFGIREVANHDKFESVYGFFNHLSGLMSFIHDVDLTLWNKLQPRFATIKKLVEL

SEQ ID NO: 1875 - protein, 374 aa, unidentified
  source 1..374: note = Related to NZ_SMLM01000002.1; note = Ramlibacter henchirensis
METWSAHHLFSAAATKIGVARAGRLAAYVAKLQRRNLPVITTLGHLAEIVGVSYSFLRQTVERKREAANYKLFAISKRSGGRRFIHEVGTQLLIVQRFLNQEVLQGIAPHPASFAFHSTGGIRKCAQMHCGASWLLHFDLKDFFYSISEWSVYEVFASLQYRPLLSFELARLCTTLHLPGASQAYLRPSTAAQRYSFYRKDVMGVLPQGAPTSPMLANLAAHDLDARLQDFADAAGMIYTRYADDLTFSTVRLSAPISQLQYEVSRQIGLTGFSENKRKRRVAGPGSRRTVLGLLVDGAEPKLSRQFIARVDRHLYAAKKYGLEAAASRAAFDSAFGFHNHLGGLVAYSMDAERKRGAMFLERLREIPVPWQTA

SEQ ID NO: 1876 - protein, 380 aa, unidentified
  source 1..380: note = Related to NC_010334.1; note = Shewanella halifaxensis
MESWSAHHLNKKALETLSNDEVKDLTFYARNLISKNTPVIFTLKHLSEIMEKRYTFLRSTVERKREHSNYKMFSISKRSGGRRFIHAVSNQLQPVQQWINTEILQKQKPHNASFAFHANGGIKKCAAMHCGARWILKFDISNFFYCINETDVYQFFVSLGYRPLLAFELARICTTLRLPIQHQKYIRSRNSSRLEYKFYYQPEGCRGVLPQGAPTSPMLSNLIATKLDEQLTQYALENGFTYTRYADDLAFSAIDLPEKKSIGKIQFEITGIMKAQGFKENEKKTSVAGPGSKKMILGLLVDGEQPRLSKQMYKKLDRYLYAIEKFGLDSVATHEKFDSTFGFYNHLCGYISFVKSVDAPRGEEFEKRMNNITPPWTSHP

SEQ ID NO: 1877 - protein, 381 aa, Acinetobacter sp.
  source 1..381: note = Related to NZ_BKIP01000082.1; note = Acinetobacter lactucae
MEIWSLHQLHSASVEKLGLSQANSLRQYSENLKENNLPTIFTLNHLAKITGVTYHFLRSTVLRNRELANYKMYAINKKSGGRRHIHSVNGKLLKVQTFINEEILQNIITSKSSYAFSKGKGIKSCAQAHCGARWIFKFDLENFFYSINEAQVYTIFNSLGYTSLLSFELARICTTTRLPVELSKLLKRGTFDPFNSINSYTIYNKNCFLGVLPQGAPTSPMLSNLVAKSLDTVLKELASTYGLTYTRYADDLTFSTSMDLPKNLSIGELQRQIIQQIRKQGFKENSKKTVVLGPGSRKIVLGLLVDTAEPRLSKAMLKRIDRLVYASSKFGIIEAAEHEGFDSPIGFFNHVSGLISFVKHIDNRKYQYFSSKFPDFDLHLT

SEQ ID NO: 1878 - protein, 378 aa, Acinetobacter sp.
  source 1..378: note = Related to NZ_LMED01000026.1
METWSLHRLYTCSAEKLGADKATKLKRYSENLKRKNLPTIFTLNHLAKITGVDYHFLRSTVLRNREIANYKMYAIRKRSGGRRHIHSVNGKLLKVQTFINEEILQNIPVSSSSYAFKKNSGIKECAQAHCEAKWIFKFDLENFFYSINEHQVYKIFKDLGYTSLLSFEIAKICTTTRLPTNLSNLLKVKNNSDFNSYRFYQNNYCLGVLPQGSPTSPMLSNLVAQNLDNALIGLASNYNLTYTRYADDLTFSTPINLPQNLSIGKLQREIFYEIRRHGFKENKKKTVILGPGSRKIVLGLLVDTSEPRLSKAMLKRIDRLVYAAHKFGIIEAAEHEGFESPIGFFNHVNGLISFVKHIDINKYHYFSSKFPIFEFDNF

SEQ ID NO: 1879 - protein, 379 aa, Acinetobacter sp.
  source 1..379: note = Related to CP029610.1; note = Acinetobacter pittii
MEVWSLHQLYTESVEKLGANKAKQLRKYSTNLKENNLPTIFTLNHLAKITGVTYHFLRSTVLRNREIANYKMYAIHKRNGGLRHIHSVNGKLLKVQTFLNEEILQHTTVSRSSYAFSKNGGIKPCAQVHCGAKWIFKFDLENFFYSINEYQVYKIFKDLGYTPLLSFELARICTTIRLPTNMHSLLKESNNTFFKDYKFYQNNSRLGVLPQGAPTSPMLSNLVARHLDNALKELADNWGLTYTRYADDLTFSTPTNLPSNLSIGELQRKVISTIRKHGFKENKEKTVVLGPGSRKIVLGLLVDTHEPRLSKVMLKRIDRLVHASNKYGIVAVAKHEGFKSPIGFFNHVSGLISFVKHIDMNKYQYFSSKFPDFKFNDLS

SEQ ID NO: 1880 - protein, 380 aa, unidentified
  source 1..380: note = Related to QMMV01000171.1; note = Deltaproteobacteria bacterium
METWSAHHLFKKATAQLNDSVALDLSRYAQCLRNQELPVIFTLGHLAKITGIDYRFLHATVNREREAANYRMFAIRKRSGGKRFIHAVSNTLSSVHEFLNREVLSKVDPHPASYAYHRSGGIRACAQRHCGARWLLHFDLKDFFFTIHEAKVYQIFREMGYRELLSFELARLCTTTRLPRHLSHLTKPSDPCFKLNELPYRRYHSIGVLPQGASTSPMLSNLAARHLDQDLYLFAKELGLVYTRYADDLTFSAYDLPRGWSIGKLKFYVEKTIRKHGFRTNPSKFSVCGPGSRKIVLGLLVDGDHPRLSKWTRHRIDRLLYSVDKFGWEKVAEFDEFDSLYGFFNHLRGLIAYAKDADPMHGEQYRSRFEELIERFPVEL

SEQ ID NO: 1881 - protein, 369 aa, unidentified
  source 1..369: note = Related to SDPD01000012.1; note = Haemophilus haemolyticus
MENWSLHTLNQKLEEDFSDEQLNTWIQYARNLRKQNLPIIFNLKHLSKITNINQHLLYSVICRFKEKDYYKIFRIKKKTGGYRFIHSPNNELKKVQYFINKYILSKLDIHKSCFSYHKDGGVLRCAEQHTNAKILFKYDLKDFFFCINEMSVYHLFKSLGYTKKLSFQMARLCTIILIKDHGKYIKKYKVKDKEIELGVLPQGAPTSPMLSNLLANQLDVKLSQLADTNNLIYTRYADDLTFSSNKKLSKIEIRTINSKILKIIKYEKFIINKNKISISRQGSRKQVLGLIVNNDTPKLSKDRKKKIDTFLYAIEKFGWESTTEHYGFRDSLGFFHHLDGIIIYAEHIDKDLGKKYRNKLDKLLPKLFR

SEQ ID NO: 1882 - protein, 380 aa, Enterobacter sp.
  source 1..380: note = Related to CP039452.1; note = Enterobacter bugandensis
MTIVPSHLYYLGGIKAKRIPAVLSATMAKAAKFLINDVVYIHNLQHLVKLSSVDKVYLDDIILRRKNEYEHYTVEKKSGGSRFISAPKEDLKQLQRWINYYILRNLKPHPCCYSYHKNSSIYSCAMVHCSSQWLVKLDVENFFDMTSERSVYEQFILIGYSPIVSFALARICTYQPTFLTKNHSKWVLYKRKNRELAYSRDNIKYIGRLPQGAPTSPMLSNMVFFELDKIIFKLVQSHGGLYTRYADDLFISFPKKDMNRSDISKIIGRVVDYLRKKGYSLNKTKIKVSPPGAKKIVLGLNVDKHIPHLSKEFKKSIDSHLYALSEFGPVAHARFRGFNSVYGMLEHIKGKIFFAKTISQDYGLKCIQEFYAALEKHGFN

SEQ ID NO: 1883 - protein, 380 aa, Escherichia coli
  source 1..380: note = Related to JAIOVT010000001.1
MTIVPSHLYYLGGVKARRTPAVLSAIMAKSAQFHTNDIVYIHNLQHLVKLTSVEKTYFDRVILREVHEYEHYSIAKKSGGYRYISAPKEDLKKLQRWINFYVLKNLNPHPCCFSYHKNSSIYNCALAHCASKWLIKLDIENFFDMTSERNVYDQFRLIGYSPIVSFALARICTYQPKYLNKNHDRWVLYKRDTQELVYSKKNVKYLGRLPQGAPTSPMLSNVVFYELDELIYKLVQENGGLYTRYADDIFISFPKKEMGRNDVSKIIGRVIGYLRKKGYSLNKTKIKVSPPGAKKIILGLNVNGDTPQLSKDFKNSINSHLYSLETYGPVLHAQYRGFDSVYGMLEHIKGKISFAKNISYDYGVKCYDEFYSALEKHGFN

SEQ ID NO: 1884 - protein, 380 aa, unidentified
  source 1..380: note = Related to NZ_JAKCWE010000004.1; note = Serratia marcescens
MTIVPSHLYYLEGIQARRTPSVLSAVMAKSARFHIDGITYIHNLQHLVKLSLIDKKYLNDLILRKTHDYEHFSIKKKSGGHRYISAPKEDLKRLQKWVNFYVLKNLSPHPCCYSYHKNSSIYKCALAHCSSKWLIKLDIESFFDMTSELSVYKQFKSIGYSPIVSFALTRICTYQPKFLTNNHDRWILYKRKNKDFIYPREGIKYIGRLPQGAPTSPMLSNMIFYKTDELIYNFIKKRGGIYTRYADDIFISFSEEEFTRDDVSNIIGRIVGYLKSNGYSLNKTKIKISPPGARKTILSFNVNESTPKLSKEFKKSIESHLYALNTFGPVLHAQYRGFDSVYGMLEHIKGKIFFAKSIYLEYGIACFNEFNSALEKHGFN

SEQ ID NO: 1885 - protein, 380 aa, unidentified
  source 1..380: note = Related to DAGCNY010000007.1; note = Klebsiella aerogenes
MTIVPSHLYFIGGVEARREPAVLKSLMAKSSKFHDHGLTYIHSIQHLSKLIYTDENYLKSIILRKSSEYDHYSIPKKSGGSRFISAPRDELKKIQHWINFNVLKNLTPHPCCYSYHKKASIYKCAAIHCSSKWLLKLDLETFFDMTSEVHVYKQFTSIGYSPIVSFALARICTYQPKKLTAHYSTWKLHSRVNRKEPFSRSGISYIGRLPQGSPTSPMLSNMAFYNLDEKIYSLVKYYGGLYSRYADDIFISFSSADINRTLISKLVGRLINHLKKEGYKLNKTKIKLSPPGSRKIVLGLNVDSETPKLSKEFKRSIDSHLYALAKHGPKLHALERNFQSVFGMLEHIKGKILFARSISREYGDKKLNEFYSALESHGFN

SEQ ID NO: 1886 - protein, 379 aa, Salmonella sp.
  source 1..379: note = Related to AAOBLA010000002.1; note = Salmonella enterica
MTIVPTHLYYIEGVKKGRPSSLLKKLVYKSGLLAERNLPYIHSVKHLSLLTGCDENYLLSIINRSNRTYSFYTVPKRSGGVRFIHAPDEELKKLQQWINAQILINVPVHPCCYSFHKDSSIKKCAEKHCGVKWLIKIDIENFFEMVSEIEIYKVFIKLGYKPIISLALARICTYEPRYLTGFYNKWVIYKKSKRLPFTSENARFFGRLPQGAPTSPMLSNLVLSSLDERINRLIKYKNGVYSRYADDIFISFGDKDINRVYLEKVIGRVTRYLEDFGYKANKTKIRLISPRALKIILGLNVGGEIVKLNSNYKKDLQCHFYGINKFGLISHASHRKFNSVLGMLEHIKGKVNFACQIEPDYGIPLKEELKNILNKNGLY

SEQ ID NO: 1887 - protein, 380 aa, unidentified
  source 1..380: note = Related to JAJVKY010000009.1; note = Klebsiella michiganensis
MTIVPSHLYYIEGVKKGRSPSILKSLIVKSSFFNYKNIPYIHDVKHLSHLLGCSQIDLTSIIKRNYSGYRFYTVPKYSGGVRFINSPNDFLKKIQRWINFNILSKVEVHPSCYSFHKNSSIKNCAEKHCGAKWLVKIDIENFFEMVSEVEVYKQFRKLGYKPIVSFALSRICTYEPTHLVNFQHKWINYNSRTDSLPFSRRNVNFFGRLPQGAPTSPMLSNLVLSSLDEKVTRLIRNKNGIYTRYADDIFISFSEMAVDRKFLRQIIGKLISYLNSFGYQANKTKIKIISPRSTKLVLGLNVAEDKVFLQKKYKNNLESHIYGMKKFGLVLHAKHRKFNSVLGMIDHINGMVNYASYIEPMYGNKLKEKIKHIVNINGLG

SEQ ID NO: 1888 - protein, 380 aa, Vibrio parahaemolyticus
  source 1..380: note = Related to MIRR01000104.1
MTIVSTHSYFQGGIKKGHSAKHLYSLMSKAHKLECYDIPYVHSIYHLAMLSRLPVHLLHSFTDRKSIHYTSYSIPKRSGGCRFLHAPSDELKSAQRWINDKILSQLPVHSSCYSYHSKGSILECAQKHCSSKWLIKLDIENFFDEISEVDVYKVFRTIGYKPMVAFILARICTYEPYTVRNNKHSWVQYNKNSDDLPYGKKHIKLFGRVPQGAPTSPMLSNLVLYKLDEKLSHFAQSRGGIYSRYADDLFISFGSDDFDRTKASQVIGSCLSSVRSYGYKLNRTKIKVVPPGSNKVVLGLNVNGDEVRLTKTYKKKIESHIYGIKKFGIDKHALHRGFDSVFSMIDHIIGLINHAKRVEPEFGADKHVEFQRILTNLGLG

SEQ ID NO: 1889 - protein, 356 aa, Vibrio sp.
  source 1..356: note = Related to DACRBQ010000013.1; note = Vibrio vulnificus
MAQAHKLECLGIPYIHSFLHFAHLTKLPESYLRSVVNRHNASYTSYAIPKRSGGSRYLQIPSDELKGLQRWINCEILNRLPVHSSCYSYHKNSSIVQCAERHCSSNWLIKLDIENFFDTINEVEVYKVFRKIGYKPLIAFGLARICTYQPISVLQNKKNWVQFNKNSDEMPFQKKHIRHFGRVPQGAPTSPMLSNLVLADLDEKLSSYAQKRGGIYTRYADDLFISFSQNNFDRQQASQVIGSVLGHVKSYGYNLKKSKIKVIPPGSNKVILGLSVNDKQVRLTKQYRQKINSHIYGIVKFGVDKHAIHRGFDSVFGMIDHVFGLINYAKTVEPDFGHTKYQELQDSLRSSGLSCT

SEQ ID NO: 1890 - protein, 354 aa, Vibrio sp.
  source 1..354: note = Related to DACRBO010000012.1; note = Vibrio vulnificus
MYKAHKMERWGIPYVHSIYHLAILSGLSVNKLNSIVGRQKQYYTAYAIPKRSGGSRFLHAPDDELKKLQRWINSEILIKLPVHPSCFSYHTGSSIVGCAEKHCSSSWLIKFDIENFFDSISEVDVYKVFRKFGYKPMISLILARICTYQSESISGDILHWVQYNKNSDELPFKKKHIRFFGRVPQGAPTSPMISNLVLSSLDEMLSQYAQKRGGIYSRYADDLFISFSQKDFDRVQASQVIGRVLNYVKSYGYKLNKTKIKVIPPGSNKVVLGLNVNGDSVLLTKTYKKRIESHIYGVGKFGIEQHALHRGFDSVFSMIDHITGLINHARLIEPTFGEKKHEEFKRLLSTLGLS

SEQ ID NO: 1891 - protein, 355 aa, Aeromonas sp.
  source 1..355: note = Related to CP023141.1; note = Aeromonas dhakensis
MSKAHHMQRWGTPYIHSIVHLSHLSNSRIELIKSIVDRKEDFYTAYTIPKRSGGSRFIHAPNAELKSLQRWINTEILYRLPVHNCCFSYHRDSSIIDCAKKHCASRWLIKFDIENFFHTIKDVDVYKVFRMYGYKPLISFMLARICTYQPKVVIENKLNWILFNTKSDDLVYSKKHVNFFGRVPQGAPTSPMLSNLVLRELDETLNQYAQKRGGIYSRYADDMFISFSQDNFDRKQASQVIGRVFTHVRKYGYNLNKTKIKVIPPGQNKVILGLNVNGRDVLLTREFKQRIESHIYGIKKFGVKEHMKYRGFNSIYGMIEHIFGLINYARQVDFSYGEIKHIELTEQLQATGLWS

SEQ ID NO: 1892 - protein, 380 aa, Vibrio parahaemolyticus
  source 1..380: note = Related to CP006008.1
MTIVSSQPYFSQGIIKGRNPQKLNALMSKARKMQAQGLPYIHSLHHLALLTNTTVDYLNTIVCRAYDDYTSYRIQKRSGGSRFINAPSDELKLLQRWINNNILYNVPSHWCCFSYHKNASIIDCAQRHCQSKWLIKLDIENFFDTINEVQVYETFHSLGYKPMIAFFLARICTYEPNWISTDKKYWVSYNTNSDELPYSKKNIKYFGRVPQGAPTSPIISNMVMFSLDDEISNLIQNKGGIYTRYSDDIFVSFSQPNFNRNDVSKVIGKIFQKSKRYGYKINKTKIKVLPPGSKKIILGLNVNQRKPELTKEYKNRIESHLYGMSKFGISNHAQHRKFDSIFSMIEHIKGLINYARQISPKYGTSKYTELSDILMKEGLS

SEQ ID NO: 1893 - protein, 384 aa, unidentified
  source 1..384: note = Related to NZ_MVBD01000002.1; note = Marinicella sediminis
MGINLSHAYLNQGASLGYSIEKIESLLIESYELIKSGFPPLFSLNHLAKNSDVDFYNLRKVIQRKCTDFKYLYDIHKIPKRSGGFRFIHSPGSQIKRVQRWINECILYNSKPHWRCFSFHPGGSILDCASIHCESKWLIKIDIERFFDSITEKQVYEVFVELGYKPLISFELARICTVNHKKKIKKHYYKKWVMFNTDKGMPYKKDEIKTIGYLPQGAPTSPQLSNLVFKKHDEHIFEVAKKNDLQYTRYADDMTFSTVKKNFSREKAVTFVKELYSYLSKYGFSPNHTKLKIVPPGAHKVVLGLNVNSNTPRLSRVFKNRVENHLRCIEKYGLESHRIHIQFNSIFALIDHIRGLINYALQIDTNYGHKLSHRYLELLRSNGF

SEQ ID NO: 1894 - protein, 428 aa, unidentified
  source 1..428: note = Related to FYAJ01000004.1; note = Photobacterium andalusiense
MLSVFYEKCLALIRSPLLHQSLVRSLPSINEAVLGSIKGSCMTIGPTHTYIQEGLEKGISEQKLKGIVYESLKRINPSVPYLFSLNQICHITGVSYPYLREIVRRNSTPYNFHRIPKKSGGHRFLTIPRTELKLVQTWIHKEILASQAPHFRCYSYHSQSSIFNCAREHCSSKWLIKMDIESFFDSISEVMVYKVFRKLGYKPLVAFELGRICTYQPTHLRISNTLKWRNFNTNSAEYPYKRKGVSFFGRLPQGAPTSPMLSNLVFQEIDEQLHSYATENGLVYTRYADDLTFSTIDNRFSRERAIKFVSYVKKVLRTENFNTNKTKLKIIPPGSRKIVLGLNVEAQEPLLSKGFKKRVEGHLRGIEKFGILQHVEHRRFDTIFGMLSHINGLIGYAKQIDNAYGFRLEAWFSSILTQNGIVNESFQE

SEQ ID NO: 1895 - protein, 387 aa, Proteus sp.
  source 1..387: note = Related to JACKXR010000006.1; note = Proteus mirabilis
MTIGPTHTYIQEGLEKGIPENKLRSIVRESLSRSNTSVPFVFSLKHVCHFTGASYPYLREIIRRRQTPYSFHKIPKKRGGHRFLTVPDIKLKRVQNWINRDILASQIPHFRCYSYHSKSSIFNCAREHCSSKWLIKIDVENFFDSISEVMVYKVFRSLGYKPLLAFELGRICTYQPTHLSIKNTLRWCNFNKNSSSYPYKRIEINFFGRLPQGAPTSPMLSNLVFQDIDEELHSYASSNGVVYTRYADDLTFSTSNRQFSRKKALIFVNKVKKILRTRNFSTNKSKLKIIPPGSRKVVLGLNIDGPNPLLLKGFKKRLEGHLRGIEKFGIQQHLEHKHFQTVFGMISHINGLIGYASQIDYEYGNRLKAKFSDILTQNGIVNESFQS

SEQ ID NO: 1896 - protein, 387 aa, Vibrio sp.
  source 1..387: note = Related to JAKJKN010000004.1; note = Vibrio diabolicus
MTIGPTHTYIQEGLEKGISEKRLQGIVYESLKRSNTSVPFVFSLNHICHITGASYPSLREIVRRNETPYCFHRIRKKSGGHRFLTVPNAELKVVQTWINKEILASQAPHFRCYSYHSKSSIFKCAEEHCSSKWLIKIDIENFFDSISEVMVYKVFRKLGYKPLLAFELGRICTYQPTHLRIKNTLKWRSFNTNSAEYPYKRKGVSFFGRLPQGAPTSPMLSNLVFQEIDEELHSYASENGLVYTRYADDLTFSTIDRRFSRERAIKFVRHVKKVLRAGNFSTNKSKLKIIPPGCRKVVLGLNIDGQKPLLSKGFKKRLEGHLRGIEKFGIPQHLEHKRFQTVFGMVSHLNGLIGYAKQIDYEYGNRMEARFSNVLTQNGIVNESFQT

SEQ ID NO: 1897 - protein, 382 aa, unidentified
  source 1..382: note = Related to NZ_BDDU01000001.1; note = Pseudoalteromonas mariniglutinosa
MAIGPAHIYLKKGIEKGIEKENLLAIYNSSLPQKRNFQTYIHSLGHLCHFSGVNYHYLRRVIKREIDCYDVYPIAKRSGGSRYISAPEDELKDVQRWINRYVLSNVKPHWRCFSYHAEASIYNAAKEHCGSKWIIKLDIENFFDSVSEIAVYKLFRELGYNPLLSFELARVSTIEPLRINKKMAAKWVNYNTSSDELPYSRRNVKYFGRLPQGAPTSPSISNLVFKGIDEEFQFFSEKNNLIYTRYADDICFSSHEKSFNRESAQQVVSYCSSVLRANGYATKKLKTKIIPPGVRKVVLGFNVDHDEPKLTKAYKKRLESHIRGVEKFGAIAHAKHKKFDSVLGMLEHVLGLVNHAKLVEYGYAVGLKNKLDTAKQRQGFIG

SEQ ID NO: 1898 - protein, 356 aa, unidentified
  source 1..356: note = Related to JADYWQ010000015.1; note = Pseudoalteromonas sp.
MTINSTHSYIATGLSKNIDLTFLENIISESNSQKFNNRTYIHGLNHISHLTGVDYFFLHDIMTRKENPYKIFFIRKNLGNREIKEPNQRLKLVQRTINQQVLSKIPVHWRCFSYHKGASIVKCASEHLGAKSLVKFDISDFFGNINELLVYKSLIKLKYSGSSSYAMARLCTHPNSENDNFGVLPQGAPTSPSLSNLVFFDVDCKLQRLAHKNNLIYSRYADDITFSSFNDLSRQEFLDLKLSVVKILKYHNFELNRDKIKFISSSTPKFVLGINVGGETLKLSKRYKNDIDCHIYGLKKYGLVEHMRHREFTSVFGMIQELFGKINHAKSVEESFGLSRESELRNFIQTKGLFFN

SEQ ID NO: 1899 - protein, 354 aa, unidentified
  source 1..354: note = Related to WOBC01000017.1; note = Aliivibrio fischeri
MAISSTHSYHSVGLRKNINPALLKKIILESNSQKLHNRTYIHDLNHISHLSGVDSLFLYDVMMRNNKPYHSFEMKKKNGTRTIKVPNDKLKVVQRVINQEVLSKIPVHWRCFSYHKGASIVKCASEHLGAQSLIKLDISDFFGSIDEFTVYKALLKLKYSPPSSFAMARLCTHPNKSGEVSVLPQGAPTSPSLSNIIFFDIDCKLQKLASKNNLIYSRYADDITFSSFYKMDRSTFLEIKLSVVKILNYYRFSLNKKKVRFIHSGMPKFVLGINVSGTTLKLSKKYKNDIDCHIYGVIKYGLHHHSLHREFASVFCMIQHVFGKIYHAKSVDYDFGISREQEFRNYLHTQGLFF

SEQ ID NO: 1900 - protein, 381 aa, unidentified
  source 1..381: note = Related to NZ_DF820596.1; note = Pseudoalteromonas sp.
MTIGPTHSYLKTGLSKGFSKEKLLTILESSHEKESKSLSYIHSLKHISHITGVHYIVLRNIVLRNSNPYLVYNLKKKVSGYRDISSPNDDLKLVQKWIAQNILINIEPHWRCYSYHKGASIIKCAQEHVESKWLIKLDINNFFGSIQESQVYDVFKSQNYNSLVSFEMARLCTINTEFDHSSSIKHWVKYRNKRSTSPYSSLKIKRFGHLPQGSPTSPHLSNIIFKSADIELQSIAQRYSLVYTRYSDDLSFSTGDKKFNRKHAKAFITEVSKILKKHHYQLNSKKTKIIPPSKSKVILGLNVDGDTPKLTKSFKQRLNFHIRGIQEFGIIEHSQHSHFNSIFGMINIISGKINFAKSVDINYGNKTELIFKKILQQEGLI

SEQ ID NO: 1901 - protein, 404 aa, unidentified
  source 1..404: note = Related to WMCQ01000027.1; note = Photobacterium phosphoreum
MVFSYSNSSVVVSVIVGVAEQNLSIKGSFVTIGPTHTYIYEGIRKGYSENQLLEIISRSSIQKSNGVSYLHSLNHISYITGTHYLFLRSVVDRTTLPYKQFTIPKKNGGERNVSSPVKQLKIVQRWICTHILADKIPHWRCFSFHKKASILNCAREHSGAKWLIKIDIENFFDSIKENQIYSVFKSMGYNSLVSFELARLCTLSSEISTSELINSNTKQLPYKRQENFTTGRLPQGSPTSPMLSNLVFDSLDVIFQRLAEKKSFVYTRYADDICFSSCQRSLGREECLQIIKIVSRILRSNNYQINRKKLKIIPPATTKSVLGLNVDWDTPKLSKQFKKRCQFHVRGITTFGLAEHAKYRRFESVYGMIKHVYGLINYCKQVEPSYGARLEILLITALEKEGFS

SEQ ID NO: 1902 - protein, 379 aa, unidentified
  source 1..379: note = Related to JAHKBA010000014.1; note = Gammaproteobacteria bacterium
MTIGPTHTYIQEGIRNGYSEAQLSDLLKLSSLQKEKGISYLHSLNHISHITGAHYLFLRAIVDRTSSPYKQFSIPKKNGGTRNVSAPDEQLKIVQRWICSNILSKAPPHWRCFSFHKKASIIKCAREHSGAKWLVKIDIENFFDSIKETQIYSVFKSMGYNSLVSFELARLSTALSESPADETNNEFSRASIESLPYKRQQGLLGGRLPQGAPTSPMLSNLVFEKLDNIFQRLAEKKSFVYTRYADDLCFSSCKTSLKRNDCLQIIKIVSRVLRANSYQINQKKLKIIPPGTTKSVLGLNVDWNSPKLSKQYKKRCQFHVRGIAEFGLAEHAKYRRFESVFGMINHVYGLINYCKDVEPSFGANLETLFTNALEKEGVR

SEQ ID NO: 1903 - protein, 392 aa, unidentified
  source 1..392: note = Related to NZ_KE150238.1; note = Bilophila wadsworthia
MQRVSPNQIHRCAELKSSNEEFIQKLVKDSRKLYSKGLPIIFTLRHLSKLTDVNFKYLHSIVGKKINPYNNFSINKARGGKRNISSPNFYLRRVQDFIKQEILDTNYVSSQISESVFSYRKALSIVDNAKFHIGAKWIIKTDIENFFDSIKEYHIYHFFHSLGYASLLSLELSRLVTWPSFDINFDLGLSQDRSLNEDITFTSKYKFYCSSDVIGSLPQGAPTSPQLSNIIFSPIDEKFKILSEEYGYIYTRYADDLFFSTRNNIDINSARNLLNEVRYILNSSNYKMNNKKTKIILPRAKKVITGIVITDDKILLDRKFKDEIKMNIFFAEKNGLEAQRKFIKFHGNTHTFLKYLLGKLNFANQVEPDFANIWKKRLLNLAKNSGFTMIYY

SEQ ID NO: 1904 - protein, 390 aa, Desulfovibrio sp.
  source 1..390: note = Related to JAJQDW010000013.1
MQQLSPYTFLDLAEARGYSEAYKDAISNTADALSRSGCPIIFTLGHLAALADADYSYLHSIVSRTIDPYCHFSIPKRNGDRRAISAPHDKLKSIQKFILDTILNSSGVVAKISQFSFSYREKISIYSHAEKHVGAKWVVKIDIKDFFPSFTEIDVYRLMCSLGYAPLLSLEISRILTWPKNDLFLQDEEAETNHQKLLESKYKLYNGSVKKIGVLPQGAPTSPMLSNLLFKECDLLINEAAKEYGCLYTRYADDLIFSANRLSKQKAKELISYLRIILKCNKFEMNDSKTRVYFPGSKKIITGLYVNNNRPTLGKKYRDAIKKHIFFIEKFGIQKQADHAGSKDANTFLAHLIGKINFALHIEPNFALSQLQKLKNALKKANYINQKFYP

SEQ ID NO: 1905 - protein, 380 aa, unidentified
  source 1..380: note = Related to NZ_JHVB01000001.1; note = Treponema sp.
MKIWQPALYRKTALKKGLSLSIINNAIKIYTHFSKTPFPCILTINHLSKILNIPYPALKRYTYNQIDNYKHFSIRKRSGGTRRIYSPNYNLLRIQQWINREILQKDTNISDFSYAFRKGLSIRDCASIHCNQSWLIKFDIKNYFESISEIDVYNYFHKLGYNKLLSFQLARICTVNDSRNKTIDTLPSKFIYHKNKQYKFLQNSEIGFLPQGAATSPMLANLITSQLDEDINNFLQSIDLDFNYSRYADDIFISTNSKQIDDTHIRKVLNSVYSIIISHGFEPNKNKTKIFRPGKCKNILGINVNSSDVKLTKHFRNILECHLFYFKKDKIQHTLNRGFNTVFGATAYIHGLLSYAEQIDSNYVKKLKKKYQIDTDFFNI

SEQ ID NO: 1906 - protein, 335 aa, unidentified
  source 1..335: note = Related to QDFT01000100.1; note = Microbacterium testaceum
LTLSHLARETETKWGYLRSIVQRQIDDYTAIRRLKRDGTYRAIWAPMPSLMHVQRWILSNVLSGLKFHDAAYAYRRGRCIRDCAEQHIGARWLLKMDLHNFFGTIEEARVYGALRGMGYPALLAFEMARICTKPLWLDADKRWLEGRGVDAYGSPLRGVLPQGAPTSGALANAVAFSMDAMLRRLADSNGLSYTRYSDDLTFSSSGPFERASIVKLVTEVERAISLAGFVVHRKKTRVVPPGARKIVLGLMLTEREVRLVPEFRSRLDNHIRCVDKYGPAGHAAARRFDSALSMINYVDGCLAFALDIEPEWTADRNQRWLDALYRHGHPVNRDG

SEQ ID NO: 1907 - protein, 312 aa, unidentified
  source 1..312: note = Related to JAFIBQ010000001.1; note = Arthrobacter sp.
MNEYSSIRRRKQDGSFREISAPNPNLMHVQRWMLSNVLTGLQFHDAAFAYRRGLSIKHCAEVHVGANWLLKMDLHNFFGSIEESRVYGVLRRLGYPALLALEMARICTKPITLPGMTKPRLSGRGVEAYSTPNRGVLPQGAPTSGALANAIAFRLDTMLASIADEGGLTYTRYSDDLTFSSYEGLSRTAVSKLILQIEHAISLAGFDVHNGKTRIVTPGARQIVLGLMLTPEAVRLLPEFRHQLDNHIRCVERYGPAAHANTRRFDSALSMINYVDGCLAFAVDIEPDWTARRKIRWRAALGQHGHPVAQDA

SEQ ID NO: 1908 - protein, 375 aa, unidentified
  source 1..375: note = Related to SOHL01000027.1; note = Cryobacterium sp.
MSTPSPHLYQKAAIAAGVSASVARRAGSVSRDIQASGAFPVLTLRHLAHETGASYGYLRRIVKRYADEYQSIRRIKRDGTFRLISAPNPMLMDVQRWILEHILNTLPRHPGSFAYHRGIGIRQCAELHVGSRWLVKMDLHNFFGEIRENRVYRVFRQLNYPALLSFEMARLCTRLDRIDPFTEAVERGVGSYDDGRLGRLPQGAPTSGALANRVATDLDNELQNLADGSGFIYSRYSDDLTFSSPAPFSRPEGMRLISAVSRAASLAGFEPHRRKTRLVPPGARKIVLGLLVSDTGVKLLPEFRRQTQNHIRAAGKFGIQQHSSKRNFHSVLSMINHVDGRLAFAYGIDPEWTIPEMLAWTEVLEMNGYPSVAKA

SEQ ID NO: 1909 - protein, 374 aa, unidentified
  source 1..374: note = Related to NZ_PJJL01000059.1; note = Cryobacterium sp.
MTKLSSHLYLANGTQLGRDAEVLRRASIANAAMVKSGVRPILTLRHFARDSELSYDYLRKVVRRGVDDYETIKRKKDDGSFRFISSPRPDLMHAQRWLLEHVLGNLDLHEAAFAYRKGVSIVHCAEVHVGAKWLVKMDLHNFFGEISESRVYSVFRNLNLSPLLSFEIARICTRVPSEAEMTGKVRLFSAYSQHAEGVLPQGAPTSGAIANAVATALDVKLDAIASRRGFVYTRYSDDLTMSTHEKISRDDASKLIADFARAIHGAGFRVHSNKTRVITPGARKVVLGLLVGDRNVRLLPEFKRQVLNHIRGVRNNGLVAHAAHRRFRSSLSMVNYLDGCLAFAHGVDREWAAAATSSWREALTNDGFLDSAGV

SEQ ID NO: 1910 - protein, 337 aa, unidentified
  source 1..337: note = Related to NZ_QETB01000005.1; note = Proposed Ancrocorticia populi
MSKDPASVASLGELATLTETPYWYLRSIVERRTDPYMSLQRAKRGGGVRPISAPEPPLMHVQRWILHNVLDGLDEHSASYAYRRGRSIAHCAKAHVGARWLVKMDIHNFFGTVTEQRVYKVFRDLGYERLISLEMARLCTREEMKSSTRAPGFRYTAVPSYVSGTIGVLPQGAPTSGALANAVATRIDRALSGLLGDRGITYTRYSDDLTFSTRDGFDRVRASDLISQVTGVVQSCGFQVHKKKTHVVPPGARHVVLGLLVTENNVRLLPEIRRRIEQHVRGVEGFGVRHHADHRGFDDPSAMIGYVGGCLSFALSVDPDWAAPMYRRWMKALSAPW

SEQ ID NO: 1911 - protein, 376 aa, unidentified
  source 1..376: note = Related to RKHG01000001.1; note = Luteococcus japonicus
MSIDAPHLYRKAALAAGRSNAAVEATLSRAHTTALRGAVPIFSLGHLARLSNVDYQFLHDVVCRKVDPYQSITMRKPSGKIRPISAPNQELKAVQQVILYRALRNLDPNPSSFAYTKNLSVLDCAKRHVGARWVIKMDLRDFFSSVDERSAYRTFIKRGYASLMAFEMARICTRDRSPRRGAREYVDRYPRIPGYACGSVGMLPQGAPTSGALANEAARPLDRKLASLAASSGGIYTRYSDDLAFSWAQDVDRSHLHGFVSNVTELCALQGFSVHRRKTRILSPGSRKVILGLLVDESSVRLLPEFKRRVDNHIRCVAKFGASKHAEERGFMSIFEMVNHVDGCLAYSHGIEPGWTEVRNTKWKEALSKSGIQSAT

SEQ ID NO: 1912 - protein, 363 aa, unidentified
  source 1..363: note = Related to JAJSDW010000001.1; note = Microbacterium sp.
MADGGDPSVVNRATAELARLKAQGAYPVLSLAHLAHETGASYSYLREIVNRTRDAYASVALPKRSGGTRPISVPEPILMDVQRWLLSNVLNRVPEHPASFAYRQGVSIVQCAEQHVGAQWMVKMDLHNFFGTVLESSVYRVFRTLGYSKLVAFELARITTRAEGNIRASGSEHVIGDYSMHNQGVLPQGGPTSGQLANAAAGRLDRLLQAYATRSGLVYTRYSDDLAFSGHSTFSRMKASGVIGEVSGLVRRAGFEAHRTKSRLVPPGARKIVLGLLVDDSVRLLPEDRRRIEVHLRGCEIFGLAKHAAHRGFDSVFSFIDHLDGWISFALGVERARATVWRQRLRQILSADGLPADLLRRVA

SEQ ID NO: 1913 - protein, 374 aa, unidentified
  source 1..374: note = Related to NZ_VSSB01000001.1; note = Agromyces mariniharenae
MRPPHLYYRDGIALGVDPDVLERAADERARLRAQGAYPLLSLAHLAHETGASYTYLREVVSRTRDPYQDVAIPKADGGTRPISAPEPILMDVQRWILKHLLERTPTHPASFAYRPGTSIVHCAEQHAGASWMVKMDLHDFFGTVTETSVYRVFRRLGYAKLVSFELARITTRAQNARYAPWLAGNRTIRAYSVDAEGVLPQGGPSSGQLANAAATRLDRLIQSFALEAGLTYTRYSDDLMFSSHAAFRRVDAVNVIRRVSGLTRAAGFSPHRNKSRIVPPGARRVVLGLLVDDSVRLLPEHRRRIEVHIRACEKFGLAEHAAHRGFDSVFSFVDHLDGWISFALGVERDRAMVWRSRFNHVLSGAGLLSAIQRV

SEQ ID NO: 1914 - protein, 374 aa, unidentified
  source 1..374: note = Related to NZ_AP024651.1; note = Arthrobacter sp.
MIPPHLYHQQGVNLGIEPSALKRASAERARLRAQGAYPILSLGHLASETGASYSYLREIVSRSRDPYRSIAIPKATGGTRPISAPEPILMDVQRWILRNILDKLPMHPASYAYRSKTSIVQCASQHMGARWLVKMDLHDFFGTVGEQSVYRVFRKLGYNKLVSFELARITTRTEDLERAPWLAANTVIGSYAVAGMGVLPQGGPTSGSLANAAATRLDQLLQKFSLQRSLNYTRYSDDLTFSSLDAFDRLTAESVVQEVSGLVRKAGFVTHRAKTRIVPPGSRKVVLGLLVDDSVRLMPEHRRRIEVHLRGCEKFGLANHAEHRKFNSVFALVDHLAGWLAFALGVDKVVALSWCRRFNKILEREGLPPMPHLV

SEQ ID NO: 1915 - protein, 376 aa, unidentified
  source 1..376: note = Related to JYIY01000074.1; note = Microbacterium ginsengisoli
MADASPHLYIAQGLAQGHAAEVVSRASIVRSRLLANGVPPILSLRHLAQLTGVSYGYLREIVGRVRDPYLDINRRKRDGGIREISSPEPVLMDVQRWLLHNVFSSVPMHPASFAYQRDRSIVQCAEQHVGARWLVKLDLHDFFGSIQEKRIFDLLLRLGYSKLVSLEIARICTRLRGPRYEGYQNFWAYNAIPSYVVGSQGVLPQGAPTSGALANTVASNLDAKLHDLAASRGLGYTRYSDDLTFSAGPDYDRKQATALIAQVRNIVRDQHFVLHEKKTHVVPPGARTVVLGLLVDSQGVRLLPEYKRRLQVHVRGVGKFGLVEHASHRGFESVLSFVNHVDGLIAFAAGVEREYAQHARRAWNDALARSGYPLEV

SEQ ID NO: 1916 - protein, 380 aa, unidentified
  source 1..380: note = Related to CP096184.1; note = Demequina sp.
MTRDSPHLYFKTGRALGRDEATLNSAIERSRLIQETNRRPVLSLGHLAALTGTRYAYLREIVERTSDPYSEHTRAKSGGGSRPISVPDPLLMQVQRWILEHVLGSTRTHPNSFAYTTGVSIKDCANVHLGASWLIKLDLRNFFGSIDENAVYSAFRRLGYGPLVSLEMARICTRPAGPRMQSLGGKRRYASVPSYAVESRGVLPQGAPTSGALANLVALRLDQQLSELATTRGVAVTRYSDDIAISAGPGFTRRDASELIARVARIAAGNGFELQDTKTRVIPPGARHVVLGLLVDGDSVRLVPEFKRRISTHVRGVSEFGLVAHTNHRGFRSAFSLINHVDGCIAFSQGIEPAYAASVRARWTAALNATNYPAGIGSER

SEQ ID NO: 1917 - protein, 374 aa, unidentified
  source 1..374: note = Related to WOXZ01000002.1; note = Rhodococcus sp.
MNPSTLHQYVEAGRSAGVPLDVLRASVAQASATRSRGAGPILSLGHLAHLTGTPYLYLREIVQRQRDPYDDVILSKRSGGTRSISAPEPVLMDVHRTVLHRALSNLPLHPFSYAYTAGRSVQQCAEQHLGAQWMIKFDLHDFFGQIQERDVFRVFEGRGYSKLVSFELARLCTRLTVFDRPERGSGRYQAIPGYEVQVSGCLPQGAPTSGALSNMVATPLDYDMAGFAARSGFTYTRYSDDMVLSTTLNGFDRTQAKSIIREVSEIIGFHRFQLHQKKTRVVPPGARRIVLGLLVDGDRLRLTPEFRRRVEVHIRGVSKFGIAHHATHRRFDSMLSFVSHIDGCIAYAHSVQPDWADARQHEWLVALRKHGFPT

SEQ ID NO: 1918 - protein, 372 aa, unidentified
  source 1..372: note = Related to CP043474.1; note = Mycobacterium grossiae
MNHPAPHRYFRLGQESGVPEQVLQASAARNAITQAHGAEPILSLGHLAHLSGAPYLYLRQIVQRTRDPYGDISRQKKTGGIRLISAPEPVLMDVQRLILRRALRNLPLHPFCYAYREGRTIQACAQQHLGAKWMIKFDLHNFFGQIEERDVYRVFDSCGYSALVSFELARICTRSRVADFHSRSGRYSAITTYDVDVTGRLPQGAPTSGALSNAVATPLDYTLHEFATGAGFVYTRYSDDMVLSTCQDFNRAQAVTIIREVSHLVATHRFRLHRKKTRVIPPGARHVVLGLLVDGGEVRLTPEFRRRVEVHIRGVREFGLSEHSDHRKFRSLLSFINHVEGSLAFARSIQPAWADEKRAEWRSILGSLGLTL

SEQ ID NO: 1919 - protein, 372 aa, unidentified
  source 1..372: note = Related to JAAVUN010000029.1; note = Kocuria subflava
MNHSSPHHYSRAGREAGVSESVVRAALAQSHLIEESGSFPILSLGHLAHLSGAPYLYLREIVQRVRDPYQDISQRKKSGGTRPISAPEPVLMDVHRFILDRALASVPLHPASFAYTRGRNIKQCAERHLGAKWLFKFDITNFFGQVKEPSVFRVFRRQGYSRLVSLELTRICTRAPLSKNLGSRSRYDVIPSYSVDQRGWLPQGAPTSGALSNAVAAPLDHDLTSLADRHGLVYSRYSDDMFFSAGQGFSRPKAKALVREVDRTVQRHRFLLHRKKTRVIPPGARHIVLGLLVDSGQVRLLPEFRRRVEVHIRGVGRFGLDSHVEHRGFRSMFSFISHVDGCLAFASSVEPDWAESCRVRWEAVLKDQGFPI

SEQ ID NO: 1920 - protein, 374 aa, unidentified
  source 1..374: note = Related to SOCP01000015.1; note = Actinophytocola oryzae
MDHSSPHLYRQAGLAAGVERAVLDHALEQMVRNEARDALPILSLKHLAHLTGAPYLYLRDIVARVADPYTDIVAPKRSGGKRHISAPEPGLMDVQRVILKRALGNIPQHPSSFAYRQGISIVECARRHLGARWLVKLDLHDFFGSISERQVYLVFRARGYSRLMSLELARLCTRAGLSGSQRVGSTRYSAIPSYAVNTVGYLPQGGPTSGALANAVATPMDYALAGLAQEWGLVYTRYSDDLVFSAGHGFNRAIAVRIIGKATSAVRSQGFILHERKTRIIPPGARHIVLGLLVDGDVVRLTPEFRRRINVHLRGVDKFGLRSHAIHRGFRSLFSFVNHIDGCLAFAMSVEPEWARETVSAWRQILRAQAFPVN

SEQ ID NO: 1921 - protein, 375 aa, unidentified
  source 1..375: note = Related to NZ_LMQC01000012.1; note = Modestobacter sp.
MSQPPPHRYLARGRADGVSETVLRAAVKNTTKTDAHDALSILSLGHLSHLTGAPYLYLRGIVQRTSDPYDDIMRKKQTGGSRLISAPEPVLMDVQRLILERALTGTPMHPASFAYRRKRSTLMCAQQHVGARWMLKFDLHDFFGSITEVQVYKVFRSRGYEPLVSFELARLCTRSTTMPSWSTRHQVRYPVIQSYNGRTLGSLPQGGPTSGALANAVATPLDNSLSDLSHDHGFTYTRYSDDLVFSSANKFDRTVARAIINAVRRCVSGQGFRLHAKKTRIIPPGARHIVLGLMLSDDGVRLTPEFRRRIEVHVHGVSTFGLLAHAEFRRFRSVFSFINHVDGCLAFAESVESPWALRLRGEWQRVLRKEGFPAM

SEQ ID NO: 1922 - protein, 369 aa, Corynebacterium sp.
  source 1..369: note = Related to NZ_CP009220.1; note = Corynebacterium deserti
MNNFSPNLYINQRPNEMPGRVAKIAWRGIVSQRDRGLTPILTLGHLASATGIDHAFLRSVVDRSWDPYQEIKISKKRGGTRKLARPHPLLMEAQRWILYNVLPNLELNDASFAYTSGRSIVDCAQRHVGARWILKLDLKDFFDSVSEKSIYRIFLNLGYEKLVSLELARLCTRVTPNSPRFGGNLDKYETIFDYRHPAQGQLPQGAPTSGALANAAMFRIDCALQKLARKHSYTYTRYSDDLVFSTGEKASRSQLITLKKKIQHEIVSTRFQLRKDKTRIITPGARKIVLGLLITESEVRLTPEFKRRILVHLRGVEKFGLYSHVQHRNFDSTLSFINHLEGLIEFASNVEPEFAHESLRNWREMVPLI

SEQ ID NO: 1923 - protein, 380 aa, unidentified
  source 1..380: note = Related to PVTL01000007.1; note = Glaciihabitans tibetensis
MTSAPHLNWARTVDFGAAPGIADAMFHRSEILRRTGAPVILSLKHLALSASVDYGFLLGVIRRSAPAYRAIRIPKNTGGFRDLLSPSESLMAVQRWILHEVLTHQPRHRNNFAYFPGVTARECAARHAGAKWMIKTDLHNYFPSITEKKVFEVFEGLGYSRLVAFELARLCTWTISQTPTAVTTVQQRARSSTGLPYPVMLEGVLPQGAPTSGALANASTFSLDEKLSDLAIKSNLVYTRYSDDMTFSSASPLDRDVARLVIRHIRTIVGKSGLELHDKKTKLIPHGARKIVLGMLITEDGVSVLPEQRRMIDLHIHAVGKFGPVAYATQRRFESVLSFVNHVEGWLAYLSHIDRDWTAQRRLAWNAALDRHHVSVMSLG

SEQ ID NO: 1924 - protein, 380 aa, unidentified
  source 1..380: note = Related to NZ_QHLY01000005.1; note = Cryobacterium arcticum
MRNEAHLSWAITSMSGERPALADAMMRQSETLRRTGAPVLYSLKHLALTTGVEYGYLRHVIQRNAPAYKAIRIPKNTGGYRDLLSPTDSLKHVQRWILHEILDTVPRHINNFAYFRDVTARECAIRHAGATWMIKTDLHQYFPSISEKLVYEVFQGLGYSRLLSFELARLCTWNKLGRLAPTGAVPRSHGSVRSLPYPPAPLGFLPQGAPTSGALANAATRRLDDALSDFAIANHLIYTRYSDDMTFSSPSAFSRTVASEFVVQIRKIVTASGLALHSQKTKVIPPGARKIVLGMLITPGGVGILPEQRRTIDLYVHAVSTYGPVDYAARRGFDSVFSFINHVEGWLAYLSHIDALWTAGRSRSWNDALRKHLIEVSSLG

SEQ ID NO: 1925 - protein, 378 aa, unidentified
  source 1..378: note = Related to NZ_UXAU01000021.1; note = Arthrobacter ulcerisalmonis
MSTDAHLSWAPPVISGGDGPALANAMMFREETLRQHGAPVLYSLKHLALSTGVDYGFLRGVIRRNTQAYKAIRIPKNTGGFRDLLSPAPALMQVQRWILHEILSKVPRQINSFAYFAKITPKECVERHAGASWLIKTDLHNYFPSISEKSVYTVFLNMGYSDLVSFELSRICTWVRPGVQLEATESAITDSEIPYPRTPLGYLPQGSPTSGALANACTRQLDNDLSTLALNAHLRYTRYSDDMTFSSRGPLDRARAAEFIGQVRRLVTASGLTLHAKKTKIIPPGARKIVLGMLVTDTGVGILREQRRMVDLHIHAVAKYGPIDYAERRNFDSVLSYINHVEGWLAYLSHIDGDWTSRRRRDWTSALSVHNVSVTSLG

SEQ ID NO: 1926 - protein, 309 aa, unidentified
  source 1..309: note = Related to JADKSK010000002.1; note = Plantibacter sp.
MRIPKNTGGHRTLHAPADSLRIVQRWILHEILHVIDRHENNYAYFPQVTVKECASRHIGASWMIKTDIHNYFPSVSARSVYGVFLGLGYAPLVAYELSRLCTWPIGGPDLSHLATLEPPTDSDLVYPSLWSEALPQGAPTSGALANACTREMDARLSSFAIKNRLVYTRYSDDMVFSGIGSFSRSLISELMTEVRKIVVSNGFALHLKKTRVVSPGSRKIVLGLLVQEESIALLPEHRRMIDLYIHATSRYGPVGYAGVRKFESVISFINHVEGWLSYSSHIDEEWTRERSVRWRAALDKHQVYVDSLG

SEQ ID NO: 1927 - protein, 514 aa, unidentified
  source 1..514: note = Related to NZ_CP080029.1; note = Streptomyces anulatus
MVSASPHLYLRSVPERRSARTAKRALRQAADVRAHGLPPLVTLGHLAHVTGVPYGTLRRVVERRGFLYDPVHKPGKADRGPRKLLAPDPELMTVQRWLLHHVLDPLPVHPDAYAYVRGRSVADCARRHLGARWLIKIDIRDFFGSVGERRVHRVFRTHGYQPLVAFELARLCTWDDRHAGIDPARRDRYPKVTAYQGGWGGFLPQGAPTSGALANLAVRPMDDRLSHIAARHGLVYTRYSDDMVFSAGTTFVRRSAVAMLREFTHAIQGYGFAVHPRKTRIVAPGARRSVLGLLVDGDTPRLTPDFKSRVLSHVYGVEKFGLPSHQQHRGFASLAGLVHHVDGLIAYARGTEPEWAEPLRARWRAALEAQGWSSAYADDRAEGPPGGNPCRRPSGGGPHILGSVRPVFAAVAAVAGGGGAEGAVAVVAGLEGRDGDAGAGECGEVVDARRRRRKQFGEPVLEEFGGVLEGVGRVVGEGVADGVGAGAAFEPGRDAGDQLTDVVLGERELRCVTA

SEQ ID NO: 1928 - protein, 375 aa, unidentified
  source 1..375: note = Related to BMRN01000021.1; note = Streptomyces atratus
MVSASPHLYLRSVPASRSLGTARRALSQSADAGTRGLPPVVTLGHLAHLTGIPYRTLRGAVERRGYHYTPIHLPGKPDRGPRKLLVPQPELMAAQRWLLHHLLDLLPVHPHAFAYVKGRSVAECARRHLGAQWLIKIDIQDFFGAIGERRVHQVFRAQGYQPLVAYELSRLCTWDDRRDDVDPVRKDRYPKITAYQGGWGGSLPQGAPTSGVLANLAVRPMDDRLSDIAARHGLVYTRYSDDMILSSGDPFSRPAAVAALRELTHAVQGYGFEPHARKTRIVPPGARRAVLGLLVDGDVLRLTPAFKSRLLAHLYGIEKFGLRAHQQHRDFASLAGLVHHVDGLVAYALGAETDWAHPVQERWRGMLRAQGWSLD

SEQ ID NO: 1929 - protein, 384 aa, unidentified
  source 1..384: note = Related to NZ_FMCR01000007.1; note = Micromonospora saelicesensis
MTIGSPHLYRRDGRAEGKPEALLDAALAQAYAVEANGLAAVLTLNHLAVRTGVSYNYLRGIVSRTFDPYADLVIERRNGRKMRPISVPDPPLMRVQRWILHRIASRIPVHTDSYAYQAGSSIRACAMRHAGARWLVKLDIRNFFETINERQVFSLFHEAGYVRLVSLELARLCTRSAAHASHVDVRHFGGDVRDRVIQSYNQPVLGFVPQGAPTSGALANAIFHELDVTFSTLAHRERMVYTRYADDLTFSSIEEFDRSRAAQLIRKVGSELRSEGFSLHQQKTRIVPPGGRKLVLGLLVDRDDVRLSRSMRSRIAENVRGVEKFGLATHVLHRRFSSLDGFVRHVSGLLAFATDVEPGWARHMSKRWQAALRANNWLDFTFNR

SEQ ID NO: 1930 - protein, 382 aa, unidentified
  source 1..382: note = Related to NZ_BOML01000042.1; note = Actinoplanes durhamensis
MTTGSPHLYRREGRARGKPEALLDAALTQTQSVEANGLAAVLTLNHLAVRTGVSYNYLRGIVERKWDPYDDIVLKRRNGRGMRPISAPHSPLMRVQRWILHRIVDRVPVHADSYAYQAGSSIRSCASRHAGARWLVKLDIRNFFETIDERRVYTVFHKAGYVQLVALELARLCTRSAAHASHVDSHRFLSNMRDRVISPYSQAVLGFLPQGAPTSGALANLIFYELDTTFSRIAQLERMVYTRYADDLTFSTIEEFSRSQATSLIREVGTELRRAGFSLHEKKTRIVPPGARKAVLGLLVDNNKVRLNRIVRGRITDNVRGVEKFGLAAHVAHRRFSSLDGFVRHVSGLLAFAADVEPEWAHALGEQWRTALHANNWSEPSF

SEQ ID NO: 1931 - protein, 385 aa, unidentified
  source 1..385: note = Related to JAAGNB010000860.1; note = Amycolatopsis sp.
MITDSPHLYRRNGVINSVPEEVLSNSLMQAGRVEQYGLASILTLKHLAVQARSSYGFLRGIVERKFDPYTDIKIKRTNGRIMRPVSSPSPGLMPIQRWILAHIVSRLGTHPNSFAYTRNKSIKSCASKHLGANWLVRLDVQNFFESIDESSVYRVFAEAGYQPLAAFELARICTRYAPHAHHVDAERFRSKSHYATIRQYNMPYMGFVPQGAPTSGALANLVAKDLDLTLTQVAEKYGAAYTRYSDDMTFSSTSKFTRSKALSLIEESRTALFMNGFRLHDKKTQIQPPGARKTILGLLVDGDSVHLNKRIRSRIENHVRGAEKFGLRSHYSHVNFASLEGFVNHVSGLIAFWLDIDPENSQDIQKRWKETLRRDGWHQVDYWRM

SEQ ID NO: 1932 - protein, 413 aa, unidentified
  source 1..413: note = Related to NZ_LIRL01000059.1; note = Streptomyces niveiscabiei
MITGSPHLYRSRGIKRNVATSVIDNAIAAAERVEKNGLAAVLTLNHLAHSTGADYGYLRQIVTRSIDPYTDIVIARRNGRKMRTVSSPEPSLLQVQQWILRSIAEKIPTHSSSYAYSPGRSVKQCASRHVGAKWLIKLDIRNFFESITEVPVYRVFRRVGYEPLPALELARVCTRYDERDPGMRLDRVLVRAKEYSSIQVYRKPLLGFLPQGAPTSGALANQVAMPLDERLSAIADSRGLIYTRYADDMTFSSGGPFTRSAALTLINQVSGAIRQRGFAVHDQKTRIVTPGARKVVLGLLVDGDRVRLTKKMRQRISLHVRGVETFGFIDHAKHVKFSSVDGLVLHVSGLISYASDIEPAWADEFKQRWRNVVAEKLDVELPSFNRDVGGKSYKSGQIRHLVPLSARLHRREN

SEQ ID NO: 1933 - protein, 409 aa, unidentified
  source 1..409: note = Related to NZ_BLPF01000004.1; note = Phytohabitans houttuyneae
MRTDSPHLYRREGRRRGLSNEVIDRVEMASARLLAHGVAVVLTLGHLAWRSGAPYPYLRKVVERSIDPYHAFAINRRAGKNPRLISSPSPLLMDVQRWILARILDHVTPHPASYAYRRGVSIRMCAEQHLGARWLVKMDLHNFFHTIDERQVFKVFADLGYAPLLALELARLCTRRAWDGFPHPTRFQVRNHRHSVIPTYSADAIGFVPQGAPTSGAIANLAVRPLDEALAALGSAHRLVYTRYADDIVFSSAGAFDRRAAASLMHKARHEIAACGFAAHDKKTRLTPPGARRIVLGLLVDGDKVRLPSEMRSRIATHVHAAEKFGLREHQLSRGFTSVLGLARHVDGLLAFASDVDPAWTDDLRTRWRRTLLRDASALGAFEISDVYRQRDDGTTAAYTVAATPWDAL

SEQ ID NO: 1934 - protein, 399 aa, unidentified
  source 1..399: note = Related to BOPG01000023.1; note = Virgisporangium aurantiacum
MTIGPPHLYRLHGRVRQQDEHMLQAAIEQAARVERRGLAHVLTLNHLAHRTGAPYPYLREIVERKRDPYHVFEIRRRVGGSGRVISSPDPTLMHVQRWILSRILNHVPVHPASFAYRTGFSIRACASQHLGADWLVKLDLHNFFHTIDERQVYQVIRQAGYTRLVALEIARLCTRQSTGTFPGSRRFHAMRIHDRVIANYTTNCLGFLPQGAPTSGALANLVARPLDDRLTAIADDHQLVYTRYADDIVLSGLGPFNRAHAASIIRLAGTAIRESGFEPHDGKTRVVPPGARRIVLGLLIDGERLRVPRDTRSRIEAHVYGAERFGLVHHQINRKFASALGLVRYVDGLLAFAHDVDPTWATPWWERWRRLVLDQAAAIAPFGPDSIVRAPTSADSPDQ

SEQ ID NO: 1935 - protein, 416 aa, unidentified
  source 1..416: note = Related to CP063844.1; note = Streptomyces sp.
MDKLSNAWMVRGARAPTGVWRATRTSPPGRDTPKVGHPIDSPALYRSLGRRNGVTSSVIDEALEQMRRVRRQGLTPVLTLGHLAHQTGAPYLYLRRVVQRRQDPYTEFSRPKREPGKSRTIAAPAPVLMDVQRWLLANVVSPIPPHGASYAYQQGRSAVQCAQLHLGASWLLKFDLHDFFHSVNERAVQSILRSVGYNSLISFEIARVCTRVPGGITWPHFRSAYQAIPGYSAPVLGYLPQGGPASGALANLAARPLDEALSSVADRYRMTYTRYADDMTFSTLRSLDRSTLTRCVSEISATVSAARFRLHRKKTRIVPPGARKIVLGLLADGERLRLPRHTRRGLEDHIRGVAKFGLGAHKEHAGYSSVQGFVHHIDGLLAYGHGVDPVWTKPLAAQWERLMNAAGLTAQERRLW

SEQ ID NO: 1936 - protein, 340 aa, unidentified
  source 1..340: note = Related to NZ_BMVE01000002.1; note = Streptomyces goshikiensis
MLTLAHLAHQTGAPYIYLREIVQRVRDPYAEFSRPKREPGKARVIAAPDGVLMDVQRWLLAGLFGRIQPHRASYAYQQGRSAVQCAQRHLGASWLLKFDLHDFFHSIDERAVQALVRESGYNRLVSFEIARVCTRLPGGNTVPYTRSAYQGIPTYRTGTLGFLPQGAPTSGAIANLIARTLDDSLVAIADRYDMTYTRYADDMTLSTSRNLDRSVLTRCVAEISATVARTRFRLHRKKTRIVPPGARKIVLGLLVDGDRVRLPRHTRRRLEDHIRGTTSFGLTAHVAHAGYSSLQGFVNHIDGLLSYARGVDAAWADQLKAKWEDAMAAEGLNGLERHAW

SEQ ID NO: 1937 - protein, 351 aa, unidentified
  source 1..351: note = Related to FWZW01000013.1; note = Streptomyces sp.
MRGLDARGLTPVLTLAHLAHLTGAPYLYLREIVQRRRDPYTEFSRPKREIGKTRTIAAPDPVLMDVQRWLLRHVFGRLTPHQASYAYQQGRSAVQCAQRHLGATWLLKFDLHNFFPSINERAVQAVVHAAGYNKLISFEIARLCTRVPWVVEWPYSGSSYQTIDTYRTPRVGRLPQGAPTSGALANLVARPLDETLSALAERYDLTYTRYADDMTFSAFRRFERPALTRCVAEITQAVAATSFTLHRKKTRVVPPGARKIVLGLLVDGDEVRLPRQTRKRLEDHIRGVAKFGFTAHVEHIRFSSLQGFTHHVDGLLAYAQGVDAAWARPLTRQWEDLLTAEGFSILERSRW

SEQ ID NO: 1938 - protein, 389 aa, unidentified
  source 1..389: note = Related to SISL01000011.1; note = Verrucosispora sp.
MSTDSPAAYQRIGRQRGVPDVVVEAALEQIRRVRAVNLTPVLSLKHLAHLTGASYIYLRETVQRKRDPYVEFSRPKRAEGQLRTISAPDPPLMAVQRWILQRIFSRLHPHSASYAYQAGRSARQCAEQHLGARWLLKFDLHSFFHSINERAVFGILAGQGYNRLVSFEIARLCTRYAGHVRGLNFSKFRATASWPHHFTIPSYSVPWLGFLPQGAPTSGAIANMTALQLDELLSDVADRYGLVYTRYADDLTFSTVGRLARSAARRCVGEVQAATAQAGFQLHQRKTRVVPPGSRKIVLGLLVDSDCVRLPADARSRLETHVRGVARFGLVAHAQHWKYNSLTGLIHRVDGLLAHARDVDPLWVAPLWRSWNDALEAQGFSDVEFRQWS

SEQ ID NO: 1939 - protein, 364 aa, unidentified
  source 1..364: note = Related to NZ_BEGX01000067.1; note = Pseudonocardia sp.
MEGAGRAAILTLGHLAHLTGVSSHFLRQVVERRRDPYHAFSISKRSPERGKRTISAPSAEMMSVQKWLLKRVLNPAIGHPNSFAYEPGRSIRQCAARHCGARWIVSLDLHDFFHSVDEKRVFQVFETLGYNRLVSFELSRICTRLIGRNIKPSNVRPETYSISAYVSENLGFLPQGAPTSGKLANLVAADLDERLLSLATEYRLVYTRYADDLFFSSSGDFDRAVAVRLIREIGDLVAVSGFEIHRKKTRVLTPGSRKQILGLLVDDLAGPRLTRRTRAQIEAHLRGVETFGVVAHREHRRFDSTWGFVAHVWGLLAFAASIEPDWARPARFRWENALSRDGWGSDVFRPDLYFVNSHLAERES

SEQ ID NO: 1940 - protein, 375 aa, unidentified
  source 1..375: note = Related to SSXE01000007.1; note = Nonomuraea sp.
MITDSPHLYVRNGLAAGLPIELLDLFVRRAQATEQQGIRAVLTLKHLAHQTGADHRYLRDIVGREIDPYTEFELRGKRRISSPRAPLLAVQKWMLTHILNHVPCHPSSFAYERQKSVAQCARRHLGANWLVKLDMHDFFASIDERQIFHVFSELGFGRLVSFELARLCTRPGIGARHSVAAEKAASSADYTVIDKYQTAVGLGFLPQGSPTSGALANLVMRDADMQIAEAVAGTGIVYTRYADDIAFSTSRKFSRREASELIRMTDHILGRSGFLRHNKKTQVIPPGARKIVLGLLVDGDRLRIPVDARNRIINDIWGAERFGLPAHARHRGFSSTISFGERLAGMLAYCHDVDPKWTAPLWRRWAKILSDYEIR

SEQ ID NO: 1941 - protein, 382 aa, unidentified
  source 1..382: note = Related to SAUN01000001.1; note = Nonomuraea polychroma
MITDSPHLYRVRGLLADHSTALIENAIAQAHQVEARGLEAVLSLNHLARRTGATRNYLRDIVERRLDPYTEFQKTSSTRARTISAPRQPLMEVQRWILRNILGRVPAGPFSFAYEHNKSITMCARRHLGCKWLIKVDLHDFFSSIDEVAVYAIFHGLGYQALPSLELARICTRQGVGASHKRHFPSASRVDRYQRIPAYLSRALGFLPQGSPTSGALANLVMKSLDEHIAALSHPFGFVYTRYADDLVFSSADRFDRKIAIGLIHRVTDLLRTHEFIVHRAKTRVVPPGAKKIVLGLQVDGDRVRLPPDARRRITENIRGVERFGLTDHVAHRHYSSVVGFVERMRGLLAFSYDVDKEWTAPVWIRWGEALERAGYWERTAW

SEQ ID NO: 1942 - protein, 379 aa, unidentified
  source 1..379: note = Related to NZ_CP084582.1; note = Micromonospora aurantiaca
MTLDSPHLYRAAAARLGISAETANNAIRETELLRDAGATPVLTLGHLAHLTGAKHSYLRAIVERRIDPYEEFTRMRRNGGKMRMISSPEPVLMEVQRWILTNVLTRAKPHHASYAYTRDRSVAACARRHVGARFMIKLDLHDFFHSINEYRVYSLYRNLGYNRLVSLELSRITTRYSEFALQTPIPAPRTGDYPMIPRYRVNYLGFLPQGGASSGAVANLVVRRMDHEIQSMASDHSLTYTRYADDLVLSGAGEFSRDTCRDVVRLIRRIVSHNGFHLHEKKTRLTSPGGRKVVLGVTVTDSGIKLSREIKARLANHLYGAGKFGIGRHASSRGFTSTVGFVRHMRGLLAYAHDIDPDFAAPLAARWREVEVRDGTRIA

SEQ ID NO: 1943 - protein, 377 aa, unidentified
  source 1..377: note = Related to NZ_JAFEUC010000033.1; note = Micromonospora humida
MTYDSPHLYRKLGRERGVDDQVLDRAMRQISRLRAAGVTPVLTLNHLAHLTGAKYGYLRRIVARELDPYTEFTRQRRTGGKMRLISAPQPVLRDVQRWVLDRILHRIPVHPAAYAYVPGRSVAACARCHIGARYLLKFDLHDFFQSISEYRVFSVYRSLGYQPLISLELARLCTRDSAAVFGRRTLTAPQVERYQAIPAYRSGSLGFVPQGSPTSGAIANLVTRRLDTGLQRLAVSAGLTYTRYADDIVLGGSDAFDREHCRKLVREVRKIVRHNGFCLQEKKLRIIPPGARRIVLGVVLTDDGITISREVKDRLAKHLFGADRFGIHRHAEHYGFTSVFGFANHVTGLLAFAADIDPGYARPLIRQWQAIESRSGV

SEQ ID NO: 1944 - protein, 318 aa, unidentified
  source 1..318: note = Related to JACASO010000007.1; note = Pseudonocardia pini
MISDSPHQYRLQGASREVPAQVIENSIAQAQVTESRNLRAVLSLKHLAHQTGCSYIYLREIVQRVRDPYSTFSRRRRSGVRMRSISSPNPPLMAVQRWILRNILNHVDPHPSSFAYQRNRSIVQCASRHIGADWLLKLDLFDYFPSISEEVVYWEFRRSGYSRLVAFELARICTRPTNESPPIRSRSKYRAIPSYASAKEAGILPQGAPTSGAIANLVSRQLDISLTRLANASGLTYTRYSDDLVFSGTGPLNRDTATQKIREIDNIISSCGFETHRKKTRIVTPGGSKDCSGPSSNSVRSPTASRVQAKDQDTHSRR

SEQ ID NO: 1945 - protein, 373 aa, unidentified
  source 1..373: note = Related to NC_014666.1; note = Frankia inefficax
MVIDSPHAYRLRGLQQGHDPELLRRAVAEADRVEGRGLTSVLTLKHLAHQTGATYIYLREIVQRKRDPYTEILRSRANGRPMRLISAPDPVLMSVQRWILENIVGRLTVHPASAAYGKGNSVAACARRHVGASWLVKMDVHNFFHSIDERAIYKIFQNVGYSSLVAFELSRICTRPVPGSPHIHPVRRDRVIESYSTANLGILPQGAPTSGVLANISFFACDEILSSLAESCGLVYTRYADDIVFSAGESFTRRDADALIEIARDALLAHGLTPHRGKTQVVPPGGRHIVLGLLVDGDRVRLTREFRQRVQTHIRGVENFGLATHRRHRKFASTAGLINHVNGLLAFAFDVDPAWAGEIRAHWASILAAQMNR

SEQ ID NO: 1946 - protein, 382 aa, unidentified
  source 1..382: note = Related to SAQH01000043.1; note = Mesorhizobium sp.
MTVASPHLYRRHAPENTDRQLVERALAQSSAPLSKGLPSILTLRHLGHLTGADYKYLRSVVQREYDGYRTFSIRKRSGGTRLIASPEPVLGEVQRWIASKVLNKVSVHKNSFAYKPGSNPKKCASVHLGASWLIKIDIHDFFESITERRVYYSFLDCGYQPLVAFELSRLCTRVFTGKPNVGPQWSTRRRHGSRVYATSELGHLPQGAPTSPMLSNMVSFELDHKLSTLANDYGFVYTRYSDDLAFSSGEKFTHKAAGEFVQNIDRILKSFGHVIHQRKTTIAPPGARKVVLGLLVDGSSPRLSKELRARVSDHVRGIEKFGLAMHASERHFASIWGMVNHVNGLISHVRGVDPELGSNLRSRLTTALAIQGWSAETIAGHP

SEQ ID NO: 1947 - protein, 388 aa, unidentified
  source 1..388: note = Related to JAFKIC010000112.1; note = Mesorhizobium sp.
MTSIPPHLYRKLAPKELDPVIVDRALDQLLAVEANRLPGILSLRHLAALTRSDYLYLRSIVARETDAYRTFTIRKRSGGGRLIAAPQPELMALQRWISKEILANITPHVASHAYARKSSPLKCANLHVGASWLIKVDIHDFFESITERRVFFAFRQMGYQPIVAFELARICTRVRIDLPLRDRRFAAARRTVGIAKYGHSQMGYLPQGAPTSPMLANLVSFEMDRKLTEFGAEKGLTYTRYSDDLIFSSGRSLSHKTAETYVAIISRIINSFGHDVHERKTTIAPPGARKVVLGLLVDDTGVRLLRETRDRAADHVRGIEKFGLAAHATERHFASLWGMVRHIHGLLRHMNSVQPEVAGPLLARLEAVLAREKWQGSLDDNFWLNDLL

SEQ ID NO: 1948 - protein, 382 aa, unidentified
  source 1..382: note = Related to NZ_LNSC01000016.1; note = Sphingopyxis sp.
MISASPHQYRASALARGITQQTVQHALDQAEQAEKRGAPAILTLRHLAHVTGADYKYLRLIVSRSEDGYKPFTIRKKSGGGRLIAAPEPQLLSVQRWISRNVLANRPVHSSSMAYAPGASPLKCAARHVGARWLLKFDIHDFFESISEDRVYWAFRSCGYQPLIAFELARICTRVHSPYVQIDSRWRSGRTHGPAEITAYSDDRLGHLAQGAPTSPMLSNLVSEPMDDLLAKIARERGLVYTRYSDDVVFSTGTTITRREVRNLVHDVKRVFNSFGHLLHRKKVVIAPPGARKLVLGLLVDGDEVRLSREYRARVESHVRGIEKFGLAEHAASRHFTSVWGMVRHVGGLIAHSRAVDQTYGDSMQLRLSAALEASGWSDASP

SEQ ID NO: 1949 - protein, 410 aa, unidentified
  source 1..410: note = Related to NZ_JAGIOU010000001.1; note = Sphingomonas sp.
MISASPNLYRSEGAERSIDPLIVEHALQQALPVERKRLPAILTLGHLAHLTGINYAYLRAIVERHADPYTPFRIGKRKGGSRLISAPEPLLLALQRWLARNVLNNIEVHHASCAYAQDCSPARCATRHLGAAWLIKVDIHDFFESITERAAWRVFRSAGYQPLISLELARLCTRQPHGREIVNPKWHVEDAGSYSIRPYRTRMMGHLPQGAPTSPMLANLASFRLDEALEALGGRYGMVYTRYSDDIAFSTGGTFDRKRAGQLIIEVERIFRSFGHALHRKKISVAPPGARKVVLGLLVHGSRLRLTGPYRRRLADHVRGVEQFGLSAHKAHRHFASLWGMVRHIQGLLGYAESVEGKAAHADMRARLDAALARDGWPDGMPPETPMPAQQPPPDVGSAAVTSSALPPAG

SEQ ID NO: 1950 - protein, 383 aa, unidentified
  source 1..383: note = Related to NZ_CP016591.1; note = Tsuneonella dongtanensis
MISASPHQYRADGRARGRPEPVLDAALAQAAGPELQGAPAILTLMHLAKRMDVSYKFLRSVIASKEGTHYRDFHISKRDGGGRRIAVPSPELMAVQRWIVREILRDRPVHRASFAYARGCSIYACARRHASAGWLLKLDIHDFFESIPEKAVYRVFREIGYARLVSFELARLCTRPWVAPPRGKRAERTVANPSRRGIEIYRRELTGYLPQGAPTSPMLSNLVFRVLDEHLSQLATRHGLIYTRYSDDLTFSGPASGFSRDRATEIISEVRDLLATRRFRLHERKITIVPPGGRKVVLDLLVDRAAPRLSRELRGRLEDHVRGIEKFGIAPHAAARGFASATGMINHIAGLLRFAGHIQPAFADPLRARFAAALARWRWSPVD

SEQ ID NO: 1951 - protein, 342 aa, unidentified
  source 1..342: note = Related to NZ_WRPK01000013.1; note = Sphingomonas formosensis
MISASPHQYRADGRALGRPEPVLDAALAQAGRAEASGAPAILTLMHLAKRMDVSHTFLRSVVGSKEGTHYREFHISKRDGGGRRIAVPSPELMAVQRWIVREILRDRPVHPASFAYARGSSIYACARQHAGAGWLLKLDIHDFFESISEKSIYRVFREIGYGRLVAFELARLCTRPWVAPPRGTRAARSVANASRRGIEFYRRDLTGYLPQGAPTSPMLSNLVFRVLDERLSQLAARNGLIYTRYSDDLTFSGPASGFSRANAAAFIGQVRELLATRRFRLHERKINIVPPGGRKVVLGLLVDRSVPRLSRELRNRLEDHVRSAIPPAMVVRIGPPISTFSS

SEQ ID NO: 1952 - protein, 389 aa, unidentified
  source 1..389: note = Related to NZ_LMQP01000002.1; note = Sphingomonas sp.
MIGASPHRYVVDGRASGRSDELLVRALAQARSVEVAGAPAIVTLRHLAARMGVDYRYLRSVIANRSGDRYRDFSISKRGGGGRRIAVPEPTLMAVQRWIVREILRGRPVHPDSHAYAAGSSIVACARRHCMAGWLLKLDIHDFFESVPERSVYDVFRTIGYQPLVSFELARLCTRPWVDPPQDRRAARTVSNHANRGIDLYRRELTGFLPQGAPTSPMLSNLACVGLDGRLSSLARSAGLTYTRYSDDLTFSGPPGTFDRSHAVAMVDGVRDVLRDHGFRMHERKISIVPPGGRKVVLGLLVDRDRPRLPGGLRQRLSDHVRGIEGFGIAAHAAERNFEAVTGMVNHIAGLLRFARDVEPAFADRLRVRFEAALARHGWGAAPESGSEP

SEQ ID NO: 1953 - protein, 705 aa, unidentified
  source 1..705: note = Related to JACHJE010000006.1; note = Streptomyces albaduncus
MTTTDDFADLTPEQFLEAVVSGSIHPYTEHRIPKRRGGLRTLHAPVPRLSEIQQAVLARLETLPAEVQPHPAAFAYRRGRSVVDCATVHLRAHTVIRLDIADFFGSIRERHVHAALKDAWTRPTEPEYRVGLVKDDNGRRKIGLRRDGRTLDTYITARLVTVSPPEPSQTWTNRGTGRRSVYLAATGQEFSVRRPHLVYRHTREGFLPQGAPTSGYLSNIVMRDVDEVVAHQAESLGLRYTRYSDDMYFSSRGLVRHDDVDRLVAGVKEALEPLGMKLNAEKTYVARPGARRSVLGILVDGPTPRLTREYKRRITKHVRGAASFGIEQHRRHQEFEDLAELDAHVTGLLSFAHMIEPAWAEKQLTAWKRLRGIPLEHEEPVSAQHGLDLPWEEEMEVSQADLAKDSIDDLIRGAQRYRSSSDYLQMLEFVGRFKRYAPFNAMVVHIQKPGARYVLPSSEWESKYRRVLKPGAKPLLIFQPRGPYLLVYDVGDTEALPGALPLPRGITAPVSVSSRAGEREVLEVWHHTETNLAPLGIRLTLVDHGASSCGRTYRSRSGGSVKRPGGRRGDPPETYPTLFEIEVNGNLPLLDRYATLAHELGHLFCGHLGAGPGETWPDRQLRPLSEEDAVKAHARNEVEAESIAYMVLKRLDPDVRMGDYITGHLGPDRQVPETVALNLTFKAAGLIIEMGKKRLSSAKLQKPKK

SEQ ID NO: 1954 - protein, 705 aa, unidentified
  source 1..705: note = Related to NZ_JNXG01000009.1; note = Streptomyces atroolivaceus
MTAADDFWDLRPEAFIHAVVSGSIYPYTEHRIPKPRGGLRTLHAPIRRLSWIQQEILARLGTLPARFQPHPAAFAYRKGRSVVDCAAVHLRAHTVIRLDVADFFGSIRERHVHAALKGAWPRTAGPEYRIELVEGDDGSPEIGLRRVGRTLGAYTTARLVTVSPPESNHTWPNRGTGRRDVRLEATGQRFSVRRPTLVHQHTHEGFLPQGAPTSGYLSNMVMRDVDAVLAHKAESWGLRYTRYSDDLYFSSRGPVRPERVDRLVTEVKRALEPLGMRLNAKKTYVARPGARRSVLGILVDGSTPRLTRAYKRRITLHVRGAASFGVMQHCYHQKFEDLAELDAHVTGLLSFAHMVEPRWAGEQLAAWKRLREIPLEHEEPVMTQHGLDLLFDEEVDVSQADLAKASIDDLVRGAQRYRSSADYVQLLDFVGRFKRYAPFNAMVVHIQRPGARYVLSSAEWKSKFLRVLRPGAQPLLIFQPRGPYMLVYDVGDTEALPGARPLPREVTSPVAVTSRAGAKKVAEVWHHTEANLAPLGVRLTLVDHAASSYGRTYPSRSDGFVSRPGGRPGDRPEKYPILFEIEVNRNLSLLDRYTTLAHELGHLFCGHLGAGPGDAWPDRRWRPRSDEERIAAHARDEVEAESIAYMVLKRLDPDVQMGDYITGHLGPDQQVPDSVALNLTFRAAGLIIEMGQKRVPAAKLQKTKK

SEQ ID NO: 1955 - protein, 705 aa, unidentified
  source 1..705: note = Related to NZ_KL585423.1; note = Streptomyces sp.
MTTADDFVDLDPAQFLKAVVSGSIFPYTEHRIPKHSGGIRTLHAPVPRLSELQQGILARLETLPARFQPHPAAFAYRGGRSVVDCAAIHLRAHTVIRLDIADFFGSIRERHIHAALKDAWARPTEREYRIDLVKDGDGCREVGLRRIGRTLSTYTTARLVTVSPPGSSRTWTNRGTGRRSVYLEATGQSFTVSRPELLYKDTREGFLPQGAPTSGYLSNIVMRDVDAAVTHLAESLGLRYTRYSDDMYFSSRRLVRHEKADRLVDGVKKALIPLGMRLNTKKTYVARPGARRSVLGILVDGPTPRLTREYKRRITKHVRGAASFGIEQHSRHQGFKGLAELDAHVTGLLSFAHMVEPGWAEEQLADWKRLREIPFEHEEPVIAQHGLDWYGDEEVEVSQSDLAKASIDDLVRGAQRYRSSADYLQMLEFVGRFKRYAPFNAMVVHIQKPGARHVLSSSEWMSKYRRVLKPGAQPLLIFQPRGPYMLVYDVGDTEALPGAQPLPRTVTAPASVSSRVGEKKLVEIWHHTGTNLAPLGIRLTLVNDGASSYGRTYRTRSDGFVQRPGSRPGDRPERYPRLFEIEVNRNLPLLDRYATLAHELGHLFCGHLGAGPGDFWPDRRSRPSSDEERVTAHARNEVEAESIAYMVLKRLDPDVQMGDYIIGHLGVGQQVPESVALNLTFKAAGLIIEMGGRRLSATKLQKPKK

SEQ ID NO: 1956 - protein, 698 aa, unidentified
  source 1..698: note = Related to NZ_JACYXT010000015.1; note = Streptomyces caniscabiei
MADDFADLSQAQFRKAVVSGSIYPYTEHQIPKRRGGLRILHTPVRRLSEMQRGILARLEHLPAGFQPHPAACAYRSGRSVVDCAAVHLRAHTVIRLDIADFFGSIRERHIHAALKDAWSHLAGREYRIDLVEDGNGRQEIGLRRTGRTLRTFTLARLVTVSPPGPNRTWTNRGTGRRSVHLEATGQSFSVSRPDLVYKHTREGFLPQGAPTSGYVSNLVMRDFDAVITHLAESLGLRYTRYSDDMYFSSRRLVRHEHVDRLLAGVKEALESLGMRLNTKKTYVARPGARRSVLGILVDGPAPRLTREYKRRITKHLRGAAAFGIEQHRRHQEFKDLVELDAHVTGLLSFAHMVEPGWAGEQLEDWKRLREIPLGHDEPVTVQHGLDLPWAAEVEASQAELAKTSIDDLVRGAQRYRSSSDYLEMLEFVGRFKRYAPFNAMVVHIQKPGARYVLPSSEWKSKYQRVLRPGAQPLLIFQPRGPYLLVYDVGDTEALPGALPLPKAITAPVSVASRASEKELAEVWHYTQVNLAPLGIRLTLVGHGASSCGRTYRSTSDGFVERPGSRPGDHPEKYPTLFEIEVNWNLPLLDRYVTLAHELGHLLCGHLGSGPEDAWPDRFLPKTVEVHARNEVEAESIAYMVLKRLDPDVQMGDYITGHLGPNQQVPETVALDLAFKAAGLIIEMGKRRIPATKLQKPKK

SEQ ID NO: 1957 - protein, 700 aa, unidentified
  source 1..700: note = Related to NZ_FONG01000017.1; note = Streptomyces alni
MADDFADLAPAQFLEAIVSGSIYPYTEHRIPKRRGGIRTLHAPIPRLSRIQQEILTCLEALPARLQPHPAAFAYRSGRSVADCAAVHLRAHTVIRLDIADFFGNIRERHVHAALKDAWTRPTEREYRIDLVEDDHGGQEIGLRRTGRTLGTYAMARLVTVSPPEPSETWTNRGTGRRIVRLEATGQDFSVHRPSLVYQHTREGFLPQGAPTSGYLSNMVMREVDAAVTNLAESMQLRYTRYSDDMYFSSRRLVRHDDVDRLVAGVKRALVSLGMKLNAKKTYVARPGARRSVLGILVDGPTPRLTREYKRRITNHVRGAAAFGIEQHRDHQKFKDLAALDAHVTGLLSFAHVVEPGWADKQLTDWKRLRRIPEQEEPVIVQHGLELPWDEEVEVSQENLAKASIDDLVRGAQRYRSSSEYLHMLEFVGRFKRYAPFNAMVVHIQRPGARYVLPSSEWRSKYRRVLKPGAQPLLIFQPRGPYMLVYDVGDTEALPGAWPLPKAITAPVSVSSRADERDVAELWHNTETNLAPLGIRLTLVDNAASSCGRTYPSRSRGFVERPGSRPGDRSETYPTLFEIEVNRNLPRLDRYATLAHELGHLFCGHLGAGPGETWPDRRLRSSSEATNVHARNEVEAESIAYMVLKRVDPEVRMGDYITGHLGPDQRVPELVALNLTFKAAGLIIEMGKKRIPASKLQKAKK

SEQ ID NO: 1958 - protein, 660 aa, unidentified
  source 1..660: note = Related to NZ_VEBQ01000002.1; note = Cellulosimicrobium sp.
MRLVGFRSHEYGECITVVTDAAHKEFLSAVVSGAVYPYVEHVVAKRTSGVRTLHAPVEQLAREQRMILTQLRERGGSVHPAAYAYRTGYSVVDCAQVHMNAHTVVRLDIADFFGSIRERHVYEVFEELRDGPTRSYELTRLTTVSPPTSTAWRNRGTGPSVKSGVIERSPRYMHNREGFLPQGAPTSGILSNLVMRAVDAHLHSYAERQGWRYTRYSDDLYFSSRKLADHRQIDRLIREVKRRLGLLGLHLNDKKTWVARPGARRSVLGILVDGPVLRLPQSYKRRITMHVRGVSSFGIAHHADHAGFITVDDLDSHVTGLLSFAHQVEPEWAAEQLHKWRRLRRLALTPSVSTDAADLVLAGATEAKASIDALVAGAHRYRSARSYADLLSFVGAFKRYSPFNAMLISLQRPGARYVLTEARWRSDFRRVLEPGAQPLVILQPGGPFMVVYDVGDTEALPGALALPPEVTDPVSVRATITAADLQQRWDWTVNNLAPLGIRLTSVDHANSSCGSTYRARTQGTVNRLAATGRTQPEEFPLLFEIEVNKNLKPIDRYATVVHELAHLFCGHLGTSPITKWPDRRGGAQSRNEVEAESITHMVLSRLDPDVAMGDYILGYVRRADDMPDVALNLMFKAAGEIIELGSGRIPTTKLRAERRA

SEQ ID NO: 1959 - protein, 657 aa, unidentified
  source 1..657: note = Related to NZ_VEIN01000001.1; note = Cellulosimicrobium sp.
MHYMTMASAVGKSAPDRGATERFLAQVVRGEVFPYTEFPVAKRTSGIRVLHAPVPELAAKQLEILGRLQRTAVTDPAAFAYRAGYSVVDCARVHLRAHTVVRLDVANFFGSILERHVYSALQEVDDAPWSNYTTTRLTTVSPPGSPAWRNRGTGELVKDGSVERSDRYMHNREGFLPQGAPTSGMLSNLVMRKVDEALRAYAEHEGLRYTRYSDDLYFSSRTFVAHRQVDALVRKVRQSLAELGLRLNDRKTWVARPGHRRSVLGILVDGPTPRLSRDYKRKVTVHLRGAAAFGVADHASFRGFSAAEQLDAHLTGLLSFAHQVEPAWAAERLATWKRLRSLGTSHGTEALADPAHQLSGAAEAKASIDALVAGAHRYRGSQAYVELLKFVGTFKRYSPYNAMLINLQKPGARYALTEPRWRTEYGRVLEPGAQPLVILQPGGPFMVVYDVGDTEALRGAHPLPPEITNPVAVQSRISDPELKQRWDWTLNNLAPLGVRLTLVSHANSSCGSTYPARRSGTVTRLSATGKTRPEEFSLLFEIEVNTHLALVDKYATLVHELAHLFCGHAGPSPVASWPDRRGGSKARNEVEAESVAHMVLGRLDPDVTMGDYILGHLDKDGDMPEVALNVMFKVAGDIIELGSGRIATNKLRKELGR

SEQ ID NO: 1960 - protein, 445 aa, unidentified
  source 1..445: note = Related to CP075371.1; note = Nocardioides aquaticus
MAVVHISNQGGASRRPTPTAFVQQVARRVDVPVTYARDVLTRSIFPYRRVEVRKRTGGQRILHSPELPLMRMQRLLLDDLLPSAPTHASSYGYVPGASVLDCASVHLRSHTVVRIDIADFFSSITERHIFRALSTTGWPSHIGGPVAGARTSHVGPRMSRLLAYELAVLTTVSPPGSATWPNRGTGSRVIDEDSAIPRAHPYSGQTEGFLPQGSPTSGALSNLVMRPIDDLVHDVARRMHLRFSRYSDDLFFSSTRPITPDTVARLVHEVRAALQIIGLHVNDSKTRVARPGSRRTVLGVLVDQSAPRVGRDVHRRIDMHLHGSRRFGIDEHAEHRGFIDPEDFRSHMQGLISWIQIVEPGRGHRYAEDWARAIRHSRLYASPDLALGESIAALSPVNPPTESAAKQSIDDLIVAGVRYRSTVEYLELLRFIERFHHYAPSTRCS

SEQ ID NO: 1961 - protein, 648 aa, unidentified
  source 1..648: note = Related to NZ_FMZF01000003.1; note = Geodermatophilus telluris
MAADSGLDGDRLTALLNRSTWPYSVLQHRKPGGGSRTLLTPAPDLMRLQRRVLDEVLAHHAVHPAAYAYRPRRSVVECAQVHCRAHTVVRLDVAGFFDNIRERHVYASLRRRPAIGGPLSAVQAYELTLLCTTTPPDSESWINRGTGARRLGQRSTDPLVARAYPYQDQREGFLPQGAPTSGALSNLVMYEVDVELSGLADRLGLRYTRYADDLIWSSRALVPRRIIAQLVTDVRTVLATKVGLHLNDAKTRVSRPGSRRLVLGLLVDGSAPRVPRETYRRLECHVRGVRIAGLRAHAAHMGFETPEAARNAVDGLLSWVRFVEPAKGRLLTDAWSRALEVGDVELLGDPTSTELPSDLDTGEARESIAALLRHGSEYRSSAEFADLMRFIGGFHRYAPFNAMVVRLQRPGSTFVLTEARWRREYRRVPKPGAQRIMIFQPRGPYMVTYDVGDTEPLREAPPLPHGVTDPVSIRTAIPVQALETAWSTLLDNSVRWGVRVTLVDHAASACGRTYRTQMTDQLVRRPGPRGKGEDVRPLRFEVEVNRNLPVPDRLATLVHELAHLSCGHLGKHPELPWLDRRGGTRRRDEVEAEATTYLVLSRLDPTLTTDDYLLGHLGEGTELPDDLRLDLMVSCASRLLEMLLSRQP

SEQ ID NO: 1962 - protein, 638 aa, unidentified
  source 1..638: note = Related to NZ_PYXZ01000001.1; note = Nocardioides currus
MRDVLARRRSPYRQFAIPKRAGGMRVIHAPEPELQILLRRVLRTALDQLPQHPMAFAYRNRTSIVECAHVHLRADTVIRLDIADFFTSVRERYVFEALMALTDDEWLPLGRPSRLAAHEMARLTTVTPDDSGAWLNRGTGTLTVDDRARPRSYPYKGQREGFLPQGAPTSGAISNLVMRPVDEAIFQVAEKLGLRYTRYSDDLYFSSRRRVLHHTVDALVSGVRPPLAELGLHLNAHKTRVARGGARRTVLGMLVDGHTLRLPREQHRNIELHLRGADRHGLEHHAESRGFDSVESLERHVSGLIGWAQHVEPMKGATYRSHWHRTRSRSSAAANPQVEHADPTVSVDDSARASIDRLLAQGHAFRQSKDYAEFIGFIGRFRGYSPFNAAMVRLQKPGSRFVATEQKWRTKYRRVIRPGGQPLVMLRPGGPYMVVYDVSDTEALPGSKPLPRHVTDPLAADSSLNSATVERLWKVTIDNAIRHGIRVTLVDNSPAHAGSARWSRLEGHVTRPGKKSGATPETYSLTHEIEVSRKLSAVDQYVTLVHELAHIYCGHLGTPDVALWPSRRGGVVRDEVEAESVAFIVMCRLDPQFTMGDYLLGYLSNSTEIPDGVSLQRMMQVASDIMQMGQRRLKAGEI

SEQ ID NO: 1963 - protein, 362 aa, unidentified
  source 1..362: note = Related to PDJD01000001.1; note = Serinibacter salmoneus
MWLADPRDFLLGLKLARLLGDAGLGAERTRAIIRREVDPYRVLTVPRIRAAAREIRKPDADLMAFQRALLAEWTPGHVAHPRAFAYARGRSIVDCARLHLGAELVVRLDISNFFHSITERHVFRALPGPHSRNSFDAAQITRLVTAPSTSPLSWNQRRTGAIQLCNPRQCRCWPLRCEKVRANYFGHAPEGFLPQGAPTSGLLSNLVMREFDQRMYEWAEANRWVYSRYSDDMHFSSRRPRAHTDTDRLVTHVRRELGRLGMHLNDKKTTVARRGARRQVLGLLVDGHHLRLTREYKRELELHTRGVSEFGLEPHAHHWGFENAGALVTHVNGRLAHATHAEPDWGVPARERWLAATTHYSV

SEQ ID NO: 1964 - protein, 373 aa, unidentified
  source 1..373: note = Related to NZ_JACGWX010000001.1; note = Yonghaparkia alkaliphila
MVERLDPNLRSYFDLSSLVQVSGADSGFIEDVVDRRLSPYYVSAVPKRTGGKRHIEKPNAEILAIQQPILRDILMTRSPSEKVFSYVKGRSPVQCARQHLGARWLLRVDLKAFFYSISEVDIYYLFLKEFGFKQLTAFQLARLVTVVSDDSLEVSEVDLLKAHPHVSKYRSRYVAGYTPQVLGHLPHGAPTSGALSNLVSRQLDHAIAALAVQHELVFARYSDDIYLSARRPITRTQSTKVLSDLSGVIRGNGFVVNQTKTRMSFEDDKKLVLGIHVDGDRLRLRREYRDRIDYELHMIETHGAESHAQKRGDKGVAFLLGRVSGLIAHAQDVDPEWGRGRRARFRAILMDGKSTEALLHKHLTERRERLRST

SEQ ID NO: 1965 - protein, 397 aa, unidentified
  source 1..397: note = Related to LT629734.1; note = Agrococcus carbonis
MESPHLYRSKAPIGLDPAVIERAIRLSTTQSANGVQPILTLKHLANQAGVGFVFLERVCDRSIDPYVIYGVRKRVGSSRRMIAAPEEQLRVVQRWLLDHVFTNMHVHSSAFAYVKGRSAPMAARLHLGANWMLKLDVRNFFHAFDERQVYDVLAGTGYSDLVRLQVARISTRHVREYLPWLPEKYRESRSQEGASAARFAHTAAEIDAFELTALPHDGGSRLGYLPQGAPSSGAISNLLSRELDRDLAELGISRGLVYTRYADDIALSASTPFSRKEAEALMHDASRALRKHGLEPNHTKTRIVRPGLPIELLGVRVDGEYTRVSRRVREKIEFHIRAIEKFGLAAHAAHAGFGDAIGCANHVIGLVRYAHDVEPQRAGAYFARIERAIPGLQVRPL

SEQ ID NO: 1966 - protein, 397 aa, unidentified
  source 1..397: note = Related to QKSO01000004.1; note = Curtobacterium sp.
MESPHLYRRNAPTDTEASVIDRAIQLMSLQSRSGATPILTLKHLAVQSGVRLSFLERIADRELDAYDVHEVKKRGRSSKRLIAAPHDELLRAQRWLLDNVFAHASIHSASYAYQTGRSAKLCAQQHLGARWAIKLDAKDFFHQYDEFQVFNLLRGFGYSPLVRLEIARICTRHVSTDQDWLPDKYRQPTRLRSIPELPPAEYMWSGPDLIDVEAYAHLPHSQGRRLGYLPQGAPTSGAISNALAYDLDQSFEKLAEANRMTYTRYADDIFLSSYSIFERPSAEQIVHQAHSIFEQHELQPHARKSRILTPGRPIELLGIRVDGESTQLPKRIKSKIEFHIRGVESFGVHVHASHSGFREGLGFVNYLEGMIRYAINIEPERGRRWNRRLRHALSGRV

SEQ ID NO: 1967 - protein, 396 aa, unidentified
  source 1..396: note = Related to JAINWC010000029.1; note = Agromyces mediolanus
MESPHLYRKNAPSDLDPAVVERAIQLSQAQEAAGVAPILSLNHLAVQANAPLKVLERIAARAVDAYHIHEIRKRDRVSKRMIAAPTPELRQVQRWLLDNVFARVPVSPYAFAYVEGRSAPQCARRHVGATWLVKLDVKDFFHEFDEAQVFSVLRSVQYSALVSLEISRIVTRHVSTPQAWLPKKYASTSPRRPMPDAELVPDLFDHADDAPEYLSHPQGVRLGYLPQGSPSSGAISNILSRQLDEELAALASARGLTFTRYADDITLSSGEIFNRGRAEKILHEATAILHRNRLTPNRRKSRIVTPGLPLEVVGVRVDGDESRLPRRLRDRIEFHLRGIEQFGFAAHSRHVGFDDVLGFSNFLYGLIRYAHDVQPSLAAAYFARADAHFPAAQVGS

SEQ ID NO: 1968 - protein, 328 aa, unidentified
  source 1..328: note = Related to NZ_RKQW01000003.1; note = Frondihabitans sp.
MSGVSYAFLRRVVERESDPYNIYTIRKRDGKSLRSIAAPSEALAAVQRWLLDQTFARMPSTPWSFAYEKDNSSVKCAQEHLGATWLLKMDLKDFFHQTDERDVYHLLRKYRYSELVAFELARIVTRSVRDPQDWLPPKYASTVEWRRGAGFPYGKRVRLGYLPQGASTSGAIANVLASGLDRALHELAISHGTTYTRYADDLTFSGGPYDRASAREFASSVTSAIFAAGYTPNKKKTRLIAPGRRLEVLGVLVNGSKLRVPARFRKRVEAHLYGLESHGVMGHLHSRGFRDIDGMSRHILGLIAHVHAVDSSLAKVYYTRFASAFPNP

SEQ ID NO: 1969 - protein, 384 aa, unidentified
  source 1..384: note = Related to PSVB01000001.1; note = Rathayibacter sp.
MNLSPHLYRKNAPSGLDGAVVERAIKLTSEQRARGVEPILTLNHLAALSGTSGNYLHAVVDRQVDGYDLFNIRKRASGRRRSIAVPHPELAKVQKWLLTDVFSKVTVHSDCFSYRHGISIKDCASRHLHAEWMLKVDLSDFFHQIDERHVFGVASSLYEPLVAFEVSRIVTRQPHVGQPWLPKKYLRTVHQIPTKSSYPYKRSEKIGYLPQGASTSGYISNLVAKPLDTALSSIAAALELTYTRYSDDLAFSSARVLSRSQGLDVLREVARMVGKTGFHINESKTRFSTRANGLNLLGLTVDGESLRLQRHLRTRIEFHVSGVERFGANAHSIHCGFRDVLGMSHHILGLLAYASHIEPAKASIWRARLDASRDALLFGAPLAE

SEQ ID NO: 1970 - protein, 342 aa, unidentified
  source 1..342: note = Related to NZ_BPFW01000004.1; note = Arthrobacter sp.
MFISKRPIPDLEHLALAVGLRPEYLRDVAARRSDPYHEFQVAKARGSVRTIAAPEPDLAKAQRWILDNMFLGSHAGGRSFAYRKGVSVKDCATVHVGARWLVKLDLQDFFHSIDSRRVARIFRKVGCDEVTSVQLARLCTRRNSGSIGQLAGPTPLDYLPQGAPTSGMLANLAAENLDRSMSRLASRTALKYTRYSDDLTFSSEEDFSRASAFALIRGARGEIARNHFSMHEDKIRISPPGSRLVVLGLLVDSDRVRLRGDFKKTLKWHVYGCARFGPNEYSASRGYASVEDYQSHVGGLFAHAVDIEPEWAAPLQRSWKELTAAQAEAASAGSLVVSASGD

SEQ ID NO: 1971 - protein, 326 aa, unidentified
  source 1..326: note = Related to NZ_BMKV01000004.1; note = Pseudarthrobacter scleromae
MLINKRPIPDLEHLALAVGLRPAYLRDVAARSIDPYREFQVAKARGSVRTIAAPEPDLAKAQRWILEHMFLGSHAGASSFAYRKGVSVGDCARVHVGARWLVKLDLKDFFHSVDARRVATIFRKVGCDDVTSVLLAKLCTRRKNGSRGTLTGATPLDYLPQGAPTSGMLANLAAENLDRSMSRLASRYRLMYTRYSDDLTFSSNRDFSRASAFALVRSARGEIARNHFSMHEDKIRISPPGSRLVVLGLLVDSERVRMRGDFKKTLNWHVYGCTRFGPDKYSASLGFSSISEYQAHVNGLFAHAIDIEPEWAGALHARWKEITAPR

SEQ ID NO: 1972 - protein, 326 aa, unidentified
  source 1..326: note = Related to NZ_WVUN01000028.1; note = Arthrobacter sp.
MELTNLQQLMQKTQVSETALFDLMRGQVDPYTEFRIPKGRNGAFRIIAAPSRDLGKLQRSILDNILSAPQRASQSFAYHRGVSITDCARVHSPARWLVKLDLKDFFGSVSAVRVAAAFSSIGLTEEFSSQLAFICTRRAGEEGTRFLPQGAPTSGLLANLVAAALDESLVLFAQHLNLRYSRYSDDLIFSSSGTFSRSKALRIVRQVRSKVAAHGFTLNEDKIRIRPPGSRLLVLGMLVDSEYPRLRHDFKRLIEWHVYGSERFGIAEYSASRGFASIESYLRHVDGLLAHALDVQPDWAAPMRQKWNFISSAPAGGLLRPPREVP

SEQ ID NO: 1973 - protein, 409 aa, unidentified
  source 1..409: note = Related to NZ_FNWI01000004.1; note = Varibaculum massiliense
MELLPFNPIVKPSRVAPAQINSLRYLLRLHNLENPEESILYPSAHVAISSHNTAEIWLDHEKTTSLRKVPLYYKYRSVPKHSGGRRILSEPSSSLKSLQRWILRHCFTDDMVSPAAYAYRPGRSIQDCAAVHIGAKWLLKLDLKDFFGGISEARVYELFRAIGYKELVAFELARLTTFLPDKNIRRNIQALYNEKFEITPAARNYTKLEISIDSSSGPYPRYRGSAGKIIRGVLPQGAPTSGIIANICAGELDKELASLALYNGLRYSRYCDDLFFSPRPDHEHFDRSFAGLIIRDVNRAVLKHGFRINQGKTRVVPPGSKKLILGLQVDDSVRLDTAFKKNIDYHIRGIAKFGLQQHVAHTKGTPPPVLSFLNHLQGLIAFAKGIEYWYGETRETNLKRALSVGEVTR

SEQ ID NO: 1974 - protein, 355 aa, unidentified
  source 1..355: note = Related to NZ_PDDL01000005.1; note = Kocuria sp.
MSNRGGSRNLFREIQKVNHDCSKFGVSPIYTLTHLCVVAKVAHKDARDVIFNHQAHYKSRRIKKKSGSGYRTIYEPSPQLKSLQKTILHNCLPTAPASELSFAFETGRNTLAAAGQHVGARAMIHVDVRDFFTSVASKQIYSVFHNLGYPELLSLEMALISTVGHTVTLRQFVEDGLVYEILDPGYLPQGASTSGKLSNMVCADLDEKLSAISHKWGGVITRYADDITFSSPVPLSRSKCTSIYHDLRKALLQSGFVTNSRKTKIFPNVREFKMLGLCVGQENVWLNKSYKKTLRAHLYSLEKFGIFKHSVSRNFDSDLEFMSYMWGHYAYCANVDKKFAGELRSRLEAAGIRKI

SEQ ID NO: 1975 - protein, 324 aa, unidentified
  source 1..324: note = Related to CP018863.1; note = Arthrobacter crystallopoietes
MTHLCVIARVSHEVARDVIFNHRVHYKSRRLAKRPGHGYRTIYEPSAPLKSLQRAILQNCLPKASLTDLSFAFETGRSTSGAARRHIGARSMIHVDIQDFFDSIRSRRVYSVFAQLGYPELLALEMAVIASVGHEVALRGENDKGFTYEFLEEGRLPQGASTSGKLSNLVCLRLDDLLLQISDRWGGVVTRYADDISFSTPRPLSRKECASIYFEIQDAVHRSGFQLNPRKTRILPRGNEFRMLGLCVGQKHVWLNKNYKSAIRAHLYGVEEFGISAHAISRGFDSDYEFMNFIWGHYAYCVDVDVTFARELRSRLEIAGVSRI

SEQ ID NO: 1976 - protein, 334 aa, unidentified
  source 1..334: note = Related to NZ_CP047898.1; note = Pseudarthrobacter psychrotolerans
MTHNVVPVYTLAHLCVIAKVPYEAARDVIFNHRAHYTSRKLVKRSGLGFRTIHEPSPQLKSLQRAILQNCLPRDASSALSFAFEAGRNTSQAARHHIGARAMIHVDIQDFFGSIGSRRVYSIFAKLGYPELLALEMAFITSVGHEVTLRGPDDRGVPYEFLKEGRLPQGASTSGKISNLLCRELDNLLSEIAVKRGGVVTRYADDISFSWPNPLIRSESGTILAEIDRAVSEAGFSLNRKKTRVIPKSHEFRMLGLCVGQEGIWLNRNYKSHIRAHLYGVEEFGLSEHAISRGFHSDLEFISFIWGHYAYSAYIDPSFASEVRARLEMAGVPDV

SEQ ID NO: 1977 - protein, 355 aa, unidentified
  source 1..355: note = Related to JAHRED010000024.1; note = Paeniglutamicibacter sp.
MKRRNATEALIRSVRRIENDCSRSGVLPIFTLVHLCVVSKTPYNTARDVIFDPRVHYSTRRMAKRSGSGFRSIHEPSPPLKALHRAILENCLPVSGVSDMAYAFHPGRDTLAAVRAHVGAQSMIRVDIKDFFGSIGTRRVAAIFMNLGYPELLALEMALLTTVGHEVILRGEHDSGPIYEIHKEGRLPQGASTSGLLANLICAPLDQLLSMVALQWDGVITRYADDICFSSHTPTSREKCQDILRDIICAIESQGFKLNSKKTRIHPKGKVFRILGLCVGESDVWLNRNYKRSLESHIHGVKKFGLINHSYSRGYGSDLEFIEFMWGHYAYSIHVDPTFGIYLKNQLQENNIVSI

SEQ ID NO: 1978 - protein, 368 aa, unidentified
  source 1..368: note = Related to VAHO01000005.1; note = Pseudarthrobacter sp.
MVGIASPHAYSAALSARGGSPQLLREIREIDRLTRSSHVIPLYTLTHLCTVAKVPYEAARDVIFNHRAHYSARKLKKHSGKGFRTIHAPSPHLKSLQLAILENCLPKRPTSDLSYAYEPRRNTLEAARRHIGAKTMIQLDLADFFGSISSTALYKTFVGFGYPKLLAFEMSLISSVGHEVTLRGPDEKGVVYELLKSGRLPQGASTSGKLSNLVCIGLDQLLGEVATAWGGIITRYADDITFSTGHAVSRSECNSILRDLKSAIHVSGFTMNERKTRVTRSGQEHRVLGLCVGQDSVWLNRNYKNSIRAHLYGLEKNGLADHGIHRGFSSDQEFMSFIWGHYAYCVYVDPDFGAEMRARLELAGVERV

SEQ ID NO: 1979 - protein, 370 aa, unidentified
  source 1..370: note = Related to QFNW01000102.1; note = Kocuria rhizophila
MVEKIAPHEYFKELSERGGSRQLQKVITKVNQECAENNVLPVYTLNHLSVISKIPLFVTKDIIFDHSKYYTRQKVAKRSSPGFRTIYAPKFPLKQLQRAILSNCLPNNGQVGISYAFQKGSNAISACRQHLGARGMVKLDVANFYGSISTPSIYRIFHSLGYPELMSIEMALICSVGQVVEMRPDDQSGKIYKIKKRGRLTQGSPASGLLSNIHCRKLDRTLELIARDHGAIVTRYADDITFSTREPMSQYVVNSIIGSSIHALKRQRLNLNRRKTSVIRNGRSFNLLGLRVADDGLHLNSGYKSTVRNHLKKASLQGVSKYSLSLGYSSDLEFIFMLWGHYAYSMGVEKDFAAEISSKLHTLGIPRLTA

SEQ ID NO: 1980 - protein, 377 aa, unidentified
  source 1..377: note = Related to NZ_BMFW01000055.1; note = Arthrobacter liuii
MSVSSHAFTEGLFAAGGSPALLRQIHRVNFDCGNAGVTPLYTLGHLAFLSAVPHGVLRRMLLETKSHYTEQRLAKKKPGTGYRTIRIPSPALLKVQRFILGRCLPPGPSSPISYAYTRGRGIRDAAERHVGARTVIKLDYSDFFSSVGSKAVYRVFESAGYPELLAFEMAMLCTYGATIQLNNEVNGNRPYKNVSRRFLAQGAPTSGALSNFALRSLDKSLGEFELSGFTLTRYADDITISSPRTMTQKEVGSLIRNITELSSTYNLSLNKSKTQVLRNKNSFRILGLSVTSSGVGLTRPYKRSFESELFGIKKGGLSNQAIYRGYSSPMDYIAFLWGHVAFAKGIDPIWSQRMSERLESMGVPFIDAIGVFGSSLP

SEQ ID NO: 1981 - protein, 361 aa, unidentified
  source 1..361: note = Related to JACFRS010000007.1; note = Bifidobacterium apousia
MEAQHRGLDKDTIEASIRQYQSMLDCGILPILSLKHFAKLVNVDYSYLRRIVGRKIDPYKTIEQQKRSGGTRLISAPEKHLQDTQRWILDYVLSDAKTHPLSFAYENGKSILKCAKIHVGMRWMIKLDLRNFFDSIKENRIYKVFRELGYPSLVSFEMTRICTRSQGFNSIKKVANKYPVIHTYLYGASGCLPQGAPTSGKLANIVCYGLDEEINRLAIRNRFTYSRYSDDIFLSTCDSFNRKKAQQIISCVNNFIHKEGFSLQKKKTHIITPGARKIVLGLTVTDQGVKPMRGFRKQIESDIHGVKKFGLVQHVQHRHYHSIFSFINHVDGCIAFVYGIDSQLGDRYKKQWGEALSRYNL

SEQ ID NO: 1982 - protein, 369 aa, Micrococcus sp.
  source 1..369: note = Related to NRSP01000001.1; note = Micrococcus luteus
MSPPHLSSANEETSCEEAAIVSRMREISGIIESNDAHPIFTLNHLAYEAGVSYGFIRSVVARRINPYRHYEMRKRRGGYRVISSPVPDLARVQRFILRKILSVQRDNPASYAYREGKSIKDCASRHIGSRWMIKMDIEDFFGSVNSKQVYFLFRDLGYSSLVSFELSRLVTWGCSPTAMNWQPYDYKISDYRHSIVGSLPQGAPTSGKIANLIARDLDKSLHGLAKTYGAIYTRYSDDIIFSFRRNITRPEARVIVKKSYDLMRANGFSPNLKKTAVIPPGARKIAVGLVVSDNVYLSREFKRRTERLVHGVYKEGVVPFSERAKFRSPIGLINYIEGSLAFAAHIDRKWAEGQQQKLLSSMRKNTKIR

SEQ ID NO: 1983 - protein, 340 aa, Pseudomonas fluorescens
  source 1..340: note = Related to NZ_JSAL01000022.1
MRSVEEWKHFFLSRGIANELIERYLKQISLLSNTKSPIIFELEHLSLLVGVKYEVLLNMIRGSSSYYRTFSIKKRAGGERVIEAPYPSLLQCQTWIYHQILLKSPVHDCAHGYVPGRSIFTNATVHLGCKTLLKMDFKNFFPSVGIGWVIKFFSELGYDKNVAYALAALCCNRGRVVQGASTSPYLTNILLYNLDDRLFKLSSRSGLRYTRYADDLTFSGGYISTKFVDLVSSMVSEFGLVINDSKTRLLIEKNKKLVTGLSVSGSSLRITREMRRSITKDVFYIEKYGLFSHVSQMKIKDPFYLESIAGKVAFWIQAEPLNSFALRCRDILAGNFSRVE

SEQ ID NO: 1984 - protein, 360 aa, Pseudomonas sp.
  source 1..360: note = Related to NZ_CP010979.1; note = Pseudomonas putida
MKKIDEWKRFFEKRGVIPELIEKYLDQIARLNKSGAPIIFEVEHLSLLIGIKYDTLLKMIHGGSSFYRKFTIKKKSGGDRVIEAPYPSLMQCQNWIYENILLKCEVHPSAHGYVRGKSIFTNASPHLNRSSLLKMDFENFFPSIKIGWVVSFFSRLGYSKKVSFALASLCCNDGCLVQGAPTSPYLTNILLRRLDKKLFQLAAKSDIAYTRYADDITFSAQLIPSYFPGLVASICARYALKINSNKTQLLVNKNKRVVTGLSVSGESLRITRELRRKIKQDLFYIEKYGLLSHISSQKIKDPFYLDSILGKVNFWLQAEPANEEALSYKEILLSYFSNSKVDVLLKRKSTRRSVGLLAAE

SEQ ID NO: 1985 - protein, 341 aa, Pseudomonas sp.
  source 1..341: note = Related to NZ_UTCV01000052.1; note = Pseudomonas viridiflava
MKKLSEWKQFFLSRGLSQELIQRYLDQIKMLAGSGSPVIFELEHLSLLVGIDSKTVLAMVHGSSSFYRAFTIKKRSGGERIINAPYPSLLQCQNWIYTNILLNCPVHDNAHGYVRGRSIFTNASPHLNCAVLLKMDLKDFFPSIGINWVINFFSDLGYSKVVAQLLAALCCNRGALVQGASTSPYLTNILLRRLDERFSRLAQKNNLNYTRYADDMTFSGGYISKNLPQLISSITLDYGLTVNDAKTRLMINKNKKIVTGLSVAGTSLKITRDLKRTIKQDVFYIERYGFLSHVSQQKITDPFYLDSIFGKVNFWLQTEPGNAEAIRCRDILHPNFGISRL

SEQ ID NO: 1986 - protein, 342 aa, Pseudomonas sp.
  source 1..342: note = Related to JAEKDB010000004.1; note = Pseudomonas haemolytica
MKKINEWKRFFLSRGIPQKTIDQYLDQIKLLTVSNSPIIFEVEHLSLLLGIEYLTIQAMINGTPKFYREFIIKKRAGGNRTIHAPYPSLLHCQDWIYQNILLNCAVHNNAHGYIPKRSIFTNASPHLNCKVLLKMDLKDFFPSIGIGWVVNLFSGLGYSHGVSYALASLCCNNGCLVQGASTSPYLTNVLLHGLDERLTKLASKSNLKYTRYADDMTFSGGYISNKMPALIESIVNDYGLVVNATKTKLMINKNKKIVTGLSVAADALRITRELRRSIKQAVHYIERYGFLSHVSQEKIKDPFYLDSILGKVNFWLQAEPHSSDAKNCRDVLLPYFGKNYQA

SEQ ID NO: 1987 - protein, 359 aa, Pseudomonas sp.
  source 1..359: note = Related to NZ_JAGYGI010000002.1
MNEAVVKTWRKHFERRGISRELIESYLPYIQKLCKTSSPVIFEFEHLSLLIGVEQHELRKMVNAPHAFYRSFQIKKRSGGLRKICAPYPSMLMCQDWIYNNILINKPVHSAAHGFVPGRSIFSNASAHLNSKCLMKMDLKDFFPSIPINWVVNYFLSLGYADNVSFYLAALCCSEGRLVQGSSTSPYLTNILLKNLDERISLLAKSYNLNFTRYADDLTFSGEYIPHKLIGVVTKIIVQYGLAVNDKKTRLQIGSNQRIVTGLSVAGSMLAVPRTFKRDLKLELHFIKKYGYGSHVSKMKIRNPYYIESLIGKLNFWLQVEPSNMDALSGIKLLKGIQQGEISLLQRSVGDSDQLNLHA

SEQ ID NO: 1988 - protein, 348 aa, Pseudomonas sp.
  source 1..348: note = Related to NZ_LHUU01000009.1; note = Pseudomonas protegens
MTKSVKDWLKHFERRGISRDLVESYLPYIKKLNQTSSPVIFEFEHLSLLIGVDQHELRKMVNAPHAFYHSFQIKKRSGGMRKIHAPYPSMLMCQDWIYKNVLINKPVHSAAHGFVPGRSIFTNASVHLGSKCLMKMDLKDFFPSVPINWVINYFLSLGYADNVSFYLGALCCCEGRLVQGSATSPYLTNILLKGLDERISLLAKAYGLRFTRYADDLTFSGNYIPHKLIGVVSEIIVQYGLRVNDKKTKLQVGANQKIVTGLSVSGNALALPRKFKRELKMELHFIKKYGYVSHASKKKIRNPYYIDSVIGKLNFWLQVEPANMEALSGLELMRGIQLGHVSSLQSHV

SEQ ID NO: 1989 - protein, 340 aa, Pseudomonas sp.
  source 1..340: note = Related to CP071730.1; note = Pseudomonas aeruginosa
MKKISYESWRKYFLSRGISPDYIQAYLSYIEKLSSTSSPVIFEFEHLSKLIGIEYDALRSMVNSPSSYYRVFNIKKRAGGLREIHAPYPSLLMCQDWIYRNILLSKPVHAAAHGFVPSRSIFSNASKHLGKKCLLKMDIKDFFPSIKINWVIKYFQTIGYADNVSFYLASLCCSDGALVQGSSASPYISNLLLYGLDARLSRLAKSYGVEYTRYADDLTFSGDYIPHFFIGFVTEIVGDYGLSVNEGKTRLKIGDGQKIVTGLSVAGEKLKIPREHKRRMKQELHFIRKYGYLSHMAKQKRRDPFALESLLGRFSFWLQAEPDSSDARGGVEYLKSIRWL

SEQ ID NO: 1990 - protein, 344 aa, Pseudomonas fluorescens
  source 1..344: note = Related to CABVIS010000011.1
MNNNTIVKNWLGYFRQRGVSGLLIEVYAEYIKTLVGNSVPVIFEFEHLSRLIGIDQARFRAMVNSPSSFYRTFHIKKRLGGLREISSPFPSLLICQDWIYKNILLNIPVHSCVHGYVPGRSIFTNATPHLNARCLLKMDIKNFFPSIKIDWVANLFNQMGYADNVSFYLASLCCKNGRLVQGASTSPYLTNILLRGLDHRLSSLAKSYNMEYTRYADDLTFSGEYIPHSVIGVVGAIISDFGLEPNVEKTRLQIARNQKIVTGLSVAGESLGVPRSFKRELKKDLHFIQKFGFESHLAKKKIRKPFYIDSLIGKVNFWLQAEPADQYAMQALSMLQGIHERRAV

SEQ ID NO: 1991 - protein, 343 aa, Pseudomonas sp.
  source 1..343: note = Related to NZ_JAIWYL010000001.1
MNEALIKQWLAHFRKRGVSGPLIDVYAVYIRTLIGNSVPVIFEFEHLSRLIGIDQARFRAMVNSSSSFYRTFHIKKRLGGLREISSPFPSLLICQDWIYKNILLNIPVHSCVHGYVPGRSIFTNAAPHLNSKCILKMDIKDFFPSIKIDWVANFFNQLGYADNVSFYLAALCCKDGCLVQGASTSPYLTNILMRGLDHRLYKLAQSYSMKYTRYADDLTFSGEYIPHTVIEVVDSIVSDFGLEVNTDKTRLQIDRNQKIVTGLSVAGKSISMPRSFKRELKKELHFIQKYGYQSHLSKKKIRKPFYIDSLIGKVNFWLQAEPADTYAIKSLFMLHEIQKGNSI

SEQ ID NO: 1992 - protein, 343 aa, Pseudomonas sp.
  source 1..343: note = Related to NZ_CP027656.1; note = Pseudomonas chlororaphis
MNDIKIRNWLSHFRQRGVSEALVEIYAEYIKTLVGNSVPVIFEFEHLSRLMGVDQTRFRAMVNSPSSFYRTFYIKKRLGGLREISSPFPSLLMCQDWIYKNILINIPIHPCAHGFAPEKSIFTNATPHLKARCLLKMDIKDFFPSIKINWVANFFNQIGYADNVSFYLASLCCKEGRLVQGSSTSPYLTNILLYGLDQRLFGLAKTYNMTYTRYADDLTFSGEYIPHTVIDIVKSIILDFGLKPNSEKTRLQIDKNQKIVTGLSVAGDSLSAPRSFKRELKKELHFIRKFGYESHLAKKKIRKPFYLDSLIGKVNFWLQAEPNDQHAKQALVTLRELYESRKI

SEQ ID NO: 1993 - protein, 349 aa, Aeromonas sp.
  source 1..349: note = Related to NZ_CP095841.1; note = Aeromonas veronii
MIKKTFDNNSSLDSKVNNWIEYFNNRGVSLELIDEYKTFILNLISKDLPVIFELEHLSLLLGIQYSEFLKIINNPDEYYRKFDIKKRKGGKREILAPLPSLLHCQRWIYKEILTKSKTHNNAHGFISNRSIITNASLHLNKKCILKMDIKDFFPSIPINWVINYFSSLGYPNNISYYLSAICCCNDSLPQGAATSPYLSNILLFSLDDRLTKLSKKYNLVYSRYADDMNFSGEYIPSHFSEIVSEIILSYGLEANKNKTQLLTKKGKRIITGLSVSGEKLTLPRNKKREIRKEVHYIEKFGYLSHAAKLKIKNPAYIDSLEGKLTFWLQVEPNNAFAKSGLLLIKSIRE

SEQ ID NO: 1994 - protein, 348 aa, Citrobacter sp.
  source 1..348: note = Related to CP045205.1; note = Citrobacter telavivensis
MTFQKLDKVQELKINSWYLYLKNRGLPSDLIDEYISYIISLIDKNLPIIFELEHLSKLLSINYIELLKIINSPENYYREFNIPKRKGGTRNILSPYPSLLHCQKWIYKNILSKIAIHDAAHGFIKKRSIMSNAEKHVEKKCILKMDMSDFFPSIPINWVINFFHSLGYSNNVSFYLSSICCLNNGLPQGGATSPYLSNILLVSLDRRLTNLSKSYKLDYTRYADDMTFSGDYIPLKFSEIVSQIIDNFGLHINNDKTQLITKPGKRIITGVSVAGSKMTLPRDKKREIRKEVHYIKKFGYLSHASKMKIRNPAYLSVLEGKLNFWLQVEPDNEYAKQAIVFIRTLKNI

SEQ ID NO: 1995 - protein, 343 aa, unidentified
  source 1..343: note = Related to NC_012691.1; note = Tolumonas auensis
MKKNNTIEYWISYLISHGVSLDIIEEYTPYITNLVDKNLPVIFELEHLSLLIGIKYLELLKMIHSPDSFYREFDIPKKKGGVRHIVSPYPSLLSCQKWIYNNILKKISIHPAAHGFNLNHSIVTNAQSHLNKKCLLQMDVKDFFPSLPINWVINLFSSLGYSHNVSFNLASLCCLNDKLPQGAATSPYLSNILLVGLDKRLSLLSTSYQLTYTRYADDLCFSGEYIPHELIQTIESIIIDYNLTPNKNKTRLQLNNNKRIVTGISVSGPKATIPRQLKRELKQELYYIQKHGYLSHVTKMKISNPKCLQSLEGKFSFWLQVEPDNDFAKKSLMFLIKLRKENT

SEQ ID NO: 1996 - protein, 344 aa, unidentified
  source 1..344: note = Related to JABSQN010000005.1; note = Piscirickettsiaceae bacterium
MNKKYNIPYWKKFYRSRGLSDEIISIYLPYIKKLQKNNAPVIFEFEHLSKLLGLKRAELSKIVNSPESFHRKFTIPKKKGGQREIVSPYPSLLHCQKWIYRNILLPQPIHDSAHGFVPNRSIFTYASMHLSKKALLKMDLKDFFPSISINWVICYFSSLGYANNVSFYLASLCCYKGHLSQGSSTSPYLTNILLKGLDKRLQKLSTTYQLIYSRYADDLTFSGKYIPHSYIEIVNACIVDYGLEVNEDKTRLHTKPGQRIVTGLSISGDELKLPRKTKRELKQEIHYIKTFGYISHISKNKISNPYYLESLIGKVNFWLQAEPDNLFAKDSLNHLLEIKRSALS

SEQ ID NO: 1997 - protein, 334 aa, unidentified
  source 1..334: note = Related to NZ_CP036266.1; note = Gimesia chilikensis
MKDWEKYFIDRGLPTDTISTYLSYISQLSENQVPVIFEFEHLTKLLGLKRNVLAKIVNSPEHFHRKFSIRKRSGGKRIIVSPYPSLLYCQKWIYVNLLLKQKVHTAAHGFVPGKSIFSNAKLHLSKRSMLKMDLKNFFPSIPMSWVINFFHDLGYAKNVSSYLASLCCYEHRLSQGAATSPYLSNLLLKNLDDRLSSISNSYRLQYSRYADDITFSGDYIPSKLIKIIEEIVDDYGLAINQKKTRLHTKPGQRIVTGLSVVGEELTIPRKMKRDLRQEVHFIRKYGYLSHISKMKINHPFYLESIAGRFQFWLQAEPENEFAKESLTYLQKIKG

SEQ ID NO: 1998 - protein, 334 aa, unidentified
  source 1..334: note = Related to NZ_CP081832.1; note = Idiomarina abyssalis
MFEQWIDFLNDRGVKTEVIESLSPIIQTLSSNKLPVIFEFEHLAKILGFNEASLASMINSPSNFYRTFYIPKRRGGKREICSPYPSLLECQRWIYKNILLKLDIHSAAHGFAPGRSIITNAKCHLSKNAVLKIDLKDFFNSIPINWVINLFYSLGYPRNISFYLASLCCLEGSLSQGAVTSPYLSNLLVKQLDSRLTNLSLKHHLVYSRYADDMSFSGAYVSKNFISSVGEVITDFGLMVNHSKTSLRTGNSKKAITGIIVSGNRLRASKQLKRKLSQEVHYIKKFGFLSHINKLKIRDPNYKLSLIGKLNFLKQVEPDNEFAIDALNYLRKLE

SEQ ID NO: 1999 - protein, 344 aa, Pseudomonas sp.
  source 1..344: note = Related to CP049161.1; note = Pseudomonas aeruginosa
MHKEKHIIRAWEEHFKDRGISSDLIVQYTTYIKKLSENDLPIIFEIEHLSLLIGINLPSLRKIINAPEKFYRTFSIPKRRGGEREISAPLPSLLACQDWIYKNLLAKISIHDSAHGFVPGRSILTNASPHLAQKALLKMDLKNFFPSIPINWVMKLFSDFGYANNVAFYLASICCLNESLAQGSATSPYLSNILVKGLDKRLKALSDSYHLEYTRYADDLTFSGNYIPHTFPSTVEEIVSDFGLEVNIEKTRLHTKPGQRIVTGISVAGATPSLPRASKRQIRQEAHFIQKYGLISHISKKKIRAPTYIDSIEGKLAFWLQVEPNNEFARESLSHIRKIRRDHQ

SEQ ID NO: 2000 - protein, 316 aa, unidentified
  source 1..316: note = Related to PBKZ01000017.1; note = Rheinheimera sp.
MVTTSLKNAVLLQDLPVIFELEHLSKIIGVEIRTLQKMIYCSRKFYRSFSIPKRNGSRRQIDAPYPTLLLCQKWIYENILKKTSVHHSAHGFIEKKSIITNALPHKNKKTLLKIDLKDFFPSIPLNWVVNHFLSLGYANNVSFYLASLCSLEGNLCQGAPTSPYLSNILLTGLDNRLTKLAASYCLEYTRYADDMTFSGNYIPHTLIVTIENVISSYGLSVNSEKTRLHLKKGQRIVTGISVSGDSLSVPREYKRALKQEIHFIERYGYISHVSKLKINDPLYLEKLIGKVNFWLQVEPENNFAKHALKLLRAARK

SEQ ID NO: 2001 - protein, 341 aa, unidentified
  source 1..341: note = Related to JAENMP010000010.1; note = Serratia fonticola
MKNNKIKSWIDFFADRGVSNEQANLYIQYISGLLDSNSPIIFEKQHLSHLIGIDEATLDRMISSSKDFYREFNIPKKKGGMRKIVSPYPSLLMCQKWIYKNILLNDKPHDACHGFTPAKSIITNASIHLNKPCLLKMDLKDFFPSIPINWVINYFKHLGYTNNVSFYLASLCCYDRKLAQGASTSPYLSNLLLKGLDNRLNNLSKKYRLSYSRYADDMCFSGSYIPNKIIGVITEIIKKFGLSINEEKTSLLIHSNKKIITGLSVSGQQLSLPREYKRKLKNELHFIMKYGYISHITQQKIKDPNYLFSILGRVGFWLQVEPNNELAISSRDYLLSILKSN

SEQ ID NO: 2002 - protein, 342 aa, unidentified
  source 1..342: note = Related to NZ_JPRU01000003.1; note = Buttiauxella noackiae
MKNNDINSWMEFFLDRGVSSDQINYYIPYIAKLLKTNSPIIFEKQHLAHLIGIDESILDKIISSPNHFYREFFIPKKRGGLRKITCPYPSLLMCQKWIYKNILLNDTPHVSCHGFTPSKSIITNASLHLKQKCLLKMDVKDFFPSIPINWVINYFKGLGYSDNLSFYMSSLCCHDKKLAQGASTSPYLSNLLLKGLDNRLNNLSRKYRLTYSRYADDMHFSGDYIPSDLVGVITSIINNYGLSVNEKKTALYIKSNKRIITGISVAGDELSLPRDYKRKLKNELHFIEKFGYISHITQKKIKDPNYLYSILGRVNFWLQIEPDNDAAIKGRDYLMRVLKNNL

SEQ ID NO: 2003 - protein, 341 aa, unidentified
  source 1..341: note = Related to NZ_ARWD01000001.1; note = Serratia plymuthica
MKNNNISAWVDFFADRGVSDEQTDLYIQYITVLLSSEVPIIFEKQHLSHLIGIDESILDKMVSSSKNFYREFNIRKKKGGERKIVSPYPSLLMCQKWIYKNILLKDKPHEACHGFTPSKSIITNASIHLDKACLLKMDLKDFFPSIPINWVINYFRQLGYSNNISFYLASLCCYEKKLAQGASTSPYLSNLLLKGLDNRLSNLSKKYQLSYSRYADDLCFSGKYIPNKIIGVITNIIANYGLQVNSDKTSLLIKANKKIITGISVTGQKPSLPREYKRKLKNELHFIKKYGYLSHISQQKIKDPNYLLSILGRVSFWLQVEPHNELAITSRDYLLSILKNN

SEQ ID NO: 2004 - protein, 341 aa, unidentified
  source 1..341: note = Related to NZ_JQHM01000002.1; note = Pectobacterium betavasculorum
MKNNELASWVDFFADRGVTDEQINIYIPYIKKILESKVPVIFEKQHLAHLIGIDENTLDKMVSSPDSFYREFNILKKRGGTRKIVSPYPSLLMCQKWIYKNILLKDSPDKACHGFNPSKSIITNASVHLGKASLLKIDIKNFFPTIPINWVINYFKKLGYADNVSFYLSALCCYEKKLAQGAATSPYLSNLLLKKLDDRLEKLSKAYHLSYSRYADDMCFSGDYIPYNIINIITEIIESYGLFVNKDKTSLLINANKKIITGISVSGETLSLPREYKRKLKSDLHFIEKYGYISHISRKKIKDPNYLLSILGKVNFWLQIEPSNETAINGRDMLLAILREH

SEQ ID NO: 2005 - protein, 344 aa, unidentified
  source 1..344: note = Related to CP026651.1; note = Morganella morganii
MKKNENELTLWIDFLIDRGISSEQIALYVPYISKLLESNLPIIFEKQHLAHLIGIDENTLNKMTSSPHSFYRNFNIPKKRGGFREIFSPYPSLHMCQKWIYKNILLNDKPHNACHGFTPSKSIITNAAIHIGQSSLLKIDLKNFFPSIPINWIINFFKRKGYTHNVSFYLASLCCNNKVMAQGAPTSPYLSNLLLKGLDKRLYNLTKKYNIKYSRYADDMFFSGNYIPYDFIRVITNIIEDYGLNINKDKTAFLINANKKIITGISVNNNTLSLPREYKRKLKNELHFIKKYGYLSHINKQKIKDPNYLFSILGKINFWLQVEPMSKKAIESKKLIISILKMGA

SEQ ID NO: 2006 - protein, 343 aa, unidentified
  source 1..343: note = Related to CWJI01000001.1; note = Yersinia intermedia
MNMKKNTLEHWSEFFHDRGISYELFEIYLVYIQKLISTDSPIIFEKEHLSQLLGINDSILNKMINSPNNFYRKFTIPKKRGGDRNIVAPYPSLLSCQHWIYKNILLTEQPHYSCHGFTPKKSIISNAKIHIGSKTLLKMDLEDFFPSIPINWVVRYFQQRGYANNVSFYLAALCCYDEHLAQGAATSPYLSNLLLKGLDERLTNLCLKYNLKYSRYADDLTISGEYVPHTLIEVITEIVSDYGLKVNIKKTALLINARKKIITGIAVTEDNIRVPRSFRRELKNTMNFILKYGFISHVTQLKIKDPYYLFSLIGKVNFLMQVEPENKNAREWKSTLINILKSQ

SEQ ID NO: 2007 - protein, 341 aa, unidentified
  source 1..341: note = Related to NZ_FXUX01000002.1; note = Pantoea agglomerans
MNKNDIHSWLVFFQDRGLSHDLINKYIPYIIKLQKNNIPVIFEKQHLSHLIGIQERVLDKIIISPSKFYREFSIPKKQGGVRDIKSPYPSLLMCQRWIYKNILLKDSLHPNCHGFTPSKSIFTNANLHTNKKCILKMDLENFFPSIPMSWVINYFMKIGYTHNVSFSLASICCYDRHLAQGAATSPYLSNLLLKKFDARIEALCVKYNVTYSRYADDLTFSGEYIPHRFSSIVEEIIENYGLTPNKEKTRLLINANQKIVTGISVSGENIALPRKYKRKLKNEIHFVITYGYVSHINNLKIKDPNYLLALLGKVNFWLQVEPKNPLALRGKEYLSKVLRDK

SEQ ID NO: 2008 - protein, 337 aa, unidentified
  source 1..337: note = Related to NC_009659.1; note = Janthinobacterium sp.
MKTNEWRAYFEDRGVSTARIDKYVSYIECLSKKNQPVIFELDHLSSLLGIQIEYLSKMIASSHSFYRKFSIPKRSGGKREILAPYESLLTCQQWILKNILKNIPLHSAAHGFRSGKSIKTNALAHINGKALLKMDLKDFFPSIPLSWIIKTFQDIGYAPNVAYYLASLCCYDEKLAQGAATSPALSNIVLTSLDKRLDRLAKKCSITYTRYADDLTFSGEHIHSSFSKLVTKIVDEYGLVVNTDKTRLKVKNGTRIVTGIGILNGRLSIPREYKRELKNEIFFIRKFGFVSHLSNKKISNPNYINSLLGKISFWLYIEPDNQLAIDSHKLVLQLIND

SEQ ID NO: 2009 - protein, 337 aa, unidentified
  source 1..337: note = Related to NZ_AJVC01000002.1; note = Herbaspirillum sp.
MTLLEWKNYFQDRGIEPDLAKKYLAYIKGLQKNNCPVIFELDHLSQLLEIDLNYLARMISASGNFYRSFHIPKRSGGVREICAPHHSLLSCQRWILQNILNNIDLHPAAHGFTAGKSIKTNAISHLNSSAILKMDLENFFPSIPQAWVIQVFKEFGYAPNVSYYLSALCCCDGALAQGAATSPALSNLILRSLDKRLSKLARTCSLIYTRYADDLTFSGKRIHFSLPIKVEEIVKEFGLKVNTKKTRLKLTHGARIVTGICITNGKLSVPREYKREIKNDLFFIRKFGYLSHIANRKIKNPNYLSSLLGRISFWLFVEPTNEFAIKGRNTVLELMRS

SEQ ID NO: 2010 - protein, 337 aa, unidentified
  source 1..337: note = Related to JAGPWD010000023.1; note = Massilia sp.
MESTQWRSYFRDRGIPNELTKSYVSYAGSLQKKNLPVIFEFEHLSLLLGLNIEPLARMIASPSSFYREFAIPKRSGGKRNICAPHESLLLAQRWILKNILEKSEVHVAAQGFLPGRSIKSNALIHLNSKNLLKMDLRDFFPSIPMSWVINVFKDCGYAPNVAYYLASLCCHSEALAQGAATSPALSNIILKSFDKRLTRLANKCGLKYSRYADDLTFSGETIHHSFSGAVEKITAEYGLAVNKEKTRLKIGHGARVVTGISIQGGRLAVPSKFKRELQNEVFFIRKFGLLSHLSNRKISNPNYLNSLLGRVSFWLHIEPENEKAQLARKLIMDTMKI

SEQ ID NO: 2011 - protein, 337 aa, Chromobacterium sp.
  source 1..337: note = Related to MUKQ01000009.1; note = Chromobacterium violaceum
MNISEWRSYFLDRGIKEDLLGIYLSYIRKLNKFKVPVIFELDHLSSLLGINVKFLTRMISSPEDFYRNFLIPKRSGGKREISAPHQSILYCQRWILVNILTHIPIHYSAHGFCAGKSIKSNAQIHLNSKSLLKMDLKDFFPSIPKSWIINIFSDLGYAPNVSYYLASLCCYNDHLAQGAATSPALSNIVLRGLDNRLQSLADKCGLRYSRYADDLTFSGDKISVNFPELVEGIIHNYGLTVNKDKTRLKAKFGSRIVTGVSISGGSLSVPREYKRNLKNEIFFIRKFGILSHVSKKKIKNPNYIYSLLGKLAFWSYIEPENEYPIEAKKFLVELIKD

SEQ ID NO: 2012 - protein, 336 aa, unidentified
  source 1..336: note = Related to PYUJ01000108.1; note = Serratia sp.
MECTWNNYFSDRGLSPDIIKQYVAYANNLERGNLPVVFEIEHLANLIGIKYPEINNIIFGAKSFYRTFKIPKRRGGCRVIQSPYPSLLSCQKWIYNNILKKVQTHPCAYAYKENISIIHNASIHLNADFVLKLDLSDFFHSIPKSWVVNFFSELGYANNVSVALASLCCVNDSLPQGGVTSPALSNILVSSLDERLNRLAHTFDLSYSRYADDMVFSGKRIPATIIKYVTGIIESFGFAINDEKTKLLIKERQKIITGIDTTGPKLTLPRNRRREIKKAMFFINKHGLVAHMNNEKIRNPNYLLSLEGKIRFWLQIDPENNEAKKFLGDIIRIKLN

SEQ ID NO: 2013 - protein, 336 aa, Proteus sp.
  source 1..336: note = Related to CP047112.1; note = Proteus mirabilis
MNKTWRHYFIDRGINDDLLDQYVIYADNLEKNGLPVIFEVEHLSNLVGIKYPEINNLIFGTKSFYREFKIPKRRGGYRTIQSPYPSLLSCQKWIYDNILQKIETHPCAYAYKKNCSIIKNASVHLNENVVLKLDLSDFFMSIPKSWVINFFSNIGYSGNVSIALASLCCLNDSLPQGAVTSPALSNILVSSLDERLYRLASVFQLNYTRYADDMVFSGKKISKSIIKYIAEIIESFGFTLNTKKTKLLIKKKQKIVTGIDITGSKLTLPRNTRREIRKTMFFIKKYGLISHMNNEKIKNVNYLSSLEGKIRFWLQVDPENIQAKEFLHDLIRIKFS

SEQ ID NO: 2014 - protein, 337 aa, unidentified
  source 1..337: note = Related to NZ_JAKMAJ010000005.1; note = Brenneria sp.
MNNNWHDYLADRGLNNALIEEYLAYINRLEENSIPVIFENEHLSRLLGIKYPEFNKLIFGTHKFYRKFKIPKRKGGYRIIASPYPSLFSCQKWIYNNILKKIPTHVCAQAYKKDHSIIKNANLHLNNDVMLKMDINNFFSEIPINWVIKLFSDLGYSKNVSFALASLCCLDGVLPQGGVTSPALSNILMLSLDNRLHKLAEKFDLIYTRYADDMFFSGKKISSKLINYIKNIVEEYNLSINESKTKLLTKEKRKIVTGIDTSSSKLTLPRATRRNIKKSMHFIIKYGLIGHMNNVKIKNPNYLLSLEGKIRFWLQVEPENQEALYFLNEILKIKKLS

SEQ ID NO: 2015 - protein, 338 aa, Enterobacter sp.
  source 1..338: note = Related to CP084692.1; note = Enterobacter mori
MKNNWKDFFESRGIKDDFIDNYLKYIEYINKNEIPVIFEVEHLSHLIGIKYPEINNIIYSPSDFYRKFEIPKRNGGSREISTPYPTLMKCQRWIYENILSKIPTHQCAYAYKKDHSIIKNASQHVNNKNIIKIDLKNFFPSIPINWVINLFVKLGYSNNIPFILAALCCNENCLPQGAVTSPSLSNILLYSLDDRLFKLSEKLGLTYTRYADDMIFSGKHVSPKIIEYIRHIIETYGFELNNSKTKILSADKRKIITGVDISNNELKLPRRTKREVRKVMFFIKKYGLMNHMSNLKIKNPNYLLSLEGKINFWLQIEPTNEEALSYRDIIRVLKKWIY

SEQ ID NO: 2016 - protein, 338 aa, unidentified
  source 1..338: note = Related to CP030173.1; note = Klebsiella variicola
MEQNWEEFFKSRGIKESYIELYLQYIKSIDKNDLPVIFEIEHLSHMIGIKYPEINSLIYGTKNFYRNFKIPKRNGGVRIIDSPYPSLMKCQRWIYTNILLKLSVHHCAYAYKKDTSIVKNASQHLGNECILKLDITDFFSSIKINWVINLFSRLGYSKKISFSLAALCCLHNKLPQGAVTSPCLSNILLYSLDERLFRLSVKLKLKYTRYADDIVFSGDNIHPNTIIYIRSIIDSFGFSINERKTKLLNNKKRKIITGIDISNNNLSLPRKTKRELRKSFHYINKFGLIGHMNSLKIKNPNYIQSLEGKVRFWLQIEPDNKEALDYLFLLKKLNLLTI

SEQ ID NO: 2017 - protein, 334 aa, Enterobacter sp.
  source 1..334: note = Related to JAEKKB010000005.1; note = Enterobacter asburiae
MRREWEDFYLEKGINTNFISTYLDYIKALESRNIPVIFEVEHLSKLIGIKYPEINDIVFGTKSFYREFKIPKKKGGYRKISSPYPSLRKCQTWIHEKILYSLRTHKNAFAYKKGKSIIDNAEQHLNNHFLLKVDIKDFFSSIPINWVIKLFDSLGYAKNVSYALASLCCLNGCLPQGGITSPSLSNILLYPLDERLSKLALKFNLKYSRYADDMVFSGEAIPSKFISYVTDIIESYGFILNKEKTKLLNNTKQKIVTGIDVSKDKLQLPRKTRREIKKIMYYVKKYGIFSHINNEKIKDPNYIKSLEGKIRFWLQVEPDNQEARSYIEHINQMK

SEQ ID NO: 2018 - protein, 342 aa, unidentified
  source 1..342: note = Related to JAHVIK010000003.1; note = Halomonas denitrificans
MKKRKELTTKLWEDYFLDRGLSSELRKTYLEYINFISEKDLPVIFETEHLSNLIGINYQSLNSMVNNPDSFYRSFKIKKKRGGSREISAPYPSLMMCQTWIYENILVDYPIHHCAQAYRSKHSIVTNAKIHLGSRTILKMDLKDFFSSIPINWVIQFFSNLGYPNNLSYALASLCCLEDCLPQGAPTSPALSNILLISLDRRLYRLGKKYNLSYTRYADDLVFSGSYIPHKFIKVVANIVTNFGLTINDEKSQLIIGDKQKIVTGISISGSSPCIPRKTKREIKKELHFIKKYGLVSHVGKMKIRNPNYLASLEGKIRFWLQVEPNNKFALESLLFIRSKRA

SEQ ID NO: 2019 - protein, 340 aa, Vibrio sp.
  source 1..340: note = Related to NZ_FRFG01000024.1; note = Vibrio quintilis
MNKTLKEWKSFFEDRGIELELIKEYLEYIDRLETNDCPVIFEVEHLSKLIGINYEDLNKMIFGEKSFYRTFYIKKRSGNKREISAPYPSLALCQLWIKENILSLDKSHFCSHSYTKKRSILSNAKIHINSNSILKLDIRDFFPSIKINWVINYFSSLGYSENVAFALASLCCLNDTLPQGGRTSPDLSNLLLKSLDKRLYRLAKKFSFKYTRYADDITFSGDDIPAIFINYVSDILVNYGFVLNNNKIRLIKGDKQKIITGLDVSGEKVRLPRKMRRDLKKQVYYIKNYGLLSHVSKQKIKDPNYIQSLLGKLAFWMYVEKSNKEVKGMYEFIKSLNRDN

SEQ ID NO: 2020 - protein, 340 aa, Vibrio sp.
  source 1..340: note = Related to DADXPV010000013.1; note = Vibrio cholerae
MNNTLKEWKRFFEDRGIEPRIISEYLKYIDKLESSGYPVIFEVEHLSKLIGIRYEDLNKMIFGSESFYRTFKIKKRSGGKREISAPYPSLALCQSWIKENILELDKSHFCNHSYARKRSIVTNAKIHVNSNSVLKLDIRDFFPSIKINWVINYFFSLGYSENVAFGLASLCCLSDSLPQGARTSPDLSNLLLKSLDKRLYRLSSKFSFKYTRYADDITFSGDDIPVVFIKYVKDILVDYGFELNENKIRLIKGEKQKIVTGLDISSNDIRLPRKTRRDLKRQVYYIRKYGLLSHVSKQKIKDPNYIQSLLGKLAFWSYVEKNNNEAKEMYEYIKSLNRNG

SEQ ID NO: 2021 - protein, 372 aa, Vibrio parahaemolyticus
  source 1..372: note = Related to ABBBBM010000001.1
MALKSPIFRERNLKDFNAMHSLEGSFYKSFPMKRSQEIKNWQVFFADRGVSESLIEQYMPYVEKLLVADLPIIFELEHLSKLIGIEISELHKMIGNSSKFYREFSIAKKRGGRRTVYAPYPSLLMCQTWIYENILKSRTVHFCCHAYRHKRSIITNATPHLNKRAILKMDMENFFPSIPINWVIRFFSDLGYSNNVAYYLAAICCVEGSLPQGASTSPALSNILLKHLDNRLYQLSIKYNLSYTRYADDLTFSGEYIPNRLINVISNIVSDCSLSVNERKTSLIIGDKQKIVTGISVQGENLSLPRASRRQIKKEIHYIKQYGLVSHISKLKIKNPYYLHSLEGKLRFWLQIEPENESVLENLNFILELKDI

SEQ ID NO: 2022 - protein, 343 aa, Vibrio sp.
  source 1..343: note = Related to VHSP01000001.1
MKKKQELEIKSWELFFIDRGISEHLIAQYMPYVRNLTQANLPVIFEIEHLSKLMGVELSELQKMIANPRRFYREFSIPKKRGGRRPVSAPYPSLLLCQTWIYENILKAISVHFCCHAYIEKKSIISNATPHLGKTAILKMDMEEFFPSIPINWVINLFSNLGYAHNVSYYLASLCCLNGVLPQGASTSPALSNILLKHLDSRLYKLSKKYKLAYTRYADDLTFSGDYIPHKLIDVISDVITDTGLSVNKQKTSLIIGNKKKIVTGISVQGNNLTLPRSSKRQIKQEIHYIKQYGLISHISKLKIKNPYYIQSLEGKLRFWLQLEPDNEFASESLAFISKLRKV

SEQ ID NO: 2023 - protein, 345 aa, unidentified
  source 1..345: note = Related to NZ_MAJU01000008.1; note = Aliivibrio logei
MNSKKTEQVVNEWKFYFLDRGISDHLIPQYLSYVEKLTNQQLPIIFEVEHLSVLIGIEYGELNKMVHDSSKFYREFEIPKRSGGKRCISAPYPSLLMCQDWIYNNILKSRNLHFCAHAYRTKKSIVTNAKKHLGKNALLKMDMQDFFPSIPINWIVNFFSGLGYSDNVAYSLASLCCLNDGLPQGASTSPALSNILLVSLDSRLYKLSKSYNISYTRYADDMAFSGDYVPHKIIEVITDIIYDFGFKVNEKKTKLIIGDKQKIVTGISVQGEFLTLPRKTRRLIKQEIHYINTFGLVSHIGKMKIRKPNYLLSLEGKLLFWRQIEPNNEYVLNNLEKISSIKWGL

SEQ ID NO: 2024 - protein, 343 aa, unidentified
  source 1..343: note = Related to NZ_CP010423.1; note = Pragia fontium
MPDYQIQKWKTFFHDRGISDYLIVQYLPYIETLVSNKVPVIFEIEHLSRLIGVDITQLRKMINSPQHFYREFSIPKRRGGHRKILAPYPSLLMCQTWIYENILKSIPIHSSAHGYVKERSILSNATIHLKQNALLKVDLKDFFPSISINWVINLFSSLGYSNNVSYYLAAICCCDECLPQGAATSPYLSNILLVNLDYRLHKLSSKYHLNYTRYADDLVFSGKYIPHNLINIISSIIADFGLNVNQAKTSLIIGNKQKIITGLSVQKNELQLPRSKKRQIKQEIYYIKKYGLISHISKLKINKLNYHQSIEGKLRFWLQVEPNNKFALESLNYIHSLQNILIN

SEQ ID NO: 2025 - protein, 332 aa, unidentified
  source 1..332: note = Related to NZ_PNCO02000001.1; note = Pseudoalteromonas galatheae
MKKISLRMQEWELFFKNKGVSTDLINIYLPYIEYLESQNLPVVFEAEHLSNLLGIKPVILYKMVSSPSSFYRSFDISKKKGGKRRISSPYPSLLICQKWIYENILMGLKTHYCAHGYIKSKSIVSNAKAHLNERVVLKMDLQDFFDTITINWVINLFSKLGYANNVSYILASLCCFNGALPQGAATSPALSNILLVHLDMRIYRLAKKYSLTYTRYADDLTFSGNYIPHTFIEIVNEIIVDFGLNVNKQKTKLIIGNKQKIVTGISVKNSRLQLPRKTRRTLKQELFYIKKYGLISHISKLKIKKPNYLDSLQGKFAFWTYVEPHNEFARHV

SEQ ID NO: 2026 - protein, 342 aa, Vibrio sp.
  source 1..342: note = Related to LJTE01000008.1; note = Vibrio alginolyticus
MNSIHKNQIASWNRFFDDRGISSHLTQQYIDYISNLICADLPIIFELEHLSKLTGINIDTLCKIIGDSSHFYRDFSIAKRRGGKRLISAPYPSLMTCQTWIYENILKKSPSHFCSHGYSPNKSIITNARPHLGNKAILKIDIRDFFPSISINWVIKYFSDLGYSNNVAYYLASICCLNKALPQGAPTSPALSNILLRGLDRRLYKLSKCYNLTYTRYADDLTFSGEHLPYKVISIISQIVSDYGLSVNEKKTSLIIGDKQKIVTGLSVRGDTLQLPRSSRREIKKEIYYIRKFGLLSHISKLKIRKTNYLDSLEGKLRFWLQIEPGNKFVQESLILILSIKN

SEQ ID NO: 2027 - protein, 342 aa, Vibrio parahaemolyticus
  source 1..342: note = Related to AAXXVD010000006.1
MKNTHKNKIAGWTKFFDDRGVSSHLSEQYIGYISNLICSDLPVIFELEHLSKLTGINIDTLCKIIGNSNHFYREFSINKRRGGTRLISSPYPSLMTCQTWIYENILKKSPIHHCSHGYSPDKSIITNAHPHLGKKAILKLDIKDFFPSIPINWVIKYFSDIGYSNNVAYYLASICCLDEALPQGAPTSPMLSNILLRSLDRRLYKLSKTYNLTYTRYADDLTFSGNHIPHKITSVIEQIVLDYGLLVNEKKTCLIIGDKQKIITGLSVRGDRLKLPRASRREIKKEIYYIRKYGLLSHISKLKIRKTNYLASLEGKLRFWLQVEPENNFAQESLTLILSIKS

SEQ ID NO: 2028 - protein, 346 aa, unidentified
  source 1..346: note = Related to NZ_LXEP01000041.1; note = Buttiauxella gaviniae
MTKSAEEIKKEINDWKKFFIDHGLETNLISDYLSYISSLIENNAPVIFEIKHLSQLIGINTSELLKMIYSPSDFYREFEIAKRSGGKRKISTPYPSLKKCQRWIYENILKKQSVSSHAHGYVQSKSIITNATIHAGKNNLLKMDIKDFFPSISINWVIVFFKKLGYAHDISFYLASLCCLKNHLPQGAVTSPCLSNILSLSLDNRLGKLSKKYKVTYTRYADDLFFSGDKIPLSLIKSVTNIVTSYGLNVNTEKTHLIRTSKRKIVTGVAVHNEVITLPRTYKKNITNTLYHIKKHGYLSHVSKLKVRNPYYLESLIGKLNFWQQIEPDNKFVEKSISYLKEIKKQ

SEQ ID NO: 2029 - protein, 346 aa, Salmonella sp.
  source 1..346: note = Related to AAMMPP010000001.1; note = Salmonella enterica
MAMTADAIKKEISNWESFFVDHGIEEKFTSDYMSYISPLIANNVPVIFEIKHLSQLIGINAPELLKMIYSPSNFYREFEIAKRTGGKRKISTPYPSLKKCQSWIYENILKNRTISPYAHGYVQTRSIITNAKMHVGKNNLLKMDIKNFFPSISINWVIVFFKKLGYAHDISFYLASLCCLNNRLPQGAVTSPCLSNILTLSLDNRLGKLSEKYQVTYTRYADDLFFFGEKIPLSLIKSVTNIVTSYGLNVNIEKTHLIRASKRKIVTGVAVHNDVITLPRAYKKNIANTFYHIKKHGYLSHISKLKVKNPYYLESLIGKLNFWQQIEPDNEFVKNSISYLKKLKKQ

SEQ ID NO: 2030 - protein, 349 aa, unidentified
  source 1..349: note = Related to WQRG01000008.1; note = Leclercia adecarboxylata
MKNEFLISPLRQNLDDWKDFFNDRGLEESLINDYISYIKPLLRNNVPVIFEIQHLSLLIGVPVIELKKMIFSPNHFYRTFEIPKKSGGSRQITTPYPSLKRCQKWIYNNILKKNRVHQNAHGYVLSKSILSNAATHVNQKNIIKIDIKDFFPSLKINWVVNYFKRLGYSHDISFYLSSLCCLNNSLPQGAVTSPYLSNILTLSLDRKLSKYAENHGLNYSRYADDIFLSGNFVPLDCFSEVKKIIKGYGFNINNGKSRFLNENKRKIVTGIAVHNEFMTLPRTKKKELMNVFYHIKKYGYISHVAKMKIKNPYYIDSLIGRFGFWKQIEPNNTLVIHCLAYLKNIKSNI

SEQ ID NO: 2031 - protein, 344 aa, Acinetobacter sp.
  source 1..344: note = Related to JAKUKP010000004.1; note = Acinetobacter pittii
MSHEIEQVKTPKQWRLYFDDIGLKEEYIELYIDIVERLYKNKNPIIFEIEHFSKLVGVEVQTLFSMIFSEENFYRQFAIKKKLGGERIITIPSPSLMLVQRWIYKYILKTKKVHYAAHGFNFNKSIITNAKMHVGHKVFLKIDLKDFFPSIPISWIVNYFNQQGYPPKISYYLASFCTFNECLPQGAPTSPILSNILFYQLDKKLYKYSKKNNLTYTRYADDLIFSGDYIPLKFRNFVIYLIKQYGFKVNPKKTSLKVNAGQNIVTGILIKDDIFVPKKYKRKIRQEMFYINKYDLLSHISNANIKDPNYIYSLQGRINFVISVEPENEEFIRYKNEIDRIIKG

SEQ ID NO: 2032 - protein, 345 aa, Acinetobacter sp.
  source 1..345: note = Related to JACXZP010000005.1; note = Acinetobacter towneri
MSYTIESVKTPKEWLIYFEDMGIKEEYISIYIEIIEKLYKNKNPIIFEIEHFSKLVGVEVDVLLSMIFSKKNFYRQFKIKKKLGGDRLITVPSPSLMMVQKWIYNNILIDKKIHYSAHGFNFNKSIITNAKMHVGHKVFLKIDLKDFFPSIPINWIINYFKQQGYPPKIAFYLASLCTLDNSLPQGAPTSPILSNILFYNLDKTLYKFSKKNNLTYTRYADDLVFSGDYISLKFRNFVIFLIKKYGFKVNSKKTSLKINAGQNIVTGILVKDSVFVPKKYKRKLRQEMFFINKFGILSHIATSNIRDPNYLYSLMGRINFVLSVEPNNEEFIEYQNKIKAIIKKG

SEQ ID NO: 2033 - protein, 346 aa, Acinetobacter sp.
  source 1..346: note = Related to NZ_CP031716.1; note = Acinetobacter wuhouensis
MLYSIEPVKSPQEWRTYFDNIGLKEEYIEIYLQIIEELYRKKNPIIFEIEHFSKLVGVEVTVLLSMIFSKEKFYRQFKIPKKKGGERTITVPSPSLMLVQKWIYNYILINKKIHYSAHGFNFNRSIITNAKMHVGNKAFLKIDLKDFFPSIPIGWIVNYFKQQGYPPKISFYLASLCTLKDSLPQGAPTSPILSNIIFYNLDKVLYKFSKKNALTYTRYADDLVFSGKYISLKFRNFVIFLIRKYGFQINSKKTSLKVNAGQNIITGILVKDTIFVPKKYKRKLRQEMFYIKKFGLLSHIATTNIRDPNYVYSLMGRLNFVLTVEPENEEFIEYQNYIKRILKKAD

SEQ ID NO: 2034 - protein, 339 aa, Acinetobacter sp.
  source 1..339: note = Related to CP077835.1; note = Acinetobacter baumannii
MDKKEIKKWTNYFLDVGLKDEYIIEYQDLITNLIKNDVPVIFEIDHLSKLVGINVSTLYAMIFSTEKFYRTFEIPKKNGGMRTITTPHKSLKLVQKWIHHNILKYKYVHKSAHGFVKNRSIITNALIHKESKVFLQLDIKNFFPSIPLNWIINYFYKLGYSKKISFYLAKLCCYENSLCQGAPTSPILSNLVFFALDKKLNHYADKNNIIYTRYADDIVFSGDNIPLSFKNFCIFLIKDFGFKINSKKTKLKIEVGQNIIAGIQIKDSDIWVPKKYKKKLTQELYYIQKYGLISHISKRRIKDPNYVYSLLGKVNFILSVEPGNTKFLEYKNLLNSIIK

SEQ ID NO: 2035 - protein, 339 aa, Acinetobacter sp.
  source 1..339: note = Related to NZ_VPDZ01000001.1
MTKHIAKNWTKYFEDIGLKDEYIEEYSEVIKKLVGNNVPVIFEIEHLSKLVGINVSTLYSMIFSTEKFYRSFDILQKNGENRRITTPFKSLKKVQKWIYQSILKQGYIHKSAHGFVEKKSIITNASVHKSSKVFLQLDIRKFFPSIPLSWVINYFHKLGYSKKLSFYLAKLCCYKESLAQGAPTSPALSNLIFFGLDKKLNNYAIKNNILYTRYADDMVFSGTEISLNFKNFCIFLIKKYGFKVNSEKTRLKINVNQNIITGVQIKNNNIFAPKKYKRELIQDLYYIKKFGLISHVSKKRIKDPNYVYSLLGKINFVLSIEPENLEFINYKNILKNIIE

SEQ ID NO: 2036 - protein, 338 aa, Acinetobacter sp.
  source 1..338: note = Related to CP035936.1; note = Acinetobacter cumulans
MSNKAKEWVAYFNDVGLQEAYINEYGLVVEKLLKNKVPVIFEIEHLSKLVGINVKTLYSMIFSPEKFYREFEIPKKKGGTRKINAPFKSLKKVQQWIYINILKVKNKNAYAHGFLDGKSIITNAREHINSSVFLHLDIKDFFSSIPIGWIVNFFYSLGYSKKISFYLSRLCCFKDCLVQGSSCSPALSNILLVNLDRKLNKYALKNNLKYSRYADDLVFSGNYISLSFRNFCSFLIKNYGFKINTKKTRLKVNASQNIITGIQIKGNILSVPKQYKRKLKQEIYYIEKYGFISHVNKKKIKNPDYLASLIGRVNFVLNVEPNNLEFTEYKKILSNLIQ

SEQ ID NO: 2037 - protein, 340 aa, Acinetobacter sp.
  source 1..340: note = Related to NZ_CP032134.1; note = Acinetobacter chinensis
MQLSQWETYFQDIGISEQYIDEYLEIISKLSKKKLPIIFEIEQFSKLVGIELNILYKMIFSPESFYHEFYIKKKKGGRRKIVVPFPSLLLIQRWIYKNILLKCTCHSNIHGFIQKKSIITNAKAHIGGRDFLKLDLQNFFPSISLNWVVRYFNELGYPKKISFYLARLCCYEEGLGQGAPTSPFLSNLLLFSLDKRLNNLAKKNESTYTRYADDIVFSGEKITKGFYSLVESIVGDFGLTLNESKTQLRKNKTQNIITGIVVVNDGIKIPKTYKKKIRQEIYYINKYGLMSHLSKIRNKNPTYLLSLLGKINYVLSVENDNQEFKDYQKKMENFIKNPLN

SEQ ID NO: 2038 - protein, 337 aa, unidentified
  source 1..337: note = Related to NZ_PIPJ01000004.1; note = Aliidiomarina iranensis
MKLKSPKEWEGYIKSRGLEPELEKTLSAYASNLSSKNLPVIFELEHLSNILDIEHDEMRVMVNGSDWFYREFEIPKRRGGVRVIKVPYSSLMHAQYWLKEAILDKEFIHSKAHGFANGKSIKSHVECHCHSLHILKLDIKDFFPTFKKSWVANYFNQLGYAPNVAFYLANLTTDTVSLVQGAPTSPVLSNILFRKADRALNKIAVKYELSYSRYADDMCFSGNYIPKKLLRLVERILRYFGFQLNSRKTYLGPVNGCHITGIKVVDGQLKVSRKLKRELRKQIHFIGKYGLLSHVNKKRIRDVFFVERLMGQLNFWKFIEPEHEFPIEALSLLRQKL

SEQ ID NO: 2039 - protein, 364 aa, unidentified
  source 1..364: note = Related to NZ_JAKZGR010000005.1; note = Belliella kenyensis
MRAANRKLFDHLLFLLTNMSKQKEINKWKTFFKNRGLSEEISDKYINYITKLLENRTPIIFEFNHLALLLGRQPFYLASVVNAPNNHYRSFKLKKRSGGFREITTPFPALLEMQYWIFNNILKNVSINPCAHGFAHKKSIITNATLHAGQNELLKLDLKDFFPSININRIIYVFKSLGYPNEIAFYLASICSYEESLPQGAPTSPVLSNIIAKQLDKRLINLAKKYNLKFTRYADDLTFSGKNIPAKFIEYIKVIIEEEGFDLNEAKTRLYKSNRKRIVTGISVLEKEIKIPREYKRNLRQELHFIFKYSFESHIKKKKIRKSNYLESLIGKVNFWLSVEPKNGFALDAKKRLFEIYKNYYPQQ

SEQ ID NO: 2040 - protein, 344 aa, unidentified
  source 1..344: note = Related to HF992628.1; note = Prevotella sp.
MTSDAIIEKWNNFFTRKGINQTLHDKYIEYIKILVKNNVPIIFDFNHLRLLMGRSDLYFTSVINSPENHYRSFKLKKRNGGFREILAPYPALLEMQYWIYNNILKKIPISPYSHGFAHKKSIITNAKIHLGQKELLKLDLKDFFPSIKINRIIYVFKSLGYTNQVAFYLASLCSYNETLPQGAPTSPYLSNIIAKKLDKRLIRLSKKYKLHYTRYADDLTFSGDSIPAKLIEYINNIVNSEGFTLNSEKTRLYKHGGKRIVTGISVNGKELKLPKDYKRNLRQELYFIMKYGYESHIKKKKIRKVNYLNILLGKVNFWLSVEPSNKFALDAHSFLLETYKKHNK

SEQ ID NO: 2041 - protein, 339 aa, unidentified
  source 1..339: note = Related to NZ_JAAKEL010000031.1; note = Dysgonomonas sp.
MAKDLIKEWYDFFTVKGIEPQLRDIYIDYISLLSENNVPIIFEFNHLALLLGRKQHYLASVVNSPENHYREFKLPKRKGGYREISAPYPALMEMQYWIYQNILKSIRIHSSAHGFINSKSIITNAKIHTGQTELLKLDLKDFFPSISLNRIISVFKNVGYPNQIAFYLAKICTYEECLPQGAPTSPCLSNIIAKNLDKRLMKLAKSLNLRYTRYADDLTFSGNKIPAKVIEYISTIIVDEGFVINQDKTRLYKNKGQRIVTGISVLEKELKLPREYKRVLRQELFFIEKYGLKSHLAKKKQRKANYIFSLIGKLNFWLSIEPENQFALKNIEKLKLILN

SEQ ID NO: 2042 - protein, 340 aa, unidentified
  source 1..340: note = Related to JAIPGO010000099.1; note = Candidatus Cloacimonetes bacterium
MKDDQYSQWKKYYESRGILPEIQDKLLNYAKIHIDNNTPVIFNFEHLTLLLGREKNYLSSVVNSPDSHYRKFKIKKRSGGEREITAPYLSLLEMQYWIYRNILINVKIHYAAHGFAQDKSIITNSRNHLGQKHLLKMDLKDFFPSIKLNRIIYIFKSLGYPNIIAFYLASICSYKGHLPQGSPTSPILSNIVSITLDNRLVKFARKMKLRYSRYADDLTFSGDKIPTNYIKYITDIINDEGFEVNDTKTKLYLKAGKRIVTGISVIGNDPKLPREYKRKLKQELHYIFTYGIGSHMAKKKIKKINYLYRIIGKVNFWLNIEPDNEYARNAKAKLLLLIDN

SEQ ID NO: 2043 - protein, 339 aa, unidentified
  source 1..339: note = Related to NC_015496.1; note = Dokdonia sp.
MSNKETFNKWQSYLESRRVQEDVKEQYLSYIRILLDKNVPIIFTFDHLSLLLGRSKNYLASVVNSPDNHYREFKIKKRSGGFRKITTPFPALLEMQYWIYNNILKKIPIHSSAHGFTHKKSIITNSKIHAGENHLLKIDLKDFFPNIDINRIIFIFKELGYPNIIAFYLAQICCFDGTLPQGAPTSPILSNIVTRRFDKRLIHLAKKFNLKYTRYADDLTFSGSTISAIFISYVNDIVIDEGFVINDSKTRLYQKKSKRIVTGISVIEKEIKIPRNYKRDLKQELHYIFKFGLKSHMSKNKIRKANYLFVILGKVNFWLSVEPKNEYALEAKTKLKELI

SEQ ID NO: 2044 - protein, 350 aa, unidentified
  source 1..350: note = Related to NZ_JPRI01000002.1; note = Chryseobacterium vrystaatense
MTKKEILREWRLYFENRQVRKDIYEKYIVYIGVLLENNVPIIFNFDHLCLLLGRSNEYLSSVINCSSNHFRDFEIKKRSGGHRAITAPYPALMEMQYWIYNNILKAIPINSSAHGFTHKKSIITNSNIHKGQKELLKLDLKNFFPSISINRIIYIFKQLGYPNNIAFYLSSICCYDNFLPQGAPTSPILSNIVSRKLDKRLITLAKKFALKYTRYADDLTFSGDIIPAKFIDYVTAIVCDEGFEVNINKTRLYKSKGKRIVTGISVSGDVIKVPRDYKRKLKLELHFIKKYGLESHIAKKKIRKYNYLFSLVGKVNFWLSVEPKNQEALDYQILLNEYVKKIQQPLDITL

SEQ ID NO: 2045 - protein, 364 aa, unidentified
  source 1..364: note = Related to JAGPCT010000083.1; note = Saprospiraceae bacterium
MLKHKKEVAHHLFLDMTKNQIYESWKCFFIERGLDEKYSRPYLVYIKKMLSNGLPIIFETEHLSLLLGRSASYLNSVAFSPSSHYRQFKLKKRSGGFRTIDVPYPALLECQYWIYRNILSVVPLNYCAHGFVPKKSIITNAKVHLGQNVLLKLDIEDFFPSISKDRVIGVFNFLGYPPKVSYFLASLCCLNECVPQGAPTSPTLSNIISYNLDKRILAFSKNFELKYTRYADDLAISGKNLPTKYIDYLRVIVEDEGFKINVSKTQLFTRQSKRILTGVSIGSGKLKAPKEYKRVLFQELFYIKKFGLNSHISKMKIRNPNYIQSLVGKLNYILSIEKDNFKAINYLNYLKENYNSQIIKIDIY

SEQ ID NO: 2046 - protein, 350 aa, unidentified
  source 1..350: note = Related to NZ_JACVMN010000002.1; note = Flagellimonas sp.
MTNHKIIYNKWEDYFSNRGLEKNLLDSYLVYIDGLLTNNLPIIFESEHLSLLLGRNEVYLNSVVFSTELHYRDFKLRKRKGGFRIISVPYPALLECQKWIHKNILSKVKISPYAHGFAKKKSIVTNARKHTNQEHLLKIDLKDFFPSIKKGRVIAMFCKLGYSTEVSFYLASICCKMDCLPQGAPTSPSISNIIAKSLDNRLFALSQKFEIRYTRYADDLAFSGGNIPARFIDYVTEIVTTESFEINNSKTQLHKSKGKRIITGVAVNGEIVKAPKSYKRKLFQTLYYIEIFGLNSHRTKLKIRNPNYLESLIGKLNYVLTIEPDNSKAKNYLTMLIEIDKSRTHNSVYK

SEQ ID NO: 2047 - protein, 346 aa, unidentified
  source 1..346: note = Related to NZ_CP047897.1; note = Nibribacter sp.
MSKKRILSNWSNFFEQRGIPEDIREIYLRYIKKLLVKDVPIIFDFNHLSKLVGRQQWYLASVVNNTSSHYRTFNLKKRSGGFREISVPYPALLGVQYWVYKNILQKIPINNSSHGFAKNKSIITNSKIHLGQSNLLKMDLKDFFPSIHLARVIKVFKALGYTTKVSYYLASVCCINDCLPQGAPTSPILSNIISFDLDRRLYLFAKKFNLKYSRYADDLTFSGENINVKMIHYISEIIVSEGFIVNDKKTRLHKESAKRIVTGISVAGSELKLPKKYKRDLKQELYYINKYGIHSHVSSVNIKHTNYIDVLIGKLNFWLSVEPGDEFVVEQLKMLYSIKYPESIPK

SEQ ID NO: 2048 - protein, 341 aa, unidentified
  source 1..341: note = Related to PCOU01000016.1; note = Chryseobacterium sp.
MSKKDLFFWNSSFTKAKINDEIKQNYLRYIEVLLNNKVPIIFDFFHLTLLLGRNSKYLSSVVNSNISHYREFEIPKKKGGTRKITAPYPALLDCQRWIYNNILKNIKIHPCAQGFTKKKSIITNAKIHVNQDEFLKIDIKDFFPSITINQVINIFKSFGYTQKVSFYLASICCYDQNLPQGAPTSPILSNLVAITLDKRLFAFAKKFDLKYTRYADDLAFSGKKITSKHLEYIKEIISECGFEANDEKTFLQQKKSKRIITGISISDNTIKVPKQYKRKLKQEVHFIRKFGALNVIRRNKIKNPNYLYSIIGKLNFWMSVEPNNQFAKKAYNDLKQFINYN

SEQ ID NO: 2049 - protein, 339 aa, unidentified
  source 1..339: note = Related to JACHTC010000027.1; note = Myroides sp.
MSNKIIQGWKSFFIKAKISVEAREIYLKYISTLLSNKVPIIFDFYHLTLLLGRNSEYLASVINSNTSHYREFQIPKKLGGFRTILAPYPALMDMQNWIYKNILNDVKIHPCAQGFTNKKSIVTNAKIHINQKEFLKIDLENFFPTITINQVINVFKNLGYTHKVSFYLASICCYNKNLPQGAPTSPILSNIIALTLDKRLFALAQKFNLKYTRYADDLAFSGDEINLKHIDYIKNIINECGFTLNEAKTVLQKNKNKRILTGISIAGETVKVPKNYKRKLKQEVHFIRKFGILNYIRRNKIKNPNYLYSILGKLNFWLSVEPKNEFAKKAYNDLKQQIQ

SEQ ID NO: 2050 - protein, 342 aa, unidentified
  source 1..342: note = Related to NZ_NFHW01000007.1; note = Butyricimonas sp.
MSKLKLYNYWYSNFEKSGIKSEFVEKYMAYVSKLLNNNVPIIFDFNHLCLLLGRNGHYLASVVNSNVSHYRIFQIPKRSGGHRNISAPYPALLECQSWIYENILAKIKIHPAAQGFTTKKSIITNAKIHINQNHFLKIDLKDFFPSITINQVINVFKSIGYTNKVAYYLASICCCENVLPQGAPTSPALSNIVGKTLDKRLYSFARTYDLKYSRYADDLAFSGEQIPSKFIEYISDIIRSCGFSVNDRKTILQQQKNRRRIITGISISDDAIKIPREYKRKLKQEIHCIRKFGISSHIRRQKIKKTDYLLCVIGKVKFWLSVEPENQFATHALNDLLNIAQQ

SEQ ID NO: 2051 - protein, 354 aa, unidentified
  source 1..354: note = Related to JAFWZH010000322.1; note = Clostridia bacterium
MNTREQNIILKNWEQFYNSRGVEPELIKVYMSYVEKLVNQSLPPIFDFRHLSLLLNINEYDLASIVNSPSNYYRTFDIPKRNGGFRTITAPYPSLKNIQKWIYHNILSNIKIHGCAHGFATSRSILTNANVHINQKCLLKIDLKDFFPSIPMSYVLQLFKSLGYAPKVAFYLSSLCCYDECLAQGSPVSPAISNIVAKHLDRRLYRIAKKYNLNYSRYADDIAFSGESINVKFIEYIKEIITDCGFFVNENKIRLYKEYGNKILTGISLATGVPRLPRDYRRSLEKELFFIYKYGIKGHISHNKIRKSNYLESIIGKVRYWLMIEPNNTFAQQMYEKLYAEYKLQLNTSDIEVL

SEQ ID NO: 2052 - protein, 348 aa, unidentified
  source 1..348: note = Related to CP042465.1; note = Prevotella copri
MTDLQLQKMMELWKAYYRSRGIAPEFANQCLAYARSLLKQDMPVIFDLPHLCLLLGLDVSYLHSIVYGADKHYRNFFIRKKSGGVRELSAPHYTLKYVQTWIYENILSKVKVNYCAHGFCPKKSIVTNARVHVSNKYLLKLDLKDFFPSITQNQVINVFRSLGYSNHVAFYLGSICCVDGHLPQGAPTSPALSNIIAHHLDNRLLGVAKKMGYKYTRYADDLAFSGDLIKPVFVQYVVRIISECHFIVNASKVKLYKGNGAKILTGVSLANGQIRVPREYRRKLEQELYYISNYGLGEHIRRRRIKNPHYLESVIGKTEFWLMLEPENEFAKQSLEYLRALYNQKYNQ

SEQ ID NO: 2053 - protein, 347 aa, unidentified
  source 1..347: note = Related to WTAE01000072.1; note = Sulfurovum sp.
MIKKYPHEWKKYFDSRCIPQNVQDEYLSYIKNLHDQDIPIIFEIEHLALLLGMEISVLNRMIFGTKSFYRTFEIPKKSKDSVRIIDAPYPSLLSVQQWILKNILKNIHIDDSAHAYMKKKSILTNVTPHLNNKVLLKIDLKNFFPNIEKNRIIAVFLKLGYTQNISFALASLCTLNNHLPQGAPTSPTLSNIIAYRLDRRLSSLCKKSDMVYTRYADDMVITSKYISLKTKDLIITIIEDCGFIVNKDKTYLSTNQNKRIITGISIQDGTTKIPRKLKREIKQEMYYLNKYGFYSHINKRKITNPFYLERIRGQILFWNFIESDSTLAKEMLSDINRIIEIVENLSQ

SEQ ID NO: 2054 - protein, 343 aa, unidentified
  source 1..343: note = Related to NZ_CABVRY010000015.1; note = Aliarcobacter butzleri
MNNTKIISIKEWKSFFKSRGIEQSLINEYISNIEKLKDKNLPIIFEIEHLSYLVNINIEILNKMIFSNKSFYQEFKIPKRNKGEFREIHAPYPSLKCVQDWIYNNILQYAKIHYNAHGYVKNKSIKTNAKKHLNKKELFKIDLKDFFPTIKIPRIIEQFKRLGYSKNMSLCLATLCCQNDYLTQGSPTSPALSNLVAYKLDKRLTALAKRNNLVYTRYVDDIAISGDDIHHFLQKLICEIIEEEGFIVNYEKTYLNKENSNKRLLTGIIIKDDKLTIPRETKRKLKQEIYYISKFGIKSHLISINNKNPYYYESLLGKLQYWKFIEPTSKDVDKLIKILNDSI

SEQ ID NO: 2055 - protein, 351 aa, unidentified
  source 1..351: note = Related to JABMQT010000738.1; note = Lentisphaerae bacterium
MDEQIDSTADRWVEHLGGTIKSRPFREACTAYASRLVENGFPVVFNLQHLAKVTGLKTRVVGSQVFRTERYYRKFSIPKRTGGLRTIHTPYPSLLLCQRWINYRVLTGIRVHKHAHGFVSGRSVLSNALPHLQKRWMLKMDIKDFFPSISIRRIVPIFRRCGYSRDVSYFLSRQCCLEDVLPQGAATSPTLSNIVLKRTDSRLTALAESFAATYTRYADDLTFSGDYLPARIIDIVSRIVTDEGFRVNTAKTRLVGPKGRKIVTGVSVSGASPRLPRQTKRVLRQELFHLHTKGYAKHTAVRQILDPLYAERLLGKLSFWLQIEPDSPFARQALDWMAEVRGTLQVLGRHT

SEQ ID NO: 2056 - protein, 342 aa, unidentified
  source 1..342: note = Related to NVRR01000003.1; note = Sneathiella sp.
MEKDEIQLWNKNISEAVSSKRWVKAYSKYIDVLSENSVPVIFEIDHLAEILGLRSDLLVRAVNSVERFYRPFEIPKSSGGTRKINAPYPVLLDIQRWIGAHILSQVRISEQAHGFVKNRSIIRNAREHLGKECMLKMDISDFFPAISLKRVITIFLFLGYSPSVSYYLSVLCCLENQLPQGGAASPQICNIIATPLDRRLMSLALAYSLNYTRYADDLTFSGRYIPIKFIKIVESIASDEGFEINNKKTKLMRAKGRRIVTGISIGTGELKLPKSTKRSLRQEVYWLERNGIFAESGRDGIFDPLYVDRLLGKLNFWRSIEPENTYVIEKIDRLKELIISES

SEQ ID NO: 2057 - protein, 350 aa, unidentified
  source 1..350: note = Related to JAGQOP010000117.1; note = Phycisphaerales bacterium
MSAKNRLGSSAWRKHFDSIGCPSDLKSTYLAYIDRMTGRGFPPILDFGHLASLLGRTPAYLASAINGTKCHYRQFVIPKRRGGARTISAPYPALLECQQWINREILEHIDVHSAAHGFRRKRSIATNASQHLNKACLLKMDIKDFFPSIKLRRVIAVFRDLGYPKNISVYLGRLCSLDGQLPQGAATSPAMSNIIAKQLDCRLLGVAKKWRLRYTRYADDLCFSGPHISIQFPKLVSRICEEEGLQINASKTQLCRSKGRRIVTGLSVSGERLRVPRAFKREVRQEMHYIKVHGYWSHVSKRKIRNPFYLQSLYGKLMFWRWIEPDNSFVNSAFDVLRNLVHENGEFEKD

SEQ ID NO: 2058 - protein, 347 aa, unidentified
  source 1..347: note = Related to NZ_CADEUM010000003.1; note = Burkholderia cenocepacia
MIEKNINIEPWANLIARRVRRPSIRTAALKYIERLIAVGVPPIFDFEHLSELVGVHRAILAGFVESAGSFYRTFKIPKQSGGFREISSPVPSLLMVQRWIKENILDEIPVHDAAHGFVKGKSVVTFAQPHVNKAALLHIDVSDFFPSIDLKRVYVLFRNIGYAPNVSLFLARLCCVNGRLPQGAPTSPSISNIIFSSIDARLIGLGCVAKLDYTRYADNIVFSGNYINIKFLDIVSEILSENSFKVNRKKTFLSTKKGKRIIAGISVSGERISLPRDTRRNLRQQVHGLLKFGFFEHTAHIGDLDPIYAERVLGRLLFWKYVEPNNSYVASSIQALRGMQMDLDSQV

SEQ ID NO: 2059 - protein, 377 aa, unidentified
  source 1..377: note = Related to NZ_FQXY01000011.1; note = Bacteroides sp.
MDGILITILIITGFLIYKMISSSRKQEGYKRWKATASGGKEESASKSESGHGAWLRRALGVTAPQSPYVPKFDDESVVWCASLLGVEANKLKEILENIPTHYHEFWVRKRRGGYRMISAPLKELQSIQTTINSRILSSVTTIHPAAVGFRCGRSVVDNASPHLGKRYVLKMDIHDFFFSIRSPRVKATFEKMGYPANVAKVFRTLCCLHNSLPQGAPTSPALSNIVGYEMDKKLAALAAEYGLTYTRYADDLTFSGDVFPKEQIIPRIKQIIRDEKFEPNHKKTRFLHEYDRKIITGVSVSSGVKLTIPKTRKREIRKNVYFILTKGLVEHQRRIGSNDPAYLKRLIGELCYWRSIEPDNTYVSDSIIALKRLEKHY

SEQ ID NO: 2060 - protein, 376 aa, unidentified
  source 1..376: note = Related to VWAM01000011.1; note = Bacteroides finegoldii
MDGILITIIVITAFLVYKMISSSRKQEGYKRWKATSSGKEEKTTKVKWEHGAWLRHALGETVPRVQYVQRFDESAVVWCANLLGVETAQLKEILRDVSEHYREFWMRKRKGGYRMISAPDKELQSIQTTINSRILSSVTMIHPAAVGFRSGHSVVDNASPHLGKRCVLKMDIHDFFFSIRSRRVKKTFEKIGYPENVSKVLGVLCCLYRHLPQGAPTSPALSNIVGYEMDKKLAALAVEYGLTYTRYADDLTFSGDVFPKEQIIPRIKQIIRDEKFEPNHKKTSFINEYGRKIITGVSVSSGAKLTIPKARKREIRKNVYFILTKGLAEHQRRIGSSDPVYLKRLIGELCYWRSIEPDNAYVSDSINRLKCLEKGY

SEQ ID NO: 2061 - protein, 376 aa, unidentified
  source 1..376: note = Related to VVYG01000002.1; note = Bacteroides caccae
MNKILITILIITGFLIYKMISSSRRQEGYKRWKATGGGKEEKVDKTKWERGSWLSHAMGVTTPVAPYTPRFEKEAVIWCAALLGVEVNRLEEILNNVSGHYQEFWMRKRSGGYRMISAPDKDLQAIQSTIYSRILSSVTIVHPVAVGFRCGRSVVDNAAPHLGKRYALKMDIHDFFGSIRSPRVRQTFKKIGYPENVSKVLGALCCLHRHLPQGAPTSPALSNIVGYEMDRKLAALAAEYGLTYTRYADDLTFSGDVFPKEQIIPQVKRIIRDEKFEPNHKKTHFMNQSSRKIITGVSVASGVKLTIPKSKKREIRKNVYFILTKGLAEHQRRIGSHDPAYLKRLIGMLCYWRAIEPDNTYASDSIAALKRLEKGY

SEQ ID NO: 2062 - protein, 377 aa, unidentified
  source 1..377: note = Related to CP081916.1; note = Bacteroides faecis
MDGLLITILIVTGFLVYKMISSSRKQEGYKRWKATGSGDTANEETAGNKWKHGAWLRHALGVTTPKARTYPVFDEEAVVWCAGLLGVEAVRLKEILQDVSSHYREFWIRKRKGGYRMISAPDKELKSIQDTIYHRILLPVNVHPVATGFRRQHSIVDNVRPHLGKRCVLKTDIHDFFLSIRSPRVKQTFENIGYPKNISKVLGELCCRRRHLPQGASTSPALSNIIAYEMDRKLAAMAEEFGLAYTRYADDLTFSGDVFPKEQVLVRVKEIIREEKFEPNHEKTRFLNEYDRKIITGISVSSGVKLTIPKARKREIRKNVYFILTKGLAEHQRRIGSHDPAYLKRLIGTLCYWRSIEPDNTYVSDSIAALKRLQKGD

SEQ ID NO: 2063 - protein, 394 aa, unidentified
  source 1..394: note = Related to FQZN01000002.1; note = Bacteroides stercorirosoris
MNTTIYISKYSSSSFFIPIDTMNGILIAVFIVTCLLVYKIISSSRKQEGYKRWKAGNRDNTEHTANAGTTRKGWFSQLFETSAPRISPWFKEEAISQCANLLGVEEVKLKEILKDVSAHYREFWIGKRRGGYRMISAPDDELKPIQGAINHRILSFVNVHPAATGFRCKMSIADNVRPHLGKQCVLKTDIHDFFSSIRSPRVRNTFEAMGYPPDIAKVLGTLCCLHRCLPQGASTSPALSNIISYEMDKKLSALAAKYGLTYTRYADDLTFSGNVFPGEQILSQVKQIVREEKFELNHKKTRFLKEHSRKIITGVSISSGVKLTIPKARKREIRKNVHYILTKGLAEHQRRIGSHDPAYLKRLIGTLCYWRSIEPDNAYVSDSITALKSLEKKY

SEQ ID NO: 2064 - protein, 373 aa, unidentified
  source 1..373: note = Related to CP072251.1; note = Bacteroides cellulosilyticus
MNGILIAVLIVTGLLIYKIISSSRKQEGYKRWKAGNRSNTEDTTDTETTRKGWFSRYFGTSALITIPWFDEEAVVKCANLLGVEEAVLKEILKDIPGHYREFWIGKRKGGYRMISAPDKDLKAIQDTINHRVLSFVNLHPAATGFRCKMSISDNVRPHLGKPYVLKTDIHDFFGSIRGLRVRKMFENMGYPPKIARVLAALCCVRRCLPQGASTSPALSNIISYEMDKKLAALATEYNLVYTRYADDLTFSGDVFPAQQILPLIKQIIREEKFEINHKKTRFLSGHKRKIITGVSISSGVKLTIPKAKKREIRKNVHFILTKGLAEHQRRIGSHDPAYLKRLIGILCYWRSIEPDNAYVSDSIAALKGLEKEY

SEQ ID NO: 2065 - protein, 371 aa, unidentified
  source 1..371: note = Related to SZUU01000003.1; note = Bacteroides fragilis
MELLFCIVTVITALLVFIIIRSSKSQEGYKRWKAGNYVSDTPYAKEKKTSALFPRSLFGKDANFFGAKRFKAEAVSWCANLLAVEEDALREVLDYVPRQYKLFYIRKRSGGFRAITAPEDKLRVMQQTIYQRILLLAHVHPAVTGFCPGKSVADNAQAHLGRKNVLKVDIHDFFPSIRSPKVRAAFREMGYSGPIAKVLGELCCCYKCLPQGAPTSPALSNIIAYPMDKKMMALADEYGLVYTRYADDLTFSGDYLPKDEVLARIHGIVREEGFTINAKKTRFLSEYKRKIITGVSVSSGEKMTIPKVKKREIRKNVHYVLTKGLVGHQEHIGSTDPVYLKRLLGNLCYWRSIEPDNRYVSDSITALKRLM

SEQ ID NO: 2066 - protein, 371 aa, unidentified
  source 1..371: note = Related to CP037440.1; note = Bacteroides fragilis
MELLLAIVIVVTGWLVFSIIRSSKGQEGYKRWKAGNYAGENPYAKEKKESVSSLKNIFGRKAVAFGSKRFDAGAVSWCASLLGVKEDTLREVLDYVPRQYTQFYIKKRSGGVRIITAPQGQLRVMQQTIYQRVLLLANVHPAVTGFCPGKSVSDNARVHLGRKNVLKVDLHDFFPSIRSPKVRATFREMGYSRPIAKVLAELCCCNRCLPQGAPTSPALSNIIAYPMDKKMMALADEYGLVYTRYADDLTFSGDFLPKDKVLSRIDQVIREEGFTMNVKKTRFLPEHKRKIITGVSVSSGTKMTIPKTKKREIRKNVHYVLTKGLASHQEHIGSTDPVYLKRLLGNLCYWRSIEPDNRYVSDSIAALKSLM

SEQ ID NO: 2067 - protein, 370 aa, unidentified
  source 1..370: note = Related to CP036550.1; note = Bacteroides fragilis
MELLLGIVIVVTCWMVVRIIRSSKNQEGYKRWRAGNYASENPYAKEKASGPLSQGFFSKRIRTSGARRFDDGAIRWCANLLATEESRLREVLDYIPRQYTCFHVRKRSGGFRYISAPAGDFRSMQQTIYHRILLLANIHPAVTGFCPGKSVSDNARVHLGRKNVLKVDLHDFFPSIRSPRVRAAFREMGYSRPIAKVLAELCCLRCCLPQGAPTSPALSNIIAYPMDKKMMALAGEYGLVYTRYADDLTFSGDYLPKDEVLVRIHRIIREEGFTMNVKKTRFLSEHKRKIITGVSVSSGKKMTLPKVKKREIRKNVHYVLTKGLVGHQEHIGSTDPVYLKRLLGSLCYWRSIEPDNRYVSDSITALKRLM

SEQ ID NO: 2068 - protein, 359 aa, unidentified
  source 1..359: note = Related to RQYS01000018.1; note = Tannerella forsythia
MTVILVTILIFICGMILLIIREKKKEKDLLNRHLPNDNSFRNGSVFYHTGICRQAVYDPEALKWCATFLNIGEKELSSFLHHPSEWYSLFWLAKRGGGYRMIAAPKKELKAVHRTIYEKILINSEIHPSATGFRRNKSIVENVRPHLGNAQVLKVDIHDFFGSIRKHTVRRTFKQLGYESGVAKILAALCCKSGRLPQGAPTSPALSNIIVAGMDEQLAAISRSVGLTYTRYADDLTFSGNLSSHHAFLAQVEKVVAEHKFALNRKKTRFLDMSHRKIITGISVSSGTKLTIPKVFRREIRKQVYHVLTKGLAEHQKYIGSSDPAYLKRLIGRLSYWHAVEPDNTYVIRSLKALKELNH

SEQ ID NO: 2069 - protein, 388 aa, unidentified
  source 1..388: note = Related to JAEPKU010000005.1; note = Dysgonomonas sp.
MNINIVILIIVLGLWLLYKLFSSGRKDDYNRNTSSYNRNADNYDKGEEKKKNHRKFIFSFLQREKNKTEVKAKRQGFLTRIFSTPLPFDDAAITWCANFLIVEKKTLIEILKDTSDHYTHFKLGKRSGGYRTISAPNKTLLNIQRVIYKRILLSVNLNPASMGFRQNISVAHNAKAHLGNKQILKVDIVDFFGSIKKQRIIETFGKIGYPSNISEVLAELCTLEGKLPQGAATSPTLSNIVAHEMDVKLVSIAQKNNLTYTRYADDLTFSGENIFFELIFSEINNIVREGKFIIQRKKTRFLTEKRRKIVTGISVSSGKKLMIPKAKKREIRKNVHYILTKGLAEHQRFIGSTDPSYMKRLMGYLNFWLMVEPDNEYVKKSITALKKI

SEQ ID NO: 2070 - protein, 388 aa, unidentified
  source 1..388: note = Related to NZ_GL891979.1; note = Dysgonomonas gadei
MNTILVILIIALGLWLLYKLFNSGGKDDYNRNTSGYNRNADNYDRGETKKENNKKSIFSFLHKKKSNTEKKAKRQSIFARIFSEPLPFDDGAITWCANFLIIDKNTLIGILKDTSDHYSHFKLGKRSGGYRTISAPDATLLNVQKIIYKRILLSVNVHPASMGFRQNISVTHNAKTHLGNKQILKADITDFFGSIKKHRIIKAFRRIGYPANISQVLAELCTLENKLPQGAVTSPTLSNIIAYDMDMKLASVAEKSNLTYTRYADDLTFSGENISFELTLSEIDRIIREEKFVLQRKKTRFLTEKKRKIVTGISVSSGEKLMIPKAKKREVRKNVHYILTKGLAEHQRFISSTDPSYMKRLMGYLNFWLMVEPDNEYVKKSIAALKKV

SEQ ID NO: 2071 - protein, 360 aa, unidentified
  source 1..360: note = Related to SELI01000017.1; note = Apibacter muscae
MNIILVVFFIVLMLWLLFRLLNFDGNNVDVEKKENGSVLKAKKQSFLARIFSKPLPYDDEAITWCANFLIIDKNTLISILRNTSAYYSHFKLAKRSGGYRTISAPNEAMLNIQRIIYKRTLLTVNIHPASMGFRKNFSVTHNAKAHLGNNHILKVDLFDFFGSIKKDRVIKTFEKIGYPVNISQVLAELCTLGGKLPQGAPTSPTLSNIIAFNMDIELASIAQKNSLRYTRYADDLTFSGTDIAFEPLLTDIDVIIRKENFIIQRKKTRFLTEKKRKIVTGVSISSGQKMTIPRAKRREIRKNMHYILTKGLVEHQRFRGSTDPVYLQRLMGYLNFWLMVEPENEYVKRSIAALKKLKIT

SEQ ID NO: 2072 - protein, 381 aa, unidentified
  source 1..381: note = Related to NZ_OEPV01000016.1; note = Dysgonomonas sp.
MNTTLIILLICLGLWLLYKVLNYRGGDVDNYNRNIDSYDKGEKNKSKSRIFSSRKSDSDFSSNPAKKQGFFARLFSVQLPFDDEAITWCANFLIIEKDVLIGILRNTSQHYSHFRISKRSGGVRIISAPSPALMSLQKTIYKRILVSVNIHPAATGFRSNTSIVQNAKAHLGKSQILKVDITNFFGSIKKRKVIKVFENIGYPPNISQVLAELCTLDNKLPQGAPTSPVLSNIIASDVDVKLAALSQKKELSYTRYADDLTFSGSNIDFETTLAEIDEILFKERFIIQRKKTRHITEKRRKIVTGISISSGEKMTIPKSTKRELRKNVYFIQTKGLAEHQRFIGSTDPTYLKRIIGQLSFWHMVEPDNDFVKKSLSALKKL

SEQ ID NO: 2073 - protein, 390 aa, unidentified
  source 1..390: note = Related to NZ_JACIEP010000005.1; note = Dysgonomonas hofstadii
MNIALVILIIFLVLWIFYKLLNYSGGDEYSRDTRNYNRNPDNYDKGEEVKTTPKKSIFSVFSREKKVKQAKRQSFFERIFSAPLPFDDAAITWCANFLAVEKNELIDILKNTSIQYSHFKLGKRSGGCRTISAPNNVLLNIQKTIYKRILLSVSIHSAATGFRQNVSVIHNAKVHLGKTQIIKVDLADFFGSIKKPRIITAFEKIGYPSNISKVLAELCSLDGKLPQGAATSPTLSNIIAYDMDVKLIALARKHNLTYSRYADDLTFSGEDIAFELFLSEIDGIVREEKFVIQRKKTRFLTENKKKIITGVSVSSGEKLTIPKSKKREIRKNVHYILTKGLAGHQKFIGSTDPSYLKRIVGYLNFWLMVEPDSEYVKKSLIALSKLQGKS

SEQ ID NO: 2074 - protein, 387 aa, unidentified
  source 1..387: note = Related to JACMIC010000003.1; note = Dysgonomonas sp.
MNILLGILAIALLYLLYKLFYKKRGDEYSRDTSGYDRGTNSNEKEERPKDQPKKSVFSFFGRKNIEKPQIAKRQGLIARLFLAPLPFDDKAITWCANFLVIEKNILIDILRDTSKYYSRFRLGKRSGGFREISAPVTALLNIQKTIYKRTLLSANVHTSCTGFRQNVSVVDNAKPHLGKPHVLKVDIVDFFGSIKKSRIIKVFESFGYPSNISQVLAELCSFEGKLPQGAATSPALSNIVAYDMDVKLMSIAQKHNFTYTRYADDLTFSGENILFEEVLSEVNNIVKDEKFVIQRKKTRFLTEKKRKIVTGISISSGKKLMIPKSKKREVRKNVHYILTKGLTDHQRFIGSTDPSYLKRLLGYLNFWLMVEPDNDYVKKSIASLKKL

SEQ ID NO: 2075 - protein, 360 aa, unidentified
  source 1..360: note = Related to QVMQ01000008.1; note = Dysgonomonas sp.
MDILIYFAIAIIIIWAIFKLLNYDNSAEKDKTRINNKPQSPGLWQRITAPHVPYDNQSLSWCSKLLAVDVVELKKILAYRDIHYKSFRIGKRSGGYRTISAPNEQLLNIQKTIYNRILLPVGLHPAATGFRKDTSIKDNAKPHLGKRLVLKMDIVDFFGSIHEYRVRKIFQAIGYPVNVSDVLAALCCLRQRLPQGAPTSPALSNIAALEMDKKLAALATKYNLTYSRYADDMTFSGDEFEKDKLIKIVTKAVQSENFAVKRSKTRYMGEKQRKIVTGISISSGEKMTIPKSKKRQVRQQVHYILTRGLDAHQRHIGNNDPAYLKRLVGYLNFWLSVEPENRYVRNSIKALAKIKTVGIV

SEQ ID NO: 2076 - protein, 387 aa, unidentified
  source 1..387: note = Related to QVMN01000003.1; note = Dysgonomonas sp.
MTGLVIISVAVIIIWLIYKYSRKEDDYSRTTDHYNRNPKGYNKEINTSPSYANNRKHSTPPPKVEKKGIFSQLFERKPSLPFDDKAITWCANFLSVDENALRLILAYQSNYYKKFLLGKRSGGYRTISAPQEPLISIQRTIYRRILAPVNIHPAATGFRHKKSVADNARPHLGKDYMLKVDIIDFFGSIKRDTIRKTFQKIGYPLNIAEVLTFLCCLRGQLPQGAPTSPALSNIVAYEMDQQLYALATENNLTYTRYADDITLSGNSLAKDEILPAIQRIVGEARFRIKHKKTRYMTPNRRKIITGISVSSGEKLTIPKTTKREIRKNVHFITTRGLNRHQQHIKSQDPSYLKRLIGQLCFWHSIEPQNEYVQKSLDVLKKIEKRIR

SEQ ID NO: 2077 - protein, 363 aa, unidentified
  source 1..363: note = Related to MIQD01000015.1; note = Tannerella sp.
MTTTLLTTLAILFGILMLVLTLREKQRERRKLSGSTPDAPYRQQPPPANPPSTDRDPLNDIYGADAIARCAAQLCTTEGELRDVLRDIRWAGYTTFWMAKRRGGYRNIEAPNPHLKAIQRAILDRLLTPLPVHTAATGFRPGLSIADNARPHLGRRRALKTDLHDFFGSIRRPAIRRVFRDMGFDAHITKVLVDLCSHRNRLPQGAPTSPALSNLVAAKMDERLTALSLRRGLTYTRYADDLTFSGDSFNRNELIADIKHIAACDGFTLNAKKTRLMASSRRIVTGLSIGSGEKLTLPRERKREIRKNVHFVLKYGVTEHRERIHSSDPAYVKRLIGELCFWRSIEPEHPFVNRALRQLRALR

SEQ ID NO: 2078 - protein, 343 aa, unidentified
  source 1..343: note = Related to JAFPFX010000010.1; note = Prevotella sp.
MKEHYQIWLKAIEESNTMSENDKNAFSKVVIALSKSGAPVIFNVKHLALLIGVDFRALKRMLYVRDRFYRSFSIKKRNGGERLIEAPYPSLKMVQRWILDNILVPSAFVHPCSVGFISKKTITDNARPHLGHSVLLKMDIKDFFPSVTEELVRSYFSNLGYRSDLASTLAYLCCKDGRLPQGSPTSPMLSNVLFYEMDNQLSKIAFWDGLSYTRYADDLAFSGDRIRISIIDNVAAIVLKYGLRINNEKTRRSGSTSRKIITGVSVSSGEKLTIPREVKRVIRQKVFYVLKYGLTDHLKHIQSRDLLAGYRLLGLLAYWHSVEPENKYVLDSSKALGEMLRGE

SEQ ID NO: 2079 - protein, 355 aa, unidentified
  source 1..355: note = Related to NZ_CP034930.1; note = Apibacter raozihei
MVWKLLKSLFSTSFHKEDVPDVHADTQVQNNKINSKSLRPSVEYLLTKDLGHLCELLEIDNKTQLAPILLHPEEYYRTFRIPKRNGKSRLISAPFTPLYRIQKKIYEKILIHARVHSAAKGFCINTSIVHNAKEHLHAKDLLKVDIRNFFPSIHQSRVVAIFRNLGYEYTLAYQLAYLCCLNGKLPQGSPTSPALSNLALLRLDSKLSEIAGNRQLIYTRYADDLSFSGNILSKNELLAEISKTVQEEKFILNKKKTRFITGAKRKIITGISISSGKLTIPKSKKREIRKVIYYIKTRGIAKHLLHINSKDAEDWYLEKILGYLSFWRAVEPENAYVLQSVKYIQSLRKQLLYKK

SEQ ID NO: 2080 - protein, 341 aa, unidentified
  source 1..341: note = Related to NZ_OEPV01000002.1; note = Dysgonomonas sp.
MNEQQNNIEIWYHEIDKANDLTSRQNSYAKKYVATLLKNNAVVIFDLYHLACLIGIKYHILLKMSHSSKHFYYDFTIKKRNGDDRVISAPFPSLKYTQKWIYQNILAKAPISPHAKGFVPNLSLLNNAEPHLHQNAILQMDIANFFPSISWKRVYNVFKNIGYNNRISAALTNLCCKHNSLPQGAPTSPILSNIILSKLDKRLSKLAEKHSLTYTRYADDITFSGYIIPNELINIISYIIEDEGFIVNNNKTRIARGNKKKIVTGISVNSEYLTIPRKKKREIRQAIYYIKTKGLSSHMENINNSDPIYIYRLLGYLNFWKFIEPENSYVIDSIRIIKSQL

SEQ ID NO: 2081 - protein, 358 aa, unidentified
  source 1..358: note = Related to PKRS01000005.1; note = Emticicia sp.
MSYDSEENIEQKLKIIRKYSKQKNHYESLLKDISIMEQKGSILIINNKHLADLVGISFDGILKIINSSQSFYYSFSIPKKNGGYRVISMPFPSLMKVQRWIYENVLLKHQIHKVAKGFVKELSIKDNASEHLGSKELLKMDIQDFFPSISKKRIISIFKRLGYNNKVSYSLASICCLNQCLPQGAPTSPTLSNIIAYKLDNRIQGLANKFNIIYTRYADDLTFSGDTFPPFFYSTIQRILLEEGFNVNKDKTRLIKEGRQKIVTGISISSDKMTIPKIKKREIRHAVYFILKRGLFAHQQAIGNYDPIYIDRIIGYLHFWQFVEPENEFVRKSIIEIKTNLASLEEEFKVYIDSNLKY

SEQ ID NO: 2082 - protein, 356 aa, unidentified
  source 1..356: note = Related to QNTX01000003.1; note = Elizabethkingia miricola
MYEALNNWDLYLDSKIKDAKVRSVLKKYVKNLLSNNTVIIFEFNHLSKLLGIEKSYLSRLVFGTHYFYQSFTIPKSNGEERLINAPKDILLDIQRWIYYNILKGISLNDNCVGYREGYSIRNNVEKHLNKEYLLKLDLKDFFPSINIERVIAVFKNLGYTPSISYILASICTLDGYLPQGSPTSPCLSNIIAKRLDARINGLCKKFDLDYSRYADDITISGNKLPKKMISYIENIIVDEGFEINLNKKRLLYKNNQRIITGVSISSGYLTIPKKKKRELRQIMFYIECYGLSNHLFKKGLNDPIYLERIIGYLYFWKFLEPNNKDIIRYFSIIKKEMIKQNEYFTDFRIPNFEFIG

SEQ ID NO: 2083 - protein, 304 aa, unidentified
  source 1..304: note = Related to MAUH01000030.1; note = Chryseobacterium sp.
MNQDLDYWFFFIDKSFRKIKVRKALKIYVEKILSTNSPIIFEFNHLSLLLGIEKDYLAKIANKSALFYHEFHIPKRNGELRIINSPNTILLGIQRWIYQNILSHIQLHESCTGFRKDYNIKHNASKHLNSNVILKMDLKDFFPSINKRRVISVFKNIGYTRNISYTLASLCCKDDSLPQGAPTSPFLSNIIAKRLDRRLNALCQKFNLNYTRYADDLTISGDTISKKLISYISDIINDEGFIVNQDKTRLLYKNNRKIITGISISSDKLTIPKKRKREIRHSIYFIKKYGIFEHVNRQQKVDII

SEQ ID NO: 2084 - protein, 357 aa, unidentified
  source 1..357: note = Related to JADEYP010000027.1; note = Sphingobacterium sp.
METAKYNLNIQRLIEDTFRGEKTLNALNIYSKGLINKNLPIILSKDHLASLLGHPLNLINNVIYSPESFYRSFYIPKKNNNGKRVIHAPKGILLDLQQKIYEYILSAIPVHEKATGYVANKTIKDNAIPHLNTNEILKVDLKDFFPSINFNRVINVFLKAGYTRDISFSLARICTLHNSLPQGAPTSPILSNLIIKRLDIRLEKLSKKLKLNYTRYADDLTFSGDSITISFLHYVKSIINSEGFKVNKKKLRILRKSHKKVITGISITNNELKVPREKKRIVRQAVYFIKKHGFLNHLEHIDRFDPIMLEKLLGYAYYWKFIEDSESSKSIISVLKLEIAKLNSSTSNLHTHLEFVK

SEQ ID NO: 2085 - protein, 360 aa, unidentified
  source 1..360: note = Related to QUMF01000012.1; note = Odoribacter sp.
MKVVSPSSFFTIMTQEQEFEINKWNGFISENIKGDKTKKALSLYVEKLIQKDTVVIIDFNHLAMLLGIQANTFASIIANTESFYYNFEIPKRSGGTRTISAPYPVLLNAQKWIYDNILNKIKVHDNAKGFIKKTSIADNARVHLDRDYILKMDIENFFPSIKMNRVMSIFRNLGYTKKISYYLSSICCLHGFLPQGAVTSPCLSNIIAKRMDARITGLAARFALNYTRYADDFTLSGDILPPKIIDYIEEIVNQEGFLINKKKTSLIGKGKQKIITGISISSGELKIPREKKREVRQSVHYVLRNGLFEHQKHIDSFDPIYVERLLGYLFFWLSVEPDNNFVKSSISKLKDYTKVLDGIN

SEQ ID NO: 2086 - protein, 346 aa, unidentified
  source 1..346: note = Related to NZ_ANLA01000010.1; note = Xanthomarina gelatinilytica
MNDNKNILVKEWDAFISENIRGAKTQIAVKTYVNKLISNNTVVILDFNHLALLLGIEVDVLARITSHSESFYYDFEIPKRDGKSRNISAPYPVLLQSQRWIYKNILSKQPIHDCSKGFKKNTSIVDNAKVHLNQKILLKMDIEDFFPSIKLNRVISVFRVLGYTKKISYYLASICCYKGALPQGGVTSPSLSNIITKRLDYRLNGLASKFDLKYTRYADDFTFSGEYLPIKIIDYIKSIVSNEGFKIKDSKTKMIGSKRQKIVTGISISSGKMTIPRKTKRELRKNVHYLLKNGLSKHLEHNRINDPIYTERMIGYLHFWHSVEPNNKYVKESLKKLKDYSIQLDS

SEQ ID NO: 2087 - protein, 316 aa, Pseudomonas fluorescens
  source 1..316: note = Related to LCYB01000004.1
MQIDSHVHMLLGISTEEELSVLSRIIASPSNFYREFKVPKKSGGTRTISSPYPSLAIIQSNILNNLFFPFEANSSAYAYVKGKSAIDHARIHVNGSELLKLDIKDFFPSISRQMVFEALQRSGAKADVCFYTSLICILDNGLPQGACTSPALSNLVFSPIDVRLTGLANFFGLKYSRYADDLAFSGEFIPRDLASLVGEILLEYDFHLNHKKTQLKLAGRKKIVTGVSISSGQVRAPKSFKRKLRAQIYELEKNIGSLARLPDFDPLIYERLIGRINYLLQIEPENNYAKVKKAYLSKCHQDFLGLVDEQIISAFV

SEQ ID NO: 2088 - protein, 317 aa, Pseudomonas sp.
  source 1..317: note = Related to CP027736.1; note = Pseudomonas chlororaphis
MQMDSHILKLLGISSKENLAILSRIIASPPSFYREFKIPKRSGGVRTISAPYPSLSYIQSNIFNSFLSSVECNLSAYAYVKGKSAIDHARVHINGKELLKLDIKDFFPSISKQMVFEALQREGGENSACFYISNLCTLNDELPQGACTSPVLSNLVFSPIDIRLSALAKFLGIDYSRYADDLAFSGDFIPRDLASLVGKIILEYGFFLNEKKTQFKLDGRKKIVTGVSISSGELKAPRVFKRKLRAQIYELERNVSNLARLPSFDPLVYERLLGRLNYLLQIEPENQYAKAKKKTISESHQRFLGLVDEQQVVSLLL

SEQ ID NO: 2089 - protein, 315 aa, Pseudomonas sp.
  source 1..315: note = Related to NZ_QDGR01000012.1; note = Pseudomonas aeruginosa
MEFEVYPILGIGSVEERAILSRIIADPPSFYRRFNIPKRRGGVRVIHSPFPSLANVQKSILTNVLADIPVSEYAFAYVSGRNAILHAKVHRESPELLKLDINRFFPSITRQMVFEALQSHGLSSKVSYFLSWLCTHKNELPQGACTSPVLSNIVFSTMDFRLSRLASEVGLSYSRYADDMAFSGGYVPRNLSRSISKILLEGGFYLNESKTQLKLAGSKKILVGVSISTGCLKAPKEFKRKLRAQIYELEKHSGNLSEVNDFDPLIYERVLGRINYLLQIEPDNRYALEKKRELSEMHQRFLSLGAGFSEALNWM

SEQ ID NO: 2090 - protein, 322 aa, Pseudomonas sp.
  source 1..322: note = Related to NZ_CP067098.1
MDNIESQIEVSGLMALYRDLNLSVEDLAIVSRMIARTDLFYRSFRIPKRRGGTRLISSPYPTLDKIQKSILQNVLEDYLPHDSAYAYVKNKCAVGHARYHLGSREILQLDIKEYFPSISRQMIFGALSRNGCDPKKASYISILCTLKNALPQGACTSPMLSNLVFFPIDVRFSKLASSLRLRYSRYADDIVFSGGKVPRDLPGLVRKILLDHHFCLNEDKTQFKIFGAKKIITGVSISSGVLKAPKAFKRNLRAQIHELERNKFHLSSQKEFDPLVFERILGRVNYLLQIEPDNIFALQKKKVLSFHHQEFLGLIDDFCLDI

SEQ ID NO: 2091 - protein, 322 aa, Pseudomonas sp.
  source 1..322: note = Related to NZ_CP077094.1; note = Pseudomonas promysalinigenes
MDNIEDIYSYQGDVQALCMALELDHTQSLILPRAIARPDLFYRFFSIPKRTGGLRKIRAPYPALASIQKRILDCLLAEKHVHHLSFAYVKNKSAIDNAKVHLTSKEILKLDIQDYFPSIDSQMVIEALMRNGFSSATAFYISRLCTVDGALPQGACTSPILSNLVFNPIDNRLAKLAERLNLRYSRYADDIVISGERVPRNLINLIRKILIERRFSLNEKKCQLKLSGSKKIITGVSISSGVMKAPKAFKRELRSQIFALEKYSGDLSKLREFDPLFFERVVGRLNYLLQIEPYNEYARKKKATICSYHQKLLGLHPMAQPQ

SEQ ID NO: 2092 - protein, 322 aa, Achromobacter sp.
  source 1..322: note = Related to CYTI01000008.1; note = Achromobacter xylosoxidans
MTSLSAFATDLNLWEIKDFSIQILYGILADSSKYYRSFEIPKRRGGNRTIHSPYPVLAQIQKELLLILQDRCGTSEYAYAYCRGKNAIMHASAHLGCDELLTVDVENFFGSTTRQQVHQALLGASFENDFAHLASLVATLHGVLPQGASTSPLLSNVVFRPLDGRLARLASHLQIKYTRYADDLAFSGDKIPRNLPKLIGKIISEKGYKLNPGKTALKIRGAKKIITGVSISSGTSKAPRQFVRATRAAVHNLEKNIGKLSATNILDPLAYERTLGKINYWLQIEPHNYYAAKKKKILSEAHQRFLELGAGFNLDNYIENRA

SEQ ID NO: 2093 - protein, 322 aa, unidentified
  source 1..322: note = Related to JAIZSD010000010.1; note = Burkholderia seminalis
MTILSLFSATMNLWEIEDFSTQILGGILADSEKYYRSFQLPKRKGGMREINSPYPVLAQIQQALTKYLRDQCFVSEHAYAYCRGRNAVMHATSHLGCDELLTVDIHDFFGSITRQQIHQSLLKNSIDASYSHIISVLATRKGILPQGAPTSPLLSNIVFSPLDLRFSRLAIKLGINYSRYADDLAFSGPRIPRNLPKLVEKILSEKNYKLNPQKTTLKIKGAKKIITGVSISGGTPKPPRKFVRSVRAEVYQVEKNINKLSSLSTIDPLSYERVLGKLNYWLQIEPHNKYALDKKNLISEAHQNFLNLSSSFDRNEYLQQLI

SEQ ID NO: 2094 - protein, 322 aa, unidentified
  source 1..322: note = Related to NZ_WKJJ01000010.1; note = Massilia rivuli
MDILESFSKELNLFSLDGFSVQLLAGAIADSSKFYRSFKIPKRRGGNREISAPFPFLANIQKAIANKLRDRIPSSDNAFAYREGRNAIMHASTHLGNRELLTVDIRDFFGSITRQQIHQSLLECNFDGNFSHISSLLSTLHGTLPQGGCASPILSNLVFYSLDIRLARLASALDITYSRYADDLAFSGDYIPRNLPRMVEKIIKEKGFALNNEKTKLKIFGARKIITGVSISSGKPKAPRQFVRALRAEVHALENNKNRLHSLTVFDPLRYERVLGKLNYWLQIEPNNSYAIEKRIGISIAHQKFLGLSANFKLEDYIQLVA

SEQ ID NO: 2095 - protein, 324 aa, unidentified
  source 1..324: note = Related to NZ_CAIGKG010000003.1; note = Cupriavidus necator
MPESEDLLALLNICEIESSNTPVLFSVLGSPDKFYRSFKIPKRNGGFRVIDSPYPSLEIIQRSILRNVLSNFPAHPNAYAFIKGRNAITHASHHLACRELITLDIKDFFPSITRQMVIDALIENGLANGVANYISLLCCLNGTLPQGACTSPALSNLVFERIDERLSRLAKTLKLKYSRYADDLAFSGDAIPRDMPQLIERILESRDLKLNKEKIRLKIAGAKKIITGVSISSGTLKAPREFKRLLRTQIYELEKNIDDISQMRSFDPLVYERVLGRLNYLLQIEPKNAFALQKKASLSQHHQRFLALSSGQWPALFPDADLAA

SEQ ID NO: 2096 - protein, 314 aa, unidentified
  source 1..314: note = Related to NZ_RBXP01000016.1; note = Azonexus fungiphilus
MTINDETLAELVRHLEIDEHLLLTLVAAISSPNKFYRSFAIPKRRGGIREIESPYPSLGSIQKAILRKILDGFSVHPCAHAFTRKKKALDHAAYHLGCKELITLDIKNFFPSITRQMVFQALNNSGLSSHFSFYISLLCCLNDVLPQGACTSPALSNVVFSQLDERLHRLAIHLGLKYSRYADDLAFSGEKIPRNMIKTVQKVLATKGFELNTEKTRLKVFGAKKIITGVSITSGIPKAPRSFKRSLRVKIHELEKHIDNLASMKKFDPLVFERTLGKLNYLLQIEPGNEFALKKKKLLSEQHQKFLSLGRQVQ

SEQ ID NO: 2097 - protein, 310 aa, Vibrio sp.
  source 1..310: note = Related to MCXB01000344.1; note = Vibrio splendidus
SLKNILSKFEIPISRENVSIFNKMISEPSAFYREFKIPKRKGGIRTITAPYPTLSYIQKLISERYLTKVNPSEHAFAYVKGRSVVDHARVHLNSTELLTVDIKSFFDSIRQQTIFEIYQSLGLSYSEAAYLTRISTLNGGLPQGACTSPILSNIAFYPLDVRLNNLAEKLGLKYSRYADDLAFSGTVVPKNLHRTIDSIIKSYNFELNQSKTKYKLEKSKKIITGVSISSGVLKAPKSFKRALRAEVYKLEKYKDNLSDMDGFEPLIYEKTIGKLNFVLQVEPNNLYAQEKRKTLISDYKVFSSKATNLI

SEQ ID NO: 2098 - protein, 310 aa, unidentified
  source 1..310: note = Related to CP014943.1; note = Colwellia sp.
MHYNNDFSIFIQNLGLEASHETRAIVSSIIHASENHYRSFNIPKRKGGYRKIDSPYPTLKHLHGVILDVFQDKLKCHKNSFAFMKGNSAIGHAKHHLDCEELLTVDIENFFPSISRQMIFEVLHSVGMKTNDSNYISYICTLRNSLPQGASTSPILSNAVFYPIDIILEQIALKFDLKYSRYADDLAFSGINIPRNLPSLIEKILMNRGFNLNKSKTKLKIKGARKIITGISISSGKLKVPRSFKRDLRANVFELEKFKHNLFEMNNFDPLIYERTIGKLNYLLQVEPESKYAKIKIKLLLESYKDFQLS

SEQ ID NO: 2099 - protein, 312 aa, unidentified
  source 1..312: note = Related to NZ_FYAJ01000004.1; note = Photobacterium andalusiense
MTDNNIVNLLEVISIKNTSHNIKIITNILNSNKNYYRFFSITKRKGGVREISSPYPTLKFIQQNIKKNILEKIVVNDNAYAYIKNKSYIDHAKIHCDSNELLTLDIKDFFPNIYRQDVFNIFSQYGFCDLQSNYLSYLCTLNNTLPQGACTSPIISNIIFNKIDNRLYKLALSFGLKYSRYADDLAFSGKKIPSKIIKLVALILEEYDFIVNESKTKLKKKGSKKIITGVSISNGEIKAPKSFKRNLRAVIYELEKNKDNIFKMPNFEPLIYEKTIGKLNYLLQIEPENKYAKEKKEKLISNYKEFISSPML

SEQ ID NO: 2100 - protein, 303 aa, Aeromonas hydrophila
  source 1..303: note = Related to NZ_CP028568.2
MNKDNLFELLEIDESFINAVNAISYSPEHFYRKFHIPKKKGGFREIHAPYPSLLALQKIISEKIQPYLKIHRSCFSYRKNISFIDNAAHHLGSKEILSLDIEDFFGNISRQKVFDVLSQSGFNNHLSNEITYLVTYKDYLPQGAPTSPIISNSIFYKIDARLYKLSEKLNLKYSRYADDITISGEKIPSNFPRYIEDILLQHGFSLNKGKTRLKKGHQKKIITGVSITSGRVMAPRIFKRNLRTEIYHLERNNYAISSPIDPMLYERLIGKLNFLLQVEPENTYAIEKKKALIEKYKKIILMI

SEQ ID NO: 2101 - protein, 301 aa, Aeromonas sp.
  source 1..301: note = Related to NZ_JRBG01000001.1; note = Aeromonas media
MNQDIFEFLAISEQQSPNLFAISHSPSSFYRTFRIKKRSGGYRELKSPYPLLLELQRIILEKSSQLLKIHDVCFSYRKEKSFIDNAKYHLNGECILTMDIEDFFGSITRQMVLDTFLFNGLTLELSQQLSYLTTCNNSLPQGAPTSPILSNAIFYRIDVRLSALSKSLGLKYSRYADDLVFSGKNIPKNFPSYISNILRQHGFSLNNEKTKLKLKSSRKIITGISISSGTLKVPKPFKRSLRSLIHNFERSSFSVSSSRNPMIFEEIIGKLNYLLQVEPHNNYAQEKRKLFLSEYRKFISY

SEQ ID NO: 2102 - protein, 342 aa, unidentified
  source 1..342: note = Related to JAIUIU010000040.1; note = Mesorhizobium sp.
MTDETLAGALRERGVPVRWIDAYESYAQRLTENGVPVIFELKHLAILTEIDLSFVLSCVYATNIHYRIFIIPKKTGGTREICAPLPALLSIQRWINHQILEKFAVSEFAHAYVNGRSIVSHAQNHRSGRVLLKMDLQNFFGSITLSMVLGIFRAAGYSRNLSFDLAKICTLGDFAPQGAATSPSISNIIFYHIDQAIGSICAKNELIYSRYSDDICISGRHISKEIIATLRELIESNGFAINDKKTKLATSAGRRIVTGISIGSGRMLPTRAFRKDVKRRLARIRKIGVNSAMVEDGDPFVLDRLVGKLHFWSHIDPDNKRIRVALNEMISLAKGESQTTGT

SEQ ID NO: 2103 - protein, 341 aa, unidentified
  source 1..341: note = Related to nan
MINSDPLESALVELRVPSHWIKSYLQYRDRLESSGFPCIFELDHLAYHLSFEPSALRVLVHNPQGSYNFIEIPKKRGGIRKISAPLPALLYAQRWIKNNIVDKLNIDESAHAYVRTRSIVTHARLHIEGRVIYRTDIRDFFGSISFDSVVSLIYSLGYSQDVLFDIASICCLHGSLPQGASTSPALSNVIFYKTDRALSTLASSFGLRYSRYADDLCFSGEHIPRKFIDKSTSILNADGYILNSEKTRLETSRSRRVICGLSIGDGRVKPVKSFRRAVRAETNNFLKQTKERSVVYWEVTPFFIDRLLGRLNFWKSVEPDNKWIVEHEQIVRRRIRTILEM

SEQ ID NO: 2104 - protein, 310 aa, unidentified
  source 1..310: note = Related to SJST01000002.1; note = Oricola cellulosilytica
MYRAGQILSLIHEICEKSGLPKDKITALAYRNRPRYRIFHIHTGKKQRLIKAPIPSLRAAQKALAAIISEKLKPEECAHGYVTDRSVITHAASHLGKKAFFKTDIVDCFGSINFPEIANTLREAKYNSVDSFIAASIATDEGSLPQGAPSSPLLCNLVLRSVDRPLSKLADKLCATYTRYGDDIVMSADDFDINIISIVRNVLSRHGFKMNEDKTYIAIEPQQNIITGISIATGYPKVRKSFKRQVRLETHLLLKKGIVSYLESDGYIDPFAADRVLGKLTWWSHVEPDAEFPKKHSIMIRSMMKEVARG

SEQ ID NO: 2105 - protein, 334 aa, unidentified
  source 1..334: note = Related to JAEPPB010000039.1; note = Pseudomonadales bacterium
MNTVNEWAEFFRDQQVPEDLILRYLPYIERLLTKNVPIIFEGKHLRKLLGIESSMLRSLVFNGSAFYRSFSIPKRSGGERTITAPYPELANAQAWIKQEILDNLKATPSATAYVQGKSILENANEHVGKKMLLKLDVEDFFGSIDVKKITAIFESCGYTNKVSYLLASICTLDGSLPQGAPTSPQLSNLASIPLDNRIHALAKKLELTYTRYADDIALSGEFIHSNVISYVEDILKSEGLKLNSNKTQLKQPGKRKILTGISVSSEKPMIPRAYKRQLRAEVFNALHKAQHELPFDPLNIERLIGKLNFVLHVEPENQFARRSLEALKQKKIAP

SEQ ID NO: 2106 - protein, 342 aa, unidentified
  source 1..342: note = Related to NZ_CAKLOR010000001.1; note = Klebsiella variicola
MTEIIKSSWDHLVGTKSPDGRQKEIFKKYIQDLEKNGLPVIFEFEHFAYLLGMTTSTLAQTIINPEKSYRSFHIKKKRGGSRLINAPYPLISYIQKWINTNILSKIKNHESSFAYKKNSNAYLHALQHIDTNETLKVDIVDFFGSIKKIDIVRLFRELGYADNVSLYLASACTYANSLPQGAVTSPNLSNIIFYSLDNRFYHLAIKLNLTYSRYADDLFFSGEKIPSNLYKSIKSILQSSGFSINKEKTRHITNGKQKIITGLAVKENSVRIPKSYRRKFCQEAYIFIKNEKSNSSMENINFDPILIDRLIGKANYILKVEKNNERIMKLLKQLNEIKLNTF

SEQ ID NO: 2107 - protein, 344 aa, unidentified
  source 1..344: note = Related to NZ_JABBPG010000001.1; note = Pseudoalteromonas caenipelagi
MNQLSYETWLDFLKKEGYGHKQSEKLAAYAHKLASNNVPIIFEIEHLAKLLGVELSLLSRIYGVSSYFYRSFSIKKRSGGARNIKLPYPKLKYIQQWIKQEILDNLTVDENAFAYVKGKSNIENAKLHIGSNELLKLDIKDFFGNVKVESIESIFRSCGYTDDVSYLLARLCTCFGFLPQGAPTSPTLSNLVLQALDKNLAHFANINSLTFSRYADDIFLSGKLITKEIKQDAVEIVEKSGLPINHNKTKIIRGNTCKIITGLIVTDSTVRVPKKIRREFRKNSFFMLKNKSSQMDGSRAKLNPLLIDEIIGVGNYIIRVEPSNKYVESVLGELQELKKDLFGK

SEQ ID NO: 2108 - protein, 343 aa, unidentified
  source 1..343: note = Related to NZ_JACJFK010000033.1; note = Pseudoalteromonas sp.
MKPIYDKWFNFLKASNLSLQQSEALAKYASRLENSNFPVIFEQKHFSKLLGLELNLLSRMTGASSNFYRSFEFKKKKGGIRAIRSPYPKLAYVQKWIKKEILEEIPISKSAFAYVKGRSHIDNAKKHIGSKDLFKIDIIDFFDQIKFEKIYNAFIACGYSHKVSFDLTQLCTFWGKLPQGAPTSPSLSNIVLKKLDDELFNVCKASSLTYTRYADDISVSGIEISPKIRNEIIEVVENNGYPVNHKKTYFAQGKAKKVVTGLIVTDSEVRVSKSMRRDFRKKSFFLLKNGVNELNGKNKPINPLYIDEIIGLASYILKVEPNNKYVATELKNLKKLKQDLFLN

SEQ ID NO: 2109 - protein, 343 aa, unidentified
  source 1..343: note = Related to SLYT01000019.1; note = Rahnella sp.
MADNNLDRKIFFKKNGLSESQSIKLDIYAKNLESKNLPIIYELKHLSKLLGMEYALLSRMSGINRFFYRSFSIKKRNGGRRIINSPYPKISYVQNWIKDKILSQVPISNNAYAYVNGLSHIEHARQHIGSDVFLKIDLLDFFGQISDQRVKKIFSELGYTDKLSLQLARLCTCNSSIAQGAPSSPILSNIVLKELDETLFTIANSNSILYTRYADDIYFSGKHVSKGFFSKIKGVINNFGMVINEEKSKIYKSHHKKIVTGIIVNQKEIRAPKHMRRRFRTESYILLKDKFKVFNGERGLFNPNYIDEILGLGMYILSVEPQNAYVIKIVKSLKALKKEFAQY

SEQ ID NO: 2110 - protein, 343 aa, Vibrio parahaemolyticus
  source 1..343: note = Related to NNHO01000001.1
MMEQSRWFKFFIENDLNKSQAQLLTKYAQILELKSLPVIFELEHLSKLLGVELSLLSRICTLNERFYRLFSLEKKHEGFRHIESPYPKLKYIQRWINDNILSVLAVHDNVYSYLQGKSHIDNAKMHIGCKQMLKLDLVNFFGHITISQIEKVFIECGYTKDLSNKLAKICTYYDHLPQGAPTSPALSNIIFYELDCILYDISQSNGLIYTRYADDLCFSGDNISQYVVDDILSHLKSHGFSINDEKSRLLTGNQRKVVTGLLVQSDTIRVPKKVRRKFRKDSYYLIKNGYDNLGNERLFNLLEVDELIGIGSYIKKVEPQNSYVSNALIELNNIKNSLMTSTS

SEQ ID NO: 2111 - protein, 343 aa, unidentified
  source 1..343: note = Related to NC_010334.1; note = Shewanella halifaxensis
MVFQESRWFQFFIEHKLSSRQAALLTEYAINLECNSVPVIFEIEHLSKLLGIELSLVSRMTGVSNLFYRQFPLKKRSGGIRTIESPYPKLAYVQRWIKNHILEIKPISSNALAYVQGSSHIENAKRHIGAKELLKIDLVDFFEYIKLSTVKSIFTECGYTEKVSHQLAKLCTLRDRLPQGAPSSPVISNLVLVELDKRLQSISKKHELVYTRYADDLCFSGHAISDEFFSLVKDEIESEGFVVNQNKSGVVRGHKRKLITGLVVSEYGVRVPKKMRREYRKQAHYMLKNGIEQLNGNMGMLNPLHIDEVIGKGQYILSVEPGNAYVKDSLCMLLKLKNKLLIK

SEQ ID NO: 2112 - protein, 342 aa, Vibrio sp.
  source 1..342: note = Related to NZ_MCYY01000073.1; note = Vibrio breoganii
MAYQESRWFKFFNEQQLSANQATLLAKYAQTLESNSVPVIFEIEHLSKLLGMELSLLSRMTGASSLFYRQFSLKKRSGGVRFIDSPYPKLAYVQRWIKNNILETRPVSSSAFAYVQGGSHIENARKHIGAKELLKIDLVDFFGHISFSSIVSIFEECGYSRSVSTQLAKLCTLWGKLPQGAPTSPVISNLVLLALDKRLQNLSDKNGLVFTRYADDLCFSGNEITEEFYSSVYDTLENEGFVVNEKKSGFVLGNKRKLITGLVVSESGVRVPKKMRREYRKQAHYMIKNGIEQLNGELGIFDPLYIDEVIGKGQYILSVEPDNAYVKESLCKLSKLKSDLLV

SEQ ID NO: 2113 - protein, 344 aa, Aeromonas sp.
  source 1..344: note = Related to JH823256.1; note = Aeromonas veronii
MTEEKSPWYEFFLKNNIGSRQATALSEYASRLDCNGVPVIFEMKHFSKILGLEFSLLSRMCGVNSYYYRAFYIKKRRGGVRVIQSPYPKLSYVQGWIKDNILDKNRISKHAFAYSKGKSHIDNAKCHIGSSELLKIDLENFFDQISISAVQEIFLRFGYTENISFKLAKLCTLRDTLPQGAPSSPAISNIFLYELDNFLASYSEINKLTYTRYADDIVFSGERISNESIVDIKKYITSYGLKINEKKSRLVKGAQRKIVTGILVGDTDVRVPKKLKRQYRAQAFNIIENGFSVFDGSIGKPNPLYIDEVFGKGQYILSVEPWNKKVVELQSSLRELMKEMSENI

SEQ ID NO: 2114 - protein, 344 aa, Vibrio sp.
  source 1..344: note = Related to NZ_CP060047.1; note = Vibrio vulnificus
MSSEYIRWLDYLRSNGVQNKQARILAEYAHNLVKSNLPVIFEIEHFSKLLGIELSLLSRMSGASSLFYRGFSIPKKRKGVRKIDSPYPKLAYVQLWIKSNILERLPISDNAYAYTKGRSHIQNARAHIGAKELLKLDMRDFFNRISRLQVEQVFLKCGYSDNVASVLSNLCSYNGVLPQGASTSPILSNIVLKELDDVIQHVAEKYSLIYTRYADDITLSGNSISKNVCNEVMQYIEEFGLPVNEEKVHLLKQNDKKIVTGLIVTDSSLRVSKQMRRAYRQESYYLIKNGETQFDGSTKPLKPLYLDEVIGKGSYILQVEPENDYVRNTLRDLSKLKSRLFSNV

SEQ ID NO: 2115 - protein, 344 aa, Vibrio sp.
  source 1..344: note = Related to JAKGTN010000030.1
MSPEYIRWLDYLCSNGVHTKQANVLAEYANNLAISNLPVIFEVEHLSKLLGIELGLLSRMSGAPSLFYRSFRIPKKRGGVRGIRSPYPKLAYVQSWLKENILECLTISDNAYAYTKGRSHIENARAHIGARELLKLDIKDFFNRISKSQVRQVYINCGYAENVASVLSNLCTYNGTLPQGACTSPILSNIILKELDETLQDISGQYSLTYTRYADDITFSGNSISDDVCSELIHHIEEFGLPVNEDKVRLLKPKDKKIVTGLIVTDRSLRVSKKMRRAYRQESYYLIRNRERQFDGSIKPLKPLYLDEVIGRGSYILHIEPNNDYVRDSLKELLELKSQLFSNS

SEQ ID NO: 2116 - protein, 344 aa, Vibrio sp.
  source 1..344: note = Related to NZ_LNRB01000009.1
MSPEYKKWFEFLCTNDVSEKQATLLAAYADRLLKSNLPVIFEIEHLSKLLGIELSLLSRMSGMPPFFYRNFQIPKKREGFREICSPYPKLAYVQSWLKENILDGLTISDNAYAYTEGRSNIRNARAHIGARELLKLDIRNFFYNIKTLQVKRVYLNCGYSNNVASVLSNLCTYNGRLPQGACTSPILSNIILKELDDALQNISEKYSLTYTRYADDLTFSGNSISDDVQNEIKANIEGFGLPINEDKVRLLKPNQRKVVTGLLVGDSSLRVPKKMRRAYRQESYYLIKSGKSQFDGSIKPLKPLYLDEVIGRGSYILQVEPDNDYVRDSLKELSKLKSHLFSID

SEQ ID NO: 2117 - protein, 345 aa, Vibrio sp.
  source 1..345: note = Related to NZ_SYUW01000019.1; note = Vibrio kanaloae
MKSNEREWIDFFIERKVDLNQAKILTSYAINLQEKSLPVIFEIEHFSKLLGIELSLASRIVTKPERFYRVFNVKKRRGGSRVISSPYPKLYYVQSWIKDNILQKIRVHESAFAYKKNTSHIDNARVHCFSDEMLKVDISKFFDNILKSNIVDIFVKCGYSKKLSEQLASFCSQGDHLPQGAPTSPVISNIFMFELDNRLSKVAEENNLKYSRYADDICFSGKRISQNLLELVNRAITDYGFQLNNRKTRLYKSQDVKSVTGIVVSNGKLRTPKRIRREFRADCHHLLSNGYLQFNGELGVFNPLMLDEVIGKGRYILSVEPENQFVSDQMSKLATLRSKYLSLSL

SEQ ID NO: 2118 - protein, 345 aa, Vibrio parahaemolyticus
  source 1..345: note = Related to DADYGM010000030.1
MKINEKRWIDFFIKNNVDLEQAKILTLYAVNIQKKSLPVIFEIEHFSKLLGIELSLASRIATKPERFYRLFNISKKRGGSRAISSPYPKLNYIQLWIKENILEKCPIHDSAFAYRKNRSHIDNARMHCDAIEMLKVDISGFFDNISASYIVKIFEKCGYSKKLSEQLANFCSHSDLLPQGAPTSPIISNIHMYELDKKLSDVSSEHNLIYTRYADDICFSGREISVNLLNIVNKLVNEHGLKLNKNKTRLYKSQHIKSVTGIIISDGKLRTPKKIRREFRLDCHYLLKYGYLQFNGEFGPFNPLLLDEVIGKGRYILSVEPENHFVKCQLSKLITLRNSYLSFNE

SEQ ID NO: 2119 - protein, 342 aa, unidentified
  source 1..342: note = Related to SNWT01000008.1; note = Idiomarina sp.
MLNFSQWKSFLQSEGISEQQSEHLANYAERLANRGFPVIFELEHLSRLLGVEKNYLYRVMFKGSEFYRTFEINGRRKKRLISSPYPILSYIQSWIKEQILEKFVVSEHAYGYVKSRSILDNAKFHLGCTELLKLDIKDYFAHISRAMVNRVFNEAGFTPKLSYQLSKLCCVYGSLPQGAPSSPTLSNLVMRELDQSLFYLSDFYNIKFSRYADDLAFSGKAIPSDFIVKAVKQIENYGFMLNHEKFTHRKINQGKMISGLSISGDFVRVPKKTRREFRQKHHYMMLNKEKSFNGVHGDFDLLSLDKLIGLGQFIKFIEPNNTFVIRAVDDLNLLKKEIFRTG

SEQ ID NO: 2120 - protein, 342 aa, unidentified
  source 1..342: note = Related to JACJFK010000046.1; note = Pseudoalteromonas sp.
MLNSSQWKSFLVNEGISVEQSDLLANYTEQLTSSGFPVIFELEHFAVLLGVEKNYLYRMMYKSREFYRTFKISGKKKKRLINFPYPILSYVQSWIKEHILENIEVSEQAYGYVKSRSILDNAKLHLGCTQLLKLDFKDFFGHISIHDVKRVFRDVGFTPKLSYQMAKICSVNGCLPQGAPSSPILSNLIMRKLDNELAHLSKFHNIKFSRYADDLAFSGEIIPSSFIVMIVKIIESNGFTLNHKKFAHKKSGQKKMVTGLCITGDRVRVLKKTRREFRQKHHYLMLNKEKSFNGDYGDLDVLYLDKIIGLGRFIKFIEPNNTFVSKAVEDLASLKKELFSIV

SEQ ID NO: 2121 - protein, 346 aa, unidentified
  source 1..346: note = Related to JAAFZY010000006.1; note = Mangrovimonas sp.
MSANYQIKDWEELINNSSLSKKEKKEKLFFIRSAYHNGVPVILDLDHLAHLLGLKVGVLSAMIKKPLRFYRQFKIPKKRGGFRDIVTPYESLLEVQQWIVEHVLSKFQVHDAAHAYVKKRNIAQNASIHVGCDEMLKIDLKDFFPSIKIPRVRELFNRVGYSKEVSYYLTNLCCLNGSIPQGAASSPMISNIILFNLDKRLSVFSKNHGVKYSRYADDLVFSGNFQSFGFKNLVIMNIEDEGFKANTDKTREYCEGHRKMITGIVVEKDRIRLPKAKRREIRTEVYFLMKYGIFDQVKRYNDIYYADRVLGRLNYWKQIEPNNEYVIDSIKSIKKLYEETLKQIST

SEQ ID NO: 2122 - protein, 343 aa, unidentified
  source 1..343: note = Related to FNSF01000001.1; note = Tenacibaculum sp.
MKVEYKISDWEDLINESSLTKKEKVEKMLFIKKAYDNNVPVILDLDHLSHLFGLKKGIVASMINSSQSFYREFKIPKKRGGYRDIVTPYQSLLEAQQWIIEHILSKFKVHDAAHAYVKKRNVAMNAMRHIGCDEMLKIDLKDFFPSIKIPRVRELFNRVGYSKAVAGYLTKLCCLNGSIPQGAATSPMISNIILNSLDRRLYVLSKNIGVKYSRYADDLVFSGEHIPHEFALNVVKNIEDYGFNINIVKSRHYKSQQRKMITGIVVGDDNIRLPKVKRREIKKEVHYLKKFGVLDQVKRYNDIYYIDRVLGRLSFWKQIEPDNIYVLNSIKEIKKMYEEFLKS

SEQ ID NO: 2123 - protein, 349 aa, unidentified
  source 1..349: note = Related to JAIQZE010000004.1; note = Psychroflexus sp.
MSYTINDWKKTIETSNLSKIEKIERMQYVESAFKNKVPVIIDTKHLSQLLGLKIGVLTSMVQSPSSFYREFKIPKRKGGYRDIVTPYKSLLEVQQWIAKHILSCFEIHPSAYAYVKGKNIAQNAKLHIGSSEMLKIDLKDFFPSIKIPRVRELFKRLGYNKEVTYYLSKLCCLKEQLPQGAASSPLISNIILSNLDKRLFKFASNNQLIYSRYADDLVFSGDAIPSDFRILVAMNIQDEGFSLNPDKTIEYSENQRKLITGVVVKKDSIRLPKDLRREIKQQAHYILKFGILDQVKRYNDIFYVDRILGRLSYWKQIEPKNEYVINTLKEIILMYKETMNNIQNNDDGE

SEQ ID NO: 2124 - protein, 346 aa, unidentified
  source 1..346: note = Related to BBML01000001.1; note = Nonlabens tegetincola
MDNNYKYEDWKEIIESSNLPNEVKVDRMDLVRNLYKNNVPVIVDLKHLSNLLGIKYTVLASMIFSTSSFYREFKIPKKSGGLRTIVTPYKSLLTVQKWIVKNILSQFKIHDDAYAYVKNRNIALNAKQHIGNPEMLKIDLKDFFHTIKIPRVRELFNRLGYSKEVAGYLSNLCCLNEALPQGAGSSPIISNIILRTLDNRLSNIASKSEIVYSRYADDLVFSGSKIPLDFEVVLTQKINDFGFKLNLKKTKFYKKGDRKLVTGVVVNSDGIRLPKSKRKQIKKEVYYLKKYGIQDQVFRHNDVFYIDRILGKLSFWKQIEPKNEFVLTSIIEIRNMYDKTMKNNKD

SEQ ID NO: 2125 - protein, 385 aa, unidentified
  source 1..385: note = Related to BBMM01000006.1; note = Nonlabens ulvanivorans
MIKAPKSFYRTFKIPKKRGGTRTIVTPHNSLKEIQRWILDNILSQFMIHEAAFAYEVKKNVAMNASIHLGQDEMLKIDLKDFFPSIKSPRIRELFTRVGYSKEVSYFLNALCSLDGCLPQGAVTSPKISNIILYYLDKNLSTLCHNNEVKYSRYADDLVFSANELPINLKSIVSSSIIENGFEINYAKLTEYSSEQRKLVTGIVIKEKGLTLPRSKKLSIRNDVFFLLKYGIEDQIQKYNDIFYLDRVQGRLSYWKQIEPNNKFVLDSIDKLKSLHKDYLNQALDKLNFLKIQKTNPLNNYKEYIHQVAFVASGLKIQIQIEDLRQSMNYLGYRTKKGAKYLKGRGFHRLIGLTFKWLEKQNKNEEADKVALTFINADGSYSYKK

SEQ ID NO: 2126 - protein, 348 aa, unidentified
  source 1..348: note = Related to JABSPD010000014.1; note = Crocinitomicaceae bacterium
MKNNYSIEDWEKHILENTEANGLERVYYLETVKIAYQNNVPVILDVNHLAKLLGLKVGIVTSMIYGPHSFYRTFDIPKKKGGVRTIVAPYTSLLYCQRWISDEILSRFFVHDAAYAYRPNRNIVMNAEKHVGQKYMLKLDLVDFFGNITESRVRSLFQENGYDKGMSFFLAGLCCLDGVLPQGAATSPSISNIVLNELDHKFDYLCDKYGVVYTRYADDLVFSSDSPLDHIVDHIGDIIKGEGFTVNIEKSKIYTAGANKLVTGLAVQEDRVRLPKRKRRKIRQEVYFVKKNGIMKEVERSSDLFALERVLGKLYFWKQVEPNNEYVLGEILELKKMRKELLRSLTSS

SEQ ID NO: 2127 - protein, 349 aa, unidentified
  source 1..349: note = Related to JAHXPQ010000003.1; note = Mucilaginibacter sp.
MIKWSEKLASNTSKPTELTEALIKYSKKLEKQGFPVIFDLAHLALILGIEKLTLASIVNSSSKFYRSFKIPKRRHNTFREINSPYPVLKKIQDWIKVEILEKIEMSHHCYSYRKNVSIIDNASVHLGNEVLYKLDLVDFFDNIKEDRILSIFLNCGYSYKVSYFLTSLCLLTTKLPQGASTSPIISNIIAKRLDKRLSALCSKYKINYSRYSDDITISGKFVPPFLRLIIKNIIADEDFIVNQNKEILINGLNKKKIVTGISITNNVLKIPRESKRIIKQEVFKFLKYDFMINPNEQEFDPYFTERLIGKLNYWINVEKGNENPIFLLRSVIEKNKLFMSRIIQEDFNS

SEQ ID NO: 2128 - protein, 314 aa, unidentified
  source 1..314: note = Related to JAIBAE010000002.1; note = Bacteroidetes bacterium
MNEIYPNIKSIRDLSIATEIPIKKIAGMIFSSENHYRIFSLPKRNSDGVRVIHSPYPNLYKVQRFILEQILRNVDGNNYCYSYKSGVSIKDNAMRHIGTKVFYKIDLENFFENIGFKKVIRVFRNCGYSDGVSYMLTKLCLCNNGIPQGAPTSPLLSNIVTSKLDKRLSGLSTKENLTYSRYADDLFFSGEYISTKCRELIKTIVEQEGLIVNNKKELLVIGYHKKKIVTGLSVTEKNISLTRNYKRELRLNVYKYLKYNHKVNPYNVDFDPLYKEKLLGQLYFWKFIEEDNEIPNILIEKVRNKEIIYPDLEL

SEQ ID NO: 2129 - protein, 350 aa, unidentified
  source 1..350: note = Related to JAAGPI010000025.1; note = Burkholderia sp.
MKLSSGSDWRKYFEEIGLESARSAELCRYAATLADSSLPVIFSFEHLAALLGRTRHHLASIIFASEHHYRSFDLIKRRGGTRLIEAPYPSLLECQRWILKNILLKIPTSNNVHSYLHGKNIKTNALVHVGENSILKMDLRNFFHSIEMTRVLKLFESLGYAPEIAYFLAKLCVLRDRLPQGAATSPMLSNIIASTLDSRLNSLAKSQNLKYSRYADDLVFSGNDISPAFVGEIRSICEGEGFYVNEEKTKLKTGSSRKIITGLIVGEKKVSLPRTYKREVRQQVYYIIKMGPLEYLKRNRLSPTALSSLAGRLAFWNSIEPDNPFVRESLPILMRLMSGEQNETRRIKNT

SEQ ID NO: 2130 - protein, 346 aa, unidentified
  source 1..346: note = Related to JAGQWR010000133.1; note = Saprospiraceae bacterium
MKPSESISKWHDLLKAAPLNEDLKDALSLYIRSIIKSGFPVILNVEHLSHLVRIEYIFLKRMMNSSESFYYEFEIPKRRGGKRVIEKPYPTLILVQKWILRHILQKKAVHRSAFGFVKGKSMIDNAKCHINGKSLLTIDLKDFFPNIKLPRVISLFQRIGYPYHISYILASLCVKNGRLPQGAPTSPYISNLVTHKLDSRLDKLCDKFDICYTRYADDMAFSGGTINLTFVNLVRSIIADEGFIVNEGKVKLIHGFDKRKIITGVSISSKKTTIPKSTKRKWKLELFYLIKNGLDAQMKVLRINDPLYLDRCIGKLNFWLQVEPDNKFARASLDTVTEMKKLRSIE

SEQ ID NO: 2131 - protein, 343 aa, unidentified
  source 1..343: note = Related to JAGNNE010000423.1; note = Leptospiraceae bacterium
MNRDYWIEYINLNIQDEEKRLIYYELLNRLIENSLPILLKFENFEFLFKIKKEILALIYKDSRKFYRTFTIPKRNGSLRFIQSPLPLLQYIQRYILDEILSKIITHNNAFGFVKHKSIVDNVKPHLNSHTLLKLDIDNFFPSIKIKRVISIFQRLGYSNRISFLLAKFCCYDDSLPQGAPTSPYLSNIIAKRLDSRLYNLAKEHHLKYSRYADDMTFSGNHISKNFIDFAYKILIDEGFTPNYTKSKLIVGRGRKIITGLSISNKKITIPRNKKRELRSKAYSVLSSDAKYKINYAAIDDPIFVERLIGQFSFWNFVEPDNLYAVNTLKLLKEYSSQLDNLIE

SEQ ID NO: 2132 - protein, 347 aa, unidentified
  source 1..347: note = Related to CP027860.1; note = Ahniella affigens
MRILNTIESWEAYFEDVCLREDIAAAHLKIISAQLKSGVPVIFDVEHLSLLLGVSSTYLASAVSVPRYHYRDFAIPKKRGGVRTISAPRAALKGVQRWILDNILNCFLPHKCAFGFRAKKSILNHARTHCTAGRILKLDVAEFFPSIKLDRVIGLFKSFGYTPGVAFTLASLCCLDRQLPQGAPTSPAISNLVCRRLDNRLHAFASKNRFRYSRYADDIALSGRDLNSSVIQIIRGILAEEGFALRDDKTRIYGVHSKRILTGLSASLDGVKLPREDRRQLRSVCHQIRKFGFLSYLANNKIRDPMFLARLIGRFSFWCYIEPENAFASEALAHLRGVERQFLAARS

SEQ ID NO: 2133 - protein, 338 aa, unidentified
  source 1..338: note = Related to JAFIXE010000059.1; note = Stenotrophomonas maltophilia
MRALTSLDSWIDYFKDVGLSDDVVEKHARYVGELLARSLPVIFDVQHLCLLLGVSERFAAVVLNASQSSYREFKIPKRSGGSRTIIAPRRALKDCQRWILDNILARVGVHAAAKGFVQRRSTKSHCRPHLGRESLLKLDFQDFFPSIKKRRVIALFRSMGYSDSVSLYLAAFCCFGEVLPQGGVTSPAISNLICRRLDARLSALASSKRWRYSRYADDLVLSGRNLNYAVVGIVAKIAKEEGFRLNDGKTRLYRGEARPIVTGLVLGESALAVPRTFKREVVKQAHYVLTYGVLSHSAKTKSRNPYLVPTLLGKLNYWIHIEPENQRAVRLRDRLSAL

SEQ ID NO: 2134 - protein, 352 aa, unidentified
  source 1..352: note = Related to NZ_JAKZKY010000019.1; note = Geothrix sp.
MNAYEGMPASIPGLRVWRKYFEDRGLSSEVVELYMGYIAPLYRRRLPVIFEWEHLGKLLGRTPHYLATAIASPAAFYRTFRIPKKCGGFREIQAPHRSLLDCQRWIVENILKRVPAHECAIGYVQGKSIIDYVTPHLQSADIFVTDISDFFPSIKIQRVIGLFQGFGYSNSVSYALASICCLGGALPQGAPTSPYLSNLICKHMDKRLSGYARKQNMIYTRYADDICFSSQAIRSVNKNTIRRIIFESGFSVNNLKTRTYIGNSTSKIVAGINLSGGKRTLPKDFTRPLLTEVYYIEKFGYISHRKKKKIKDPLHLMRLLGRAAYWRWVDPGSEKAQYCYGLLAGILREIAI

SEQ ID NO: 2135 - protein, 350 aa, unidentified
  source 1..350: note = Related to JACPYP010000009.1; note = Acidobacteria bacterium
MYDFVPAPLPSLHKWRKFFISRGVPEPRIQELLIYIKPLVKNRVPVIFNLEHLGRLLGRKTGYLAKIINSNEHFYRSFQIPKKNGAHRIINAPYPSLLECQRWINDNILSIVKIHDCAKGYLKNTSIIDHVEPHLGNNVVLLLDLKDFFPNITINRIIPVFRNLGYSQQVSLALSKICTLNDILPQGAASSPSLSNIICNRLDKRIACYSEKNDINYTRYADDLCFSSKHIEPHKIKMILKIINSEGFLINSSKYRLLGPQSSQKIITGINISNGAMKISNTYKRELSLAMYCIKKFGIRSHLQKLKIRDTYYLDSLYGKINYWLNIESTNKKAKFYKMFVRSLMQTYEP

SEQ ID NO: 2136 - protein, 352 aa, unidentified
  source 1..352: note = Related to NZ_WQGP01000012.1; note = Ruegeria lacuscaerulensis
MKRSLTQVWESYFEEIGLDTELSAKYIPYIARCADAKIPPIFEQDHLAQLLGLELPMMLSMVFGTKSFYRSFSIPKRSGGRREIVAPYPSLLEAQRWIAENILDSVKVSVCATGFRRGKSILDNARLHCERDQILKIDIKDFFPSISFQRIMRVFTSIGYPNEVAYLLSKICTLGDSLPQGAATSPTLSNIVCRRMDVRFYKVCKRHRLRYTRYADDIAVSGKSIPSGIARLFFEIIEDEGFEVNQQKVRFLGKADRKIITGLDITSGVPRVPRKFRRELKKDVYFVWSAGLSTHVSRRKIFNPQYIDHLMGRIEFWRQVEPECVQLATVQRRVNEIVSQQKSYSGTSKFQL

SEQ ID NO: 2137 - protein, 345 aa, unidentified
  source 1..345: note = Related to NZ_FNNB01000012.1; note = Sulfitobacter pontiacus
MNDNLLYKWHQYFEDIGLRSDLVRSYTPYIRRCISNGVPPIFESSHLAVLVGRNPADLSAMGFGAKSYYRSFKIRKRSGGLREIQAPYPSLLEVQRWIVGEVLSSVRLPVCSTGYREGVSILDNALVHCGRKEVLKIDLKDFFPSIGFSRVVKVFIDFGYPSNVAFLLANLCTLDRKLPQGAASSPLLSNIICRDLDQRIMKICKSRRLRYTRYADDIVISGKAIPKGIRRLFFEVIASEGFQVNEKKVRFLCEGDKKIVTGLDITSGKPRPTRQFRRDLKRDVYFVWSSGLSSHVARRRIFFPNYIEQLEGRARFWEHIEPDNVQMKKTMERVVELRKLYGRQR

SEQ ID NO: 2138 - protein, 343 aa, unidentified
  source 1..343: note = Related to NZ_CP044970.1; note = Brucella anthropi
MNQNSIQQWSSYLEDIGIYPDLREQYIEYVKKCVRFGVPPIFERTHLSMLTGRHLGDLMSMIFATEKFYREFKLRKRSGGYRRILAPYPSLLEVQQWIKDNILSKYELQNCVTGFRDGYSIVDNARMHCGRDILIKIDIRDFFPSINFNQIMGVFHKAGYANNVCFYLSRLTTLDNQLPQGAATSPSLSNIVCRNMDKRFLLLSKNHRLRYTRYADDISISGKHISDGMIRLFFEIVESEGFRINTDKFRILNANDKKIVTGLDISSGRPRVTREFRRDLQRDIYFVWSQGLAAHIARRRIFFPNYVDHLTGRVNFWRSVEPESAQLKKVINRLKIIRSQYMI

SEQ ID NO: 2139 - protein, 348 aa, unidentified
  source 1..348: note = Related to JACIDV010000004.1; note = Rhizobium skierniewicense
MATIPYQREHLSRWKAYLSDIGVRDDLKAIYLFHVKKSLEKGVPPIFEHEQLALLLGIDVAHLMRMLFGQKSFYREFSLKKRSGGYRTIRAPLPTLLECQRWINSNILSAVQLAQPAMGFRERHSIVDNARIHCGREELYKIDLKDFFPSIGFRRVMGAFVSLNYPKHVAFFLSTICTVDDELPQGAATSPTLSNIICNRLDMRLRAICRKRKLRYTRYADDITISGNKITDELKWIVHKIVEDEGFVINREKIRHVFAGEKKIVTGLDITSGVVRIPRQYRREVMKDVYFVWSSGLSNHMAKNRAFEPNYIAQLAGRLQFWKHVEPENPQMLKCLKRFKSVMLSYQK

SEQ ID NO: 2140 - protein, 344 aa, unidentified
  source 1..344: note = Related to NZ_BACT01000550.1; note = Methylobacterium sp.
MSKSSVEKWEAYFSDLGINQDYIREYIDYAGPMLRAGVPPIFEDVHLSLLIGRDLGTLYAMVFGTGKFYRSFTIRKRRGGKRLIQSPYPSMLECQKWISEHILQKSQVSRCATGFRRNQSILRNASLHCKRDVLLKLDIKDFFPSISVNRVIDIFNSFGFPPNISFLLGRLCTLNGRLPQGAATSPIVSNIICKQMDDRLYSLCLSKNLRYTRYADDIAISGVQIEVGTNYLIREIINAEGFLINEEKTRICGPRDKKIVTGLDITAGKPRLTRSYRRELQRDVYFVWSAGLASHLSKRKIFNPNYMEHLQGKIAFWESIEPESAQMKKCKDRVSKIRRLMNKM

SEQ ID NO: 2141 - protein, 318 aa, unidentified
  source 1..318: note = Related to NZ_SKCI01000005.1; note = Marimonas lutisalis
MAYVEPLVRNRVPVIFGFKSLSDLLGIEESTLSSIINSSSSFYRSFKIPKRSGGRRQIDAPYPSLLHCQRWIAQTILPSCKVSSVAHAYLPERSILTNARVHCGAQFLLKMDFKDFFPSISERRLVGLFSSLGYSTLVSVYLAKICTLKGATPQGSPASPMLSNVVARRFDLRLVGYARSRGLKYTRYADDIAISGEMDADEVQSFVTTCAVSEGFRINHKKTRYVESGQKMVVTGLDISTGTPRPTRKFRREVEKDVFYIWRYGVAGHVNAEKIYDPSYILRLKGKLDFWAQIEPDHPRLVRCRERFLSAAPDYLPL

SEQ ID NO: 2142 - protein, 383 aa, unidentified
  source 1..383: note = Related to NZ_GL883080.1; note = Asticcacaulis biprosthecum
MNDVDEKVSPPPMSIDLEQWAAFFLDKAKGNQQLISGYLHFLKHCKQKDIPPIFEDNHLSQLLGINIRDLAFYLSGAQGRYRSFHIPKRKGGVRLINTPTPLLLHIQQWILSKILYKLPVSEFAHGGVPGRSIFSNAKAHLGARCVLRIDLKGFFDTVPLALGISIFRAAGYSPNVSRSLALLCFENGCLPQGAATSSTLANLAANSLDKRLSALAKKYGLSYTRYVDDLTFSGRSIGPRFAIAVKSIVEQCRFVVNPRKTQLMRGSSPKFVTGLAVGGQTLRVPRAFRRNVKNQAFQLVKRGVAGHLLATGDNDPLILERVAGKLAFWLQAEPESKTARQLCAALAEYRKTVDTDVSLPQPRRIVPINYPDELFSDIDLFTT

SEQ ID NO: 2143 - protein, 379 aa, unidentified
  source 1..379: note = Related to JAAXEP010000005.1; note = Rhizobium leguminosarum
MNYVNLKVSPPIMPISVEDWRAFFSLSVKRDSKLVEGYIRFIELCENKGLPPIFEERHLAHLIGIPYSNMAYFFSVASGRYRTFTIPKRRGGRREINVPTPLLLAIQQWILHNILYKLPMSEFAHGGVPGRSILSNARAHLGAKAVLRVDLKQFFDSVEFPIGIPIFEAAGYSPKMSKSLALLCFENGRLPQGAATSSTLANLAAISLDIRLSKLANKFELTYTRYVDDLTFSGRSIGPGFISAVEGVVEQCRFVVNAEKTQLARGKSPKFVTGLAVGGDRLRIPRAFRREVRNQAFQITRRGVQNHLEAIESSDPLIIEKVLGQLAFWLQVEPESAMARKLFANLSLYRRTVSTDTLLPPPRRIIQIGTMPIDERRKE

SEQ ID NO: 2144 - protein, 367 aa, unidentified
  source 1..367: note = Related to NZ_CAKLBS010000005.1; note = Sphingomonas sp.
MSDTAEQWRAFFQEHVKQDTALVRGYLAFIDQCIVRNLPIIFEERHLSRLIGVDYRDMAFYFTSSGGRYRQFRIPKRLGGTREINVPSPLLLAIQQWILRNVLYKLPITDAAHGGVPGRSIITNAGGHLGARSVLKMDLRGFFDTILLPRGVAIFESAGYSPHLSRSLALLCFEGGRLPQGAATSPALANLAAVALDGRLEALAQKFGLIYSRYVDDLTFSGHSIGVRFSAIVQDIVEDTGFVVNSDKTRLMRGQSPKFVTGLAVGGGRLRVPRAFKRDVRNRAFQLAKRGVERHLEATESSDPLVLEQVTGQLAFWLQVEPESKTARQLFDALTEYRRGMTTSVKLPDPRRVASIDDSHWRVIRDH

SEQ ID NO: 2145 - protein, 372 aa, unidentified
  source 1..372: note = Related to NZ_CP022528.1; note = Qipengyuania flava
MDMVVEDWSSFFSKEIGKGSNLRGRSRILVDGYMAFIKHCADLGVPPIFENTHLRLLLGLDAAHFGALLTEHPGRYRKFTIPKRSGGERVISSPNPALLHVQKWILRQILDNAEVSDFAHGGIEGRSIVTNAREHLGAEALLKLDIADFYGSVGFGFGISTFQRFGYPRNVALSLTQFCFDGGSLPQGAATSASLANLSCRLLDRRCHGLAKKYNLTYSRYFDDISFSGSFINERLVEIVSEIAMESGFELNKRKTRLLLGKSTKYVTGISVGGDRLRLPKKTRRAIRNSAYLLTKTGDVQGFAESAKDPLIIETVLGQVAFWRHVEPEDDVAEELFQALVELRRETDVPVELPAPWRPSPIPELDLEKVSD

SEQ ID NO: 2146 - protein, 367 aa, unidentified
  source 1..367: note = Related to JAJTGN010000370.1; note = Roseomonas sp.
MSESSSEIALKWLTLWDEKIRHRKWLFDSYSRYVGNLVRNGFPPVFEMRHFAALVGLEETTIAWMLEKNAGFYRTLQIPKRLGGVREISAPSPTLLHVQRWILRNILDKVKPHDCCYGYIPQKSAIENAKQHLGSKTVLKMDLANFFPSIELRRGIAIFRAIGYTGRVSYCLALLCFKDGKLPQGGAASPSISNIVGKRMDLRLSTLASRNNLRYTRYADDMTFSGDEISWKFVAAVELIAREEGFCVNREKTRLIREGRAKVITGVSISSGEARLPRRTVRDIKNEAYNILRNGLEQHAERTHNFDPIAIERLLGRINFWLQVEPTNQTALNYRYRLLEYQKFLDAHGLGLPEDRSDRSLILGGPS

SEQ ID NO: 2147 - protein, 361 aa, unidentified
  source 1..361: note = Related to NZ_JROG01000004.1; note = Sphingomonas sp.
MTDSIRTIASNFQVDVRQWQSFFEENGSRRKRLIAGYLHFIEEMASRGLPPIFEGSHLGKLLGTTPVEFGRLTSAPEHHYRSFTIPKRSGDERTILAPTPLLLHCQRWVDAFILRKFPTHSAAHGYVVGRSNITNARVHIGNAQILCLDIANFFESVGVKKITEIFYEAGYPPNVAFLLARLCSYMGHLPQGGASSPQLSNIVMRDFDATMQTFAEKRGLRFSRYVDDIALSGDRVSDQDIQAVEEALEETGLTLNPHKIRFQRGRKKIVTGISIGSGRMLLPRELRRRFRNQAFLALKNLADAVDADPIALERHLGRFAYWKSVEPDNKRVQMVFDRLNELKNILVKRDTSLSDKDGFLS

SEQ ID NO: 2148 - protein, 345 aa, unidentified
  source 1..345: note = Related to NZ_BEWP01000006.1; note = Gluconobacter kondonii
MIDSIRTIASNFRIDVNDWRSFFEIHGGRQKRLIAGYLAFVEEMATHGLPPIFEGRHLRKLLGATQAEFGSMTSNPESHYRSFTIPKRNGGERTILTPTPLLLYCQRWIDLFILRKIPVHDAAHGYIAGRSNISNAKIHLGSAQLLSVDISNFFENVNAGKVAYVFQSAGYPPAVVFLLTRLCTYKGHLPQGAASSPQLSNLVMRGFDETLQSYANVRGLRYSRYVDDIVLSGRHIGPNDVNAVEEALKQVGLALNPKKIHFQRGRKKIVTGISIGSGRLLLPRELRRRYRNETFLTLKNITAATERDPIALERHLGQLAYWTNIEPGNERALHLLKQVRSVSTC

SEQ ID NO: 2149 - protein, 361 aa, unidentified
  source 1..361: note = Related to JAHVKP010000001.1; note = Qipengyuania aquimaris
MTDSIRSAASSYELDIELWSSFYSKRVERNKQLVAGYLKFIAEMADRGIPPIFEGHHLAKLLGLSLAELSRFTANPEKQYRTFEIPKRSGGAREISTPSPELLECQRWIDWYILRRLPVHDCAHGYVTGRSNRSNAVTHIGSRQVLHLDIRDFFGSIKFRRVISIFLKSGYPRNVAFLLARLCTQGGCVPQGGASSPQLSNVVMYDLDLEIAEFCKSNGLIYSRYVDDIAISGDLIRTTHIAEISRILLESGFLLNEKKTSLQRGRKKIVTGVSIGSGNPKVPRQMRRHFKNQAFIALKNLEHGEQIDEMSDPIHFERCLGQLSYWSMIEPENEKVAKLIDEIKNRLSDLEARLRPSRATR

SEQ ID NO: 2150 - protein, 348 aa, unidentified
  source 1..348: note = Related to NZ_PHSN01000004.1; note = Acidimangrovimonas sediminis
MSKSSEEWRHFFEERGVKDKKALLGYLQYIEEIEAKGLPPIFEMQHLSELIGVNKSYIAAVTKDSSAFYRDFEVKKRSGGVRVISAPHPTLLLCQRWINGEILQHVPIHDSAFGFAQGRSVVDNAKMHISGNHLLGMDIKDFFPSIHIDTVRDTFLGLGYPPNVSAIMARLCCKDGRLPQGAPTSPAISNLVCRNMDKEISDLVKPRSLIYTRYADDISVSGEDLGSDVLGKIEFILKSFGFLVNEGKTRISKGGHKKIVTGISIGTGRPKLPRKEVRSIKADAHALLSYGLLSYIERSEKPDPLVVERLMGRVAFWLQVEPENSTAVKLKSNLQDLSNQMDRGRFRL

SEQ ID NO: 2151 - protein, 351 aa, unidentified
  source 1..351: note = Related to SJNG01000007.1; note = Rhizobium leguminosarum
MTDFNYDEWQSFYHERVKGEHGLQLVRGYLAHAAALSARNLPPIFEFSHLAALLGVDKVTLATICHSPHNYYRTFAIPKRTGGRREISVPRPILMKLQRWILANIVELVNVHDAAHGFLKNRSIVTNARQHLGCNELLKIDILNFFPSISSGKVRSLFAELGYSGSVASALTRICTKNDGLPQGAPTSPAISNLAAKAFDVRIADHCAEEGLTYTRYADDIAISGERIAPHVRGKIIQILADTELKIHPVKSRLFGPKDRKIIAGISISSGKLMPPKDFVRSVRKDVYHVTTKGLLAHMAAIENFDPIYLERLLGRIAFWKHVTKNSDQSLRAEFALKQYMVVSGLAGEFQ

SEQ ID NO: 2152 - protein, 379 aa, unidentified
  source 1..379: note = Related to LMCG01000027.1; note = Pseudovibrio sp.
MNNVKDWEEFLRTHLSHEQQQLEGAIGYVKHLISQSLPPIFGEKHFSILTGVSEIFLRKLADNSAHYYRTFSIPKRKGGFRNISVPSPTLLHVQRWIVANILRKIPVHEAVHGYVASRSVITNAKVHREQESILRIDIKDFFPTIESQQVQALFAAIGYRPELSVLMSDLCCRNNVLPQGAATSPAISNWAFAPLDRKLKELSQKYSYQYTRYADDIFISGKHIHDRIESEVAQILLEQKFRINRAKTRFMGPNRPKILAGVSIASGRLCLPREKKREIKQNAYYIIKYGLFEHCNWKASRDPLILEKLLGKINFWLMVEPKNPTALELQQKLRAISLEFDNSLWEKFEPKRARDIQDIFKPTPAANFEFPSSMRNSKS

SEQ ID NO: 2153 - protein, 353 aa, unidentified
  source 1..353: note = Related to VFTI01000007.1; note = Mesorhizobium sp.
MKQSKYKSVLCGDLVPVQPYSQFLQEKTFRWPLKYAAKRGLIAYAERLESQGLPVILDIQHLAWHSGLEAKFIASVALDNRRYYSTRTIPKRRGGERSLFVPRPFLAGLQRWILDEILSKFGLHQSAFGFVKGRRTLDNARLHAASKCILKVDIRDFFGSIKYASVSDIFLGAGYSPKVSYYLSRICTLDDVIPQGAPTSPSISNIAMRQVDIQIAEFCAQNRLLFSRYADDICLSGDSIPESAFPFLSDCLSKFGLEIAEEKTVLAFEGQKKIITGISISSGELRLPKVYRRELRKTIHYICRFGLKSHKNKAGISDPIYRYRLLGQVEYWLSIEPNNSIALLGREILKESR

SEQ ID NO: 2154 - protein, 353 aa, unidentified
  source 1..353: note = Related to NZ_AYXE01000006.1; note = Mesorhizobium sp.
MIGTIILCGNPVPVQLYSEFLRERTFRWPLKSAAKRGLVVYAERLENKNLPVILDMQHLSWHTGIKSQFIANVVLDGARYYRSKVIPKRRGGERILFVPRPFLAGLQRWILDEALSKLKPHCSAFGFIKGRGIVENAKVHVNSKCIVKVDIKDFFGSVSYVTVYDIFLQAGYSPKISYFLSNICTLNDALPQGAPTSPALSNMAMFQADTQIAEFCSQNALLFTRYADDICLSGDLIPESAFPFLSDCLAKFGYEVAEDKTVLAFAGQKKIVTGISISSGKLKLPKEQRRKLRQAIHYISKHGINSHLANLAILDPIYRYRLAGQIDFWLSIEPDNEVAKLGRRIIRSTISAG

SEQ ID NO: 2155 - protein, 314 aa, unidentified
  source 1..314: note = Related to nan
MELKFSFPPPAIQTLADLADVLNVERWCLGKAINSSRSFYRVFQLPKRSGGYRSISAPVPSLLSVQKIIYKSILSSVVCSDRAHGFLSGRSVRSHAEVHLNGRDFLLTDIENFSDSIKIEDVVSIFSKIGYVHEIASALALLCTLDGSLPQGSPTSPVLSNIYSIRLDNRLSNICSDLNISYSRYADDMVFSGDKMSLGFLRLAQSIINSEGLNLNSKKTMFAKSPSRLIITGISISNRTLKLPKETKRALRFKAHFIARNGILSELERQETADPFYIDRIIGQLCFWSFIEPENRFPKIYKNVIKNIINNNPS

SEQ ID NO: 2156 - protein, 321 aa, unidentified
  source 1..321: note = Related to SEDZ01001888.1; note = Proteobacteria bacterium
MVGRIELPFRTIRGLARQAEVRHSVLRAVLSKIESNYRLVRIPKATPGEYRSLSIPKPTLKQIQRTIYDSALKGIAISSSAHAYAPGRSIVSHARIHAGSTDFIQIDIKEFFPSVSPARVRVLFDELGFGSDVAQALTALCTFQGGLPQGAPTSPSISNAILKHLDEDLDAYAVSRSCRYSRYADDLVISGSSLDVADFEATIALVAKHGFRINDRKSRLMMNPSKVIITGISISSGVLKVPKSFKRQLRQMSHRLLVSPQLTISEDGHVDPFLFDRVIGRLTFWRMVEPEAVFPRRQIELLVSRYPSGVVSSRPERLPFV

SEQ ID NO: 2157 - protein, 311 aa, unidentified
  source 1..311: note = Related to WIEF01000046.1; note = Rhizobium leguminosarum
MFEENLAIGSLTQLSLASGIPSSVISSLVFEREGRYRKHFIAKRDGGARTISVPLPALLQVQKTINKEILSTVDIHDAAVGFRKHHSIIDHVKPHLGNKKFAKFDIKDCFGSIAFNAVFSIYLRITNDPALANSLSELSTDEGKLPQGAATSPSLCNISLKFLDERIFGLCQRLGLTYTRYADDLLISGTKLDLYIYRTLKSYIEDCGFLTNEKSRLMEDPQRLIICGISISESDLKLPKQKKRDIRQAAHFLVNRPIVSESISDELFDPFHVDRVLGRLQFWRFVEPEAEFPIKYIPIIKERIASQIDTQ

SEQ ID NO: 2158 - protein, 347 aa, unidentified
  source 1..347: note = Related to LR701476.1; note = Roseovarius sp.
MTGEDLREWRELYNSRISGNRGRALADGYIKYIESLQALGIPPIFEFSHLADLVGIEYETLAKVASRPQDFYRTFAIPKRSGGIRKIDTPRPILMQIQRWLLDQIVSKSRVSEQAHGFVVGRSIITNARTHLGCRELLKMDLKDFFPSVTASTVHYIFKDMGYPPNVCRALSRLVTLGACLPQGAPTSPALSNIACVELDSNLNNLALKYDLTYTRYADDLTFSGSSIPSDMTSLVANLTSKAGFSTNDKKTILSPAGHRKIVTGISISSGELKLPRTYIRNLRQRIHLLINHGILHPNNDSTAWDPLVLDRLLGMVSFWVSVCPESEAAKRAYSELKNFMMKFQTV

SEQ ID NO: 2159 - protein, 323 aa, unidentified
  source 1..323: note = Related to DXFG01000149.1; note = Candidatus Blautia pullistercoris
MKSDIWKYCNKSHTREFLLSLGLTGKLNLPEEKQLSLLYGLSNHAEEHYQKVQIPKRNGTWRTLYVPDSLLKYIQKQILHKILMQFPVSSCASAYKKGCALKENAAPHSGKPIVLKMDIWDFFGNITFISVYQHAFPGELFPPSVRTLLTHLCCYKDFLPQGAPTSPYISNLVLAPFDHYMENWCKGRNITYTRYCDDLTFSGNFEPEMLIPKVSSFLLRMGFEVNPKKTKVCRQGQQQIITGLIVNEKAQVPKAYRRSLRQEIYYIEKFGLSEHLAHIHSDLTPERYLEKLKGRIRYILQINPQDKVFQEAFTHLNKIHISH

SEQ ID NO: 2160 - protein, 323 aa, unidentified
  source 1..323: note = Related to DWUX01000243.1; note = Candidatus Blautia stercoripullorum
MSSDIWKYCDKNHSREFLLSLNLTGNLNLTKEKQLSLLYGLSNHTEEHYQKIQIPKRNGAWRTLYVPDSLLKYVQKQILHKVLTQLPVSYCASAYKKGCSLKENAAPHTGKSIVLKLDILDFFGNITYISVYQHAFPGELFPPPVRTLLAHLCCYRDFLPQGAPTSPYISNLVLFPFDRYMERWCKNQNITYTRYCDDLTFSGSFEPEAVIRKVSSFLLRMGFEINPKKMKICPQGQRQIITGIVVNEKTQVPKTYRRNLRQEIYYIEKFGLSEHLAHIHLDLTPEKYLEHLKGKLRYVLQINPQDREFQEALARLNRICISH

SEQ ID NO: 2161 - protein, 327 aa, unidentified
  source 1..327: note = Related to DXBG01000050.1; note = Candidatus Blautia pullicola
MNSDLWKYCTGSQCRDFLLSLNLTGNMKLSDEKKLALLYGLANHTQDHYKRVEIPKKTGGFRTLYVPDSVLKYVQRQILSNVLSQFAVSPCATAYQKGHSLICSAKPHLQKPMLLKLDISDFFGSITYISVYQHAFPGEIFPPSVRTLLTHLCCFQDMLPQGAPTSPYISNLVLAPFDKYMEKWCRDRAITYTRYCDDMTFSGSFSPGQVTAKVRGFLGRLGFQLNPEKTRVIHQGQRQIVTGIVVNEKAQTAKAYRRRLRQEIYYIEKFGIYEHLKNIHSSQTPENYLKSLEGKIRYCLQINPQDVQLLNPWEKFKKIKTEGISES

SEQ ID NO: 2162 - protein, 324 aa, unidentified
  source 1..324: note = Related to JAGZGI010000008.1; note = Lachnospiraceae bacterium
MAPSLWKYYTKEQTQDFLLSLHLTENLTHTPTAEMALLYALANHADEHYEKISIPKRNGTKRILHAPDSVLKYVQTQILRQVLREFPVSGYACAYQKGISLRSNAFPHQAQKLVLKLDIQDFFDSISYISVYQHGFPCERIPDSVRTLLAHLCCYKDRLPQGAPTSPYLSNLVMKPFDEYMGNWCRVREIAYTRYCDDMTFSGDFHPKEVLKKAEGFLNRLGFELNHKKTRICSQKNRQEITGIVANEKLQVPKNYRRRLRQECYYIRKFGLENHLSHIEYTGDKQKYLQRLLGKIQYVLQINPEDGEFCEWKRWITNSFFIHD

SEQ ID NO: 2163 - protein, 324 aa, unidentified
  source 1..324: note = Related to NZ_CP030280.1; note = Blautia argi
MNSSLCNYCTENQIQDFLLSLHLTGTLTHSPKAELALLYGLANHAEEHYERVLLPKKDGSKRILHVPDSVLKHVQKQILRQVLMEIPVSSYSCAYQKGSSLSQNAAPHKGQKLLLKLDIHDFFGSISYISVYQHGFPCERIPDPVRTLLAHLCCYKDMLPQGAPASPYLSNLVMKPFDEYMGNWCREREIAYTRYCDDLTFSGDFNPKEVYRKAKGFLNRLGFEVNSRKTHIISQKNRQEVTGITVNEKLQVPKNYRRQLRQECYYIQKFGLENHLKQTGCQDSSAKYLQRLLGKIEYVLQVNPEDMEFQELKKRMKVYRKNDE

SEQ ID NO: 2164 - protein, 322 aa, unidentified
  source 1..322: note = Related to CP022413.2; note = Blautia hansenii
MENSLWKYNTHNDSLDFLRSLHLTDGLNLASDNQLAFLYALSNHAQNHYSQVFIPKKNGKKRKLLIPDYLLKQVQTNILKHILVQFPVSPYATAYKSGCSTVFNAFPHLNQKLLLKLDIHDFFGSITYIDVYQKVFKSELFPPSVRTLLTHLCCYHDALPQGAPSSPYISNLILKPFDNYIGNWCKKQQITYTRYCDDMTFSGDFNPVLVKKKVQSFLMRLGFSLNPEKTHVCSQKNRQEVTGLVVNQKLQTSKEYRRRIRQECYYIKKFGLKDHLAHIGYKKGETHYLQSLNSKINYILYVNPSDSEFLLLKKELSSFFQV

SEQ ID NO: 2165 - protein, 323 aa, unidentified
  source 1..323: note = Related to DVGS01000147.1; note = Candidatus Egerieimonas faecigallinarum
MQNGLWKYCSSAQETEYLLSLDLAGALTASREKQAALLYALSNHAEEHYRRVRIPKKHGGFRTLDVPDRLLKSVQQRILTQVLEHLPVPECARAYRKGVSLLENAEPHAGQRCVLKLDIRDFFGSITYLSVYSLAFPGEFFPPAVRTLLTHLCCLHDSLPQGAPTSPYISNLVMAPFDRYISGWCEARGITYTRYCDDLTFSGDFNPNEVKSAAEGFLLRLGFELNPDKTRFFSSSRRQEVTGIVVNDRPHLSKSYRRKLRQEWYFLKKYGTENHLQHMGSPLTPEKYLQSLKGRILYVLSIDPSDREFADMLRELSAERSSI

SEQ ID NO: 2166 - protein, 330 aa, unidentified
  source 1..330: note = Related to DXGZ01000117.1; note = Candidatus Mediterraneibacter vanvlietii
MHYDIWKYCTKDQWIQYLLSMNLTGNLRLSDEKKLALLYELSNHAEEHYTTIRIPKHSGGLRVIRQPDSLLKYIQRQILFRILVQIPVSDCAFAYRKGFSAADNARPHAGKDTVLKLDIHDFYENITFMAVYQHAFPETLFPPPIRTLLTHLCCYDSILPQGAPTSPCISNLVMRPFDETMKQWCGEQGITYTRYCDDMTFSGHFPGNTAQEVIDKTRGFLLRLGFELNQKKTRLIRRGCRQEVTGYTVNDRVRTSKDYRRKLRQEWYYIRKFGLEEHLKTLLGTSHVTDAQKNSYLQSFTGRIAHVLRTDPQNTVFLAIQKEVKLMRNS

SEQ ID NO: 2167 - protein, 336 aa, unidentified
  source 1..336: note = Related to DXEY01000047.1; note = Candidatus Mediterraneibacter colneyensis
MSQELWKYCTKEQCRDFLLSLRLTGSLCHTDEKRVALLYGLSNHVDEHYHIRKLPKRGGGCRTICEPDPLLKYVQKQILCRVLSQFSPAPCACAYRKGMSLRDNALPHTGKEKVLKLDIRDFFGNITYSSIYQHVFPGTIFPPSVRTLLTSLCCYDSVLPQGAPTSPCISNLVMKPFDQYMENWCAKRSISYTRYCDDLTFSGSFDHVQVIRKVRSFLKRMGFELNTGKTRIITRGSRQEVTGLTVNDSPGVPRPYKRALRQEWHYIKKYGISSHLERTSGISSITLEAKKHYLIQLAGKAGYILQIDPQNLFFQEMRQEILQLIQETGWQDASQN

SEQ ID NO: 2168 - protein, 354 aa, unidentified
  source 1..354: note = Related to NFKT01000023.1; note = Proposed Lachnoclostridium sp.
MGAVLINHDTQIEEKQSEETTDSPAGHGLWKYCTPAQCRDFILSLNLTGSMRLSSEKQLALLYGLSNHTEDHYAKKKIPKRNGGFRTLYAPDPLLKYVQRQILRKVLVQFPVSGCACAYRSGASTRDNALPHVGKEKILKLDIHDFFGSISYISVCQHAFPGTIFPPQVQTLLASLCCYDSMLPQGAPTSPYISNLVMKPFDRYMEEWCRQRDISYTRYCDDMTFSGSFDARKVTAKVRAFLLRLGFELNEKKTRIITQSGRQEVTGLVVNDHIQVSKAYRRRLRQEWYYIRKYGLKGHLARINYSNTEEAYLASFSGKVNHILQCCPEDAYFQEIKLALQSRTDTRTDAATYH

SEQ ID NO: 2169 - protein, 328 aa, unidentified
  source 1..328: note = Related to JAJEQX010000005.1; note = Ruminococcus sp.
MSGDLWKYSTKEHWVRFLLSLGLTEPLQLSESGALPLLYELSNHPEAHYTLHRIPKRSGGVRLLHEPDTLLKTVQRQILKNVLKPQSVSDCARAYRDGVSLKDNASAHTGKALILKLDIHDFFGSISYLNVFQHAFPGTLFPPAVRTMLTALCCCDDALPQGAPTSPYISNLVMKPFDNYTDIWCRQRGISYTRYCDDLTFSGDFDPREVQCKTEMFLLRLGFELNRKKTKVIRSSSRQEVTGLTVNEKVSVPKEYRRKLRQEWHYIEKFGLEEHLKRTAGPDTASPELTKKYLLSLSGRIGHVLQADPESAYFREMASNVKTLLQNG

SEQ ID NO: 2170 - protein, 333 aa, unidentified
  source 1..333: note = Related to JAGTTS010000004.1; note = Clostridiaceae bacterium Marseille-Q3526
MQAVCRGEQDIWKYCTKEQWKEMICSFGLLGDPEIPQEIQMAVLYRFSRHSSCYYREKKIPKRFGGVRCLMIPDSGLKAVQRRILKHILSERPVSSCACAYRKGVGIRDNAAAHVGQESVLKLDIEDFFGSITSSAVYGLAFPGTLFPPPMRGLLTALCCCKGRLPQGSPASPAISNLVMKPFDDSMDLWCRQRGIRYSRYCDDMTFSGSFEPGEVIRKVQSYLSELGMRLNRRKTGVYAKNCRQEVTGITVNQKAQLSKDYRRKLRQECYYCRKYGIESHMERLGAGGQEAEEQVLARLLGKIEYLLSVDPANREFQAQREYFRKLMKTLHT

SEQ ID NO: 2171 - protein, 337 aa, unidentified
  source 1..337: note = Related to NZ_CP085988.1; note = Clostridium sp.
MGETGLWNHCSSRQCVEMILSMKLLGYASLTEEQELSVLYELSNHASRHYREAVIPKRTGGVRHLMVPDSTLKAVQRRILRNVLSGLELSEQAYAYRKGVGIRENAAVHTGQEKILKLDIHDFFGSITSSSVYGLAFPGTVFPPQVRGLLTSLCCLRGRLPQGSPASPAISNLVMRPFDEHMGLWCRERNIRYSRYCDDMTFSGSFDAGKVIRKVSGFLSERGMRLNWKKTGVYGKNCRQEVTGLTVNEKVQLPKELRRQLRMECYYCRRFGTESHMERLGLAESESEEHFLMRLLGRLEYALSVSPGAKEFEQEREYFREQLKALRERRAQKNQKG

SEQ ID NO: 2172 - protein, 350 aa, unidentified
  source 1..350: note = Related to JAGZWN010000002.1; note = Clostridiales bacterium
MSGNLWKYCTTDQWQDYLLSLHLGGSNLPLKKEMAVLYHFSNCQEEHYRKGRIPKKSGGYRTLWIPDGQLAGIQRRLLGRVLETMEVSEYAAAYRKGMGLADGARPHVGKPVVVKMDVKDFFGSIGYLTVYRKAFPPWLFPDPVRGLFASLCCFRETLPQGAPTSPYISNLVMRDFDCSLGSWCRERGIAYTRYCDDLTFSGDFDPGQVIRKATAFLEAMDFSVNREKTRVFTRGARQEVTGLVVNEKLQVPGKTRRRLRQEWHYCRMYGVEEHLKQTGLEESPEHYLERLAGRIQYVLSVDPGNSVFGRMKEEVARELAVRRATGASESFRPGSESDGKIRTKNRQKMD

SEQ ID NO: 2173 - protein, 328 aa, unidentified
  source 1..328: note = Related to HF995414.1; note = Firmicutes bacterium CAG:646
MDERTNIWKYCSREQSMEFLLSLRLTEDFRGAQDHRLAQLYEISNHPQRHYRKAVIPKKTGGNRVLWIPDTELAIIQRRILRNVLEERPVSSYAAAYRRGQGLKDHAECHRNQKLLVKVDIHDFFGSISWMQVYQKAFPWYLFPPSVRNLLTNLCCFREALPQGAPTSPAISNLVMASFDESMGGWCEERQISYTRYCDDMTFSGEFDPGMVIRKVSAYLEQMGMVLNRKKTRVYTRGSRQEVTGLTVNERVQVPRFYRKKLRQEWYYCKKYGVKEHIKALSLEAEPAAYLAGLMGKVQYVLQIDPENREFLQYRKEIQEEITKNYEN

SEQ ID NO: 2174 - protein, 339 aa, unidentified
  source 1..339: note = Related to DXHY01000007.1; note = Candidatus Eisenbergiella stercoravium
MSGELWKYCGKEQEKAFILSLNLLPASMRERMSGEAQLALLYVMSNHVEQHYRETRIPKKGGGSRRLLVPDGMLKGVQRNILHHCLDGRSVSRHACAYRRGLSPVDNAAPHAGGERDKILLKLDIRNFFDSILFPGVYGAAFPESLFPPAAAGLLTHLCCCHDRLPQGAPTSPAISNLVMKPFDDYIGKWCEERKVIYTRYCDDLAFSGRFDAKEVYRKVRGFLAAMGFELNEGKTVIAGRGRKQTVTGLVVNERPRTSAQYRRKIRQEMYYCRKFGVEEHLRMAGLLNGREDAGETSEKADAFLQSLSGRIGYVLQMEPENREFLEYQEICRKMMDSH

SEQ ID NO: 2175 - protein, 342 aa, unidentified
  source 1..342: note = Related to DWUW01000200.1; note = Candidatus Eisenbergiella stercorigallinarum
MSSKLWKYCGTQQEKEFLLSLNLLPSGIRERMSGEAQLALLYSLSNHTQRHYRETRIPKKGGGSRRLLVPDGLLKGVQRNILHHCLDGRSISAHACAYRRGRSPIDNAAPHAGGEKGRLLLKLDIRNFFDSILFPRVYGAAFPESLFPPAAAGLLTHLCCCYDRLPQGAPTSPAISNLVMRPFDDYIGKWCEARQITYTRYCDDLAFSGVFDAGEVYRKVRGMLEAMGFALNSRKTVVANQGMRQTVTGLVVNERVRTSAQYRRKIRQEIYYCCRYGVREHLKAVGSLSGKETEGEAATKEQAFLQSLFGRIAYVLQTEPENQEFLEYRDGCRSMLLEKERG

SEQ ID NO: 2176 - protein, 349 aa, unidentified
  source 1..349: note = Related to DXDD01000050.1; note = Candidatus Eisenbergiella pullistercoris
MSSQLWKYCGTQQEKEFILSLNLLPAGMRERMSGEAQLSLLYALSNHTERHYRRARIPKKSGGSRRLLVPDGLLKSVQRNILRHCLDGRSVSAHTCAYRRGLSPIDNAAPHAGGEKDKILLKLDIRDFFDSILFPRVYGAAFPESLFPPAAAGLLTHLCCCYDRLPQGAPTSPAISNLVMKPFDEYIGKWCEARQISYTRYCDDLAFSGVFDVGEVYRKVRGMLEAMGFELNRKKTVVARQGMRQSVTGLVVNDRVRTDAAYRRRIRQEMYYCTKFGVREHLKVAGKPDGMETEAEREAETAAEEYAFLQSLRGRIGYVLQMEPENREFLEYLEEWKRLWEELENRERK

SEQ ID NO: 2177 - protein, 345 aa, unidentified
  source 1..345: note = Related to DWWS01000044.1; note = Candidatus Eisenbergiella merdavium
MSSNIWHACTDRQVREFILSLNLLPDGSREELSGEKQLALLYALSNHPERHYRKVRIPKRSGGSRRLLVPDGLLKGVQRNILHHCLDGRSVSEHACAYRRGVSPMAGAAPHAGGGKDKVLLRLDIRDFFDSILFPRVYGAAFPESLYPPAAAGLLTHLCCFYDRLPQGAPTSPAISNLVMKPFDDYMGKWCREREITYTRYCDDLAFSGAFDVGEVYRKVRGLLEAMGFELNSGKTAVLKQGMRQTVTGLVVNERVRTSAQYRRRLRQEIYYCRRYGVREHLKAVGRLTGAETEADVSALETAYLCSLLGRIGYVLQTEPENAQFLEYREICRSLIEGADAAEWG

SEQ ID NO: 2178 - protein, 361 aa, unidentified
  source 1..361: note = Related to DWWH01000066.1; note = Candidatus Eisenbergiella intestinipullorum
MSGRLWKYLTPQQEREFILSLNLLPASCRKRMSGEAQLALLYAISNHVERHYRKVRIPKKDGKSRRLLVPDGLLKGVQRNILRHCLDGRSVSEYACAYRRGLSAADNAAPHAGGGKDKLLLKLDIRDFFDSILFWQVYGAAFPGSLFPPAAAGLLTHLCCCGDRLPQGAPTSPAISNLVMKPFDEFMGAWCRQRQIVYTRYCDDLTFSGAFDPKAVYHKARHLLEAMGFALNAEKTALRNRGMRQSVTGLVVNERVRTGVPYRRRIRQEMYYCRKYGVGEHLQAVGRLTGTETQEEAAEAERAFLCALLGKIGYVLLLEPENREFLEYREICRGMQAEQEKASCPPACGEREQKRRGGKEK

SEQ ID NO: 2179 - protein, 328 aa, unidentified
  source 1..328: note = Related to AP025576.1; note = Lachnospiraceae bacterium
MGNTQLWKYCTTRQCQDFILSLRLIPGGEKMSREKQLACLYTLSNQGIKNYRRVTIAKKGGGSRQLLVPCGLLKAVQRNILHHVLDERPVSPCALAYRKGTDIRANASAHLGKNKVLKLDISHFFDSILFPRVYGAAFPDTLFPPAAAMLLTSLCCCKERLPQGSPASPAISNLVMRPFDEYMEGWCREREITYTRYCDDMTFSGSFDAPALITKVRSYLEAMGFSLNEKKTKLLTEGVRQSVTGIVVNEKLQVSRDYRKKLRQEVYYCRKYGIEAHLARIEAAEGIRWDKERYIGSVLGRLRFVLQINPQDEEFARYCRDWKEQYLG

SEQ ID NO: 2180 - protein, 327 aa, unidentified
  source 1..327: note = Related to NZ_MCGI01000005.1; note = Eisenbergiella tayi
MGNSPLWKYCTREQCQDFILSLRLIPGGEKMSREKQLSCLYTLSNRGSRNYRRVTIDKKDGGSRTLLVPCGLLKGVQRNILHHVLDERPVSPCARAYRKGTDIRGNASCHLGKRLVLKLDISHFFDSILFPRVYSAAFPETLFPPAAAMLLTSLCCCNERLPQGSPASPAISNLVMRPFDIYMDGWCRERGIAYTRYCDDMTFSGDFDAAALCSKVRSYLEAMGFTLNEKKTKLLTGDVRQSVTGIVVNDKLQVSREYRKKLRQEVYYCKKYGIDAHLERVEADTGIRWEKELYICSVQGRLHFVLQVNPQDDEFAGYCREWKELFM

SEQ ID NO: 2181 - protein, 328 aa, unidentified
  source 1..328: note = Related to NZ_QVLV01000005.1; note = Eisenbergiella sp.
MSNSQLWKYCTKEQCQDFILSLDLVPHSAGMSREKQLACLYMLSNRGAENYHKEILTKKDGGTRTLMVPCSLLKAVQRNILHHVLEQRPVSDCARAYRKGTDILANAGPHTGRKQVLKLDISHFFDSILFPRVISAAFPDTLFPPAAAALLANLCCCRERLPQGSPASPAISNLVMRPFDESMRRWCEARQIVYTRYCDDMTFSGDFDPAAVYHKVKSYLEAMGFSLNEKKTKLLKDGVRQSVTGIVVNEKPQVSRDYRKKLRQEIYYCMKYGVTGHLERLREKTGNAVEEQRYICSVLGRIQFVLQVNPEDREFAEYCRIWKERFVK

SEQ ID NO: 2182 - protein, 362 aa, unidentified
  source 1..362: note = Related to RAYB01000053.1; note = bacterium 1XD21-70
MDIGESGGQGSAWTVSRKDLWRYCTDAHCQEMILSFRLLGENGWPREKVMACLYALSNHSERHYERISIPKKDGSRRILLAPDPLLKHVQKNLLRHVLEGLSIAGCATAYHRQAGIICNASGHVGKPLVMKLDIRDFFGSITFPMVLCHAFPVKYFPPPVGVLLTSLCCCGEYLPQGAPTSPAVSNLVMKPFDEYMAGWCRERKISYSRYCDDMAFSGDFDAWEVRQKAENFLRAMGFELNRKKTKVLPQNMRQTVTGLVVNERVQTSAQYRRKLRQELYYCRKFGVEGHLRQSGEAKHFLLPDGSLDKQRYLQALAGKVRHVLLTRPEDAWFLEAKGWLLTERKRQEGRQSRREMGTENGI

SEQ ID NO: 2183 - protein, 353 aa, unidentified
  source 1..353: note = Related to QXWS01000023.1; note = Clostridiaceae bacterium
MKETAISSSKDLWHYCTEDHVRTMLLSFRLLGDNDWPEEKILACLYSLSNHTQDHYKRIQIQKKSGGTRTLLAPDPLLKYVQRNLLHHVLDGLSLADCATAYRKNRDDLYKRGGQEDRDGSAYKECFGIVPNARIHVGKPLVMKLDIVDFFGNITFPMVLHQVFPARMFPPAVGNLLTSLCCCGEYLPQGAPTSPAVSNRVMKPFDEFMEAWCRERGISYSRYSDDLTFSGDFSPKEVRGKVKGFLGAYGFELNRKKTRILSLGTRQKVTGLVVNEKAQTSKEYRRKLRQEIYYCRRFGVKEHLQFQNKGEPACEADQERYLYRLLGKVNYVRMTRPEDKWFLEARQWLKGML

SEQ ID NO: 2184 - protein, 322 aa, unidentified
  source 1..322: note = Related to RAYY01000002.1; note = bacterium D16-56
MLLSFHLLGENDWSEDKILACLYALGNHGEKHYKKIRIPKKSGGFRILLAPDPLLKYVQKNILHHVLEGFSVSDQATAYRKKGNPANAVCGCVENASLHRGKPLIMKLDVENFFGNITFPMVLHSAFPIQYFPPEVGKLLAELCCYLEYLPQGAPTSPAISNLVMKPFDEYMAEWCRNRGIVYSRYCDDLTFSGDFDPEEVLKKSEGFLKAMGFELNRKKTRVLSKASRQTVTGLVVNEKVQPSREYRRKLRQEIHYCRKYGVEEHLRRRGTQGMLFAGKEDDRGKYLYSLLGKINYVRLTRPDDTWFLEAEKWVREQLSER

SEQ ID NO: 2185 - protein, 335 aa, unidentified
  source 1..335: note = Related to CP069520.1; note = Enterocloster bolteae
MARTDLWKYCSAEQCREMMISFRLIGAGDWPPEKIMGCLYALSNHAEKHYQRVNIPKRSGGFRTLLVPDPLLKNVQRNLLHHVLDGFTVSDSAAAYRKGASVAANAGKHQGRKIVMKMDIEDFFGSITFPMVLHHAFPTAYFPPAVGVMLASLCCCHDRLPQGAPTSPAISNLVMKPFDEYMEAWCGEREIVYSRYCDDMTFSGVFDGSEVKGKVYGFLRSMGFEPNLRKTRILTRGTRQVVTGLVVNERVRVPAPYRRRLRQEIYYCMKYGAKEHLTRTGRQAYLNDGDGGTRRYLESLLGKTAYVLLASGDGDAWFREAQVKLREMLGQDMCL

SEQ ID NO: 2186 - protein, 332 aa, unidentified
  source 1..332: note = Related to JAKNTH010000001.1; note = Enterocloster sp.
MAQADLWKYCSTEHCREMLLSFRLLGTRDWPPEKIMGCLYALSNHAQRHYRKVRIPKRSGGYRTLLVPDSLLKEVQRNLLHHVLDGFAVSASAAAYRKGASAAANAGIHQGRKIVMKMDIEDFFGSITFPMVLHHAFPAAYFPPPVGAMLAALCCCHDRLPQGAPASPAVSNLVMKPFDEYMEAWCGERDIAYSRYCDDMTFSGVFDTAEVKGKVYGFLRSMGFEPNQRKTRILTRGTRQTVTGLVVNDRVQVPAPYRRRLRQEIYYCLKYGAEEHLRRTGRDAYLKEGDAGVKRYLESLLGKTAYVLLAGGGDAWFREAQVRLKSMVRQGI

SEQ ID NO: 2187 - protein, 326 aa, unidentified
  source 1..326: note = Related to DWYS01000122.1; note = Candidatus Enterocloster faecavium
MGDGEIWKYCGKEQAVEMILSLQLLPSSGWQRERILACLYALSNHPEEHYHPVWIPKRRGGYRRLDVPDPLLKQVQRNILHHVLEGFSVSPAAAAYRKNRCAADGAAVHIGKPLVLKLDIHDFFGSITFPMVLGYGFPAAYFPEEVRVLLASLCCCRQRLPQGAPTSPALSNLVMKHFDEAMAAWCGPQNIAYTRYCDDMTFSGDLNPGAVIGRVRGFLETMGMELNHSKTAVCSQFSRQTVTGITVNQVCQLPREDRRKLRQEVYLCLRYGTGESRPADSVRRLEQILGKVSYLLQVRPDDRWFLEQREALKEMLKKERGQVYES

SEQ ID NO: 2188 - protein, 326 aa, unidentified
  source 1..326: note = Related to DWWB01000077.1; note = Candidatus Enterocloster excrementigallinarum
MGKGDVWKYCEKNQITEMILSLELLPSSRWERDQILSCLYALSNHPEEHYHPVWIPKRSGGFRRLDVPDPLLKQVQRNILRHVLEGFSVSPAAVAYQKNRCAADGAVIHRGKPLVLKLDINDFFGSITFPFVLGYGFPAAYFPEEVRVLLASLCCCRQRLPQGAPSSPALSNLVMRSFDDIMVSWCAAQGIVYTRYCDDMTFSGDFNPALVIGRVRGLLEPMGMELNRKKTEVCSQADRQVVTGITVNQVCQLPREDRRKLRQEVYLCLRHGAEGIEPAASVRRLERILGKVSYLLQVRPDDRWFLERRDMLKDMLRKERKRVYES

SEQ ID NO: 2189 - protein, 323 aa, unidentified
  source 1..323: note = Related to JAJCIC010000013.1; note = Lacrimispora sp.
MPEHLGLWKYCDKEQCKDMLLSFRLVGSDSWTDGKIIACLYALSNHAKEHYHKTELPKKRGGRRILMVPDPLLKQVQRNLLHHVLEGFSVSPAACAYRKGASPLANASLHTGKRLVLKLDIRDFFGSITFPMVLHHVFPSTYFPPAVGTLLASLCCYRDRLPQGAPTSPAVSNLVMKPFDDHMLEWCRSRRITYSRYSDDMTFSGDFDPGEVIRKTESFLRAMGMELNREKTRVCAAGGRQSVTGIVVNEKPGLPRDYRRALRQELHYCMIYGVEEKSAACLRSLLGKTVYLLSVNPEDQWFQGAEAFLREELKKIEEKGEEK

SEQ ID NO: 2190 - protein, 317 aa, unidentified
  source 1..317: note = Related to DWWT01000008.1; note = Candidatus Enterocloster excrementipullorum
MNNMDIWKYASAEQYKDMLLSFALLSGPDWPPKRIMACLYALSNHPEAHYHALSVPKKSGGVRRLLAPDPLMKQVQRNLLHHVLEGFSPSEAAMAYRRGVSAKDHAARHCGQRVVLTLDIQDFFDSITFPQVLARCFPIIYFPRPVGVLLASLCCAYERLPQGAPTSPAVSNLVMKPFDEHMLAWCGERDITYSRYCDDMTFSGDFDFREVKGKAEGFLEAMGMALNRKKTRVSFRGGRQAVTGLVVNERPGVPREYKRRLRQEIYQYRKFGLPGTETDSEKYRARLLGKIRYVLSVHPEDAWFAQAEQELKRRNPS

SEQ ID NO: 2191 - protein, 328 aa, unidentified
  source 1..328: note = Related to NZ_PGET01000001.1; note = Clostridium celerecrescens
MYHTDLWKYCTKEYCRDMLLSFRLLGNTSWPDQKVMACLYAFSNHTERHYRTVRIPKRDGRQRSLMVPDYMLMRIQRNILHHILDGYAVSSSATAYHKGAGVVSNARVHTGKHVVVKLDIKDFFGSISFPMILKSVFPVRYFHPAVGTMLTALCCCNDFLPQGAPTSPAVSNLVMKHFDESINKWCENKGISYTRYCDDMTFSGDFNPGLVIRKVSGFLNSMGFELNETKTRILYRNGRQAVTGIVVNEKLQVSLDYRRKLRQEIFYCQKYGVNSHLKRIGNAAGIPENQYLLSLLGRIQYILLVNPEDQWFQEAEQKLLAVLGRKSE

SEQ ID NO: 2192 - protein, 328 aa, unidentified
  source 1..328: note = Related to NZ_AZUI01000001.1; note = Clostridium indolis
MYQTDLWKYCTPDYCRDMLLSFRLLGNTRWPDQKVMACLYAFSNHAERHYGIVLIPKKNGKSRKLLVPDYMLMKIQRNILHHILDGYSVSGCATAYHKGAGVVSNAAVHRGKNVVVKLDIKDFFGSISFPMVLSSAFPVQYFPTSVGTMLTALCCCNDFLPQGAPTSPAVSNLVMKHFDESINKWCEGKGISYTRYCDDMTFSGDFNPGLVIRKVSGFLNAMGFELNETKTRILYRNGRQAVTGIVVNEKLQVSRDYRRKLRQEIFYCLKYGVKSHIEKLGNDARISEDQYVLSLLGKIRYILLVNPEDHWFQEAEEKVLAVLGRKAG

SEQ ID NO: 2193 - protein, 332 aa, unidentified
  source 1..332: note = Related to NZ_JHWJ01000001.1; note = Clostridium aerotolerans
MYGTELWKYSTPEHCREMLLSFKLLGEDWPDQKAIGCLYAISNHTERHYHTVLIPKSDGTKRKLLVPDDLLKMIQRNITKHVLSEFEVSSCAAAYRKGTSVLTNASVHTGKKLVLKLDIEDFFGSITFPMVLNGAFSGRYFPPSVGTMLTALCCYRDYLPQGAPSSPAISNLVMKPFDDYMKVWCEKRNISYTRYCDDMTFSGDFQPGPVIRKVSGFLNDMGFSLNQGKTRIISWGRRQTVTGIVVNRKPKVSPEYRRKLRQEVFYCLKYGAKSHIMVTGREEPDEERERRYLRSLLGKIQYLLFINPDDIWFAKAKGKIQSILETSYACLL

SEQ ID NO: 2194 - protein, 326 aa, unidentified
  source 1..326: note = Related to NZ_MCIA01000032.1; note = Lacrimispora algidixylanolytica
MYQTELWKYSTKKHCQDMLLSFQLLGEDWPDQKVIACLYGVSNHTERHYHTAMIPKSDGTKRQLLVPDDLLKMIQRNIARNVLSGFELSSCASAYCKGTSVLKNASIHTGKRLVLKLDIEDFFGSITFPMVLNGAFSSKYFPPTVGTLLTALCCYHDYLPQGAPSSPVISNLVMKPFDDYMKVWCEEKNISYTRYCDDMTFSGDFQPGHVINKVSGFLDAMGFALNREKTKILSSGRRQTVTGIVVNERPHVSPDYRRRLRQEVYYCLKYGVKSHITMTGREEPKPEIERHYLFSLLGKINYLLFINPQDLWFKQAEGKIRSILDH

SEQ ID NO: 2195 - protein, 336 aa, unidentified
  source 1..336: note = Related to NZ_QJKD01000014.1; note = Hungatella effluvii
MHEPDLWKYCTAEHCREMLLSFRLLEGEEWTDDKVISCLYAVSNHTEKHYNRLRIPKKGGGVRQIQAPDLLLKTIQRNILHHILEGLELSPCAAAYHRGASIRDNAARHTGKNVVLKLDIKDFFGTITFSMVQQRAFNSRYFPVPVGTLLTSLCCLRDTLPQGSPASAAISNLVMKPFDEYMDGWCRERDIVYSRYCDDMTFSGDFAAAEVIGKVKGFLDAMGFELNRSKTKVLTRHTRQTVTGIVVNDRVSVPAAYRRALRQDIYYCRKFGVREHIRSRSDKKYLELGEAGEVKYLMSLLGKIGFVLSVTPGDVWFMEAEEAVKTLLKEYQGQAS

SEQ ID NO: 2196 - protein, 337 aa, unidentified
  source 1..337: note = Related to NZ_WNME01000006.1; note = Hungatella hathewayi
MHEPDLWKYCTAEHCREMLLSFHLLEGEEWTDEKVISCLYAVSNHTEKHYSRLRIPKKGGGVRQIQAPDPLLKAIQRNILHHILDGLELSSCAAAYRRGASIWENAACHTGKMVVLKLDIKDFFGSITFPVVHRSAFNSRYFPASVGTLLTSLCCLNDCLPQGSPASAAISNLVMKPFDEYMDGWCRERSITYSRYCDDMTFSGDFSAAEVIRKVKGFLGAMGFELNRSKTKILTRRTRQLVTGIVVNDKVSVPASYRKEVRQDVYYCMKFGVQAHLERRGEEKYLKMGPAGEVRYLTSLLGKIGFILSAAPGDIWFTEAKEAVKSLLREAAEPVPE

SEQ ID NO: 2197 - protein, 333 aa, unidentified
  source 1..333: note = Related to NZ_QSGP01000002.1; note = Enterocloster aldenensis
MGEPGLWKYCTAGHCREMILSLRLLEGEEWTERRVLSCLYAISNHTEKHYNKQKLIKKGGGVRHILAPDPVLKTIQRNILHHVLEGLEVSPCAMAYRKGASVRLNAACHMDKQVVLKLDIKDFFGSITYPMVHRGAFNSRYFPVPVGTLLTSLCCCQDRLPQGSPASAAISNLVMKPFDTYMEGWCRDRGIVYTRYCDDMTFSGDFRVSAVYGKVNGFLGAMGFELNQSKTKVLTRHVRQTVTGMVVNDKVQVPLPYRRALRQEVYYCLKYGVKEHLRHRGETAYLAMGEEGELRYLQSLCGRIGFVLSADPEDKWFREAADLVTGNIKTYLK

SEQ ID NO: 2198 - protein, 331 aa, unidentified
  source 1..331: note = Related to FOZH01000006.1; note = Enterocloster citroniae
MYDTDLWKHCTPRHCREMILSFSLLEGEEWTDERIISCLYAVSNHTEQHYTCLKIPKKGGGVRRVMAPDPLLKTIQRNILHHILEGYEIPCCATAYHKGASIRGNAMVHLGHEVVLKLDIKDFFGSITFPMVGQRAFGRQYFPEPVGVLLTSLCCYNDRLPQGSPASAAVSNLVMRPFDRYMAAWCGQREVIYSRYCDDMTFSGDFDVSEVMNKANGFLGAMGFELNRSKTKVLTRQERQTVTGIVVNEKLQVPSSYRRELRRDVHYCLKYGVQEHLKRRNERTYLDMGKDGETRYLMSLSGKIRFVLSVNPQDRWFREADDRVKRLLRYM

SEQ ID NO: 2199 - protein, 333 aa, unidentified
  source 1..333: note = Related to NZ_FNWC01000007.1; note = Coprococcus sp.
MDNQRLWQHRSKEEDKEAILSLNLLERANVPKEKTLKCIYAVSNHIEEHYREVFIPKKKGGRRKLLVPDYLLHTMQKNILRIILSEEKVSKYAKAYCPGRRIRDNAFAHVGAETILELDIKDFFENITYIMVYQCVFSGEYYPPAVRTLLTQLCCYRDYLPQGAPTSPMISNLVMFSFDQYMGKWCEEREICYTRYCDDMTFSGKFDVREVKQKVRSYLQVLGFELNLKKTKVLKQYNRQSVTGIVVNEKAQVSKTYRRDVRQAVYYCGKYGVQEHLQRTGAQMWLQKGEERYLQHLMGKVNYILQVNPEDCTFQEVRKNLLRIQRQCKGGKP

SEQ ID NO: 2200 - protein, 319 aa, unidentified
  source 1..319: note = Related to JAGZOR010000071.1; note = Lachnospiraceae bacterium
MWKYCTDEEAIRSFHLTDGLRCKEGKEIQTLFAVSNHVEEHYHIAYIPKKKGGRRKLLVPDVILGRIQKNILRNILAERKVSSYAKAYVKGVGIVENALPHSHAEIILKLDIEDFFENITYLMVYQKAFPEKYFPPAIRTMLTHFCCYNDYLPQGASTSPIISNLVMYSFDEYMGKWCEERKISYTRYSDDLTFSGNFDVKEVKHKARSFLEKMGFSLNEKKTRVLKPYQRQTVTGIVVNEKPNISKNYKRQLRQEIYYCEKYGVAEHLRQKGICDKEEITYLKELLGKVNYVLQINSDNMEFREAREKINKMLLKVKG

SEQ ID NO: 2201 - protein, 338 aa, unidentified
  source 1..338: note = Related to NZ_OIWX01000001.1; note = Blautia sp.
MAGNDLWKYCEAKEAEDVLRSFHLLEGTGVSDEKYLACLYAVSNHTEEHYHTAVIQKKNGGMRKLSVPDTLLRTIQRNIVKNVLCERSVSQYATAYRKKASVMENARPHVGAEMVMKLDIKDFFDCITFQMVYQYAFPAIYYPPSIRMLLTSLCCRNDCLPQGAPSSPAISNLAMRSFDEYMGAWCGERQMQYTRYCDDLTFSGTFDQKEVKQKVRNFLHVLGFELNRKKTRVQDQSHRQTVTGLVVNEKMQVSREYRNQLRAEIYYCQKYGVTSHLNKMGNPAWMREDEPDGKRYLQYLLGKINYVLAVNPHDGHFCKKREELSLMVREISTRSNTL

SEQ ID NO: 2202 - protein, 339 aa, unidentified
  source 1..339: note = Related to NZ_CP035945.1; note = Blautia producta
MAERDIWRYCTAEQVEEVLRSFRLLQGTKVRGDRYMACLYAVSNHIEKHYHIAVIPKKNGGTRKLSVPDILLRTIQRNIVKYVLPERFVSQFATAYRLNASVLMNACPHVGTEQVLKLDIRDFFHSITFQMVYQSAFPAVYYPPAIRMLLTSLCCFMDCLPQGAPSSPAISNLVMKPFDEYMGSWCEERQIQYTRYCDDMTFSGNFDVKKLKLKVKNYLYKMGFELNEQKTKVQRQYQRQIVTGIVVNEKPQVCREYRRQLRAEIYYCGKYGVESHLQRMGISGGGSESPQDPERYAQHLLGKINYVLSVDPGDKYFLEKRDEILLLVKEFRGDSIISK

SEQ ID NO: 2203 - protein, 329 aa, unidentified
  source 1..329: note = Related to DNJM01000030.1; note = Lachnospiraceae bacterium
MSSGQLWKYCTSDQVKEVLLSLHLLDGVPIKEEKRLACLYAVSNHTEKHYHSAAIPKKNGQVRRLFVPDPLLMRIQKNILRHVLAEEAVSEYATAYRAGSAVIENVRPHVGKKKILKLDIQRFFDHITFPLVYQYAFPAVQFPPAIRRLLTELCCYKDYLPQGAPTSPAISNLVMKPFDEFIGAWCAKRKITYTRYCDDLTFSGEFDEKEVKCKVRSYLEAMGFDLNRKKTRLARQCSRQTVTGIVVNEKPQVNREYRRQLRAELYYCRKYGVKSHLERIYGQKRQIEDEDCKTYLRQQLGKVNYVLQVNPADPYFFQEVARLKKELKE

SEQ ID NO: 2204 - protein, 363 aa, unidentified
  source 1..363: note = Related to KE159610.1; note = Lachnospiraceae bacterium M18-1
MIMGGKDLWKYCTAEQVRITLRSLHLLDGVHMEEEKYFSCLYAVSNHPELHYRQASVPKKGGGVRNLLVPDHLLCRIQKNILRHVLADFPISDYAMAYKTGTAIVENAKPHAGMKEILKLDIRNFFDSITYFQVYRNAFPAVYYPPPIRTMLASLCCCRDSLPQGAPTSPAVSNLVMKPFDEYLGAWCEERGIRYTRYCDDLTFSGKFDRREVQNKVRGFLAAYGFELNEKKTRLQKAHQRQTVTGIVVNEKPQVSREYRRKLRAEVYYCSKFGVESHLQRYGGEGPQKESVPREAGEACVRYLQKLQGKINYVLQVNPEDPEFCRAKELVKEMLEARGCSAETEKKSSERGENDDRKSKKVI

SEQ ID NO: 2205 - protein, 351 aa, unidentified
  source 1..351: note = Related to QXWX01000071.1; note = Lachnospiraceae bacterium
MKGKDLWKYCTSEQVHAVLRSLHLLDGVRVEEEKYFSCLYAVSNHPERHYHPASVPKRGGGTRKLLVPDHLLCRIQKNILRHVLADFPVSDYAAAYKPGTAVTENAKPHVGAKEILKLDIRNFFDSITYLQVYRNAFPAVYYPPPIRTMLANLCCCRDSLPQGAPTSPAISNLVMRPFDEYMGAWCRERGIRYTRYCDDMTFSGEFDRREVKNKARGFLAAYGFELNETKTRLQKAHQRQTVTGIVVNEKPQVSREYRRKLRAEVYYCGKFGVESHLQRCRGEEGTKEISREMEGACVRYLRQLLGKINYVLQVNPEDAEFCRAKELAREMLAARSCPADFPDAKELQKNK

SEQ ID NO: 2206 - protein, 337 aa, unidentified
  source 1..337: note = Related to NZ_RHJS01000002.1; note = Schaedlerella arabinosiphila
MGGKDLWKYCTQEQVRAALRSLRLLDGVHIREENYFSCLYAVSNHPEQHYHPASVPKKGGGVRRLLVPDPLLCRIQKNILRHVLAEFPISEYAAAYKPGTSIVENAEPHVGAKELLKLDIRHFFDSITFFQVYGQAFPSTCYPPAIRTMLANLCCCRDSLPQGAPTSPAVSNLVMKPFDEYMGNWCQERGIGYTRYCDDMTFSGEFDRREVQNKVRGFLAAYGFELNEQKTRVQKAHQRQTVTGIVVNEKPQVSRAYRRKLRAEIHYCSKYGVESHLQRRREGQAPEKERLMEADCVHFLQQLLGKINYVLQVNPEDTEFCRAKEIVKEMLAERASL

SEQ ID NO: 2207 - protein, 340 aa, unidentified
  source 1..340: note = Related to CP060635.1; note = Proposed Wansuia hejianensis
MTTYLSRCASREYDLWKYCTKEQIHEMLLSFRLLEGAPVREEKKLACLYAVSNHVRQHYHTAQIVKQSGGVRRLLIPDALLGTIQRNLLHHVLDGFSVSAYATAYKKKATVLDNARAHVGRERIMKLDIENFFSSITYPLIYQSVFPAIYFPPAVRRMLTEFCCYEEYLPQGAPTSPAISNLVMKSFDNYMGAWCEEREINYTRYSDDMTFSGLFDEKKLKRKVRNYLLAMGFELNEKKTRLLGRHTRQTVTGIVVNEKPDVGRAYRRKVRAEVYYCKKYGAVEHLRRCEKKEWMNGGQPDAARYLQHLLGKIQFVLQISPEDAQFRAAREDVQSMMRNI

SEQ ID NO: 2208 - protein, 337 aa, unidentified
  source 1..337: note = Related to CP084061.1; note = Blautia sp.
MTTTLSNYDNDLWKYCTKEQIKDMLLSFRLLQGAPVREEKELACLYAVSNHIKKHYHTAQIPKRNGSVRRLLVPDALLNTIQKNLLHHVLDGLSVSVYATAYKKKTTVLDNALSHVGQEQVMKLDIENFFENITFPLVYQSAFPAIYFPPAVRRILAELCCYEDYLPQGAPTSPTVSNLVMKSFDNYMGAWCEERGIHYTRYSDDMTFSGVFDEVELKNKVKNYLLTMGFVLNEKKTKLLGKHTRQTVTGIVVNEKADVGRAYKREVRAEVYYCKKYGVMEHLRRCNKKEWMTEGESDTVRYLRHLLGKIQFILQISPEDVQFREAREDIRRLLRDI

SEQ ID NO: 2209 - protein, 332 aa, unidentified
  source 1..332: note = Related to NZ_LT574838.1; note = Proposed Bariatricus massiliensis
MTDQNLWKYCTREQSNEMLLSLGLLEGTGVKPEAALACLYAVSNHTGRHYRTAQIQKRGGGVRRLLVPDALLNKIQRNLLHHVLDGLPVSTYATAYRKRMSVVDNAAPHVGQALILKLDIKEFFENITFLMVYQSAFPAVYFPPAVRKLLAELCCYEDYLPQGAPTSPAVSNLVMKPFDEYMGSWCGERGICYTRYCDDLTFSGSFDWREVKHKVAGYLRVLGFELNEKKTRILKPHVRQTVTGIVVNDRLQTARSYRRQVRSEVYYCTKYGVEAHLRHLGNKGESYGDSRDVMHYLQHLLGKVHFILQASPEDEEFRRAKEEIERLMKEQE

SEQ ID NO: 2210 - protein, 337 aa, unidentified
  source 1..337: note = Related to NZ_CABLBR010000003.1; note = Ruminococcus gauvreauii
MSGNDLWKYCTAEQEKEMLISFRLLDGIQMKEEKYLACLYALSNHADEHYHAAAVKKRGGGVRRLMVPDALLGAVQRNILHHILDGITPANASKAYRRGVTIADNALPHVGAKQIVKLDIRDFFENITYLLVYQYAFPAVYFPPAVRTMLTALCCCRECLPQGAPTSPAVSNLVMKSFDQYMESWCCRRGIRYTRYCDDMTFSGSFDAKELKNKVKSYLQVMGFQLNEKKTRVLKRHCRQTVTGIVVNEKPQVSRDYRRNLRSEIYYCLRYGAKEHLSRLGNSKWMTEEGPDTERYLRHLLGKINHVLQVNPEDEYFLWAREKVREISSRATKDEIR

SEQ ID NO: 2211 - protein, 397 aa, unidentified
  source 1..397: note = Related to GL945165.1; note = Lachnospiraceae bacterium 1_4_56FAA
MAGQDFWKYCTTEEIGRTLRTFDLLKGMDVPEEAYLPCLYTVSNQIETHYHPVVIPKKSGGRRKLLVPDALLRTIQRNLLHHVLEEFQISEFACAYKKGTSIVDNARPHVGAKLVLKLDIQDFFDQITWILVYQNAFPGTHFPPAIRKMLTEFCCVRDRLPQGAPTSPTVSNLVMRPFDVHMGEWCREREIRYTRYCDDLTFSGAFAPEEVIRKVRGFLQVYGFELNRKKTRVLGRGNAQSVTGIVVNEKAQVSRAYRRKLRQEVYLFDRYGIKTEEGPKNDEKERMRLLGKMRYVLSVNPEDVWFGNMYKKWKVGADSRKRTEEMQSISEEGGVAMKARVNEGCISCGACVATCPEVFRFDENDLAVAYADVTDETEAQAKEARDGCPVDVIDLEA

SEQ ID NO: 2212 - protein, 333 aa, unidentified
  source 1..333: note = Related to WQPN01000006.1; note = Clostridium sp.
MSDLWKYCTAEQCREFLLSLELVGDSGWPDDKKLACLYAVSNHVEKHYHTAVIKKRSGNERRLLVPDPLLKGIQQKILHNVLEDYAVSRYATAYHKGAKLKDNAAPHVGKEKILKLDIENFFENILFKQVLQSSFPKKYFPPAVGTMLAYLCCYYDYLPQGAPTSPAISNLVMKPFDESMGAWCEERGISYSRYCDDLTFSGDFDAEMVKRKAGAFLGEMGFQLNRKKTRVISRGQQQNVTGVVVNCKPQVSKEYRRKLRQEIYFCRKYGIRGHLERIGDRKYLDLGEAGIERYRLRLIGKVNYVLQVNQDDRDFIGCLGDLTSGVKGFSKKP

SEQ ID NO: 2213 - protein, 323 aa, unidentified
  source 1..323: note = Related to PKUU01000015.1; note = Clostridium sp.
MSDLWKYCTEEQCRQFLLSLELVGKDGWTDDKKLACLYAVSNHVEEHYHTAVIKKKNGKERLLLVPDPLLKGIQRQILHNVLEERPISKYAMAYHKGASLKDNAAPHVGKEKILKLDMENFFQNILFSQVLQSAFPGKYFPPSVGTLLTYLCCYYDYLPQGAPTSPAISNLVMKPFDESMGKWCEERGIAYSRYCDDMTFSGDFDADMVKRKAGAFLNHMGFCLNHKKTRIITRNRQQNVTGVVVNCKPQVSKEYRRKLKQEIYYCKKYGILGHLERIGDKKYLELGDAGIEKYRLRLIGKMNYVFQVNPEDKEFRGYLKDFV

SEQ ID NO: 2214 - protein, 328 aa, unidentified
  source 1..328: note = Related to AP025571.1; note = Clostridium symbiosum
MENTGLWKYCTPEQSREFLLSLRLLGRTDREDGEQLACLYAVSNHIEKHYHPAEIRKRDGSIRRLLVPDPLLKKIQRNILHNILDQMPVSPYATAYHKGAGIRLNARPHSGAKLLLKLDIKDFFENILFSQVYQQAFPTIYFPPSVGTILTYLCCYRDYLPQGAPTSAAISNLVMKPFDTYMGAWCGEKGIRYSRYCDDMSFSGEFDADTVIRKAGGFLKAMGFELNTKKTKAVSCHQRQEVTGIVVNQKPQLSKEYRRRLRQELHYCGRFGLRSHLEAIHDTRFLPLGEAGIQRYRMSLLGKINHILYVNPEDAWFLNARQIVRTLR

SEQ ID NO: 2215 - protein, 330 aa, unidentified
  source 1..330: note = Related to RAYU01000170.1; note = bacterium 1XD42-8
MSRLWRYCTKEQCRDLLLSFQLFGETNWSFEKQIACLYTVSNHIEAHYHSIIIPKKDGSKRQLDIPDYILKKIQKNILHHIIEKFSVPECATAYQKGKGILNNVTPHIGKKTVLKLDIKDFFHSIIFPMVYARAFPEEYFPPSIRTLLTYLCCYRDRLPQGAPSSAAISNLVLKPFDTYMELWCKDRNIQYTRYCDDMTFSGNFHKKEVMKKVQHFLHLSGFSLNYKKTKELSSNRRQQVTGIVVNSKPQVSKEYRRRVSQEIYYCQKFGVLSHLKYIDDKEHLPLGQIGVRKYVSSLQGKVQYILYINPEDKLFRKLLDESIAKIWDSL

SEQ ID NO: 2216 - protein, 332 aa, unidentified
  source 1..332: note = Related to JAGZJZ010000010.1; note = Clostridiales bacterium
MGDQNLWKYCTREHCRKLLTEFQLFGEMNWSKERQIACLYALSNHISDHYHTAVIPKQDGTCRKLCIPDTLLKLVQRNILHHILDGLTVSSYATAYRKGVTILNNVSCHTGQEKILKLDIHDFFGSIPFILVYQSVFHSDRFPPSVGTLLTHLCCYNGCLPQGAPASAAISNLVMKPFDEYMGNWCGERKITYTRYCDDMTFSGSFEAYKVKNKVRSFLKVIGFELNEKKTKLLLAGQRQAVTGIVVNEKPQVSKEYRKKLRQEVYYCLKFGAASHLEHMNHDESGSKEGAERYLQQLLGKINFVLQVNPEDEYFRAARERLRKNQNERVNR

SEQ ID NO: 2217 - protein, 328 aa, unidentified
  source 1..328: note = Related to NZ_FMJR01000027.1; note = Robinsoniella peoriensis
MGDHRLWKYCTAEHCRQLIMEILLFGEINWPEERQIACLYALSNHIPSHYRTAKIPKRDGTCRRLCIPDTLLKMVQRNILHHILDPIPVSSCATAYRKGVSLISNVSGHVGQEKILKLDIHDFFGNIPFILVYQRVFHSYRFPPAVGTLLTHLCCYEGCLPQGAPTSAAISNIVMMPFDEYMGEWCAKRGITYTRYCDDMTFSGSFEAYKVKNKVRGFLQVIGLELNEKKTKLLLAGQRQAVTGIVVNCKPQVSGEYRRKLRQEIYYCCKFGAASHLQHVQDQKYGTDATENIRYLQKLLGKINFVLQVNPEDKYFKTARESLKNLVT

SEQ ID NO: 2218 - protein, 328 aa, unidentified
  source 1..328: note = Related to NZ_FQVI01000010.1; note = Lactonifactor longoviformis
MGNTDIWKYCTGEQCRDMLLELRLLGNVDWSREKQLACLYSLSNHAENHYHLKEITGKGGRQRTLQVPDAFLKKVQKNLLRNVLDGLPVSSYATAYRKGKSILCNAVPHTGKGKILKLDMRDFFGNITFFQVRQSVFGGLLFPGSVGTLLTHLCCYRDYLPQGAPTSGAVSNLVLKSFDESMGNWCRIREITYTRYCDDMTFSGSFDSREVKNKVESYLRILGFELNPKKTKVLDSGTRQMVTGIVVNEKPQADRDYRRRLRQECHYCLKYGPDPGRVSSNKSKEAYLAGLVGKVNYVLQINPEDMYFKEIKRQLTQLQREAGEFPMQ

SEQ ID NO: 2219 - protein, 333 aa, unidentified
  source 1..333: note = Related to NZ_SGXF01000003.1; note = Cuneatibacter caecimuris
MSGEEMWKYCTGEQCRDLLRSLDLLRGTGVKQEQEIACLYSLANHAEAHYRRARIPKKNGGVRKLQIPDGMMKKVQRNLLHHVLDGLEPSPYATAYRKGAGLKENAAPHTGKKQILKLDLENFFENITFSLILENVFPSRLFPPAVGVLLTNLCCYRDYLPQGAPVSAAVSNLVMRPFDDYMGSWCGEQGIAYTRYCDDMTFSGDFDARKVKNKAQNFLKVMGFSLNAGKTRLYGQGHRQSVTGVVVNCHPQAARTYRKKLRQDLYYCEKYGVAGHLKRQGRDLGQEDAAGASFRYLQMLAGRAAFVLQVNPEDSWCREAKGRIARLQSELWV

SEQ ID NO: 2220 - protein, 328 aa, unidentified
  source 1..328: note = Related to DVJD01000043.1; note = Candidatus Fimimorpha excrementavium
MIWRYCTAEQCRELLYSYRLFGERKWSMEEQERCLYTLSNHAEQYYRNVWIPKKNGKKRKLMIPDPILAEVQRNILTQILADMPVSEYAKAYRKGLGLREMVQEHQGQNTVMCLDIRDFFGNITFFMVYQQVFSSLRFPPAIGTLLTNLCCFKDTLPQGAPTSPAISNLVLKPFDEYMGQWCRKRGIVYTRYCDDMVFSGELDPKTVKNKVRGFLRVIGFSLNEEKSSVRRQSQRQTVTGIVVNEKIQAAREYRRRVHQEVYYCRKFGVDDHLAKIGKDKKEPMDRQRYLLSLLGKLNYILQMNPQDGQAKSDLAALKEIIVSLGEKN

SEQ ID NO: 2221 - protein, 319 aa, Escherichia coli
  source 1..319: note = Related to CP065613.1
MDATRITLLALDLFGSPGWSADKEIQRLYALSNHAGRHYRRIILSKRHGGQRLVLAPDYLLKTVQRNILKNVLSQFPLSPFATAYRPGCPIVSNAQPHCQQPQILKLDIENFFDSISWLQVWRVFRQVQLPRNVVTMLTWICCYNDALPQGAPTSPAISNLVMRCFDERIGEWCQARGITYTRYCDDMTFSGHFNARQVKNKVCGLLAELGLSLYQRKSCLIAACKRQQVTGIVVNHKPQLAREARRALRQEVHLCQKYGVISHLSHRGELDPSGDLHAQATAYLYALQGRINWLLQINPEDEAFQQARESVKRMLVAG

SEQ ID NO: 2222 - protein, 319 aa, unidentified
  source 1..319: note = Related to NZ_BNAA01000006.1; note = Pseudocitrobacter faecalis
MDATRVCLLALDLFSSPGWSANEEIRRLYALSNSTSKHYRTIVLSKRDGGERQILAPDYLLKTVQRNILRNVLSHFPVSPFATAYRPGSTVVHNARPHLSQPQILKLDIEGFFENISGLLVWRVFRQTTLPNAVVTMLTHLCCYRDALPQGAATSPAISNLVMRRFDERMGRWCQERHIVYTRYCDDMTFSGEFSARQVRNKAAALLAELGLRLNKRKTALIPAYKQQTVTGIVVNEKLHISREQRRLLRQEVHYCLKFGVAAHLSHSGKSTESALCYLQRLQGKIAWLLQVNPDDRAFRRALRDVQQMIRQIALPGTR

SEQ ID NO: 2223 - protein, 356 aa, unidentified
  source 1..356: note = Related to NZ_LS483470.1; note = Leminorella richardii
MRRANALSTFSRLRDRLYRIVAADAFFKHQWDKEPTLDATRACLLALELIGRSDWSADREIRCLYALSNRSERHYRKIVLTKRDGGSRVLHAPGFLLKTVQRNVVKNVLSHFPVSPFATAYRPGSSTLCNASPHVGRKQILKLDIEKFFDNIRFTQVYRLFNKTELPAGAVTLLTHLCCYRDALPQGAPTSPALSNLIMARFDDLLGIWCKERDIAYTRYCDDMTFSGDFDAHQVTNKVRGLLNDMGFTLNSRKSRRIARGSQQTVTGIVVNHRPQLPSEFRRALRQEVYFCQKFGIASHLERIGSSETPLRYLQSLLGKIAYLLQINPDDAEFQRAKAAIGQLLKAETSLSYRAD

SEQ ID NO: 2224 - protein, 323 aa, unidentified
  source 1..323: note = Related to NZ_JMPN01000024.1; note = Leminorella grimontii
MDAARACLIALELTGKTACPADKEIQCLYALSNRSDRHYRKIVLTKRSGGLRTLYAPDILLKSVQRNILRNVLSLFPLSPFATAYREKCSTLDNASPHVAQSNVLKLDIENFFDSITFFHVHRLFKKTELPAAVVTLLTHLCCHRDVLPQGAPTSPTISNLVMKRFDDVIGLWCQERDIVYTRYCDDMTFSGDFDARQVKNKVRGLLYDMGFTLNARKSRLITANQRQTVTGIVVNQKPQLTRDIRRKLRQEVYFCQRFGVASHLVQTGDFNPQESPREQRLRYLQSLQGKIAYLLQINPDDAEFQNARSAVRQLLKEESASA

SEQ ID NO: 2225 - protein, 314 aa, unidentified
  source 1..314: note = Related to NZ_RBIZ01000005.1; note = Yokenella regensburgei
MNAAQLSLVSLELTGHPYWSPHKQLRCLYALSNHSERHYRTLSLPKRSGGMRNIQVPDPLLRQVQRHILRHVLSLLPLSPFATAWRPEYSLRHNVLPHLGKKQVLKLDIENFFPGIIFPQVQQLAFAKTCLPYAATTLLSHLCCYRDRLPQGAPTSPMLTNLVMRPFDDYIGDWCQQQEIAYTRYGDDMTFSGDFDARRVQNKVAGFLGEMGMVLNEGKTRVMRRGQQQIVTGIIVNESTPRAPREMRRALRQALYYYGKYGASAVPEGFDEQQWLQSLHGKITFILQIHPEDAALQHARGILQRQLKAIRSQP

SEQ ID NO: 2226 - protein, 311 aa, Enterobacter sp.
  source 1..311: note = Related to OBEF01000007.1
MNAAQLSLISLELTGHPHWSPAKQLRCLYALSNHSDRHYRELQLPKRSGGIRTIHVPAPLLKSVQRNILRHVLSLLPLSDYATAWRPGYTLLNNVLPHVRQKQVLKMDIDNFFQRIIFPQVWQQAFAKTRLPQATITLLSHLCCYRDRLPQGAPTSPTIANLVLRDFDNYIGRWCAEQEIAYTRYGDDMTFSGDFDARRVRNKVKGFLAELGFELNHDKTRLMSQGQRQIVTGIVVNGPYPQAPATLRRELRQTLYYYEKFGWSPAHSEMTERHWLQTMQGKIEFILQIRPNDSEFLHARHNVRRWLKRCA

SEQ ID NO: 2227 - protein, 345 aa, unidentified
  source 1..345: note = Related to NGMM01000007.1; note = Enterococcus sp.
MSRDIWKYITVEQCNEFLLSFQLLGETTLSNKEQITCLYSLSNTLEKHYEQYTLVKSNGGTRKITKPDERLKLVQKNILANILSQRSVSIYATAYQKGVGLIMNAQPHTEKQQILKLDIEDFFDSISFSQVYAYGFPRSYFPKATAGLLTNLCCYNHCLPQGAPTSPMISNLVLRSFDDSIGQWCVEKGISYTRFCDDMTFSGTFDATTVKNKVQAFLVELGFSLNKKKTRVISKHEQQTVTGIVVNEKSQAPRTYRKQLRQEIYYCMKFGVSSHIARKTAVAPHLIEQRTIENYLLSLLSKTNFILQINPLDEEFLQARTQLKVLLTEPVSYTHLDVYKRQVYR

SEQ ID NO: 2228 - protein, 333 aa, unidentified
  source 1..333: note = Related to WLYM01000046.1; note = Erwinia sp.
MSHRDLWKYCTPAKNREFLLSLQLLGQTELSDAQQISCLYSLSNHLEAHYRTYFLIKRNGSKRKISAPDLLLKKVQKNILTVCLTNRTCSPYATAYRKGVQLLENATPHLGQKQLLKLDIEDFFGSITVPMIARSAFPRTYFPSSVAGLLTQLCAYDDCLPQGAPTSPLISNLVMKPFDDSIGQWCAQRQITYTRFCDDLTFSGDFAPKEVKKKVQNFLFELGFTLNKIKTKQLSASQRQSVTGIVVNTKAQVPRSYRKKLRQEIYYCLKFGVRSHLIHQHTTSQPVLEQEEDQRYLQQLIGKTNFILQVNPSDQEFLQAKKALKELLQANYT

SEQ ID NO: 2229 - protein, 336 aa, unidentified
  source 1..336: note = Related to NZ_NGKC01000006.1; note = Vagococcus acidifermentans
MPYFLGGIRPMNKSIWKYITTDQCNDFLLSFNLLAPTNLSPEKQLACLYAVSNSIESHYTTTYLKKKTGGHRVIHEPSPLLKKIQKNILVHVLEPQACSVYATAYQKEKSLLDNAAPHIGKKQVYKLDIDDFFDSISFTMVFQRAFPREYFPPQAAGILTQLCCFNDCLPQGAPTSPMISNLVLKPFDDYIGQWCRERNIAYTRYCDDMTFSGEFNVKKLHHKVRAFLEALDFSLNQKKTKLLATGKQQIVTGITVNEKMQVPKKYRREVRQSAYYCLNYGTASHLKRMNEGNGELDPETYLNSLLGKINFILSVNPSDKEFSLLKEEISKLLSHS

SEQ ID NO: 2230 - protein, 327 aa, unidentified
  source 1..327: note = Related to NZ_FYBT01000001.1; note = Listeria goaensis
MQNQDVFGYATNAQINDFLYSLQLFGASDWSKEKQIGALYAISNHIEDHCTLFQVPKRNGSERTICAPSPLLKTVQKRILFAVLSERPVSEFATAYKTGVSILDNAAGHVGQKYVLKLDIENFFGSILFQDVMNFAFPRALFPKRVSALFASLCCYHDCLPQGAPTSACISNIVLKPFDDYIGRVAKEMGAVYTRYSDDMTFSGDFDTKKMYYKAKLFLEAMNFTVNEAKTQILTKKSQQKVTGLVVNEKVQVPKNYRKTVRQEAYFATKYGLTSHLAYRQNVQAAEVTQNAAFRYKLSLLGKINYILLANPEDQEFKKWQNEIKSL

SEQ ID NO: 2231 - protein, 327 aa, unidentified
  source 1..327: note = Related to KQ130610.1; note = Listeria fleischmannii
MNHQEVFGYATDAQLSEFLYSLRLLGPSAWPKEKQLATLYAISNHLENHYKTFTVQKRNGQMRNIYAPSPLLKGVQRRILVSLLNERQVSPFATAYKNEGSIFFNAAKHARQKYILKLDIEDFFGSILFPDVMNYAFPKAIFPKRISGLLTSLCCYHDALPQGAPTSAAISNIVMKPFDDYMGKLASEMGINYSRYSDDMTFSGDFDTAYMYRKAKMFLNDMNFSVNHAKTKVLTRKMQQKVTGLIVNEKVQVSKAYRKKVRQEAYYVSRFGLRNHLAFIQQLNEVEISKEAVKRYQLVLLGKINHILCANPNDKEFLNWREKIKGL

SEQ ID NO: 2232 - protein, 333 aa, unidentified
  source 1..333: note = Related to NZ_FXUT01000001.1; note = Listeria costaricensis
MNSHFWKNCSAQEERAFLLDLNLLRQYGDAWSDKEKIALLYTVSRTINQHYLTVKIPKRTGGLRTLHAPDPLLKMIQKNILSLLETRTLSAFATAYRKGGSILANATPHVGKKQLLQLDLLDFFDSLSFPMVMAAAFPKTVFPDNTRMLLTNLCCLNDALPQGAPTSALISNLIMRPFDDYIGEWCKERQIAYSRYSDDLTFSTNEGDLTLVKRKVEHFLEAMQLNLHPAKTKYTDQSMRQCVTGVVVNQHPQVPRRYRSMLRQEIYYLEKFGLTGHLACLKEKGEVAADLSEKQYLRKLIGKVQFVCAICPESAGFQDAYWRLQKLAISFEE

SEQ ID NO: 2233 - protein, 333 aa, unidentified
  source 1..333: note = Related to JAJFDR010000002.1; note = Anaerovorax odorimutans
MRYTNLWKYCDIQQCQDFLLSLELFDESRLTRQERLKCLYAVSRHAEKHYRKTFRKKADGSLRPLLEPDYLLKQIQRNLLCNVLERVPVSEYATAYRKGVSVRDNAAAHVASPQILKLDIENFFGSITDSMVFTKAFPREYFPYPAASLLTAICCYEGYLPQGAPTSAAISNLIMKDFDRYIGNWCREKGVNYTRYCDDLTFSGDFDWVEVKNKVRAFLNAMGFEMNKKKTKLLTAGQRQIVTGVVVNEKLQTPRAYRRELRQIYFYMKKYGMRSHLHNKLGREAANEEMASYLEHVLGRVNFVLQIKPEDGCFKEMKAWILEKKKEEAHECL

SEQ ID NO: 2234 - protein, 324 aa, unidentified
  source 1..324: note = Related to DVGX01000291.1; note = Candidatus Ventrisoma faecale
MDLWRYCTAEKWQEFLVSLDLLGSAPADREAYFRCLYALSNHPEAHYRTLSVPKRGGGRRTLREPDALLKKVQKNILRHILAGAPVSEYACAYRKGMGVRQNAAIHLGQPMILKLDIHDFFGSITFPMVMWSAFPGTLFPPAAATMLTSLCCFRDVLPQGAPTSAAISNLVMEPFDRHMGAWCAARGIRYSRYCDDMTFSGVFDAGEVEAKVRAFLEVMGFSLNKKKTKLMTAGRRQTVTGLVVNEKLQVPREYQRALRQELYFCETYGVRSHLERKNGRAPSEEEAARYLESLAGKAAYVASVAPESENARRMQEKIKKLIKK

SEQ ID NO: 2235 - protein, 332 aa, unidentified
  source 1..332: note = Related to LR134531.1; note = Pragia fontium
MPDTDVWKYCTTAQIKQFLVSLRLLGNTDWSDEKYIASLYAVSRNINNHYQQTTLLKRDGTQRHLLVPDKLLKKIQKNILRNLLQDVPLSAHATAYRQGTDIVANAQAHLGQRQILKLDIVDFFGSITFMMVCRSVFPSLYFPPSVGTLLTNLCCYNDALPQGAPTSPAISNIVMTPFDNYIGKWCQERKIVYTRYCDDMTFSGDFEAKQLKNKVRAFLQEMGFSLNQHKTKLFTCHTRQLVTGIVVNEKLQVSREYRKQLRQELYFCQKFGVLSHLTQINNGLIAKQEDVESYLQSLLGKANFIVQVNPQDAYFLQAQSLIKQLIRTHRAE

SEQ ID NO: 2236 - protein, 332 aa, unidentified
  source 1..332: note = Related to PDDX01000001.1; note = Budvicia aquatica
MPDMPLWKYCTTAHYLEFLISLQLFGDTDWCAEKQISCLYTISNDVNAHYQRTTILKRDGTPRHLLAPDPLLKKIQKNILRNILAPVPVSPYATAYHKGADVVANAAAHLGQKLLLKLDIEDFFGSIIFPMVRRSAFPDIYFPPAVSTLLTHLCCYNDALPQGAPTSPTISNLVMKPFDSHIGEWCSARGIIYTRYCDDMTFSGDFDAKAVKNKVGHFLQALGFSLNKEKTKLLTRHTRQSVTGIVVNQKLQLSRDYRRQLRQEIYFCQKFGVVSHLKRMNYPLESGDVERYLQALQGKVNFLLQVNPGDDVFRQAMSGIKQMIKANRNSQY

SEQ ID NO: 2237 - protein, 334 aa, unidentified
  source 1..334: note = Related to NZ_PQSP01000009.1; note = Saezia sanguinis
MPDNDLWKYCTAEHCKELLLSFRLFGNTAWTGEKQIACLYALSRHIGKHYARAVIPKRDGSARHLLVPDPLLKQVQKNILHHVLAEMPVSPHATAYHPKANVFANATPHLRQPQVLRLDIEDFFGTITFPMVYSQAFPYVYFPPSVRTLLTHLCCYRDYLPQGAPTSADISNLVLKPFDDHMGRWCSERGITYTRYCDDMVFSGDLDARAVKNKVQNFLQAMGFSLNLKKTRLSTRHQQQVVTGLVVNEKVQAPVQYRKALRKEIYFCQKYGVQSHLTQTADQTYLPHGHNGVMRYLASLLGKVNFVLQANPQDAYFQQAKSAIQHMRAQLKLA

SEQ ID NO: 2238 - protein, 321 aa, unidentified
  source 1..321: note = Related to JAFYPD010000088.1; note = Peptococcaceae bacterium
MDFSQSQIEEVLALPLLTDKTPEKRLKTLYALSNHAEEHYHPVTAAKRNGGRRKILVPDALLKQVQRQILHNILEKQPISRYAKAYHPGAAIRENAAVHLHQPGILKLDIENFFPSILFPDVLSSCFSSQRFSVPMGTLLTNLCCYQGYLPQGAPTSPAISNLVLYHFDVWIGQWCGQQHIRYTRYCDDLTFSGDFDAALVQGRVEGYLQTMGFMLNQKKTRWMTAHQQQMVTGVVVNEKMQVSRAYRRNLRQEIYYCRKYGVQSQAAYAAGKDAAEIGPGDGKRYLQSLLGKINFVLQINPDDAEFQRAEEEVKSWLTAK

SEQ ID NO: 2239 - protein, 343 aa, unidentified
  source 1..343: note = Related to JAFRDE010000015.1; note = Ruminococcus sp.
MYIDHNEVIFQPFDVEYVVERGLERAMEEAFAFHQNCRLPFLMDVSQLAGFLSLTKKETFRFVFACDSMYRTFSLPKRTGGTRQIDAPMPELSWAQYRITREILNKLPISQYATAYHKGARLTQNASPHTGRRYLLKIDLSDFFHNIRMTDVHSRVFTPYYPKQIGYFLSLICCKDGTLAQGAPSSPAISNIVMRCFDEPFGQWCKKRGLSYTRYCDDITISGDVPLYRAYEKASLWLNNMGFTVNEKKTRFITDASRQTVTGLTVNEKVSVPSDYKRKLRQELYYVEKFGIRSAADHMRLPDALKYCQSLMGRINYVLSVEPANESFLRAKDALSGQFAFCV

SEQ ID NO: 2240 - protein, 343 aa, unidentified
  source 1..343: note = Related to JAFRBD010000130.1; note = Ruminococcus sp.
MYIENNEVIFRSFDVNYVAKHGLEQAMDEAFAFHEKCRLPFLMDIAQLAGFLSLTQRETYRFVSKCSRMYRSFDLPKRTGGTRRIDAPLPELSWAQYRIDRTILRKIPISRYATAYHKGARLTRNALPHTGKKYLLKIDLSDFFHSIRISDVHGRVFAPYYPKQIGYFLSLICCKDGSLAQGAPTSPAISNIVMRCFDEPFGHWCEKRGLSYTRYCDDIAISGDVPLYRAYEKASLWLNNMGFTVNEKKTRFITNASRRTVTGLTVNEKVSVPSDYKRKLRQELYYVNKFGILSAAAYLKLPDALKYCQSLMGRVNYVLSVEPENESFIKAKEALSGQFAFCV

SEQ ID NO: 2241 - protein, 345 aa, unidentified
  source 1..345: note = Related to JAFRBX010000029.1; note = Ruminococcus sp.
MYIDKDEVIFEFFDVEYVTKHGLEQAMDAAVAFHQKCRLPFLMDISQLAAFLSLDRRELFGLVKRCDTMYRSFLLPKRTGGYRQIDAPAYELTAYQYRILHRILGRIPISRYATAYHRGAALTKNASPHTGKRYLLKIDIKDFFHSVRLSDVHARVFAPYYPKQIGYLLSLLCCKDGRLAQGAPTSPAISNIVMRCFDEPFGEWCEKRGLSYTRYCDDITISGDVPLYRALEKASLWLNNMGFTVNEKKTRFITNASRQTVTGLTVNEKVNVPSDYKRRLRQELYYAAKFGVSSAADYKGLTDAEQYYQSLMGWLNHVLSVEPENESFLKAKQALRERYAADRRI

SEQ ID NO: 2242 - protein, 349 aa, unidentified
  source 1..349: note = Related to JAFORM010000263.1; note = Ruminococcus sp.
MIVKNDSVTFEPCDMPFTRKFGCDEAAKMVLDFKAFHPKLPFLYDTHQLADFLKTGRKTLFDLTNHPEACYSTVSVPKKSGGTRTLNVPNDRLKAIQRKILYEILAYLPVSKHAAAYHKGARLTDNAAAHIHHRYLLKLDLSDFFGSIRFDSVFCSAFNAHYFPRQIGVMLTSLCCFDDVLPQGAPTSPALSNLVMKRFDNSFGAWCSARGFSYTRYCDDIAVSGNCPVYPAYKKARLLLENSGFEINDAKTRFVTDAGRQTVTGLTVNEKLSVPSDYKRKLRQELYYAKKFGLENVIQKQNLTDYISGGKADAARYAMHLLGKLHFVLSVEPDNAYFRNARQFLITQL

SEQ ID NO: 2243 - protein, 344 aa, unidentified
  source 1..344: note = Related to JAFOUX010000084.1; note = Ruminococcus sp.
MLVSDNEVMFFESDMRFVKRFGLEAATDMVLDYSAINKTPFIYDFFQLSSFLRILPSDLRKLLDDIPGSYRSLQIPKKSGGYRELNQPLGRLPDIQERIYTGILKRLKSSPYATAYHQGAHLSDNAAPHIGKRFLLKLDITDFFGSIRFDMVLSSVFNTSLYPRHIGAMLTSLCCLEDVLPQGTCTSPTLSNLVMKRFDDIFGAWCKRHGFDYTRYSDDITVSGNTSLYPAYCAAKSMLHKMGFELNERKTHFITDSFRQTVTGLTVNEKVNVTAAYKRKLRQELYYTDRFGIESAAQYLHQPDAKKYYQQLMGRLNFVLSIEPDHTYFIKAKEKLSEQRAEII

SEQ ID NO: 2244 - protein, 331 aa, unidentified
  source 1..331: note = Related to JAFUNJ010000009.1; note = Clostridia bacterium
MRITEGTVRFDGCDRHFAEKFGAHQAAEMVLDFASTNTHPFLYDTYQLAAHLGLRRKALFELVRRPGRHYRTLRIPKRSGGSRTLSVPDDRLKTVQRTVLHTILCHFPASAYATAYQPGATLRQNAAPHCGKKYLLKLDLEDFFGSIRFDQVYGAVFHTRRFPKQIGAMLTALCCKDDALPQGAPTSPQLSNLVLKWFDDTMGAWCQRRGIAYTRYCDDITFSADRPLYDAYRKAVGLLEHQGFSINEEKTRFVTAAGRQTVTGLTVNEKVGVPADFKRALRQQVYYALKFGAEPPEYRRLLGKVQFVLQTAPEHPWFCDAREELIRRLKG

SEQ ID NO: 2245 - protein, 354 aa, unidentified
  source 1..354: note = Related to JAFRAJ010000055.1; note = Oscillospiraceae bacterium
MHFEGEKIVFSAADIERAKRTGIENMLLRADQYCSAFSIPYICDLFELSTELGLPAEDLARIGSRASMKYRCYYIKTGSGKFRKIEEPDFELRIVQNRILNHILRYYRISEHAAAYHKGASVKNNAMPHVGKRYLLKMDLSDFFGHITDSMLMDTVFSEQHFPYPVGRTLTDICTRNGSVPQGACTSPAISNIVMKGFDDRMGRWCSYRGISYTRYSDDLTFSSDEPLYPAYRKARRMLEEMGFGINDDKTHFITSAGRQQVTGLVVNDKLGIPADYRRRLRQEIYYVLKFGARDAFSRSDDCRNEPGMTLRRYLLRLIGKTEYVLQIRNDDRFFREAKIKLAEEIAKLSSAEE

SEQ ID NO: 2246 - protein, 352 aa, unidentified
  source 1..352: note = Related to JAFSIW010000012.1; note = Clostridia bacterium
MYTQNGRITFEKSDLKFLQKHGLSKAVVIYEEHCAHSNLPFVTDHHQLAGLLGCYTNVLFQTLRTVDELYYDAAIPKATGGYRTLQVPTHPLRYMQTVILHSILDKLPVSPYATAYHKGARITDNAKPHQHKKYLLKMDLQDFFSSITFEQVLSGVFHKGRFPTHVGVSLTALCCKNGVLPQGAPTSPALSNLVMSHFDGVMGEWCCRQGFSYTRYCDDITVSGNRPLYAAYQKAKGLLENMGFELNEKKTRFVTAAHRQTVTGLTVNQGIGVTADYKRNLRQAVYYTVKFGAADHIRQRNLTRFMVNGVPQTERYLAHLEGQIRYVLSVEPDNRAMVKLLADLSASPPYMG

SEQ ID NO: 2247 - protein, 337 aa, unidentified
  source 1..337: note = Related to JAFNUN010000059.1; note = Clostridia bacterium
MIINKKYESIVFDESDMNFVSKFGIQEATDMVFDYLSTNKTPFIYDVFQLADYLQIKLPKLFRLVNKADELYSNVVIKKRNKSDRILSVPDYYLGSVQKRINRKILSKIDISKYATAYYKGSNLLKNVENHCGKKNILKMDITDFFSSITFGMVLSSCFNTSRFPRNIGYMLTTLCCKDDCLPQGTSTSPAISNIVMKNFDDILGNWCEKRGISYTRYCDDLTFSSDEDLYPVYVKAKSMLNDMGFQVNEKKTHFIKNSNRQEVTGIVVNDHPQLSKDYRRKLRQELYFVFKYGIKDALEHINKKEVSNKEIYSYACQLSSKISYVLFINPNDKEFV

SEQ ID NO: 2248 - protein, 353 aa, unidentified
  source 1..353: note = Related to JAFSEL010000040.1; note = Ruminococcus sp.
MKVVNETVEFFECDMNMVSKIGLMEAVEMVLDFSSTNTVPFIYDTYQLSDMFAIGRKNLFSLIRNCDQNYKQINIKKSNGDIRVLYSPRTRLKAIQNIILKEILYKIPVSKYATAYHKGAKLIDNAKPHCGKKYLLKMDLRHFFDSITFTQVYSSVFNTCRYPKQIGTILTTLCCHQDVLPQGAPTSPALSNIVMKSFDDYFGKWCEKRNFSYTRYCDDITVSGDSSVYPAYLKAEALLENMGFEINQNKTHFITNTNRQEVTGLVVNERARVSSDYRRKLRQEIHYVTKYGILDALKHLKDSGYESVYSYYSSLMGRINYVLQIEPENQQMLNLKADLEKSLEKYEWQTMLQ

SEQ ID NO: 2249 - protein, 353 aa, unidentified
  source 1..353: note = Related to SVPW01000009.1; note = Oscillospiraceae bacterium
MLIKGQSVTFHADDMHFVKKFGIMEATNMVLDFASTSNLPFVYDTYQLASLLQLRRSSMFKIVRKCNSYYRDVELKKNNGKVRYISAPLDILKWTQKCILTNILEKYPVSKFATAYRKGLKLVDNAKVHTSKKYILKMDLKDFFPSIGFEQVYSCVFNTRHFPKQIGVILTSFCCRNGVLPQGAPTSPAISNIVMRNFDDIFGAWCEKQGFSYTRYCDDITVSGNKSLYVAFVKAKAMLEKMGYEINTKKTHFLTNASCQTVTGLTVNERARIPSDYRRNLRQEIYYAQKFGVKDAVMRANREEYIVDGKVDEHRYISHLEGKVQYILQIEPENEYFKKALKTVQNLRPLGNF

SEQ ID NO: 2250 - protein, 366 aa, unidentified
  source 1..366: note = Related to JAFUKO010000119.1; note = Ruminococcus sp.
MIIRNGTIEFGHGDMHFVEKVGLSEAVEMVLDFKSQNKIPFVYDTYQLADLLMIRRKDLFSLSKNADSFYTYATIKKRDGSKRILCVPDAYLKSVQRTILSTILSKLPVSEYATAYRKGCKLQSNAQPHCGKKYLLKMDICNFFDNITFMKVYSSVFNTRHFPKQVGVMLTQLCCRNDVLPQGAPTSPAISNLVMKSFDDTFGAWCLRHNLSYTRYCDDITVSGDIPLHNVYLKASEMLHKMGFEINKRKTHFVKYTDRQSVTGLTVNECIRVDSKYKKQLRQDIYYTLKFDVVSAMKRSLSFEFDENEDIDSAVIKYLNSLIGKTAYVLQIEPDNEYFKKLLKKLTDLLDETKLDIRRSKYFTFY

SEQ ID NO: 2251 - protein, 365 aa, unidentified
  source 1..365: note = Related to JAFOED010000001.1; note = Ruminococcus sp.
MYIEDNIVKFEYCDMSFLKKFGVDVAADMYLDFKSVNKIPFIYDTYQLADFFGIRRTNLFKVTKNIDKFYYTTTIKKRSGGVRKLNVPDDTLKFMQRCILKRILSEFKVSKYATAYKKGATLKDNARVHSAKKYILKLDLKDFFDSITFMQVYDAAFSTRYFPKQIGVMLTTLCTRQDVLPQGTPTSPVLSNLVMKNFDDSFGAWCEERGFSYTRYCDDITVSSDNELKGVYSKCKFMLTKMGFEINEKKTRFLTNGSRQTVTGLTVNSSVKVPSPYKKELRQAVYYTLKFTAADALKRDKNFERKTDLPIDEEALRYLNCLIGKVAYVLQIEEDNVYFKSALIKLVNRKDELEFNIKRENNYNF

SEQ ID NO: 2252 - protein, 326 aa, unidentified
  source 1..326: note = Related to JAGBTD010000211.1; note = Clostridia bacterium
MIEDFYSVNSNKLPFLTDQRQLASMLGIELRTLYSILKSINANYTTHKFVQKNGKVRTINEPSTKLKSIQRLIYFRILQHLPVSKYAKAYRPRITIKQNALPHIGKKYLLKMDIKDFFPSITFTRVYGAAFNTKFFPKYIGTLLTTLCCKDDCLPQGAPTSPALSNLVMKNFDEYLGKWCEEKGIAYTRYCDDLTFSSDMPLYGVYLKAKYMLENMGFDVNEKKTKFISSKNRQTVTGLTVNKKLNISSVYKRELRQEVYYVLKFGAKTAILRGGHEDYIIGGETLKVDYLYHLLGKVNYVLSIERDNKWFQESKGYLTDMIIKYS

SEQ ID NO: 2253 - protein, 360 aa, unidentified
  source 1..360: note = Related to SVPP01000010.1; note = Oscillospiraceae bacterium
MLNKKEMQKMKITKGHISFEQSDMHFVEKFGISEAFRMVGDYVSERKTPFVYDTYQLAYLLGIGRKDLFSLVKTVDNHYRPVNILKKNGNIRTLIIPSSKLKRIQSVIAGRILSCYSVSEYAYAYLKRKTIYDNASVHCGKKYLLKMDITDFFSSICFDRIYSAVFNTKYFPRQIGVMLTALVCNDDVLPQGAPTSPAISNIVMASFDRLIGTWCKERGVSYTRYCDDLTFSGNVPLYGVFKKSKSLLEEMGFEVNEKKTRFITSSDRQTVTGLTVNEKVSVPSDYKRKLRQEVYYVLKHGIVNTVLFTENKEFISDGQVDEEKYYLSILGRVSYVLQIEPDNRFFSEARKRIMEDRYKT

SEQ ID NO: 2254 - protein, 349 aa, unidentified
  source 1..349: note = Related to SVJN01000007.1; note = Oscillospiraceae bacterium
MQIFIDDVTFDAWDLHFVEEFGVFRATEMVLDFFEHNRHPFLYDTYQLAHFLQVEQKQLLTILGRCDTLYRKVKLPKKNGGVRIISAPLRDLKQMQKIILEHFLKKLPVSEHATAYKEGGTIRKNASVHCGKKYLLKLDIEDFFDCISAERVYKSAFHTQYFPQKIGKILTRLCTKNGYLPQGAPTSPMLSNLVMRPFDMVMGNWCKKHNIGYTRYCDDITFSADVPLYVAYVKAKSLLEKMDFCLNEEKTKFIRSSNRQVVTGLTVNECIHVTADYKRKLRQEIHFVLKFGLKDALLHTTPNPFVTEQAVHTERYFQSLMGRIHFVLQIEPENRYFLEAEQKLKGINH

SEQ ID NO: 2255 - protein, 414 aa, unidentified
  source 1..414: note = Related to QUJR01000007.1; note = Butyricicoccus sp.
MPKSDTLRRIANHFMILDSPPLNQTILYCKGLIFGRTLHMKIEGSCVTFEPCDAAFVKKFGPLEAANMVLDYHSVHPNMPFLYDAEQLAGFFDISCGELNHIVNHIQKEYKKAFLPKKDGTYRSLYIPSIRLQFCLGPIKDKILSQLPVSKFATAYQKGSSTRKNAEPHIGKKNLLKLDITDFFGSISFEQVLCAAFNTRYVSKQVGFLLTSLCCKNDALPQGSPTSPALSNIVMRRFDDQIGRWCNQRQITYTRYCDDMTFSSDRPLYGVYQKVKKILFEMGFELNEAKTHFISNADRQTVTGLVVNEKLSIPSSYKRNLRQEIYYTLKFGIEDSIVHGNRLNFLEDGQPIRCPTYMTHLIGSVQYVLQIEPENRWFLNAKQKLLDYARAYFRAEGLGEEYYLHRSRLREKDE

SEQ ID NO: 2256 - protein, 333 aa, unidentified
  source 1..333: note = Related to DMLP01000060.1; note = Oscillospiraceae bacterium
MPCRRYIRGKAPPDNTPTNKRITPLFSVRLRFYRVILYCKGLYSFRLKYYSAAVIFMNIIDSNVVFGSGDAEFVKKFGLFEAAQMVLDYKSRNNLPFIYDTYQLADFLGIKRKELFFISKNTDKYYNAFEIKKKNGKPRRLYAPASKLKACQAAINRLILKNLPVSEYAAAYQKGSQISKNAAPHIGKRYLLKLDITDFFGSIRFEQVYSAAFNTRYFPKQTGVILTELCCLNDALVQGAPTSPALSNIVMYNFDNSIGLWCKKRGIAYTRYCDDMTFSSDRPLYGVYQKVKKMLFEMGFELNEAKTHFISNADRQTVTGLVVNEKLSIPSSY

SEQ ID NO: 2257 - protein, 359 aa, unidentified
  source 1..359: note = Related to JACJKY010000027.1; note = Proposed Phocea massiliensis
MLIKKNRIIFEQSDMAFVEKFGVLDAAEMVMNYKTVCTLPFVYDADQLAEFLKIGRKDFFDLIKNCDTCYRPISLKKKSGTYRQIYAPNDILKRIQKTILDKILSKLPISQYAKAYRMGGTLIDNAAAHIGKRYVLKLDITDFFGSISFEQVYSAAFHTKYFPKQIGVLLTMLCCRKEVLPQGAPTSPALSNIVMCHFDNYIGSWCEARAIAYTRYCDDMTFSSDRPLFGVYQKVKTILGEMGFELNEKKTHFILNTSRQSVTGITVNEKLSVPIHYKRKLRQEIYYTLKFGLVEQIVRLGKTEFFMDARPNVQKYYNHLLGQIGFVLQIEPENNWFQNAMIKLKSSSFLQGEMELWRR

SEQ ID NO: 2258 - protein, 354 aa, unidentified
  source 1..354: note = Related to NZ_AP023418.1; note = Vescimonas coprocola
MKIEKDTVTFEAPDADFVTKFGIQAAADMVLDFHCFHPQLPFLYDARQLAAFLSTSRQKLLYYVRHTAAAYHPVTIPKRNGDVRILSVPDDTLRRWQRKICRELLAYLPVAPQATAYRKGGAISGNAAPHVGKRYLLKLDISDFFGSICFEQVHSAAFHTRYFSRQVGFLLTSLCCKDGALPQGAPTSPALSNLVMRNFDTSMARWCQRRGIVYTRYCDDLTFSADRPLFAVYSKAKNMLAEMGFDLNEAKTHFITNAGRQSVTGLTVNEKVSVPAGYKRSLRQEVYYTLRFGLADSILRGGHATLLTDDLPDTERYRQQLLGRIQYVLQIEPENRWFREAKQKLLSCDDRPKV

SEQ ID NO: 2259 - protein, 355 aa, unidentified
  source 1..355: note = Related to DVGI01000013.1; note = Candidatus Fimenecus excrementavium
MIVKENTVIFEACDMAFVKKFGIAQATEMVLDYKSVNPLPFLYDTYQAAKFLGVGRLTLFQYAKNPEQGYKLITLKKRSGDKRRIYAPDIVLKHLQTGILRKILIYFPVSPYATAYSKNCTLRNNAAPHVGKKYLLKLDITDFFGSIRFDQVYSAAFNTRYFPKQIGVILTSLCCREEALPQGAPTSPALSNLVMRNFDNSLGRWCQKRGIAYTRYCDDMTFSSDKPLYPVYEKVKSMLYDMGFTLNEKKTRFVTSAGRQSVTGLTVNEKVAVSSDYKRKLRQEIYYALKFGLEDSIRFAKRTEFMRDGVLDAERYAQHLIGKANYVLQIEPENRWFREALERLQWTLKCLEMQG

SEQ ID NO: 2260 - protein, 342 aa, unidentified
  source 1..342: note = Related to SVPJ01000007.1; note = Oscillospiraceae bacterium
MHIQNGAVTFEPHDMWFVKRVGFEAACEMVLDYASQNKLPFLYDTHQLAHFLHIPRRYLFRWFRDMSSCYTPIALTKRSGGVRHLHVPVDPLMCAQRRILQDIVSRLPVSPYATAYVKGKRLTDNAAPHCGHRYLLKLDITDFFSSIRFDQVYSAAFNTTRFPKLIGVMLTALCCYEDVLPQGAPTSPALSNVVMRRFDDRIGEWCKKRGIAYTRYCDDMTFSSDKPLFAVYQKVRGMLAEMGLSLNEKKTRFVTHASRQSVTGLTVNERVAVSSDYKRDLRQQVHYALKFGYADALAKRGDTTFENGDHYAHHLIGRVRYVLQIEPHNTWFRDALPRLLWK

SEQ ID NO: 2261 - protein, 394 aa, unidentified
  source 1..394: note = Related to SVPN01000018.1; note = Oscillospiraceae bacterium
MILRFASACIRAICTATVRRFLVFEKGGVCVRKIGDTLIFTSSDMPFVKRFGIEEATKMVGDFYAEHDLPFLFDTYQLSSELGLRRKTLFSLTRNPEKLYYPVTLSKKNGGTRKLHVPFTVLRGIQRHILNAILNKLPVSSYATAYRRKHQPLHNAAPHCGKRYLLKMDIRDFFGSIRFDQVYRAAFHTRHFPVQIGAMLTSLCCYQERLPQGAPTSPALSNLVMKHFDEQMGEWCQKQGIAYTRYSDDLTFSADVPLYHVYKKAKAFLEHMGFELNDKKTHFITNASQQSVTGLVVNGDTPTVSRKTRRALRQELYYVQKYGLGDAIMRGNRTAFIKDGRPLVYRYLNHLEGRVGYMLHVMGEDDELKNALQMLHRRRQNLLIDAGVVLCDDD

SEQ ID NO: 2262 - protein, 350 aa, unidentified
  source 1..350: note = Related to NFIH01000004.1; note = Pseudoflavonifractor sp.
MYIRENGTIYFHEWDRPFVAKFGEHTATQMVLAFQAEHRGLPFLYDTHQLAAFLQMNRKRLFDLVKQVDEHYDQVKIVQKNGKMRVLHVPDGALKAVQRQIQRNILMHFLPSPHATAYIRRRTLVDNAAPHVGKKYLLKLDITDFFGSIQFAQVYRSAFCSPYFPKQVGVLLTRLCCWQGALPQGAPTSPALSNLVMKSFDVYLGDWCQKHAIAYTRYCDDMTFSADRPLYMVYQKVQIMLEHMGFSLHEDKTCFVTRASRQCVTGLTVNETVSVSRVYKRRLRQELYYAQKFGLADSLRHTQRGGFFTGDTPDVERYRNHLLGQVGFVLQVEPENRWFQHARNALKTMR

SEQ ID NO: 2263 - protein, 361 aa, unidentified
  source 1..361: note = Related to JAFQCR010000001.1; note = Clostridia bacterium
MIVKNGAVEFSDVDMRFVEKFGIFKATEMVLDFHNLNKTPFIYDTHQLASFLGYGRRLMFLVTKDPESHYFPTEIPKRDGTARKLLIPDTLIMSMQRHILDGILKHLKPSRYATAYAPKTNIKQNAQPHIGKKYILKTDISDFFGSIRFEQVYSAAFNTRLFPKQIGVMLTELCCYNGYLPQGAPTSPALSNLVMKNFDNNIGYWCEKHGISYTRYCDDMTFSSDKPLYNVLQKLTKMLDEMGFELNAKKTKFVTSSSRQSVTGLTVNERLSVSRDYKRNLRQELYYGFRFGFEGAVSRTKHPEFFDDNNHFMHESYYNSLLGRVRYILSIEPNNTEFSEALDRLKQYDMYQYRKLPRIVY

SEQ ID NO: 2264 - protein, 355 aa, unidentified
  source 1..355: note = Related to JAGAOS010000040.1; note = Clostridia bacterium
MKIVKNHIMFGAEDTNFIKKFGLSEALEMVENFRTLNNLPFIYDSLQLAGFLDIPLGVMFRMVRKGCDSLYHSHTIKKKNGGERQLYSPYCVLKRCQSIILRNILMKLPVSKYATAYKPKVSIVDNANPHIGKKYLLKMDITDFFDSISFEQVYSAAFNTRYFPKHIGVILTNLCCRSDSLPQGAPTSPAISNIVMKNFDNNIGNWCEERGISYTRYCDDLTFSSDKPLYHLYVKVKKMLYNMNFEVNENKTRFVTSASRQSVTGITVNQKLTVSREYKRELRQKIYYVLKFGVKSSLVYETNGFLGDDVNAIATHMLNVLIGKINYLLSVEKGEGNNYFKKAKGILILMRDELE

SEQ ID NO: 2265 - protein, 349 aa, unidentified
  source 1..349: note = Related to JAFVIF010000076.1; note = Clostridia bacterium
MKIKGNTVFFDSSDKSFIKKFGFSAAADMVMDFRSQNKLPFIYDLLQLSGFLSVDFKDTVRFLKKGCDNDYRTLTIKKRNGNDRILNVPSPTLKRCQRIIYNEILKNLPVSKYAKAYKKGVHLQDNASPHVGKKYILKIDITDFFGSITFREVYSAAFNTRYFPRHVGYVLTVLCCKDEALPQGAPTSPALSNLVMKGFDENIGKWCEARGISYTRYCDDMTFSSDEPLYHVYKKVTSLLEEADFSVNQSKTKFITNASRQSVTGLTVNQKVSVNREYKRTLRQELHYLFLYGAENCLIKTDNKQYFTNGKPDKNRYLSSLEGRIVFVLSVEKDNPYFKTALEKLRALY

SEQ ID NO: 2266 - protein, 354 aa, unidentified
  source 1..354: note = Related to SVOI01000004.1; note = Oscillospiraceae bacterium
MFINGQSIKFQNSDMAFVKKFGLIAATEMILDYKKKNSVPFIYDTFQLSQFLDISNKQVYRAVRNCDKTYSYVTIKKKNGNDRMLLVPGKQLKRIQRIILRRILNKIPVSEYATAYKKGATLYSNASPHTNKKYLLKLDITDFFNSIDFLTVYRFVFIKYYPKQISYMLTKLCCKNGFLPQGAPTSPALSNLVLKSFDDYIGEWCKKRGVTYTRYCDDMTFSGDRPLLDVYKKVKNVLDKNGFDLNENKTVFVSSGNRQSVTGLTVNEKVNVSKDYKRKLRQEIYYALKFGFEDAIIKSDNKNFITVENGVEIADSMKYQDSLIGRVNYVLQIEPDNAWFRTKAKELAEKAVFD

SEQ ID NO: 2267 - protein, 353 aa, unidentified
  source 1..353: note = Related to SVOH01000020.1; note = Oscillospiraceae bacterium
MYIKDGTVRFDACDKNFVKKFGLIEAANMVLDFSSTHNIPFVYDVWQLSVYLGENPKCLWPIVKHVDDMYKVCFVPKRNGGTRQLCSPNSRLKAIQHNVLKKFLNNMPVSKYATAYIKGKTLSDNAKLHTNKKYVLKMDISDFFGSIHFDKIYNSAFNTTLFPKQIGYMLTSLCCRKDVLPQGAPTSPALSNIVMKRFDDYIGDWCKGRGISYTRYCDDMTFSSNKPLYNMYVKVKKVLEDMGFELNDKKTHFITSNSRQSVTGLTVNRKVSVSKDYKRALRQEVYFALKFGLAESIMHGDKTDFVKNNAPDTAAYYHNLLGRVSYVLQIEPNNNYFCEAIRELRTGKILAQI

SEQ ID NO: 2268 - protein, 357 aa, unidentified
  source 1..357: note = Related to JAFOYN010000067.1; note = Clostridia bacterium
MKENSFTISFEQHDMPFLKKYGLFKAMRKVRNHNKKYKVPFIDDTYQLAHALSITRKQLFDLSRNANKHYKQILLKKRKGGVRVINAPDPELKDIQRRILRRILYKSEISKYATAYAPDRKLKDNATPHVNHKYLLKMDITDFFGSITFLEVISSAFNSKIYPTQIGAMLTALCCKDEVLPQGAPTSPMLSNIVMKNFDNAIGGWCEKRDITYTRYCDDLTFSADIPLYNVYQKVEDMLIQRGFEVNESKTKFITNSGRQTVTGLTVNEKVSIPRDYKRQLRQEIYYALKFGLSESIVYGNKTEFMDSRGPNCWRYYQHLKGKLNHVFQVEPNNMWFRDADEKLWVAYIQPNMRYPY

SEQ ID NO: 2269 - protein, 352 aa, unidentified
  source 1..352: note = Related to JAFOFE010000078.1; note = Clostridia bacterium
MKLNKISVSFEHQDLHFLKKYGFFKAASMAKKHYKKYDVPFITDIYQLSHLFHDFNKNVFKLSKNANKHYKKKILRKSNGGIRILHAPDETLKFYQRRILEKILYKIPISKYATAYVPGKKLQDNASPHIKHKYLLKMDITDFFGSITYMQVISTAFNSNMYPVQIGAILTSLCCKDDVLPQGAPTSPMLSNIVMKNFDDILGHWCEKRNITYTRYCDDLTFSANIPLYHVYNKVSEMLEKRGFEVNEAKTKFISNTSCQKVTGLTVNEKVAIPKEYKRQLRQEVYYALKFGLKDSIIKGKKKEYIEFGVPDIHRYYDHLNGKLTYVLQIEPQNEWFENAHKKLKNLYTLCT

SEQ ID NO: 2270 - protein, 358 aa, unidentified
  source 1..358: note = Related to JAFXAP010000013.1; note = Clostridia bacterium
MKLNKFTVSFEQQDMHFLKKHGFFKASSMVKKHYKQHNTPFIYDTYQLANELRIFHKDVFELSKNIRKHYKLIMLRKKNGGLRYIYSPDANLKHAQLQILKNILNNIKISPYATAYVKGKNLKDNAKPHTNHKYLLKMDITDFFGSITYLQVLSTAFNRKRFPTQIGAMLSSLCCLNDVLPQGAPTSPALSNIVMKNFDDIIGAWCKKRNITYTRYCDDLTFSANSPLYNAYIKVKNMLEERGFELNEEKTKFITNSSSQRVTGLTVNEKVSIPKEYKRQLRQEVYYAIKYGLADSIVKGNKSEYINYGKPNIHSYFSHLEGKIFYVLQIEPDNTWFVKAAEKLNDRFCYEIKSTQCT

SEQ ID NO: 2271 - protein, 352 aa, unidentified
  source 1..352: note = Related to JAFTLW010000024.1; note = Clostridia bacterium
MRFHNGILSFDASDRYFLEKHGLHNTIKAAGKHYDSYETPFIRDTYQLAHQAGTFRKTLFELCKNTSKHYKTITLKKKSGGVRYIHAPDGTLKCAQQYILRNIVNKIAVSPYATAYVKGKRLHDNAAPHTNHRFLLKMDITDFFGSITFLEVISSAFPAKMYPVQIGAMLTSLCCLNDVLPQGAPTSPMLSNIVMRSFDDFIGSWCQKRGVTYTRYCDDLTFSSDAPLYGVYLKVKETLENRGFTVNEHKTKFITNASSQRVTGLTVNEKVSIPKEYKQQLRQEVYYAVKFGLANSILFGNKTDFVKNGVPDPVSYYEHLLGKLQYVLQIEPHNQWFGKAIKDLCDRYYLSK

SEQ ID NO: 2272 - protein, 350 aa, unidentified
  source 1..350: note = Related to SVRX01000013.1; note = Oscillospiraceae bacterium
MKKASNIIRNIQVFVKKLIGIFANSHSSKKQKSNKGISKELQSLADTLGTTTGELFALSKKADSCYKEIRIPKRSNGFRIIHSPNGKLKKVQKKILQSIISKAETSPYAMAYKKGKNLKDNADPHINHLYLLKMDISDFFSSITFHQVLSSAFPSTLFPTQCGVILTSLCTKDGVLPQGAPTSPALSNLVMKSFDEHIGFWCNERGIVYTRYCDDLTFSADYPLVVLSYKIEDMLNRWGFQVNKKKTKYIFFSSRQTVTGLCVNKKVSIPSDYKKTLRQDVYYALKFGLEDSMIHGKKNDFFENGKWDTARYKCHLIGKVNYILQIEPENKWFQAAKENLSKSFDPPLNS

SEQ ID NO: 2273 - protein, 355 aa, unidentified
  source 1..355: note = Related to JAFVQI010000036.1; note = Clostridia bacterium
MMVKRFITRFEKQDMHFVAKHGFFRAARMVRAHKKKHNAPFIADTYQLAHELGVRRRELFGLTRHPEYHYRILTLRKRNGGLRVLHAPLYQMKQVQQHILKRILPHLPVSPYATAYVQGKALADNAAPHVGHKYLLKMDITDFFGSITYLQVLSTAFPSTFYPPQIGAMLTDLCCYKEALPQGAPTSPTLSNIVMCRFDNAIGGWCKKRGIAYTRYCDDLTFSADTPLYHVYEKVKDKLEGMGFAVNERKTHFVTAASRQTVTGLTVNEKVAIPADYKRQLRQEVYYAIRFGLADSINQGGKPFRTIGNNPDVRRYYNHLNGKLNYVLQVEPHNRWFACAKEDLRRQFEDEICRW

SEQ ID NO: 2274 - protein, 361 aa, unidentified
  source 1..361: note = Related to JAGBGQ010000166.1; note = Clostridia bacterium
MIINDWSVRFENADAHFVEKYGFFHACHKVRQHVEKYDTPFVQDTHQLAATLALRHRQFFRLLREADAQYERVEIPKKNGGVRVLYAPNPLLKRVQFLILRLFLDGMPISRFATAYCKGKSLRDNASPHTGHTYLLKMDITDFFDSITFPQIVGTAFPKDMYPSHIRAMLTALCCRNEQLPQGAPTSPAISNLVMRRFDDVLGEWCEKHDIAYTRYCDDLTFSANKPLFAVHQKATAMLEGMGFTVNEAKTRFVKNTSRQAVTGLTVNEKVSISAEYKRALRQELHYAIKFGIRDSLVKGLKTAFLTNGQPDTERYYRHLRGKINYVLSVEPQNTWFADALKRLEVVYHWEVYEYVRYGKR

SEQ ID NO: 2275 - protein, 347 aa, unidentified
  source 1..347: note = Related to SVPL01000026.1; note = Oscillospiraceae bacterium
MIVRKDGVVLKKEDDNYIKKFGLMKAAEIAIEYKQTHKTPFIHDLFQLAAFIGPGKRSFFKLLKNVNNEYSFFEIKKKNGGFRKIYAPSPELCRAQRVILRGILSCYDVSPYASAYIEGKGLISNAQPHTNKKYILKMDITDFFGSISFEQVISTVFNKNYFPSAVGYALTTLCCYKGYLVQGAPTSPMISNLVLKHFDDVMGVWCEKRGISYSRYCDDITFSANEPLFCAYSKAKAFLSEMGFEINKKKTRFVSHTSQQNVTGLVVNEKVSVPKEYKRDLRQKIYYFLKFDKKDTAFKQSGREYYSYINYLLGRANYVLSIEPNDKFLKESILVLREKSDVEYWNE

SEQ ID NO: 2276 - protein, 328 aa, unidentified
  source 1..328: note = Related to RKDE01000011.1; note = Clostridiales bacterium
MFYRKYHSCIFKGYIMNDFSLTEIFNMREKEIYYVSNHISKHYKRVEIPKKTKGVRILYIPSKKLIYMQRIILNAFLSEYKISECATAYHKGSTLVSNALPHRNKKYVLKLDIEDFFGSITYGRVYKMFFKHFPVKYAKLFTELCCYNDKLVQGAPTSPAISNIIMLDFDNRVESYCKENNISYTRYCDDITLSADFSLDRTYHRIKKELQKAGFELNKRKTHFVKNTHQQKITGVVVNEKIQVPIEYRKKLRQELYYLYKFGANNVILKNNYTDYISNGNTLDVKYINSLLGRINYVLQIDPDNNEFAKEKEKLCSYVQQIKIQKIF

SEQ ID NO: 2277 - protein, 304 aa, unidentified
  source 1..304: note = Related to JAFUWO010000134.1; note = Eubacterium sp.
MLESTFNMSKRELYYVSNNIGKHYKKIIIKKKSGENRTLYAPDKKLKYIHRIILKEFLSDYKISACATAYHKGAQLVDNALPHINKKYLLKLDIKDFFPSIMFGRVYKLFYSKFPEEYAKLFAELCCYDDCLVQGAPTSPAVSNIVMLNFDNELEAWCKSNFISYTRYCDDITLSSDEPLVSAYHYVKKLLNKNGFEVNKKKTRFIKHTHGQYVTGIVVNEHLQVTREYRRKLRQDLYYLYKFGARDVILKNKLDDYILGKTTLNAKYMQSLMGRINFVLQVDPDNKEFKEEKTKLINYMNIRI

SEQ ID NO: 2278 - protein, 322 aa, unidentified
  source 1..322: note = Related to NZ_HG005285.1; note = Candidatus Stoquefichus massiliensis AP9
MWKYMNQEMCNQFLLSLHLIDGDLSDQEKIKLLYTISNTIENQYEIIKIKKNSGKLRTIYCPHPLLKSIQRKILHQILNHKSISSYAKAYHPHIGLKENALPHVHQKRILKLDIQDFFNHIQFINVYESCFSLAYFPKPIGMLLTQLCTYHDDLPQGAPTSAYISNLVMKDFDEEIGDWCSQRNISYTRYSDDMTFSGDLIPADVIRKVKQYLNPLGLKLNYQKIHVINHSQQQNVTGIVVNEKIQVPRLYRRKIRQTMHYIEAYGLQSHLEKIGYQKSPERYLNHIYGQVLYILQINAQDKEFQIYKDKLKEYENSYTFSV

SEQ ID NO: 2279 - protein, 315 aa, unidentified
  source 1..315: note = Related to NZ_LN852692.1; note = Candidatus Stoquefichus sp. SB1
MWKYMDQNQSQEFLLSLHLLHNQLSDKEKVKMLYSISNSIEENYNIIKIKKRNGSLRTIYQPHTNLKLIQRQILKTILNNRSVSTYAKAYHKNIGLKDNAYPHVHQKRILKLDIKDFFEHIQFIDVYNACFSLAYFPQSIGHLLTQLCTYHGYLPQGAPTSAYISNLVMKEFDEQIGEWCENKHICYTRYSDDMTFSGDFNPREVIQRVRKALYPLGLEINNQKIHVIGNGQQQNVTGLVVNQKVQTSSRYRKKVRQAIYYMKKYGLESHLSAIQYQQSPQNYLHHLYGQVQYILQINPLDQEFQSYQEYLKKIK

SEQ ID NO: 2280 - protein, 317 aa, unidentified
  source 1..317: note = Related to DVII01000099.1; note = Candidatus Coprovivens excrementavium
MIIHTKEDCNNFLLSLNLINKNISDSEKLRLLYTLTNPIEKNYKIYKIRKKNGQFRQIYIPNNLLKSIQRKILKNILNNKKISIYAKAYKKGVCLKDNAYPHLNKKIILKLDIINFFDNIEYYDIYRTCFSKEYFPPSVGHLLTNLCTYESRLPQGAPTSAYISNLVLKEFDEEIGHWCDEHNISYTRYSDDMTFSGDFNPQEIIKKVRHYLNYLNLKLNNKKIKVISNSKQQRVTGLVVNKKIQVPKKYRYKIRQEVYYIKKYGLLSHLQKINYEDKPLHYLNSLLGRLNYLLSINSNIEFIKYKEYLTKLRKTYL

SEQ ID NO: 2281 - protein, 313 aa, unidentified
  source 1..313: note = Related to SVAU01000015.1; note = Firmicutes bacterium
MINHTKEQSKEFLLSLNLINSKDVLKKLYSISNRIESNYKVYKIRKHNGKYRTIYSPNTLLKSIQRNILKNILNNKKISKYAKAYHKNISLKDNAMPHLNKKIVLKLDIIDFFENIEYPTIYRYCFNEIYFPKSVGHLLTTLCTYESRLPQGAPTSSYISNLVMNDFDNTIGEYCEQNNISYTRYSDDMTFSGDFNPSKLITIVRRELYKLGLKINNKKIHVINNSQQQNVTGIIVNKKIQVSSSYRNKIRQIIYYIKKYGLKDHLNRINYQESPSTYINSLYGKTLYVLSIDKTNKEFINYKEYLKELKKAI

SEQ ID NO: 2282 - protein, 318 aa, unidentified
  source 1..318: note = Related to DVML01000007.1; note = Candidatus Fimihabitans intestinipullorum
MWKYIGTKECNDFLLSLHLIDCLDQRKYIKTIYSISNNIEKNYKIYKIKKSNGGYRTIYEPNPLLKQIQKRILTSILNHKAISRYAKAYHKGTQLKDNAFPHVNKNMMLKLDIKNFFETITFLDIYNSCFSIEYFPKSVGMILTYLCTYDNHLTQGSPTSPYISNLVMQEFDEELGSWCDLMGISYTRYSDDMTFSGQFNPRKIISKVRKMLYRLGMELNDSKTHVVYKSSSQKVTGVVVNEKMQVSKRYRNKIRQEIYYIKKFGLNSHLKKCNIDINSITYVNILYGKILYVLQINETDKEFIKYKQFIKDLKGNIG

SEQ ID NO: 2283 - protein, 317 aa, unidentified
  source 1..317: note = Related to JAFRQS010000031.1; note = Bacilli bacterium
MWKYIGTKECNDFLLSLNLFNCKDENHYIKTLYSISNNIENNYRIYKIKKRNGKYRTIYEPNPLLKHIQKQILINILNNKTISEYAKAYHKGISLKDNANPHINKDIILKLDIKDFFENISFLNIYNSCFQIEYFPKSVGMLLTTLCTYDDHLTQGSPTSAYISNLVMKDFDEELGSWCKENSISYTRYSDDMTFSGSFNPSDIIKKVRKMLYSLGLQLNSDKIHVVTKNACQTVTGLVVNNKVQVGIKYRKEIRKEVYYINKYGLQSHLKKINIKDKNKYLNSLYGRILYVLQINKNDKEFISYKKIINKIKSDLS

SEQ ID NO: 2284 - protein, 317 aa, unidentified
  source 1..317: note = Related to FR887372.1; note = Clostridium sp.
MWKYIGKEECNEFLLSLKLFNCKDKKKYLNTIYSISNNIENNYKIYKIKKKNGKYRTIYEPNSLLKHIQRQILVKILDNKAISKYAKAYHKGINLKDNAIPHLNKELILKLDIKDFFENISFIDVYNSCFSIEYFPKSVGMILTYLCTYDDYLMQGAPTSAYISNLVMKEFDEVLGLWCEENNISYTRYSDDMTFSGEFNPREVIVKVRKMLYKLGLELNNKKIHIIHKSSNQNVTGIVVNEKVQVSAKYRKEIRQEIYYIRKFGLESHLKKRNIDIEKEKYINILYGKILYVLQINNKDNEFNKYKKFMNDFKNKF

SEQ ID NO: 2285 - protein, 318 aa, unidentified
  source 1..318: note = Related to DLWG01000243.1; note = Firmicutes bacterium
MWKYIGLKECNEFLLSLNLFDCKDEKKYIRTLYSISNNVENNYKKYKIKKSNGKYRTIYEPSLLLKHIQRQILNNILNDRMISSYAKAYRRGSSLKDNAIVHQNKKIVLKLDISSFFDNISFIDVYNSCFSIEFFPKSVGMLLTSLCIYNDYLPQGAPTSAFISNLVMRSFDEEIGSWCSLKNISYTRYSDDMTFSGDFDCKEVINKVRKMLSIKGLELNKDKIHVIKNSSCQKVTGIVVNNKVQVCSNYRKSIRQEIYYIKKYGLESHKKYRNILSSNRKYLNSLYGKVSYVLQINRDDKEFIDYKNYLLKLLKDNL

SEQ ID NO: 2286 - protein, 316 aa, unidentified
  source 1..316: note = Related to JAFRAB010000047.1; note = Erysipelotrichaceae bacterium
MWDYIGVKECNDYLLSLHLFDCEDERKYIRTLYAIANNIRNHYRKFQIRKHNGKMRTIYEPSGILKHIQKRILGEVLEDLKVSPYATAYTRGKSLLDNACPHVGCKMILKLDIKNFFENIWFLDIYNSCFPIELFPKSIGMLFTYLCTYDDHLVQGAPTSAYISNLVMRDFDYAVGNWCRQQGIEYTRYSDDMTFSGDFDPAAVIRKVRRELYRLDMELNDSKTRVIYRSHRQCVTGVVVNEKPQVSKKYRKEIRKQMYYIEKYGLSEHLKRTGKAEKGYLETLKGCICYVLQINPDDAEFRQYLKKANELLYADK

SEQ ID NO: 2287 - protein, 316 aa, unidentified
  source 1..316: note = Related to JAFWHJ010000089.1; note = Erysipelotrichaceae bacterium
MWDYIGVKECNDYLLSLNLFDCDDRQKYIRTLYAIANDVRKHYTKYQIRKHDGKMRTIYEPSGILKHIQKRILTEVLEDMRVSPYATAYTKGKSLLDNAQPHVGQKMILKLDIRHFFENIWFLDIYNSCFPIELFPKSVGMLFTYLCTYDDHLVQGAPTSAFISNLVMREFDYEVGNWCNQKNISYTRYSDDMTFSGDFDPSGVIRKVRRELYKLDMELNDSKTRVIRRSHRQCVTGLVVNEKRQVSREYRKEIRKQIYFIQRHGLSEHLARIGRDEKGYLERLKGSICYVLQINPDDAEFRKYLEDIDELSYANK

SEQ ID NO: 2288 - protein, 322 aa, unidentified
  source 1..322: note = Related to JAFTRC010000024.1; note = Bacilli bacterium
MWKYITKEQVQEFLLSLNLLDNKLNDKDNINKLYSISNNIENNYKIFKIKKRNGKFRTIYEPNYTLKNIQRKILNNILNNKSISKYAKAYKKGTSLKDNAKEHLNKNIILKLDIKNFFESIQFIDIYNSCFPIEYFPKEIGMLLTFLCTYNNYLPQGAPSSSYISNLVMKEFDEYIGDYCDKNNISYTRYSDDLTFSGNFNPSIIIKKVRKDLLKMGLEINDSKTHIIKKGNRQSVTGIVVNEKLQISSDYRKEIRKQIYYIKKYGIESHLEFTNNNISEIKYLNSLYGKINYVLQINKDDNEFIEYKKYINKLLKEKRPKN

SEQ ID NO: 2289 - protein, 321 aa, unidentified
  source 1..321: note = Related to JAFQQQ010000003.1; note = Bacilli bacterium
MWKYITKEQTKDFLLSLNLIDDKLSDKEKINILYSISNNIENNYRIFKIKKRNGKLRTIYEPNPTLKNIQRRILNNILNNKSISKYAKAYKKGICLKDNAVEHLNKETILKLDIKDFFENIKFSDIYDSCFSIEYFPKEIGMLLTHLCTYNNHLTQGSPTSAYISNLVMKEFDEYIGDYCEDNNISYTRYSDDLTFSGNFNPSNVIKIVRKALLKLNLEINDDKTCIINKGNRQTVTGITVNEKAQICSTYRKNIRKEIYYIKKFGIDSHLKFTNNNITPLKYLRYLSGKINYVIQINNNDKEFLKYKIYINELLREKRVD

SEQ ID NO: 2290 - protein, 317 aa, unidentified
  source 1..317: note = Related to JAFQTN010000005.1; note = Bacilli bacterium
MWKYLSKDKEKEFLLSLHLINGVNDEDILNKIYTISNNIEKNYKIFKIKKRNGKTRTIYEPNPNLKIIQKNILHNILEDRYISYSAKAYKKGISIKDNANEHVDKDMILKLDIKNFFNNITYIQVYCSCFKEIYFPKSIGTLLTNLCTYNDSLPQGAPTSSYISNIIMLDFDIKIGEYCKENNVSYTRYCDDMTFSGNFSKMEIINLVKSELKKLGLTLNHDKTKLITKKNRQYVTGIVVNKKAQVSIDYRKEIRKNIYYIKKYGLNSHMNYQKMSLPKEKYLNILLGRINFVLEVDKANKEFIEYKKYILKLIKDR

SEQ ID NO: 2291 - protein, 317 aa, unidentified
  source 1..317: note = Related to HF998250.1; note = Coprobacillus sp.
MWKYTTKEVCNDYLLSLFSFDLISSNQETLKLLYKISNNKEKYYHVIKIKKKSGGYRTIYQPSPTLKYIQKTILDKVLKEKGISKYAKAYYNGASLTTNAKPHLNQKIILKLDIKNFFPSTNYLTIYKACFSKELYPKSIGTLFTSLCTYQDFLPQGSITAPYISNLVLKDFDNGIGTFCQKRNINYTRYCDDMTFSGNFDPHHIIKCVANKLHKIGYELNKKKIHIITNNKRQEVTGIVVNKKLQVPKDYRHKIRQELYYVTKYSLSSHLERNNIKDKETYLQSLYGKILYVLQIDPSNKEFIKYKELISLELNKM

SEQ ID NO: 2292 - protein, 317 aa, unidentified
  source 1..317: note = Related to HF993109.1; note = Mycoplasma sp.
MWQHLTKKQINNFILSLNLISFNNLSNKEKLKLLYTISNHGEKHYKVFKIPKKNGGYRTIYEPDYTLKMIQENILTNVLNERIISSYAKAYKKGLSLLDNALPHLRQKIVLKLDIKDFFPSIDFLKVYKKAFPRHIYPEAVASLLTNLVTYNNTLPQGAPTSSYISNLVLRSFDIKIGSFCQSKNIAYTRYCDDMTFSGEFNPQEIINLVKTELFKENFILNKKKIKIIKSNKAQIVTGIVCNEKLSIPRTYKKFIRQNMYYINKYGLNNHLKYINYLDSKDYLNKLYGQILFVLQIEKNNKEFLNYKNELIKLKEN

SEQ ID NO: 2293 - protein, 319 aa, unidentified
  source 1..319: note = Related to DVMT01000048.1; note = Candidatus Aphodocola excrementigallinarum
MFRYLSLDKYNDLLSSFNLVNTTDIKKINKMLYNISNNIDANYEEIIIHKKTGGLRFLYAPSKELKSIQKRILKNVLEEKKLSRYSYAYRKKVSVLDNAKPHVKKDVIVKLDIKDFFDNITFSMVYDSCFNETLYPKKMGMLFTNLCVYNNRLPQGAPTSGFISNIVLRNFDEKVGSYCEKRKISYTRYSDDLTFSGNFNVKDLIKYVNKLLYEYNFRLNKKKIKVVSKKTRQQVTGIVVNEKVNIRRNYKRKIRQEMYYIKKYSLKSHLKNIAYKCDEKTYLLNLLGRINYVYNITKDTEFYNYKKDVTKLVKKLDLK

SEQ ID NO: 2294 - protein, 317 aa, unidentified
  source 1..317: note = Related to HF990861.1; note = Firmicutes bacterium CAG:822
MLDNVTKDMANEFLLSLNLIDEKLSDKEKIRKLYTLSNNIEKNYKKTVILKKDGNKRIIYEPNYTLKKVQRNILDNVLSGFKVSKYAMAYVKGKSVKDNANMHVNKKLILKLDIKDFFNNISFMDVYNKVFLEEYFPKQARTVLTYLCTYNEFLPQGAPTSSYISNLIMQDFDEKIGLFCEKNNISYTRYSDDMTFSGDFNVKMVIFKVKDELKKMGMQLNYDKIHVIYSNMSQQVTGITVNEKPQVLKVKRRKIRQEVYYIKKYGLYSHLKRINVKDEFSYLRSLLGKINFVLMVNSEDLEFFKYREFILKIFNNL

SEQ ID NO: 2295 - protein, 313 aa, unidentified
  source 1..313: note = Related to SVAM01000009.1; note = Firmicutes bacterium
MWKYLTKEHKKEFILSLNLIGGKFSDTEKLNILYAISNNSEKYYTTKYINKKDGTKRELLVPNKTLKNIQKNILNNALNDLEVSKYACAYIKNKSLKDNASPHINQKVVLKLDIKDFFTSITFEEIYKVIPNELFPTSIKVLMLKLCTYYDYLPQGAPTSPYLSNLVLKNFDNYIGTYCKERNINYTRYCDDLTFSGDFDVKKLKNKVQAFLEEIGYNLNDKKTKVIKNNKRQIVTGLVVNEKVNIPISYRKKIRQEMYYINKYGIDSHLKYINNTNKEKYINSLKGKINYCLNINPNNTEFQSYLKKLNNLL

SEQ ID NO: 2296 - protein, 315 aa, unidentified
  source 1..315: note = Related to JAFWVI010000074.1; note = Ruminococcus sp.
MIDTDVLIISETLDVPVNKLYMLSNNYTSRKKHRRSKYENYHMVVIHHGIVHKKRMLSVPNAFLKTVQRRILDQYLYQLEESEYSTAYCKGKSLLDNASPHVGKECVLKLDISHFFDSIDDDMVYLVMKRLGLSVPATALLTHLCTYRAKLPQGAPTSPYIANLAMKQFDEKLGRWCSERNIAYTRYCDDMTFSGSKAAIRESRIISKVRSMMYRMGFMLNDKKTVFISSSQQQRVTGIVVNEKPVLSRTQRRAIRQEVYYCQKYGAAKSIKRRKLNISPDKYLHSLLGRIAFALQIEPDNSEMKGYFETVKNMI

SEQ ID NO: 2297 - protein, 315 aa, unidentified
  source 1..315: note = Related to FPJT01000001.1; note = Ruminococcus flavefaciens
MLDADIIKISEALDVPVNKLYMLSNNYKPRKKRRGSTYENYHTVVIHHGRGHKNRRLSVPNAFLKMVQRRILECYLYQLEVSDHSTAYCKGKSLLDNASPHVGKECVLKLDISHFFDSIDDDMVYLVMKHLGLSVPATALLTHLCTYKTRLPQGAPTSPYIANLVMKQFDEKLGCWCRRNNITYTRYCDDMTFSGTKSAIRESRIISKVRSKLYHMGFTLNDKKTVFISSSQQQRVTGIVVNEKPVLSRSQRRAIRQEVYYCQKYGAVESINRKGLDIPSDKYLRSLLGQIAFAMQIGPDNAEMRRYFDTIKNLI

SEQ ID NO: 2298 - protein, 317 aa, unidentified
  source 1..317: note = Related to JAFTYF010000065.1; note = Ruminococcus sp.
MIDADVMKISETLDVPANKLYMLSNNYTARKKRRGSKYENYHTVIIHHGRGHKNRKLSVPNAFLKMVQRGILEQYLYQLEISEYSTAYCKGKSLLDNASPHVGKECVLKLDISHFFDSIDDDAVYLVMKRLGLSIPATTLLTHLCIYKARLPQGAPTSSYIANLVMMQFDERLGSWCSERNITYTRYCDDMTFSGNKADIRSANVVGKVRRMLYRMGLTLNDKKTVFISSSQQQRVTGVVVNEKPTLSRSQKRSLRQEVYYCQKYGAAKSINRRGLDISPDKYLHSLLGRIAFALQIEPENAEIKEYFETVKNLINT

SEQ ID NO: 2299 - protein, 314 aa, unidentified
  source 1..314: note = Related to NZ_JAEF01000007.1; note = Ruminococcus flavefaciens
MYNDIPYIAETLRVPVGKLYMLSNNYKPRKKRKGSIYENYHTVVIHHGRGHKNRTLNVPNAFLKLVQRRLLDNFLYQLKVSEYSTAYCKGNSLLDNAAPHVGKECVLKLDISHFFDSIDDDKVLFVMKRLGVSITATVLFTHLCTYKGKLPQGAPTSPYIANLVMKQFDEKLGHWCSEYNITYTRYCDDMTFSGYKADIHSAKVVGKVKRMLYHMGFTLNDKKTVFINSSQQQRVTGIVVNEKPTLSRSQKRTLRQEVYYCQKYGAAESINRKGLDISPDKYLHSLLGRIAFALQIEPDNSEMREYFETVKNLI

SEQ ID NO: 2300 - protein, 318 aa, unidentified
  source 1..318: note = Related to JAFPPE010000436.1; note = Ruminococcus sp.
MDSDVISIAENLGTTAAKLYMLSNNYSPKNKRHGSRYANYHKVTIQKPGSHKSRTLHVPNGFLKMIQRRILDKYLYTLEVSEFSTAYRKGTNLLDNALPHVGKECVLKLDISDFFGSIDDDAVYMAMKGLGLSVPATALLTHLCTYHGILPQGAPTSPYIANLVMRHFDGKLGKFCISRNIAYTRYCDDMTFSGSREDILRAKLPGKVKAMLAARNFILNDSKTVLVYASRQQRVTGIVVNEKTTVPRSSRREIRQQVYYCRKFGAQDCIRRKGLDITPEKYLSGLLGRITFALQTDPENKQMQEHFRTVREMIGKLT

SEQ ID NO: 2301 - protein, 317 aa, unidentified
  source 1..317: note = Related to JAFXEJ010000141.1; note = Ruminococcus sp.
MTDSDVLKIASEIEISVNKLYMLSNNNSPRHKSRKKKHRNYHTVIIHRGRGHRNRILSVPNTLLKLVQRKILDCFLYQLETSEYSTAYCKGKSLLDNASPHIRKECVLKLDISHFFDSITDDSVYLVFKQFGLSVPATSLLTHLCTYKGKLPQGAPTSPYIANLVMKNFDKKLGKWCKERNITYTRYCDDMTFSGDKTSVRKNKIIVKVKAMLGSMDMKLNDKKTIFISSSQQQRVTGIVVNEKAAIPREMRRSIRQEVYYCTKFGISDSLQQQRLDISPDKYLHSLLGRISFALQIDPYNSEIQKYFDTVKQLMNA

SEQ ID NO: 2302 - protein, 317 aa, unidentified
  source 1..317: note = Related to JAFVBU010000121.1; note = Ruminococcus sp.
MIDKDVLQISETLGVPVGKLYMLSNDYIPRKKSRKSKYNNYHTVVIHRGRGHKNRVLSVPNNFLKMVQRRLLERYLYRLDVSECSTAYSKGKSLLDNASPHVGKECVLKLDISHFFDSIDDDMVYMIMKQFGLSDPATALLTNLCVHNCKLPQGAPTSPYIANLVMTHFDEKLGAWCSERSIAYTRYCDDMTFSGTKEAVKSSHIIRKVKRMLYRMGFELNEKKTVFISSSQQQRVTGIVVNERPQLTREMRRSIRQEVYYCTKYGVKESLQHRGLDISEQKYLHSLLGQISFALQIDPQNEDMRRYFDTVKNLMNT

SEQ ID NO: 2303 - protein, 317 aa, unidentified
  source 1..317: note = Related to JAGAMS010000071.1; note = Ruminococcus sp.
MIDADVIKISETLDVPVGKLYMLSNDRFPRKRRRKSKYTNYHTVIIHRGRGHRNRKLSVPNSFLKMVQRRILEHYLYNLDVSAFSTAYCRGKSLLDNASPHIGKEYIVKLDISHFFDNIDDDMVFMIMRQLGLTMPATSMLTNLCVHNGRLPQGAPTSPYIANLVMKHFDEKLGVWGAENNITYTRYCDDITLSGTKKAIESSHPVGKIRRMLYRIEFNLNEKKTVFASSSQQQKVTGIVVNEKPQISREMRRAIRQEVYYCAKFGVTESLKRNGLNISAKEYHHSLLGRISFALQVDPANDEMQSYFNTVKNLISK

SEQ ID NO: 2304 - protein, 320 aa, unidentified
  source 1..320: note = Related to UETD01000003.1; note = Ruminococcus flavefaciens
MTDVDVMLISEVLGVPVRKLYMLSSDRVPRQKRGGSYSNYHQSVIYTGRTKKKRVLTVPNGFLKLVQRRILDRCLSKLPVSEYATAYRKGTSVRDNALLHTGKEFIIKLDISGFFDSINDDAVYMVMKQFRLSPRATSLLTHLCVHRGVLPQGAPTSPYIANLVMKHFDEHIGAWCAERNITYSRYCDDMTFSGSRDDLLGSRLVGKVGRTLYAMGFTLNREKTVFAGSSQRQTVTGLVVNEKADLPREKRRELRQEVYYCLKYGVREHLSQRGSSDAPLRYINGLMGRLAYQLQQRPEDEKLREWFVQIKKLRESEGDK

SEQ ID NO: 2305 - protein, 317 aa, unidentified
  source 1..317: note = Related to NZ_ATAX01000036.1; note = Ruminococcus flavefaciens
MTDVDVMLVAEVLGVPVHRLYMLSSDRMPRNKRGGSYSNYHKSVIYSGRSKKKRVLTVPNGFLKTVQRRILHRCLYKLPVSEYATAYCKGRGPADNASPHTGKDYIIKLDISDFFGSINDDAVYMVMKQLKLTPRATSLLTHLCVHNGVLPQGAPTSPYLANLVMKHFDGRIGSWCAERNISYTRYSDDMTFSGRRGDLLASGLTGRVRNMLYSMGFELNSKKTVFAVCSQRQTVTGAVVNEKVNVPSELRRKLRQEVYYCTRFGVEDHLARCGSGEAPKAYISGLLGRLSYALQLRPDDEWLRSGFEKIKAMSNDI

SEQ ID NO: 2306 - protein, 319 aa, unidentified
  source 1..319: note = Related to JAGPNI010000006.1; note = Ruminococcus sp.
MTDSDVLAVSHALDVPVGKLYMLSNERIPRQAKSSSSKYKNYHTVVIKKGLFRKSRKLSVPNALLKMTQRRILHQYLYRLELSSFSTAYQPGRSLKDNASPHLHQEYLIKLDISKFFDNIDADMVYSVMRQLGLSQAATVLLMRLCVHNSVLPQGAPTSPYIANLVMKRFDEHLGEWCGRRGINYTRYCDDMTFSGRKTDLLTCDLVRKVRRMLHGMGFELNERKSLFLSCANQQKVTGIVVNEKLQVPRELRRQLRQEVYFCLKFGPKESMKRRGLKTSPEQYLHSLLGRIAFALQIDPDNLEMQGYHSQIKELTAQL

SEQ ID NO: 2307 - protein, 319 aa, unidentified
  source 1..319: note = Related to JAFUAO010000003.1; note = Ruminococcus sp.
MTDRDVTELSRALGVPVGKLYMLSNERIPRKPKRGSSKYKNYHTVVIKKGLFRKSRKLSVPNGLLKMTQRRILHQYLYRLEASRYSTAYQPGRSLRDNASPHLGQEYLIKLDISKFFDNIDADMVYNVMRQLGLSRAAAVLLMRLCVHNSVLPQGAPTSPYIANLVMKPFDEHLGDWCRARGINYTRYCDDMTFSGRKADLLTCHLVGKVRKMLRRMGFELNDKKTLFLSRGSQQKVTGIVVNQKLKVPRELRRTLRQEVYYCTKFGAEESLKRRRLDMAPEEYLRSLLGRIAFALQIDPEDSEMQGYHSQIKALAAQK

SEQ ID NO: 2308 - protein, 320 aa, unidentified
  source 1..320: note = Related to JAFZOZ010000090.1; note = Clostridia bacterium
MADADVIKIAQSLGVSVKSLYMLSNNPMRLREKRRKPRYENYRRVVIHRGRGRKNRVLSVPNEFLRRVQRGILKKYLYNLEPSEYATAYLPGFSVRANALPHTGKEFIVKTDILHFFDSIDEELVWRTVRELGFSIPATTLLTDLCVYRDRLPQGAPTSPHLANLVMRRFDEKIGAWCKERGITYTRYCDDMTFSGQKDALCGVGLIGEVRKELHRIGLQLNDEKTAFIPASQQQRVTGAVVNKKTRLSRDARRELRQAVYYCEKFGVKEHLAHRNDPSAPEEYLRSLLGKISFALQLDPTDGEMREMFRKIKKLTDGSK

SEQ ID NO: 2309 - protein, 325 aa, unidentified
  source 1..325: note = Related to NZ_HF545616.1; note = Ruminococcus sp.
MNDIDNDIIRISEELDVPLKKLYMLSNNRIRYHKRNQKKCYSNYRKVIIHRGRGHKNRVLKVPNEYLKLVQRRILERYLYTLSVSEYATAYCKNSSLLKNAEPHIGQQRVLKLDVSGFFDSIDFGKVYGVMCELGFSKPATTLLTNICTYNSILPQGAPTSPQISNLMMKRFDERIGKWCGERGINYTRYCDDMTFSGGKAVLNAKEITQLVSRALWKMGFKLNMKKTTLIGSSQRQQVTGIVVNEKAQISSKQRREIRQEIYYCEKYGVSQSLFFKGADITPEKYINSLLGRISFALQIDPADVKMHEYFKVVKKLKSEVCVEK

SEQ ID NO: 2310 - protein, 319 aa, unidentified
  source 1..319: note = Related to JAFWIW010000020.1; note = Candidatus Saccharibacteria bacterium
MNEQEVNYMSSLFLGASTLEKRDLINLMPNKIVRKYYIRHDIPKRTGGIRVIYEPSQTLKTVQRRINRWFLKDAPVSDFAFAYVKGRCILDNAKPHVGKPILLKLDIHHFFDNIHFESVFDIFKSLGFSENFARLVAGLTTVDDYLPQGAPTSPALSNLFLKEFDEEIGEYCSKNDIVYTRYSDDLTFSMYRFNPDLVKFVREKLGALGLELNRKKSKIICGPLQKRVTGVVVNNKPQVPRSYRHKIRQEMYYISKYGLDASLNTRNITDKEKYVSCLLGQINFVLQINKNDDEFKKYREILMTPSLDNLRSQLTNLLN

SEQ ID NO: 2311 - protein, 310 aa, unidentified
  source 1..310: note = Related to JAFSSJ010000008.1; note = Bacilli bacterium
MNSNEKKFLLSLFSFDKNLSDNEKIKKMYIMSNRIEKYYHHFTIKKRNGTERNILCPYTQLKKIQLNILNGLLYDKSVSVFAKAYIKNSYLVDNTIIHRGHKYILKLDIHNFFENISYVDIFNIYKEYGFSNALCSLLAHLTTYNDYLPQGAPTSPYLSNLVLRNFDYKVGKWCEKQNINYTRYSDDMTFSMNEYNKDLIRFIRINLFKQGLELNNEKICLIHHSQQQKITGIVVNDKIQVDSKYRKKIRQELYYINKYGLDEHLERNKTKDKKKYLKILYGKILFVLSVDKNNKEFIKYKMIVRKILNG

SEQ ID NO: 2312 - protein, 350 aa, unidentified
  source 1..350: note = Related to JAFTUG010000010.1; note = Clostridia bacterium
MLYLNSQKALIDLLYEDWCEDISKEVFTAFIYRISNNPQNFYRRNQIYQKNGKVRNVDVPSQGLKIIQRIILKRILENIPVHNSARAYIKGSSLRDNAGAHCGRKCVVKLDIKRFFEHIDEKSVYLIFRRLSYPPDVCRMLTKLCCLKGRLPTGAPTSPYLSNLFMKKFDREMSLFCENKNISYTRYSDDITFSFDSFDKTRLIRVTRNFLGLYANGLPLNQKKIFVVTSNKKQKVTGLVVNEKTSVDKELRRNIRQAVYYIGKFGVSDHIRHLQSSEYGGWVMFIADDWHFRMVKLRYLRTLQGRISFCLCADPDNTEMKQYAEFIKEIIKKEKEEICILKMSFQNAKK

SEQ ID NO: 2313 - protein, 306 aa, unidentified
  source 1..306: note = Related to SVTP01000007.1; note = Oscillospiraceae bacterium
MIVYQELASIERDLGFSAKTLYGLSNHLEKHYHNVLIPKSDGSKRKLSVPELILKRVQRSIADHILVQFPVSNYAKAYKIGGSVQHNAQPHVGKKKILKLDIEGFFDHILYSQVKEKVFCKEKFAEPIRILLTMLCYYKESLPQGAPTSPAITNIIMYDFDQTVGAFCNERGISYTRYCDDMTFSGDFDEGEVIAFVKGELYRLGLFLKNRKTVVVPASKRQTVTGIVVNEKINLTKEYKKKIRQEMYYIQKFGIDEHLTRLGVSDKRGYLLSLMGRISFVLQTVPNDCEFAKYRKMLTQGSFQNA

SEQ ID NO: 2314 - protein, 303 aa, unidentified
  source 1..303: note = Related to SVQS01000086.1; note = Oscillospiraceae bacterium
MIVYKELASIEQDLGFSARTLYGLSNHLEKHYHNVFIPKSDGSKRKLSVPDLILKRVQKSIADNILVQFPVSRYAKAYKVGSSVQRNAQPHIGKKKLLKLDIEGFFDHILYSQVKDIVFCEEKFAEPIRILLTMLCYYKESLPQGAPTSPAITNIIMFDFDETVGAFCNKKNIAYTRYCDDMTFSGDFDEGEVITFVKKELFKLGLFLKNRKTVVLPASKRQTVTGIVVNEKLNITKEYKRNIRQEMYYIQKFGMDEHLNKLGISDKRGYLLSLKGRISFVLQTIPNNREFVEYRKVLNANLL

SEQ ID NO: 2315 - protein, 377 aa, unidentified
  source 1..377: note = Related to SVRN01000036.1; note = Oscillospiraceae bacterium
MASRHLFTHAQLIRCTSPTKDFLRKLLLNGLVPLSRNAHRSAARLRKLHLADLRLRVSPCKLVLFYDPSGKESDMIVYKELASIEQDLGFPARTLYGLSNHLEKHYHNVFIPKSDGSKRKLSVPDLILKRVQKSIADHILSQYPISRYAKAYKVGSNVQRNAQPHVGKKKMLKLDIEGFFDHILYSQVKNIVFYKEKFSEPIRVLLTMLCYYQEALPQGAPSSPAITNIIMYDFDERIGAFCNEKHIAYTRYCDDMTFSGEFDEREVISFVKEELSKLGLFLKNRKTAVIPASKRQTVTGIVVNEKLNVTKEYKKAIRQEMYYIKKFGVDDHLARLGISDKQHYIRSLAGRIAFVLQTTPSDGEFAGYKKFLAECSL

SEQ ID NO: 2316 - protein, 303 aa, unidentified
  source 1..303: note = Related to SVST01000008.1; note = Oscillospiraceae bacterium
MIVYKELASIEQDLGFSAKTLYGLSNRLEKHYHTVYVPKSDGTKRKLSVPDLILKLVQKSIADNILVQYPISRYAKAYKVGSNVQKNAHPHVGKKKLLKLDIEGFFDHILYSQVKDIVFYQEKYAEPIRILLTMLCYYHDSLPQGAPTSPAITNIIMYDFDETVGAFCDSKNIAYTRYCDDMTFSGDFSEKEMIGFVKNELSKLGLHLKKRKTAVIPATKCQCVTGIVVNEKMNLTKDYKKKIRQEMYFIKKFGLDGHLKKMGVSDKEQYLLSLKGRIAYVLQTIPNNDEFTEYKKILHSIRV

SEQ ID NO: 2317 - protein, 302 aa, unidentified
  source 1..302: note = Related to JAGALS010000020.1; note = Clostridia bacterium
MIIYKELSSIEKVLAYPAKTLYGLSNNLEKHYHTVFVPKSDGSKRKLSVPDLILKNVQRSIADHILAYYPISRYATAYKVGSSIQKNARPHVNKKKILKLDIEGFFDNILYSRVKDVVFYEEKYSEPIRILLTMLCYYQESLPQGAPTSPAITNIIMYDFDEKIGAYCTEKGVSYTRYCDDMTFSGDFDEKEVIALVTSELQKLGLFLKNRKTVVIKNTKRQTVTGIVVNEKINLVKEYKKKIRQQMYYIKKFGIESHAEHLGITDVFGYLSSLKGQVAFVLQTCTQNAEFKGYQEFLQNLK

SEQ ID NO: 2318 - protein, 302 aa, unidentified
  source 1..302: note = Related to JAFTNT010000011.1; note = Clostridia bacterium
MIVYKELCSIEKDLGYPAKTLYGLSNRIEKHYHTVFIPKSDGTKRRLSVPDLILKSVQRSIADNILAYYPISEYATAYKVGSSVQRNARPHVNKKKILKLDIEGFFDNITYSRVKDIVFYEDKFSEPLRVLLTMLCYYRDSLPQGAPTSPAITNIIMYDFDEKIGAYCSKNGVSYTRYCDDMTFSGDFNEQEVISLVKEELRKLGLFLKNRKTAVIERTKRQTVTGIVVNEKINLTKEYKRKIRQEIHYIEKFGIEGHAKKQAITDVAEYLTSLKGRIAFVLQTCPDDSEFLKYKAIVHPLH

SEQ ID NO: 2319 - protein, 302 aa, unidentified
  source 1..302: note = Related to JAFVUY010000073.1; note = Bacilli bacterium
MIVYRELNTLATDLGFPLKTLFALSNNIDKHYHNAFIPKSDGTKRKLSVPDKILKLVQKSIADNILAYYPVSKYACAYTYGSNVQKNAAPHIGKKKILKLDIEGFFDNIIYSRVKDIVFYKEKFSEPVRVLLSMLCYHRDALPQGAPTSPAITNIIMYDFDEIIGCYCNEKGISYTRYCDDMTFSGDFDEKEVIVLVKQELKKLGLFLKNRKTAVIPNTKRQTVTGIVVNEKINLAKEYKKKIRQEMHYITKFGLDEHLKRTGETDKKKYLLSIKGRIAFVLQTTPNDKEFLEYKSLLTKEK

SEQ ID NO: 2320 - protein, 302 aa, unidentified
  source 1..302: note = Related to SVHW01000007.1; note = Clostridiales bacterium
MIVYRELKSIEHDLGFSAKTLYGLSNNLDKHYHNAFIPKSDGTKRKLSVPDLILKKVQRSIADNILAYYPTSKYACAYAYGASVQKNAMPHVGKKKILKLDIEGFFDNIIYSRVKETVFFKEKFSEPIRILLSMLCYYLDSLPQGAPTSPAITNIIMYDFDEKIGSYCAEKGIAFTRYCDDMTFSGDFNEKEIIELVKSELKKLGLFLKNRKTAVVPNKKRQIVTGIVVNEKINLTKEYKKKIRQEMYYIKKFGLEDHLRKIGQSDKQRYLLSLKGKIAFVLQTIPDKNEFLEYKELLSRKY

SEQ ID NO: 2321 - protein, 301 aa, unidentified
  source 1..301: note = Related to JAFXAN010000018.1; note = Clostridia bacterium
MIVYKELKTIEHELGFPAKTLYGLSNNLESHYRTVFIPKRDGNKRKLSVPDSILKMVQRAIADNILSYYPVSSYAMAYSPGCSVQRNASHHIGKKKILKLDIEGFFDNITYSRVKDIVFFKEKFSEPIRILLTMLCYYKESLPQGAPTSPVITNILMYDFDERVGEYCREKQISYTRYCDDMTFSGDFDEKKIIAFVKNELKKLGLFLKNRKTAVVPVTKRQTVTGIVVNERINLTKDYKKKIRQEMYYIRKFGIDGHLKKLEITDKKAYLNSLKGRISFVLQTIPNDKEFLEYKNILKCQ

SEQ ID NO: 2322 - protein, 302 aa, unidentified
  source 1..302: note = Related to JAFTHO010000004.1; note = Clostridia bacterium
MIVYHELASLQKDLGFSAKTLYGISNNIAKHYHTVLVPKKDGTKRKLSVPDVMLKRVQRAIADNILSQYPVSRYATAYKPGASVQKNAGKHVGKQKILKLDVKGFFDNILYSQVKDIVFYEKKFSEPIRILLSMLCYFNDSLPQGAPTSPAIANIIMYQFDQNVGSFCKQNNVTYTRYCDDMIFSGDFDERQIVSFVTSELKKLGLFLKDKKTAVIPNSKRQIVTGIVVNQKANVARQYKSKIRQEMFFIKKFGIDGHLQKTGINNRQKYLNSLKGRIAFVLQTLPGDKEFLKYKNYLANLK

SEQ ID NO: 2323 - protein, 315 aa, unidentified
  source 1..315: note = Related to JAFVYN010000052.1; note = Clostridia bacterium
MIVYHEVATVARELGIPLKTLYGVSNNISAHYHKVALPKKNGGTRILSVPDPVLKTIQCAIADTLLPLSPVSRYAKAYKPAASVKANALPHVGKKKLLKLDILHFFDSILYSTVKEKVFPASRYAEPIRILLTMLCYERDALPQGAPSSPAITNIILFDFDETVGAFCHERGIAYTRYCDDMTFSGDFDEKEVTAFIEAELRIRGFFLNRSKTAVIRHTRRQTVTGIVVNEAPALPRATRRELRQAVYYCKTYGVANHLARIQSSTSPGKYLEKLLGKISYALSVDPDDADLQKARKTVLLLIGLEKHIPDPTQP

SEQ ID NO: 2324 - protein, 305 aa, unidentified
  source 1..305: note = Related to JAFTKF010000062.1; note = Clostridia bacterium
MIVYRELSTLERDLGFSAKTLYAVSNSIDRHYHKVTLPKKSGGTRTLSVPDEILKKIQRAIAEKLLAYHPVSQYAKAYKPAASVKRNAMPHVGKKKLLKLYILHFFDSVLYNTVKDRVFPETVFSEKLRILLSMLCYYRDVLPQGAPTSPVITNIILYDFDETIGDFCLSRGIAYTRYCDDMTFSGDFDEKEIIKTVQQELNARGFLLNRKKTAVVPSSKRQVVTGIVVNEKLSLSRSARRSLRQALYYCKTYGVSEHLAHCGIHDTPKHYLESLLGKIAYALSIDPDDSELLNCKETVTRLLQE

SEQ ID NO: 2325 - protein, 307 aa, unidentified
  source 1..307: note = Related to JAFTRY010000008.1; note = Clostridia bacterium
MIVYTELRSLEIDLGIPIKTLYAVSNNINAHYYSKSIPKSDGSQRVLSIPDEPLKKIQRAISEKLLVYEPVSIYAKAYKPTSSVRKNAVCHVGKEKLLKLDIYKFFDSINYSLVKEKVFPSNKYSEQIRILLSLLCYKGEPLPQGAPTSPVISNIIMRDFDQTVGEWCKERKISYSRYCDDLSFSGSFDETDVIEFVTVNLKSLGCILNKKKTHCFKGKEKKTVTGVVVNEKINTQKSYRRQIRQEFFYCQKFGVQEHLSRIGSSEKPYNYLSRSLGQINYVLQITPDNKEFLSYKVQILALLKEHK

SEQ ID NO: 2326 - protein, 307 aa, unidentified
  source 1..307: note = Related to SVSM01000002.1; note = Oscillospiraceae bacterium
MIVYKELQSLETDLGVTAKTLYATSNNINAHYHNKSIPKSDGSIRVLSIPDEPLKKIQRAISEKLLAYEPVSIYAKAYKPASSIRKNAICHVGKEKLLKLDIYNFFDSIKYSLVKEKVFPAKKYSEQIRVLLSLLCYKGESLPQGAPTSPVISNIIMRDFDQTVGEWCEERKIRYTRYCDDMSFSGSFDESNVIKFVEGELKSLGFILNRRKTRCFTGGNKKTVTGIVVNEKINTEKSYRRQIRQEVFYCKKFGVQEHLTHMGSPENPYNYLSRLLGQINYVLQITPDNKEFLNYKVQILNILKDNQ

SEQ ID NO: 2327 - protein, 311 aa, unidentified
  source 1..311: note = Related to JAFVSI010000037.1; note = Clostridia bacterium
MVVYRELSSIEADLGIPARTLYRLSNNIGKHYREKKIPKSDGTVRLLSVPDEILKKVQRSIAEKLLAYEPVSLYAKAYRIGGSVISNAAPHVGKEKILKLDIYHFFDSISYSSVKEKCFPAEKYAEKIRILLAMLCYHGESLPQGAPTSPIISNIILRDFDIEVGRWCSERKIFYSRYCDDMTFSCDGDFDGAEVTAFVKQKLGVLGFILNDRKTRLLKKGDKKTVTGIVVSEKLNASKEYRRTVRAEIHYCQKFGVEGHLSRTANALAENPSKYLASLMGKVNYVLQITPENKEFLEYKEYLSDIIKEFK

SEQ ID NO: 2328 - protein, 306 aa, unidentified
  source 1..306: note = Related to SVRW01000015.1; note = Oscillospiraceae bacterium
MIVYKELKSIEKELGFSSKALYGLSNNLGKHYHKVEVPKKSGGTRTLSIPDEALKKVQRAIVQSLLEFENVSFHAKAYKYNSSITKNASPHVGKEKILKLDIYRFFDNISYSAVKEKVFPAEKYSEQIRILLSMLCYYNEALPQGAPTSPIITNILMREFDNVLGEWCKKRNVDYTRYCDDMTFSGSFDEKEIIDYVIHLLCGFGLRLNDKKTKVFTSSQKQIVTGIVVNKKMNVSKAYKREIRKEVYFCKKFGVENHIEHEEIQLSPERYLNSLLGRINFVLQVCKNDKEFKEYKKIISKIIKNK

SEQ ID NO: 2329 - protein, 307 aa, unidentified
  source 1..307: note = Related to JAFTKI010000072.1; note = Clostridia bacterium
MIVYRELSTLSRDLGIPAKTLYAVSNAQDKHYRLIKIPKKDGTDRTLSIPDEILKKIQRAISEQLLSREPISRYATAYRPASGILKNALPHVGKAKLLKLDILHFFDSILYSAVKERAFPADRYSESNRILLSMLCYYRDTLPQGAPSSPAITNIIMRDFDEAVGAWCAERKIAYTRYCDDMSFSGDFDEEEVIEYIAARLKELGFTLNRRKTVVKTNSQQQTVTGIVVNQKPNISAKYKREIRQAVFYCTKFGVTEHQKQIGSSQSPVAYLQALLGKINYVLQVCPNDTSFAAYRKSVLALLEKNR

SEQ ID NO: 2330 - protein, 307 aa, unidentified
  source 1..307: note = Related to JAFVTO010000133.1; note = Clostridia bacterium
MITYKELATVEGELGIPLKTLYSVSNNVNAHYRRVLIPKKDGTYRNLSVPDAPLKRIQRAINEKLLVYEPISRYATAYRIASGIRNNALPHIGMPKVLKLDIKGFFDSVTYSLVKERVFRKEKYSEPVRVLLTILCYYKDVLPQGAPTSPVITNIVMREFDEVIGEWCGKKGIAYTRYCDDMTFSGDFDEKEVKAFVAGELKKQGFFLNAQKTVVATAAKRQTVTGVVVNKKANVSSEYRREIRKEVFFCQKYGVAEHIERLGLDVDTKNYLRKLLGRINYVLQISPDDGVFQGYKNAVTEMLANER

SEQ ID NO: 2331 - protein, 307 aa, unidentified
  source 1..307: note = Related to JAFTUH010000073.1; note = Clostridia bacterium
MIVYKELSSVEADLGFPAKTLYGLSNNLSAHYREVKLPKRDGSFRTLNVPDEILSRVQRAIADKLLSYEPISTYATAYRIAGSVCKNAVPHVGKAKLLKLDIAHFFDSVLYSTVKENAFPKEKYAEKIRVLLAMLCYCGEVLPQGAPSSPMITNIIMRDFDEAVGKRCRALGVSYTRYCDDMTFSGDFDEGEIVPFIRDELRKRGFFLNEKKTAVVPFCRRQIVTGVVVNEKLNISADYKRKIRQEVFFLRKFGVADHLRRTASPFSEKQYLMRLLGRINYVLQISPDDAKFLDYKEAVIRILKEAK

SEQ ID NO: 2332 - protein, 328 aa, unidentified
  source 1..328: note = Related to JAGBRZ010000213.1; note = Clostridia bacterium
MCGTTFRPIAIQMYCLAVVYVSMIVYTELKSVEQDLGISAKTLFSVSNSLSSHYKRVKIPKKNGSFRELSVPDEVLKKIQRAIVQKILVYEPISKYAQAYKTGASVQRNASHHVGKKKILKLDIKHFFDSILYSTVKDKCFPAERFSEPIRILLSMLCYNREALPQGAPSSPIITNIIMRDFDEKVGDFCRERNIIYTRYCDDMTFSGDFDEKPIIEFVKAALFEYGYLLNSKKTTVVSSSGRQIVTGVVVNEKMTVPAEYKAKIRQEVYFCKKFGVENHLEHIHYSKDTKAYLQSLLGRVSFVLQTEPGDQEFLEYKTYLTEILSQI

SEQ ID NO: 2333 - protein, 306 aa, unidentified
  source 1..306: note = Related to JAFTOR010000034.1; note = Clostridia bacterium
MIVYTELKSVERDLGIPLKTLFSVSNNLSAHYRTVKIPKKNGSFRELHVPDEVLKKIQRAIAKRILAYEAISTYAQAYRFGASVQRNASHHVGKKKILKLDIKHFFDSIIYSTVKEKCFPSERFSERVRVLLSMLCYYRDALPQGAPSSPVITNIIMRDFDERVGAFCKERNISYSRYCDDLTFSGDFDEKPVVEFVKTELFQRGYLLNHQKTTVASSSQRQLVTGVVVNENMTVPCEYKAKIRQEMYFCQKHGIEDHLHHIQYTGEVRAYVSSLLGRVSFVLQTEPENKTFMEYKAFLINALRRF

SEQ ID NO: 2334 - protein, 307 aa, unidentified
  source 1..307: note = Related to JAGAMD010000012.1; note = Clostridia bacterium
MIVYTELKSIEKDLGIPLKTLFSVSNNLSSHYKKVKIAKKNGGTRELRVPDYILKKIQRAICDTFLVYEPISKYAQAYRFGSSVQKNASYHINMKKILKLDIKHFFDSILYTTVKDKCFPSDRFSEPIRILLSVLCYYGDALPQGAPSSPVITNIIMKDFDIEVGSFCEKRNISYTRYCDDMTFSGDFDEKEIISFVKEKLFSCGYLINNKKTTVVKEGKCQLVTGIVVNKRLSTPSEYKAKIRQEIYFGTKYGFENHLNHTGNQTELKSYIESLLGRVSFALQTEPDNNEFKKYKAQLIKYKKSIS

SEQ ID NO: 2335 - protein, 307 aa, unidentified
  source 1..307: note = Related to JAFQLX010000091.1; note = Clostridia bacterium
MIVYRELSSVESDLGFSSRELYALSNSIDRQYRAVKLPKSDGTYRTLSVPSQKLKAVQRAITEKILVHMPVSRYATAYRYGASVQRNARVHIGKEKVLKLDIYHFFDSIRYQQLKDKVFTADRFSESIRILLSMLCYYRDVLPQGAPTSPAVSNIIMRDFDDTVGAFCAERGLAYTRYCDDMTFSGSFDYAEIIKFIKNELHKNGFILNGKKTKLVSSANRQTVTGMVVNKKLSTPSDYRRGIRREVYFIKKYGAAEHLKHIESNLSPKQYLQSLLGKIAFALEAAPFDKHLVEAKNAIISEIKKEP

SEQ ID NO: 2336 - protein, 314 aa, unidentified
  source 1..314: note = Related to JAGBUH010000087.1; note = Clostridia bacterium
MYCSGEKMIVYRELSSVEADLDFSAKTLYSLTNDIEKHYRRVEIPKHDGTFRVLYVPDTLLKTVQRRIANRILLLEPISRYATAYKRGSFIRKNASCHVGKETVLKLDIKHFFDSILYSHVKDKVFTEKRFSEPIRVLLTMLCYYKDRLPQGAPTSPVITNIVMRDFDETVGNWCNQRGITYTRYCDDMTFSGSFDVNEVKIFVKSELRKIGFFLNEKKTVSAKGTQRQIVTGIVVNEKLNVSSEYRKKLRQEVYYCRKYGVEEHLKRIGNSVDAKKYLQGLLGRISYVLEVRCDDKSFLADKEFIAGLIKQYE

SEQ ID NO: 2337 - protein, 309 aa, unidentified
  source 1..309: note = Related to JAFSIE010000307.1; note = Clostridia bacterium
MKIVYKELSSIEADLGYSAHMLYALSNSIAKHYRSVSIPKHDGTSRTLSIPDAPLKAVQRRIASVILPLLPISQYATAYRCRGGIVANASPHRGKDKILKLDIYRFFDSIMYSAVKDRVFTRDRFSEPIRVLLSILCYYDDRLPQGAPTSPAISNIIMREFDDAVGKWCSRRGITYTRYCDDMTFSGDFNAARVVAFVRRRLKKYGFLLNDKKTHVARYFNKQVVTGIVVNRKLNVPSSYRRKIRQEMYFCRKHGIEEHLKFIHDPTPPQEYIRRLLGRVGYVLSVSPDDGEFRKYRDFLRRALAQESE

SEQ ID NO: 2338 - protein, 306 aa, unidentified
  source 1..306: note = Related to JAFTLM010000135.1; note = Clostridia bacterium
MIVYRELGSLESDLGFSLKTLYALSNNIKKHYVSVEIPKRNGGVRCLSVPDEILKRVQRRITEVILSGQRVSKYATAYRYGAGILKNASEHVGKPKVLKLDILHFFDSISYSEVKENVFVKERFSESVRILLTMLCYCGDRLPQGAPSSPAITNIVMRDFDEKVGAWCKEQGIAYTRYCDDMTFSGDFDERSIIAFVKQELLKKHLVLNYGKTSVTTPGKRQIVTGIVVNQKPNISADYRRKLRQEIYYCKKYGLEEHANRIGEDDTQKYLLGLLGRVSYALQVRPDDVALKEVKRWLTQTINERG

SEQ ID NO: 2339 - protein, 306 aa, unidentified
  source 1..306: note = Related to JAFNUZ010000041.1; note = Clostridia bacterium
MIVYKELKSLESDLGFSLKLLYALSNNIKKHYSTVEIPKRSGGVRRLSVPDEILKGVQRRIAVVILSGQSVSRYASAYRYGASVVKNAAEHVGRKKVLKLDILHFFDSISYSAVKENAFPSERFSEPVRILLTLLCYYGDVLPQGAPSSPVITNIVMRDFDETVGAWCEEKGISYTRYCDDMTFSGDFDEKAVIDFVKEELRKKRLLLNYKKTSLTNRGGRQTVTGIVVNEKPNITSEYRRKLRQEVYYCQKYGVSEHTKRIGEADAKKYLRGLLGRVSYALQIRPDDAWLVKAKCELLKLIKERH

SEQ ID NO: 2340 - protein, 306 aa, unidentified
  source 1..306: note = Related to JAGBSO010000048.1; note = Clostridia bacterium
MIVYRELSSLSKDLGVSKSSLYKLSNSINKNYHKVEIPKKNGGTRVLSVPSENLKEVQRKITKVILSKETVSIHTTAYRYGASTAYNASHHVNKDVVLKLDILHFFDSILYSDVKDKVFPAEKYSEQIRTLLAILCYHKDSLPQGAPSSPAITNIIMRDFDNTVGEWCRKKNIAYTRYCDDMTFSGNFDAKEVIGFIKIQLRENGFLLNTAKTRVIRRNRSQTVTGIVVNEKINIPADYKRKLRQELYYCKKFGVNSHMARMDFDGNEMSYINRLLGKINYVLSVTPHDKQMLDYKKWLINELEYF

SEQ ID NO: 2341 - protein, 302 aa, unidentified
  source 1..302: note = Related to JAFQKX010000056.1; note = Clostridia bacterium
MIVYRELSSLEQDLGINAKILYAVSNSINKHYRETSLPKKSGGFRYLSVPDKILKSIQRQIAEVLLIHMPISKYAKAYRFGSSTLRNAKHHVGKQVVLKLDILRFFDSIRYSTVKDKVFPKEIYAEPLRILLTMLCYYKEGLPQGAPSSPPITNIILYEFDEQIGQWCREREISYTRYCDDMAFSGDFDPAEVIRFVRVQLKKMGFLLNEQKTRIQRLGQQQTVTGIVVNKKLSAPADYRRKLRQELYYCRKFGIREHLQKLGLEINEHTYRMQLLGKVNYVLQFCPDDQELKAAKKWLQAK

SEQ ID NO: 2342 - protein, 304 aa, unidentified
  source 1..304: note = Related to JAGAUY010000021.1; note = Oscillospiraceae bacterium
MIVYRELSSLEQDLGISSKTLYAVSNNISKHYHRAKLPKKSGGYRNLSVPDEILKAIQRQISEVLLIHMPVSRYAKAYRFGSSTLRNAKHHVGKQVVLKLDILHFFDSIRYSTVKDMVFPEEIYAEPLRILLTMLCYHKDDLPQGAPSSPAITNIILYEFDEVIGQWCRERGIAYTRYCDDITFSGDFDPAEVIRFVRLELKELGFLLNEQKTRIQRPGQQQSVTGIVVNEKLSIPAVYRRKLRQELYYCRKFGIQEHLQKIGLETPEDTYRMQLLGKVNYVLQVHPDDKEMLEARKWLQQSTK

SEQ ID NO: 2343 - protein, 304 aa, unidentified
  source 1..304: note = Related to JAFQIL010000045.1; note = Oscillospiraceae bacterium
MIVYRELSSLEQDLGISAKTLYAVSNNLNKHYRKAKLPKKNGGFRNLSVPDEALKTIQKRIAEVLLIHMPISKYAKAYRFGGSTLRNAKHHVGKQIVLKLDILHFFDSIRYSTVKDVVFPEKIYAEPLRILLTMLCYHKDALPQGAPSSPAITNIILYEFDEQIGGWCRNQGIAYTRYCDDMTFSGDFDPSALIQFVRLELKKMGFLLNEQKTRIQRSGQQQTVTGIVVNEKLSIPADYRRKLRQELYYCRKFGIREHLQKIGLDIPEDAYRMQLLGKINYVLQLYPDDRDMIAAKNQIIAKSR

SEQ ID NO: 2344 - protein, 304 aa, unidentified
  source 1..304: note = Related to JAFQNL010000019.1; note = Oscillospiraceae bacterium
MIVYRELSSLEQDLGISSKTLYAVSNHINKHYHKATLPKKSGGFRTLSVPDEALKSIQRRIVEVLLISMPVSRYAMAYRYGSSTLQNAKHHVGKQLVLKLDIFRFFDSIRYSTVKDKVFPEEIYAESLRILLTMLCYHKDALPQGAPSSPAITNIILYEFDERVGQWCRDQGIAYTRYSDDMTLSGSFDPAEVIRFVRLELKKMGFLLNEQKTRIQRPGQQQSVTGIVVNERLSIPADYRRKLQQQLYYCKKFGVQSHLTKIGLEVSEATYRMQLLGKINYVLQLSPNDRDMLEARRWLQQSAE

SEQ ID NO: 2345 - protein, 303 aa, unidentified
  source 1..303: note = Related to JAFVXA010000039.1; note = Oscillospiraceae bacterium
MIVYRELSSLEQDLGFSARTLYAVSNNLTKHYHETKLPKKSGGFRKLSVPDQVLKAMQKRITEVLLIYMPVSRYAMAYRFGSSTIQNARYHVGKQIVLKLDILHFFDSIRYSDVKDKAFPTAIYEEPLRILLTMLCYHKDALPQGAPSSPAITNIILYEFDEQIGQWCRERNITYTRYCDDMTFSGDFDPAEVICLVRQELKKLGFLLNEQKTRIQRPGQQQTVTGIVVNEKLSIPSDYRRKLRQELYYCRKFGMQEHLQRTGSEISADTYRRQLMGKINYVLQLTPDDRDLLQAKEWLSNEG

SEQ ID NO: 2346 - protein, 306 aa, unidentified
  source 1..306: note = Related to JAFTVM010000054.1; note = Oscillospiraceae bacterium
MIVYRELSSLEQDLGIRAQTLYAVSNNLGKHYRNAKLPKKSGGYRTLSIPDAVLKSIQKQIAEVLLIHMPVSRHAKAYRFGSSTVRNAKPHVGKPIVLKLDILHFFDSIRYSTVKDKVFPAEIYAEPLRILLTMLCYHRDALPQGAPSSPAITNIIMYEFDELVGQWCRERNIAYTRYCDDLTFSGDFDPYEVIRFVRQELRNMGFLLNEQKTRIQRSGQQQSVTGIVVNEKLSIPASYRRRLRQELYYCRKFGVSEHLRKSGLEILESTYRMQLLGKVNYVLQVSPDDQDMLDARRWLQQTSKSC

SEQ ID NO: 2347 - protein, 310 aa, unidentified
  source 1..310: note = Related to DVGO01000036.1; note = Candidatus Faecousia faecavium
MIVYRELSSLERDLGIPAKTLYAVSNSLSRHYRMVSIPKKTGGVRNLMVPDTALKTIQRRISDVLLAHMPVSSYATAYRFGTCTLRNAAVHVGKPVVLKLDIYHFFDSIPYSLVKEKAFPAHIYAEQIRTLLTMLCYHKDVLPQGAPSSPAIVNIILANFDERIGRWCTQRGIAYTRYCDDLTFSGDFDPKDVIAFVEGQLKSLGLLLNTNKTRVQRQGQQQLVTGVIVNEKPGVPAVYRRQLRQEMHYCQKFGVGEHLKFLGQGISEEAYLRQLLGKVNYVLHIVPDCEEFQQYRTWVLQKLQNISLAK

SEQ ID NO: 2348 - protein, 309 aa, unidentified
  source 1..309: note = Related to WNBA01000006.1; note = Pseudoflavonifractor sp.
MIVYREAPTLARDLGVGLHTLYALSNRLSAHYHTVELTKPNGGVRRLTVPDEALKGVQRSIARNLLACRELSPYATAYRYGAGTVRNASAHVGKARLLKMDIYHFFDSVNYSAVKDAVFPAEVFSEPLRILLTMLCYYQDALPQGAPTSPAVANILMRDFDEDVGGWCARRGIAYTRYCDDLTFSGDAGLAGAYRYAEARLREKGFLVNRRKTLYLDAGRRQCVTGLVVNEKVDVPAEYRRALRQELYYCKKFGLEEHLRSVGWEGDPTAYARRLLGRFSYALQIRPEDRALLEGKAWLVEELNRRAGK

SEQ ID NO: 2349 - protein, 306 aa, unidentified
  source 1..306: note = Related to KE159708.1; note = Oscillibacter sp.
MIVYREAASLARDLGVELKTLYALSNSLPAHYRTVEIPKADGGVRRLTVPDEALKRVQRAILNNLLVHMPVSPYATAYRYGGGAVCNAARHVGRPQVLRLDIRHFFDSVRYSAVKDAVFPPEIFSEPLRVLLTMLCYYRDALPQGAPTSPAIVNILLRDFDRRVGGWCRERGIVYTRYCDDLTFSGEDLSGVRAVTEAELRDLGFFLNERKTRLRSAGQRQTVTGLVVNEKVRVPREERRAIRQAVYCCRRFGLEDHLARTGVGLTPEACLNRLLGRVGYVLQADPDCAWALEARRWLLEERRRRI

SEQ ID NO: 2350 - protein, 313 aa, unidentified
  source 1..313: note = Related to DXIA01000170.1; note = Candidatus Pygmaiobacter gallistercoris
MIVYTHTETLAQDLGIPAATLFGVSFHLDRHYRRVTLPKRDGGVRTLCVPDPILKKIQRRILRVLLFHRPVSPYATAYRPGVGLRANALPHCGRQCVLQLDIRQFFDSVRYLQVKEIVFPKEIFSEKLRVLLSCLCYGRDGLPQGAPTSPAISNLLLRDFDLRVGDWCAARGIRYTRYCDDLTFSGAFDPKPVIRMVSDALWREGFVLNPRKTRFSRSGQRQTVTGVVVNDRPRLDAARRRALRAELYYCRRFGVADHLSHIGDPRTPRAYLLSLLGRLDFALSLGAEPQLAEGRRWVLEQLKPSKQKEEIDG

SEQ ID NO: 2351 - protein, 310 aa, unidentified
  source 1..310: note = Related to JACONZ010000001.1; note = Anaerofilum sp.
MIVYTETATLERDLGIPAKTLFAVSHDLKRHYRRVELSKADGTVRVLSVPDAVLKKIQRSINANLLAYMPISPYATAYRPGGGVRRNALPHCGQEQLLKLDIRRFFDSVRYTQLKETVFPAAVYAEKLRVLLSILCYSKEGLPQGAPTSPAIANILLRQFDETVGGWCGARGIAYTRYCDDLAFSGRFDPAAVICTVQEALRREGFSLNAQKTRLAGPGGRHLVTGAVVNLRPRAPAEERRALRQELYYCEKFGVRGHLVQTGDPRTAQAYLAALLGRLDYALSLSPEPRLAQGRRWVLDRLREERTARP

SEQ ID NO: 2352 - protein, 307 aa, unidentified
  source 1..307: note = Related to CP048436.1; note = Flavonifractor plautii
MGIVYQEGPSLARDLGLPLRTLYAVSNRIPAHYHRAEVPKRDGGVRVLRVPDPVLKDIQRRIARVLLSGMPVSPHATAYRYGAGVVENARRHVGRPELLKLDILHFFDSIRYIQVKEAAFPAEIYAEPLRTLLSMLCYDRDVLPQGAPTSPWIANLVLRPFDEKLGAWCRARGVVYTRYCDDLAFSGTALDGVEERAEEGLRALGFRLNRAKRALCRDGQQKRVTGLVVNERVAVPACCRRRLRQELYFCRRRGVEEHLRAVGLAEGREQCLRRLLGQVDFWLQAQPDSQEAAEYRRWLLDEMRDGR

SEQ ID NO: 2353 - protein, 309 aa, unidentified
  source 1..309: note = Related to JAGZAL010000035.1; note = Butyricicoccus pullicaecorum
MKIVYREASTLARDLGIPLDILYAVSNRLDAHYHTAVLPKRDGGTRTLTVPDGLLKRIQRAILETLLVHMPVSRNATAYHYGARVTKNAAPHAGKRFLLKLDIARFFDSIRYTSVKEAAFPPEIYAEPLRILLAMLCYHRDALPQGAPTSPAISNLVMRPFDEQVDGWCRARGIVYTRYCDDMTFSAGRPLGGVHGFVQDALGGMGLLLNERKTARFHAGQRQTVTGLTVNDRPNVPPAYRRALRQELYFCRKFGAASHLAHIGLDMDVPTYLHRLLGRVSFWLQADPGNQEAAAYRRWTLAQLDSALP

SEQ ID NO: 2354 - protein, 313 aa, unidentified
  source 1..313: note = Related to BQNX01000001.1; note = Eubacteriales bacterium
MIVYRELSTLAGDLGVSGRTLYAVSNSLPKHYRTVELPKGDGAVRRLSIPDRELMEIQRRILNRLLVYMPVSPYAAAYRRGVDHAAGARPHIGRPVLLRLDIRHFFDSILYSDVKEYAFPAHIYAEPLRVLLSILCYCGDALPQGAPTSPVVSNLVLRDFDLETGAWCSARGISYTRYCDDMAFSGAFDPVEVSRLIAGKLRERGFFLNEEKTRAMFAGQRQTVTGLVVNERLNLPREYRRALRQELYFCRRFGVSAHLARTGAAPEPEACLRSLLGRVSYVLQISPENREMLGYREWLLQELALLHSGERDS

SEQ ID NO: 2355 - protein, 309 aa, unidentified
  source 1..309: note = Related to QALD01000098.1; note = Oscillospiraceae bacterium
MIVYRELETLTRDLGIGAGVLYAAGNRPEAHYRTVSITGGNGTVRTLSVPDPMLMAIQRRILFRLLVHMPVSPQAAAYRCGVSTLSAARFHIGKPVLLCLDIRHFFDNIRYADVKRYAFPPDIYAEPLRVLLTRLCYLRDALPQGAPTSPAISNLVLADFDRALTSWCAPRGIAYTRYCDDLALSGDFDPDQACEIAAALLRQHGFLLNPAKTRIRRAGTRQQVTGLIVNERPSVPREYRRALRQELYYCRRFGVASQMQRRGFCGKETSYLQSLLGRVNYLLQIRPDDVAAKQDRDWLLALLHTQQTP

SEQ ID NO: 2356 - protein, 311 aa, unidentified
  source 1..311: note = Related to JAFURT010000015.1; note = Clostridia bacterium
MPDRIVYNELSSIELDLGFTAQQLYAVSNSLHRQYRQVKLPKANGGYRTLSIPSPLLKAIQRRITTVLLAQEPVSPYATAYRYGGGPLRNARQHVGRQMVVKLDIRGFFDHILYSDVKDAAFPADRYAEPLRVLLAMLCYYGDSLPQGAPTSPAISNIVLRSFDDAVGAWCRAHGIVYTRYCDDMTFSGPPEVTEVIPFVQAQLEQRGFYLNRRKMVVAHRGCKQTVTGLVVNRRLNVPAGYRKKLRQELYYCRKFGLVQHLAHIGDTTPPMTYARRLLGRVNYVLAVSPDREEFREYRHYLTEWCQTYTE

SEQ ID NO: 2357 - protein, 312 aa, unidentified
  source 1..312: note = Related to JAFBIO010000002.1; note = Fournierella massiliensis
MIVYRELSSLVRDLGVEAKTLYALSNSLEKHYHQVKIPKRDGGYRQLSVPDEQLKRVQRQIDRVLLARMPVSPYATAYRCGCGIGRNALPHLGQPGVLKLDIRHFFDSIPYTAVKERAFPGTIYGEPLRVLLTMLCYYRDSLPQGAPSSPAITNIIMAKFDARVGQWCAQREIRYTRYCDDMTFSGSFDPQEVVAFVRPLLREMGFFLNEKKTRFLPAGRRQVVTGIVVNEKPGLPAEYLRRLRQEVYFCQKYGTADHMARCGIQGPASGYLRRLLGRVNYGLQILPGKKELLEARAWLMKEMAREQEGDRP

SEQ ID NO: 2358 - protein, 314 aa, unidentified
  source 1..314: note = Related to NZ_CP044227.1; note = Flintibacter sp.
MIVYRELSSLVRDLGIPAKTLYGVSNTVETHYHKVQLPKRDGGVRELSVPDPILKHIQRRITQVLLLPMPISRYASAYRYGASTLRNAAPHAGQPGILKLDIRHFFDSILYSTVKEKAFPPEIYAEPLRILLAMLCYYRDTLPQGAPSSPAITNIIMAQFDEDVGAWCRSRSIRYTRYCDDMTFSGAFDPREVKAFVSQKLREMGFFLNESKSKYLPAGQRQTVTGLVVNEKPAVPSDYLRSLRQELYFCQKFGVSDHMAHLGIKESEAHYLARLLGRVNYVLQITPGKKEWAQARAWLLVQLSSLNDSSPVIS

SEQ ID NO: 2359 - protein, 308 aa, unidentified
  source 1..308: note = Related to JACJJD010000020.1; note = Pseudoflavonifractor sp.
MIVYRELSSLARDLGVDARLLYAVSNSLDRHYRQVCLPKKDGGVRTLSIPDQLLKTIQRRITQVLLVHMPVSPYATAYRYGGSAWRNAAPHVGQPALLKLDIRHFFDSILYATVKERAFPPEIYAEPLRILLTMLCYYRQSLPQGAPSSPAITNIILSGFDQEVGAWCAGKGIRYTRYCDDMTFSGLFSPEEVTSFTEARLQPFGLFLNGRKTRFIPAGRRQVVTGLVVNETVGVPAHYLRTLRQELYYCRKFGVSGHMARLGVPEPEARYLARLLGKVNYVLQVTPGKREFQQARAWLLQALAHCEG

SEQ ID NO: 2360 - protein, 320 aa, unidentified
  source 1..320: note = Related to NZ_CP034413.3; note = Dysosmobacter welbionis
MIVYRELSSLVRDLGIPAGTLYAVSNTLDRHYIRRQLPKSSGGVRELSVPDPLLKHIQRQILRVLLVHMPVSPYATAYRYGGSTLCNAAPHVGKPCVLKLDICHFFDSILYSAVKETAFPAEVYAENLRILLAMLCYGWDRLPQGAPTSPCITNILMRDFDNEVGAWCRERQIAYTRYCDDMTFSGDFARDEVLRCVEPRLRALGFYLNPGKTKWLPADRRQLVTGIVVNKKCNVPSEERRALRQELHFCQKFGISGHMARAGIDGPEDRYLAQLLGRVNYQLQITPGRRELQEARDWLIKAQPQYGGGRETSPAEKQIL

SEQ ID NO: 2361 - protein, 310 aa, unidentified
  source 1..310: note = Related to NZ_LR130816.1; note = Intestinimonas sp.
MIVYRELSSLVHDLGISARTLYAVSNGLDQHYRRAELPKADGGVRALSVPDPLLKHIQRRITQVLLVHMPISPCATAYRYGGSVLVNAAPHVGQSAVLRLDIQRFFDSIRYTSVKEAAFPADIYAEPLRILLGMLCYHREGLPQGAPSSPAISNIVMADFDAQVSAWCRERGLTYTRYCDDMTFSGAPVPSEVVSFVSDRLRPLGLFLNRRKTRYLPSDRRQLVTGIVVNQALNTPAEYRRKLRQELHFCQRYGVAAHMAWQGLTCSEDAYLARLLGQVNYALQISPGRSDLEQARAWLRAGGGRTEPHT

SEQ ID NO: 2362 - protein, 320 aa, unidentified
  source 1..320: note = Related to NZ_JADCKB010000012.1; note = Ructibacterium gallinarum
MHILYGFSRRKGPNHMIIYRSIDTLAKDLGFSPKTLYAVSYQTDRHYEQVSFACGGKTRLLSVPDPLLKSIQRSIYRNLLCHMPVSPCAAAYRFGTSIAQHARLHAGQKLVYQMDIQNFFDHILYSTVKDKAFPEIIYSPSLRILLTMLCYYRDRLPQGAPTSPVIANLVLKDFDEKVCAWCRQRHIRYSRYCDDLTFSGSFDPVSLYEFVKGALYQEGFYLNPKKTRLLSQSRRQTVTGLVVNQQVSVPSAYRRQVKQEIYYCQKYGITAHMSRQNIADTPEHYLRSLLGRVDFILYYHQDASWAMDGRQWLITQLKNF

SEQ ID NO: 2363 - protein, 303 aa, unidentified
  source 1..303: note = Related to JAGBHD010000062.1; note = Oscillospiraceae bacterium
MIIYKEISSIEQDLGYDIKTLYSISYSLHRHYISIKMPKKQGGYRILSIPDAPLKCIQKRIAEVLLSQINISPYAIAYRYGGSTLRNAAPHINKDIVLKLDIHDFFNNILYSTVKEKAFPKEKYSENIRILLSVLCYYNDTLPQGAPTSPAISNIIMCDFDNTIGSWCKKHSIAYTRYCDDMTFSGSFDPKEVIKCVESELKKMRLFLNKKKTIVARKSNKQIVTGIVVNEKLNIPRQYKKDIRQALYYCRKFGVENHMADANINDTNEHYILKLLGKVNYVLSVCPNDKEFINYRDFLKGLI

SEQ ID NO: 2364 - protein, 303 aa, unidentified
  source 1..303: note = Related to JAFXAP010000004.1; note = Clostridia bacterium
MIVYKEISSIEQDLEYDIRTLYSISYSLHRHYHSIKISKRQGGYRVLSIPDMPLKCIQKRIADVLLSQITISPYAKAYRYGGSNIKNATPHINKDIVLKLDIRDFFNNILYSTVKEKAFPKEKYSENIRILLSMLCYYNDALPQGAPTSPFISNIIMCEFDNAVGSWCGKHGVAYTRYCDDMTFSGNFNPNEVIKYVRFELRKMGFFLNNKKTIVAHKSNKQIVTGIIVNKKLNIPRKYKKDIRQAIYYCKKFGVYNHMESTNINDTVESYILKLMGKVNYVLSVCPNDKEFMGYRNYLKSLI

SEQ ID NO: 2365 - protein, 308 aa, unidentified
  source 1..308: note = Related to DVKV01000137.1; note = Candidatus Faecousia intestinavium
MIVYRELSSLERDLGFPASTLYAVSNRLNRHYRKVELPKGDGPLRTLSVPDNLLKTIQRRIAQVLLSTLPVSPYATAYRPGGSVVKNARPHVGKPVVLKLDIYHFFDAVCYSRVKKEIFPPEIYSEQNRILLSMLCCYQDKLPQGAPTSPAISNRILLEFDQEIGSWCARQGISYTRYCDDLTFSGDFAPGDVIRLVRERLKVRGFLLNNRKIQVLRQGQRQSVTGVVVNQSLQAPVSLRRELRQQVYYCRKFGVSDHLARTKQTVSEEDYLRRLLGQVNFALQINPADQELADARQWLLAEIRRKRT

SEQ ID NO: 2366 - protein, 310 aa, unidentified
  source 1..310: note = Related to JAFQDF010000039.1; note = Clostridia bacterium
MRSYSIVYKDIYALSGDLGVSPRILYSLSNRISGHYHTVAIPKKNGTYRKLSVPDDILKYVQRRINKVLLCYMPSSGYAMAYEYGKSILKNANPHSNKKCILKLDIDDFFDTVKYSQVKEKAFPAAHFAENLRVLLSQLCYNGEGLPQGAATSPKIANLILRDFDERIGSWCAQRDITYTRYCDDMTFSSDKGLDGVYKYVRDELFKEGFLLNKDKTKFIDSHHRQKVTGIIVNNSPKVPTEYTKKIRQEIYYCRKFGISEHLSHTDSDKSLCEYLASLLGRINYVLSVTPKNEEMKDYKDQVTIWQKSL

SEQ ID NO: 2367 - protein, 305 aa, unidentified
  source 1..305: note = Related to JAFUMW010000045.1; note = Clostridia bacterium
MIVYKSLESVEADLGVSLKTLYAVSNNLQSHYRNVELPKKNGGIRHLCVPDDVLKHIQRRITEVMLVHMPISKYAGAYRYGASVIHNASAHLGKKRILKLDISKFFDSVLYSQVKEYAFPEIIFSEKVRVLLSILCYYKESLPQGAPSSPAISNIIMRQFDEKVGAWCEERSISYTRYCDDMTFSGDFDANDVKKLVERELGKYGFYLNPVKTKTVTSDHRQSVTGIIVNEKLSLPSEYRRKLRQELYYCRRYGVDAHMERIGVSGSAGSYLSRLLGKVNYVLSVRKDDAEMKEYKAWLVAELKK

SEQ ID NO: 2368 - protein, 310 aa, unidentified
  source 1..310: note = Related to JAFPLT010000171.1; note = Lachnospiraceae bacterium
MIVYHELSSLCADLRLSPRTLYAVSNAMEKHYHTVRIPKKSGGFRKLTVPDDLLKMIQRRITEALLLPLPVSAAASAYYPGRGIKRNALPHVGKPVLLKMDIYHFFDSVLYRDVRDCAFPAEIYSEPLRVLLTTLCYGMNELPQGAPSSPAISNRILYRFDEKVLKLCRKQGIHYTRYCDDLCFSGDFDAEALRKEVTKLLIEEGFFPNRKKTKVQKGGTRQCVTGLVVNERANVPAEYRRKIRQELYYIGRFGLRSHMERTKAEGSELSYLRKLLGRISYCLEIDPENDEMKRDREMVLELIGERTGRQ

SEQ ID NO: 2369 - protein, 308 aa, unidentified
  source 1..308: note = Related to JAFZQQ010000087.1; note = Oscillospiraceae bacterium
MIVYRELSSLSTDLGFSAKALYSVSNSITKHYHPVKIPKGNGEYRQLTVPDEFLKAIQRRINDKLLCFEPISPYATAYRVGGSTKANACPHVGQKVLLKLDIRHFFDNLIYPVIKEAAFPKERYSEANRILLTILCTYQGYLPQGAPTSPTISNIVMRQFDDTVGTWCEKRGIHYSRYCDDMTFSGDFDPKPVKSMVAGELRKLGLFLNTKKMVVAGKGQKQTVTGIVVNEKASVPTGYKRKLRQELYFCMKYGTDSHMNHNEINMEKGNYILSLLGRVNYACSIETDNEELKSYRDWLLLESQETKR

SEQ ID NO: 2370 - protein, 334 aa, unidentified
  source 1..334: note = Related to SVKP01000140.1; note = Oscillospiraceae bacterium
MGLRIQRDSCHILTVLLHGNRGRRACCMIVYWELSSLSTDLGFSPKALYSVSNSIGRHYRLVQIPKGNGELRRLTVPDRFLKAIQVQIYEKLLRLEPVSPHAAAYRPGGSTLVNARPHVGQAVLLKLDIRHFFDSLIYPQVKDAAFPVERYSEANRILLAILCTYRGILPQGAPTSPAISNIILRNFDDTMGEWCGRQGVRYTRYCDDMTFSGDFDPAAVIEKTAAELKNMGLYLNAGKTVVARKGQKMIVTGIVVNEKTSIPRDYKRKLRQELHYCTEYGLASHLAHTHSQMEQRDYVLSLLGRVNYALSVEPANAELGQYRVWLTEAMKQIS

SEQ ID NO: 2371 - protein, 304 aa, unidentified
  source 1..304: note = Related to JAFWAC010000028.1; note = Clostridia bacterium
MIIYKEFSSLLSDLGFSGKTLYSVSNHINRHYHPVKIPKANGEFRELNVPDKLLMTIQRAINNKLLCLENVSRFAMAYKPGSSTKMNAVAHVAQPVVLKLDIRHFFDHLIFPLIKEKAFPAARYSEQNSILLTFLCTYKDALPQGAPTSPTISNIIMKDFDNFVGGWCNERGIAYTRYCDDMTFSGDFDPKAVIILVKKELKKLGLYLNDKKTVVVRKGQRQSVTGIVVNEKRSIPIEYKKRIRQEMHYCMKYGVASHLERIGIDEAPKTYTLKLLGKINYVLSVEPNNSNMRQYRSWLMEQKF

SEQ ID NO: 2372 - protein, 306 aa, unidentified
  source 1..306: note = Related to JAFQMR010000111.1; note = Clostridia bacterium
MIVYKELSSLTSDLGFSSKALYSVSNHIGRHYRAVSVPKGNGESRRLHVPDALLKAIQRRINDRLLSLEAVSAYATAYRAGGSTKRNAAPHVGKPVLLKMDIRHFYDSLIYPLVKEKAFPKERYSEQNRVLLSLLCIYNDTLPQGAPSSPTISNIIMRDFDERVGQWCAQQDITYTRYCDDMTFSGDFDPHPVIRFVRKELQSLGLFLNNRKTVVARTGQKQAVTGIVVNETTHIPSGYKAALRQELYYCRKFGIASHLLHCGIDESPERYAQKLLGRVSYVLSVEPQNRQMQDYRAFLQSCLQSR

SEQ ID NO: 2373 - protein, 308 aa, unidentified
  source 1..308: note = Related to NZ_JACOPN010000001.1; note = Flintibacter sp.
MVCKSYSDLERLLGISVKALYSVSNASWKHYRSVKIPKNDRGEFRELHVPDEFLKTVQRRIADRLLSAYPVSPYATAYRPGGSTIVNARPHVGKNVLLKLDIHHFFDNILYATVKEKAFPAEDYSESIRILLTILCVHKDALPQGAPTSPVISNIIMRDFDCTVGGWCDARGIAYTRYCDDMTFSGDFDSREVVSLVRTELRKMGLFLNEKKTVRAVRGQRQSVTGLVVNEGLRIPAAYRKKLRQEVYYCRKFGVAAHLQRMGSGERAEEYLPKLLGRINYACSVMPDDQELRQERRWVMQQLHTLER

SEQ ID NO: 2374 - protein, 310 aa, unidentified
  source 1..310: note = Related to SVSR01000007.1; note = Oscillospiraceae bacterium
MIVYKELSSLTNDLGFSVKALYSASNHISSHYHKAKILKKTGEYRELSVPDDFLKSIQKRIVEKLLVYEEVSPYATAYRYSTSIIKNARVHLHNNTILKLDIRHFFDHIIYPVVKEKAFPKEKYSEENRILLSLLCLYHDALPQGAPTSPIISNIIMKDFDNTVGAWCKSKKIRYTRYCDDMTFSGDFNIREVISFIKRELGKMGFYLNDAKTVVARSGQKQIVTGIVVNDKLNTPLLYRKKLRQELYYCKKFGIASHLRQKSIDMSEREYILKLLGRVNFVLSVGQTNKEMQEYKSWLLDQNNLFITEK

SEQ ID NO: 2375 - protein, 306 aa, unidentified
  source 1..306: note = Related to JAGBHE010000095.1; note = Clostridia bacterium
MIIYMELSSIIHDLGVSAKALYALSNHTEKHYHRAKILKGNGEYRELAVPDNFLKSVQRKIADTLLVHEEISPYATAYRYGGSVIANAEPHLGNSSILKLDIRKFFDTITYPLIKDNAFPKNRYSEKIRILLTFLCVYNDVLPQGAPTSPVISNIIMREFDNTVGAWCRQRNICYTRYCDDMTFSGELNREEIIDFVKKELKKMGFFLNDKKTAFIHDGQKKIVTGIVINKKLNTSKKYRKQVRQEIFYCKKFGVASHMKHINSDKSKNDYLLSLLGKVNFILSVDKCNAEALGYKKWLSEEIKNN

SEQ ID NO: 2376 - protein, 308 aa, unidentified
  source 1..308: note = Related to JAFSXU010000033.1; note = Clostridia bacterium
MIVYRELSSLSEDLGVSKKALYTASNHASSHYRRIKIPKGNGEFRELAVPDNFLKSIQKRIADKLLIYEEISKYATAYRYGGSVVANAKPHIKNGTVLKVDIRHFFDHIIYPIVKDKAFPAYRYSEPNRIMLSLICLYKDTLPQGAPTSPVISNIIMKNFDDCIGQWCDKKGIVYTRYCDDLTFSGNIIPGEIICFVKQELAKMGFYLNNKKTVIARNGQRQLITGVVVNDKLNIPLDYRKKLRQELYYCKKFGVSSHLSKINSEQNEEKYLQKLLGRVNYALMIDKSNAQMNGYRQWLVNELKKYNG

SEQ ID NO: 2377 - protein, 308 aa, unidentified
  source 1..308: note = Related to JAFYQP010000074.1; note = Clostridia bacterium
MITYKELSSLTNDLGFSARALYSITHNIHKHYKPVSIPKGNGEMRKLCVPDKFLKAVQRSIARNLLSYEEISPYATAYRLCGSTVVNARPHLGAEVILKLDICHFFDHIIYPVVKDKVFPGEKYSEANRVLLTLLCTYRESIPQGAPTSPAISNIVMRDFDDTVGVWCEDRGICYTRYCDDMTFSGDFSPKEVISFVRTELGKKGYFLNNRKKVIAKRGQKMQVTGIMVNEKLNVPNTYRRKLRQELYYCRKFGIKSHMEKIGVEITEQEYIMKLLGRVNYLLQVTPDDKSAKEAKLWLIKELKKASL

SEQ ID NO: 2378 - protein, 312 aa, unidentified
  source 1..312: note = Related to JAFPRS010000057.1; note = Clostridia bacterium
MFRKREGGFAVIVYSELSSLCRDLGFTARELYAASRNTDRLYRKAVLPKAGGGVRELSVPSPLLKAIQTAVYEKLLSQEPVSRYACAYRPGGGIKRCAAPHVGRGQVLTLDIRRFFDSAIYPLIKEKVFAPERYSAPNRVLLSMLCTYRDALPQGAPSSPAISNILLYGFDEAVGEYCRERGIRYTRYCDDMAFSGLFDARELTAFVESELRKLGFYLNRKKTRLVRPGQRQAVTGVIVNEKLAVPREYKRRLRQELYYIEKYGMEEHLSRLGGEAQNVDYAARLLGKVNYVLSIEPGNIEAAHWARLLKDK

SEQ ID NO: 2379 - protein, 309 aa, unidentified
  source 1..309: note = Related to JAFRLE010000126.1; note = Oscillospiraceae bacterium
MIIYNELASLEADLGYSAKQLYSLSNGINRHYHPAEIPKSDGGSRSLSVPDAQLKAVQSKIADRLLSLEDISVYATAYRPGGSIVRNALPHIGHSDVLKLDIRRFFDSITYPLIKEKAFPAKRYSEKNRILLAILCTYKEALPQGAPSSPAISNIILRNLDDAVGSWCRSRYITYTRYCDDMTFSGRISTALKKEIINTVEQQLRKAGLYLNADKTVFVHDGQRKCVTGIIVNEKVSIPAGYRRDIRQKMHYICSYGIKSHIQHTGSKLSEEEYLRKLLGRISFVLSIDPHNEEMLGYRSKLIEIRRTL

SEQ ID NO: 2380 - protein, 305 aa, unidentified
  source 1..305: note = Related to JAFQUH010000074.1; note = Ruminiclostridium sp.
MIVYREFSSLTEDLGFSGKALYSLSNKIHRHYKKVEIPKADGSVRSLSVPDDFLKAVQRRIADRLLSMEEISPYAIAYRPGGSPLKNARPHIAKNTVLKLDITCFFDHITYFLVKEKAFPKERYSERNRILLTMLCIYNDALPQGAPTSPVISNIIMKDFDNAVGRWCRERRIVYTRYCDDMTFSGDFDVCEVKNFVSGELRRMGFFLNSKKTTAVRRGQRHTVTGIVVNEKPSISANYKAKLRQELYYIMKFGINSHLEKCGIDIPAEKYLQKLLGRANYILSVEPDNKKVKEYKGWLTAQLKK

SEQ ID NO: 2381 - protein, 306 aa, unidentified
  source 1..306: note = Related to JAFQPT010000004.1; note = Oscillospiraceae bacterium
MIVYRELSSLETDLGVSAKVLYTLSNSRSSHYHTVMLPKENGELRQLSVPDGLLKSVQRKIARQLLVYEEVSPYAMAYRLGGSTLHNAVPHVGQPMVMKLDIRKFFDHCFYPLVKEKAFPAARYSEPNRVLLSLLCVYHDALPQGAPTSPAISNIILRDFDNAVGSWCAKRHIVYTRYCDDMTFSGSFDPAEVKTKVRTELRKVGLFLNDNKTVVLNGGQRQTVTGIVVNERVSVPSDYRRKLRQELYYCRKYGIAAHLEHIGSEADVRSYERQLLGRVNYVLYADPCNQEMQEYRRWLQNTLTGK

SEQ ID NO: 2382 - protein, 303 aa, unidentified
  source 1..303: note = Related to JAFUPP010000033.1; note = Clostridia bacterium
MITYKEISSLENDLGVSAKALYTLTNEIHRHYRTVMIPKDNGELRKLSVPDPFLKSVQRKIAHNILFFEEISPYATAYRPGGSTLINALPHVSKNTVMKLDINKFFDHIIYPIVKEKVFPAHKYSEANRILLTLICIYKDSLPQGAPTSPVISNIVLKDFDNKVGEFCFKRNVTYTRYCDDMTFSGEFDPQQIKRFLQNELKKLGLYLNSKKTVILKNGQQKKVTGIVVNEKPNVCAKYKRKLRQEIYFCQKYGIKNHLDKTGSCLTEAQYKAQLLGRINYCLSVSHKDKNMQGFKEWLINNK

SEQ ID NO: 2383 - protein, 372 aa, unidentified
  source 1..372: note = Related to JAFPOZ010000331.1; note = Clostridia bacterium
MNVNFLTAAASRCGQTYTFDSRFAPEKLTAQYTGPCSMGWRILLRIFSMRISIASHAFREGSSVVIVYRELSSLVSALGFSAKTLYGVSNRVTTHYRQLKIPKSNGGFRTLHIPDQLLKSIQRQINMQLLLPEPVSPFATAYRPGGSTRINALPHVGKPIVLKLDIDHFFDHAFYPLVKEKAFPAMRYSEKNRILLSLLCTYKDTLPQGAPTSPAISNMIMYDFDMAVGKWCVMHNVSYTRYCDDMTFSGMFDIAEVIAVVKDALKDWGFFLNARKTTVIRSSQRQTVTGLVVNEQVHIPSSYRNALRQELYYCRKFGIQSHLEHRHIKMEPEAYALSLLGKINYCLSIHAADPMMLEMKQWLMQQIRNNCF

SEQ ID NO: 2384 - protein, 317 aa, unidentified
  source 1..317: note = Related to JAFZOL010000002.1; note = Clostridia bacterium
MIIYREFSSLSRDLGFSGRTLYGVSHAVTKHYRPVRIPKRGGGTRELHIPDPLLKAIQTRIAETLLPLEEISPCASAYRPGGSTKRNALPHVGRQTVLKLDISGFFDHITYPLVKKKAFPASRYSESNRVLLAMLCVYKDSLPQGAPTSPAISNIVMKDFDDAVWRYCAAREIAYTRYCDDMTFSGDFDPAPLIAFVKARLKKMGLFLNEKKTAVLRQGRRQQVTGVIVNERPGVPAEYKRAIRQEVHYCEKYGAADHLSFRGDPTPPADYLMSLMGRVNYVLSIEPQNEEMRGYKTLVAAWLKEAAQPKKTPEEQP

SEQ ID NO: 2385 - protein, 307 aa, unidentified
  source 1..307: note = Related to JAFURU010000174.1; note = Clostridia bacterium
MIVYRELSSLARDLGVSGRTLYALSNHVVKHYRRVLLPKGSGEYRELHVPDDLLKMVQKRIAERLLAMEPVSPYATAYRVGGSPMLNAKPHVGAPVLLKMDIRHFFDHVIYPVVKEKVFSAERYSEKNRVLLTLLCMYKDSLPQGAPTSPVISNIIMRDFDDRIGSYCRERGIRYTRYCDDLTFSGDFDPAPIKAFVREELIKMGFYLNDKKTVVLREGQKKTVTGIVVNERLNTSSAYRRSLRQDVRFCKKYGVADHLKHIGKVGVSEYSYLSQLLGRANYILQVDKDNAEVKGYKRWIIEQMTKH

SEQ ID NO: 2386 - protein, 303 aa, unidentified
  source 1..303: note = Related to JAFTEJ010000045.1; note = Clostridia bacterium
MIIYRELSSLSDDLGFSAKTLYSVSNSISSHYRCVSIAKPGGGYRELSVPDCLLKSIQRRINEKLLWMEEISPYATAYRVLGSTKKNAFPHKGNPIVLKLDIRHFFDSIIYPVVKEKVFPNYRYSEQNRVLLSLLCVYKDALPQGAPTSPAISNIIMRDFDNKIGSWCSERGVVYTRYCDDMTFSGNFDPKPLRAHVKSELRSMGFFLNDRKSVILNRGQCHIITGVLANERLRAPSDYRRRIRQEMYFCRKYGIGSHLRRIGIEDDVAHYRLVLLGRINYALSLDPADSELVSYKKWLCEND

SEQ ID NO: 2387 - protein, 307 aa, unidentified
  source 1..307: note = Related to JAFQEI010000172.1; note = Clostridia bacterium
MIVYREFSSLAGDLGFSARTLYGVSYHRASHYQTVRIPKANGEYRELHVPDALLKSIQRRILSVILDREEISPYATAYRYGGGIAKNAAPHVGKPVVLKLDIRHFFDRVIYPLVKDRAFPADRFSESNRVLLTMLCMYRDALPQGAPTSPAVSNIIMREFDDTVGAWCARQQIAYTRYCDDMTFSGDFDPKPVIQKVRQELQKMGFFLNDKKTVVVRDGQKKLVTGVVVNRRLRAPAEYRRNLRQELYYCRRFGVSRHLEHRALQQTEGQYLRGLLGRVQFALQLDPDDRELRDDRAWLLSRISDCT

SEQ ID NO: 2388 - protein, 307 aa, unidentified
  source 1..307: note = Related to JAGAYD010000015.1; note = Butyrivibrio sp.
MVVHRELSSLCQDLGYSARALYSLSNSVSEHYHDAMIPKANGEYRLLHIPDKFMKAVQKSIAQNILSYEDISPYAMAYRPGGSTKANAFPHVGASMVMKLDVRKFFDHITYPMVKEKVFPSEKYSESNRILLSVLCVYNHAIPQGAPTSPAISNIILRDFDNRVGDWCGKSGITYTRYCDDLTFSGEFEPKEVKAFVKKELFKEGFFLNSKKTIVLRNGQRKEITGIVVNEKAAVPARYKKRIRQELYYCRKFGIDEHVKRLGLPESTEAYARKLLGRINYVLSVEPDNDEMKRGRAELLSWFQSTS

SEQ ID NO: 2389 - protein, 303 aa, unidentified
  source 1..303: note = Related to FOXO01000040.1; note = Butyrivibrio proteoclasticus
MVVYRELSSLCHDLGYSARALYTLSNSVAEHYHDVMIPKANGEQRLLHVPDKFMKSVQKSIARNLLAYEEISPYAMAYRPGGSTRANARPHVGAPMVMKLDVRKFFDHITYPTVKEKVFSSEKYSESNRVLLSVLCVYSHTTPQGAPTSPAISNIIMRDFDNRVGDWCDKRNISYTRYCDDLTFSGEFNPSEVKTFVKEELFKEGFFLNSRKTVVLRNGQRKEITGIVVNEKASVPAEYKKRIRQELFYCQKYGIDEHVKRLGLCESGESYARKLLGRINYVLSVEPENEEMKRGRTNLLLRL

SEQ ID NO: 2390 - protein, 309 aa, unidentified
  source 1..309: note = Related to JAGBKD010000016.1; note = Eubacterium sp.
MIVYRELSSLCQDLGYSARALYTLSNTVTEHYHDVSIPKANGEYRLLHVPDTFMKSVQKSIARNILEYEEISPYAKAYKPGGSTISNAEPHVGAQMIMKLDIRKFFDHITYPMVKEKVFLAEKYSEANRILLSVLCVYSHTVPQGAPTSPVISNIIMKDFDNRVGKWCSEKSITYTRYCDDMTFSGVFKPAEVRKYVGEELFKEGFFLNGQKTVVLREGQRKEITGIVINNKLSIPKAYKNKIRQELYYCRKYGIEEHIRRLEIKERPERYLRKLIGRINYVLCVEPENEEFKAGKEWASEEIKKLSDL

SEQ ID NO: 2391 - protein, 309 aa, unidentified
  source 1..309: note = Related to JAFOYD010000138.1; note = Lachnospiraceae bacterium
MIVYKELSSLCHDLGFSARALYTASNSVDQHYHTVEIPKGNGETRTLHVPDPYMKTIQKSIAKNLLAYEEVSPYAIAYRFGGSTKANAAPHVGHPVILKMDIRKFFDHITYPMVKEKVFPEKKYAESNRILLSILCVYDHTIPQGAPTSPAISNIILREYDDIVGKWCENQAITYTRYCDDMTFSGDFEPAPVIAFVKKALFEQGFFVNNKKTVVLRNGQRKEVTRIIVNQKISVPASYKKSLRQELYYCEKFGIESHLKHIKANENEEHYIERLLGRVNYILSVEPDNQEMKKYRQWLLNQKPYMTKA

SEQ ID NO: 2392 - protein, 305 aa, unidentified
  source 1..305: note = Related to FOWB01000004.1; note = Pseudobutyrivibrio sp.
MIVYRELPSLCKDLGFSARALYAASNTINKRYHKVRIPKADGDYRELYVPDDFLKSIQRSIAKNILAYEPISPYACAYRINGSTALNACTHVGEPTILKLDIRKFFDHITYPMVKEKVFPAEKYSEQNRILLSILCVYLQTVPQGAPTSPAISNIILREFDDRVGEWCKARNINYTRYCDDMTFSGSFDAKELKQFVENEIQKEGFFINAKKTVVLHDGQRKAVTGIVVNEKLSVPAEYKKDIRQIMYYCNKYGVIDHMMANKIIGYKSDYLNVLLGKINYVLSVEKSNKQFIEYRSQVKKWLAE

SEQ ID NO: 2393 - protein, 312 aa, unidentified
  source 1..312: note = Related to JAFQLL010000109.1; note = Clostridia bacterium
MITITYKELSSLTNDLGFSARALYALSNHSTKHYHKTVIPKHSGGERVLHVPDEFLKAVQRSIVRNLLAYEAVSPHARAYCYGASTVKNALPHKGHRVLLKLDIQNFFDSINYPLVKNKVFTKERFSESNRVLLSLLCTYKDTLPQGAPTSPFVSNIIMKDFDNTVGTWCNERNITYTRYCDDLTFSGDFNQDEVKTFVSQELRKMGFFLNAKKTTLLHDGQQKCVTGIVVNDKLNAPLRYRKGIRQEVYYCKKFGIEEHIKKQGIEKTREGYLKSLLGRINYVLSIDDTNEEMKSYKAWALKECKTAQLKK

SEQ ID NO: 2394 - protein, 309 aa, unidentified
  source 1..309: note = Related to JAFUOO010000022.1; note = Clostridia bacterium
MITITYKELSSLTCDLGFSARALYSLSNHASKHYHKTVIPKGSGGERVLHVPDNFLKAVQRSIVRNILSHEEVSPYARAYRYGASTLKNAMPHKGHKVILKLDIKNFFDSIIYPLVKKKVFPSERFSESNRVLLTLLCMYKDALPQGAPTSPCISNIIMKDFDNTVGTWCKERNITYTRYCDDLTFSGDFNVDEAKAFVEAELKKMGFFLNAKKTTVLRDGQKKCVTGILVNDKINAPLEYRKSIRQAVYYCKKFGIDEHLKRNGIEKAAEGYLKSLLGRINYVLSIDNTNEEMKGYKAWAVKQLKKLK

SEQ ID NO: 2395 - protein, 307 aa, unidentified
  source 1..307: note = Related to JAFXHP010000039.1; note = Clostridia bacterium
MIVYKELSSLTTDLGFSARTLYSVARMVRKHYHEVSIPKKDGTERKLSVPDELLKRIQRRIAEKILMYEDISPYATAYRVCASTLINAKAHLDKKCILKLDINHFFDSIIFPVVKNKVFTEEKYSYANRILLTALCIYEDSVPQGAPTSPVISNIILREFDFHIGSWCSERGITYTRYCDDMTFSGEFEAKEVIKEVEDALAKEGFYLNRKKTAFLKDGQRKEVTGIVVNDKVSVPKEYRRKIRSEVHYIKKFGIDSHLSHIGCNMDKVKYLMSLFGKINYALSVSPDNAEMKNCKKIIGKILYKLK

SEQ ID NO: 2396 - protein, 312 aa, unidentified
  source 1..312: note = Related to JAFYHQ010000006.1; note = Erysipelotrichaceae bacterium
MKNTYFELKTLENDLGVKAGTLYRLSNNINSHYRSVSIPKPDGSKRTLSIPDPVLKHVQKRINDVILSTMNVSVYSKAYSFGDSPLRNAIPHLKQKLILKLDIRKYFDHVTYPLIKEKVFKDDQFSESNRILLSLLCIYNESLPQGAPTSPAISNILLYDFDNVIGEWCRQRNFVYTRYCDDMTFSGNFDGLHPIDIIRKVELELKKYGLFINRKKIQSLHDGQRKKITGIVVNDKPNVPANYRRKIRQEMYYINKYGLQDHLKKTGSKQTEAEYLRSLLGRINYVLSINCSSEFEVYRTKTVSLLDALLSV

SEQ ID NO: 2397 - protein, 309 aa, unidentified
  source 1..309: note = Related to JAFRKA010000015.1; note = Erysipelotrichaceae bacterium
MMNTYFELNTLEKDLGISARTLYSLSNNINSHYHSVVIPKSDGGSRKLSIPDYSLKNVQKRINNVILSCMNVSIYAKAYTNGDSPLRNALPHLDKKTILKLDIRKYFDHITYPLIKESVFKKENFSESNRILLSLLCMFNESLPQGAPTSPAISNILLYDFDNWIGEWCRRQDITYTRYCDDMAFSAEELNSDIIIERVRLGLKKYGLYINNKKTQIIHDGQRKKITGIIVNDKPNVSIDYCKKIRQEMYYIRKFGIDSHLKAIGYEKTVDDYLRSLLGRINFVLSISFSKEFDDYRTTIAYIRNTIFS

SEQ ID NO: 2398 - protein, 315 aa, unidentified
  source 1..315: note = Related to JAFYHQ010000014.1; note = Erysipelotrichaceae bacterium
MKHTYFELETLEKDLNVHAKTLYGLSNNINAHYHSRIIKKSNGGDRVLSVPDFILVKVQNQINDVILSRMPVSVYSKAYSAGDSPLGNAAPHLRNDTVIKLDIRQFFDHVTYPLVKEKVFRKELFSESNRILLSLLCMYNESLPQGAPTSPAISNILLYDFDNRIGEWCRQRNIIYTRYCDDMTFSGDFENWDPIDIIRKVKLELKQYGLFINGRKTKILHNGQRKKITGIVVNDKPNVSIDYRKKIRQEMHYIRKYGLKNHIRKTGCDKSEMEYLRSLLGRINYVLSVNRIEEYERYRDDVVSYLRHMGLRQDL

SEQ ID NO: 2399 - protein, 323 aa, unidentified
  source 1..323: note = Related to JAFRQF010000031.1; note = Erysipelotrichaceae bacterium
MKHTYFELKTLEKDLGVSAKVLYTLSNQINRHYRSVEIPKSDGGTRKLSVPDPLLKSVQRKINEVILSRMDVSSYARAYSYGDSPLKNASSHVNKKEIFKLDIRKFFDHVTYPLIKERVFTADRFSESNRILLSLLCMYDESLPQGAPTSPSISNILLYEFDEELGIWCKERDVSYTRYCDDMTFSANSLTPEEIEHKVSSMLKQYGLFINQKKKQYIRGSRRKKVTGIVVNEKPNTPVEYRKKIRQEIFFINKYGLKDHMERIKCTDSQGSYLSSLLGRISYVLSINQSEEFEKYREQISTLLKEQDDMRIIQKSEETRRLL

SEQ ID NO: 2400 - protein, 308 aa, unidentified
  source 1..308: note = Related to JAFUCV010000276.1; note = Solobacterium sp.
MIVYRTMQALETDLGFSARTLYSAANTIDRHYHEVRIPKRDGTERILHVPDEFLKRIQRRINDVLLAGMPVSRYATAYNPGNSIMQNAQPHAGKHFLLKLDIRDFFDHITYPLVKEKVFPEHIYSEQNRILLSVLCVYHDSIPQGAPTSDLISNIVLYDFDRTVGRYCRERNIAFTRYCDDMSFSGDFDPQELTAFVSEELRKDGFFLNRKKTVTARPGQAMRVTGLSVNETVNVPSEYRRKIRQEMHFIQKYGTAQHIKRLGIGMEEQAYLNSLKGRIAYVLSVREIPEFREYLKQISLLEKRQMIQ

SEQ ID NO: 2401 - protein, 328 aa, unidentified
  source 1..328: note = Related to DS264270.1; note = Eubacterium ventriosum
MVYYKDLSTLEKDIRIPRKVLYKFSRNIFSNYKTVEIMKNNGEIRTLHVPKDNLKSIQRKIRFYILRKMPTSIYATAYIRGEGIVNNAKVHVGAENILKLDIRHFFDNITYPMVKEKVFKPDIFSEPIRILLSILCVYEHSIPQGAPTSPDISNIIMRDFDKEIGDWCKERNINYTRYCDDMTFSGKFDKEPVIEKVESELRKMGFYINNRKTTYLHSGQSKNVTGIIVNEKLSAPRKYKKEIRQEIYYCKKYGIENHMKHSVLKKKSRQLSDALKGQIDIDIDVEISTEQYINSLMGRINYVLSVEDNEEMREYKEWLYGCGNTQKF

SEQ ID NO: 2402 - protein, 324 aa, unidentified
  source 1..324: note = Related to JAFTAK010000098.1; note = Clostridia bacterium
MTNAKKKYSDLSSLALDLGFTGKELYTVSNAITRYYLEVAIPKSNGETRTLHVPSGMLKMIQTSIARVLLPKVPVSRYACAYKPGASAVKNAMPHVGAPIVLKLDIRKFFDHIIFPIVKEKAFPEKMFAEKLRILLTILCIYKEALPQGSPASPGISNIIMRDFDDKVGGWCAERGIAYTRYCDDMTFSGDFDPKPVKDLVRNELRKMGFFLNDAKTVVAHDGMRKQVCGIVVNERPSVPKDYIKKIRQEIYYIRRYGLASHLKRTNPGVDPVNYINSLSGRIRYSIYVSKASDRCADPELSGYLDVIKKEMDILAGRDYRDRT

SEQ ID NO: 2403 - protein, 341 aa, unidentified
  source 1..341: note = Related to SVBR01000043.1; note = Erysipelotrichaceae bacterium
MLAAEQHTSRVHALTGCPAAALQNILKWCQKGGRMIVYRELSSLCSDLDVSAKTLYTLSNSITSRYRTAQLLKKDGGYRTLRIPDPLLKEVQRKIVQVLLSRMEISPYATAYRYGASIKKNASVHVGQKTVLHLDIRRFFDRILFPQVKEKVFPKERYSEPIRILLTILCFDGENLPQGAPTSPWISNIILCDFDNTVAAWCRKRGIHYSRYCDDMTFSGEFDPAAVEDFVERQLKKEGFFLNRKKTRRMDRSRRQYTCGLVVNDQVSVPSSVRRKIRQEMYMIQKYGLDSHLRKIQYEGSEEEYLNSLLGRVGFVLSIQASDEFLRYKQTLLRMMKKRNI

SEQ ID NO: 2404 - protein, 310 aa, unidentified
  source 1..310: note = Related to JAFUHN010000140.1; note = Solobacterium sp.
MIVYRELSSLSRDLEVSVKTLYSLSNSISRHYHTVQLPKKDGGVRTLRVPDPLLKHVQRRIAEVLLAQTEISPYATAYHYGASIKKNAAVHTGNEKVLRLDIRQFFDHILFSQVKQKVFPAERYSEPIRVLLTILCFDEETLPQGAPTSPWISNIILKDFDDAVSAYCRSKGIHYSRYCDDMTFSGELDEKELTEFVSEQLKKEGFFLNRKKNRLMKASQRQYTCGLIVNEKVSVPSDTRRKIRQEMYMIQKYGLSSHLEAVHFEGSLEEYLYSLLGRVNFVLSIEKREEFLKYRKALLEMISGNTDTHA

SEQ ID NO: 2405 - protein, 344 aa, unidentified
  source 1..344: note = Related to DPVX01000340.1; note = Erysipelotrichaceae bacterium
MGPGTAAARRNIRKWCFGREERRMIVYHELSSLCLDLGIEAKTLYALSNNVSSHYHEVKIPKKGGGMRTLHVPDDVLKHVQKRIADQLLACEEISAYAYAYRYGCSAKMNAKRHVNQEIVMRLDIRDFFDHITFAQVREHAFPKWKYSEPLRTLLSVLCIDEDSLPQGSPASPAISNIIMRPFDDVMGEWCRRKKITYTRYCDDLTFSGSFEPNEVIAQAALFLSHLGFFLNEKKTVIRRKEQRQFTTGLIVNESVSVPPEYRRKIRQEMYYLQKYGLSSHLEQINETDEKTYLRSLLGRIRYVLYIHSSEEFRNYEAIVLKLTEETSHGRDNQKTDCDAGRAE

SEQ ID NO: 2406 - protein, 315 aa, unidentified
  source 1..315: note = Related to SVGZ01000005.1; note = Clostridiales bacterium
MIFYGLAKLEKALGYEAKTLYALSNNVKKHYHPAQIPKKNGEMRNLLVPDMALKSVQKAIAEKILQNFPVSPYAYAYRKGFGIKKNARQHTGKEKVLNLDIEKFFDHILYTQVKDYAFPKAFFAEDVRILLSILCYGEKGLPQGAPSSPAITNLVMHDFDMKIGKWCEKQGIDYSRYCDDMSFSGDFDEKAVISFVKKELRRLNMSLKREKTRVAKKGSRQTVTGIVVNEIPSVPSEYRRKLRQEIYYLKKFGAGHQLRHYGLKMTAKDYFLSLLGRVNYVLHISPDNYEMWQYRRYLKNMLRQSRLQPRRSVLL

SEQ ID NO: 2407 - protein, 323 aa, unidentified
  source 1..323: note = Related to JAGCGE010000004.1; note = Clostridiales bacterium
MAYLDPDVIAVLLHVPVHILYAFSNSSYKHYRLISIPKKNGKTRQLTVPDNDLKIIQRSIYFRFLRGREVSPAAKAYLKKGTTTENAKPHVGKPMILKLDIRHFFDNVLFWHVKEKVFTSDIYSENARVLMTYLCTYDGHLAQGAPSSPAITNILMKDFDDEILRFCGKDGVCYTRYCDDMTFSGVFEPDQVISKVAWELKKMGLHLNPAKTRVIWQGQQMNVTGLVVNDKVSVPASYRRKIRQEIHYIWKYSVEDHLKHMGREEDEQYSYLSNLLGRINYVLSIHKDDFEFQEYKDYVVMGCDGRLRYKERPYQIGIDELLG

SEQ ID NO: 2408 - protein, 335 aa, unidentified
  source 1..335: note = Related to JAFQLL010000102.1; note = Clostridia bacterium
MKRSIKKLIRPKDAAMWLYKAQSGKEVTEALMLLYDMSNNAPKYYQKKEIPKKQGGKRVLSVPVTELKRVLCCIKAEILDYIPVSDYARAYKKGGGIAHAAKEHVGHETLLRLDIEGFFDHITYKEVYKHVFGRYYPRKVAGLLTALCCYEKHLPQGAPTSPAISNIVMKGFDDEVAVFCKMNNIHYTRYCDDCIFSGKFDVGAVIKKVKSELLKMGLRLNDEKTKVISQGQRQIVLGVCVNEKMQAPAAYRNRIRQEIYYCKKYGVKNHLLRLNDERFVKKTPGGVFVDAVGYLMQLKGKISFVLSINPDDKEMREYFNLLSVSKKSTRAKKSC

SEQ ID NO: 2409 - protein, 407 aa, unidentified
  source 1..407: note = Related to JAFZLF010000009.1; note = Clostridiales bacterium
MNRSLYLPQMDSLYAFAYQYLRVNGRSCRSDDIYSCGGEIKAILDDTRPHYRKILIPKPNKKEMRTVFEVTQDLRSLQHFIKRYILDRLDAMYTSPYAFAYRLGLSARDNASAHAGHRYMLKLDIRHFFESTRAGQVYSMFRKYTPYNRQILGTLTRLVCYKGALCQGACTSPQIANLILSDFDMAIGTCCRDMCITYTRYCDDMTFSSVLPFDKSALERTVALMLQPYHYKLNTRKTRFLGPGHRLEVTGAVVNERVHAKREYRQKIRQELYYTNRYGVADHLERTRPAWYHTPCSCAQIRHFLYSLQGRINYVRMLDPDDPFLGDAQYQLFRLFLREQSAFRNIYADVGPVSQRQGSTSGFFPEEGPVGFDDLDTDLMEPPFNIPDMDPPELPFDVLGWDDPFSG

SEQ ID NO: 2410 - protein, 382 aa, unidentified
  source 1..382: note = Related to JAFZVE010000038.1; note = Clostridiales bacterium
MDSDEIYACAGEIKAILDDVRPHYRKILIPKPNQEEMRTVFKVTSDLQLLQYFIKFRILDPLDRAYTSPYAFAYRRGYSARDNASQHSGRKYMLKLDIRHFFESTRAGQIYSMFRKYTPYNKTILGTLTRLVCFNGALCQGACTSPQIANLVLSDFDRTIGSYCKCIGVTYTRYCDDMTFSAYWPFNKVAVKDMVEDLLRPYHYKLNTAKTRFLGPGKRLEVTGAVINDRVHAKREYRHKLRQELYYACKYSVAEHLERTRPKWYHSPCTAEQVRHFIYSVQGRINYIRMLDPEDPFLEYAQDLFQVLHLSEVSAFSRNGHFRGSEPDEDLPDPLDIPDLFFTDLEEPPFDVMGDYFPGEEFFHPGDYPVPGPQDDPLFGSE

SEQ ID NO: 2411 - protein, 491 aa, unidentified
  source 1..491: note = Related to JAFZQI010000003.1; note = Clostridiales bacterium
MKPTLPKMDSAYTFIKAYRRSKGYSENRNRAFRDTRELLSVLDEISEHYEKHFVSKKNSDELRTVFSVSYPLREYQEFIRAQVLTPLDLAYTSSFAYAYRRGLSTKDNAKVHEKSRYMLKLDIRHFFESTRKRLVFATFEKYTSYNRSILGILTKLVCYNGSLCQGACTSPTIANLVLADFDASVGLFCDGLGIRYTRYCDDMTFSSPFEFEAKNVEEFVRLQLKPLRYSLNDRKTRFFRPGQRLEVTGAVVNTRVRAPREYRQKIRQDLYYINKYGFIFHLEKTRPSWYSGKATEYDILHLLKIMKGRIAYVKMLDPDDPFASNARKELDAAALRYGVGDLSKMQDRQISFEIENAKILRFMTLEERLQRSVSPEVHLMVWHAMRGLEYHPEGNGGFVSDEEDDGLFSDERDVRDNRCFADEGHTSMQDANDTLPFEAVNFPTFDEVSIPPFDEDFPTFDEHRIPSFDEVIVPSPDEDKTPPLGNEFPDD

SEQ ID NO: 2412 - protein, 513 aa, unidentified
  source 1..513: note = Related to FMTG01000031.1; note = Ruminococcaceae bacterium YRB3002
MVVNWEKKRRRRLTELEQKILAERPGEPAFNAGSGDLPVIGSLMSLVMLARGNSFSSEEGFWREYRRASAMVDDTSPYYRHYPIPKANGRGYREIYTVDDGLRVYQEAIRGTILDPLDEKYSSKYAYAYRRGRSVRDNAAVHAGHGYIVKLDIKDFFDSTGKSDVYRMFSRYTNYSRAAKTVLTALVCRDGHLSQGSCTSPQIANLVMVDLDGELAAYCEPQKITYSRYCDDMTFSSDEPFDHEALIRFVSLRLRQMHYRLNCRKTKVLGPDSRHIVTGIVVNNERIRVTKEYKKKLRQEIYYIRRYGITSHLKRIRPGEYTPVFEGAGSKHEIHYLAHLLGQAAYALYIDHDDEELRAMVDYLKQAVTECVASTGTRRSEYLSVISRQILNNRMCSVNDRLKIRVSCQYDEIVVTASFRLIDDPDVREVADHYTKYSRVQRRCRGRFVKPGRGTGRGTESATESTTATGGDGIICYEVVIPERDFSRYNEAVPEVMDDITWIYSDFMKYKLI

SEQ ID NO: 2413 - protein, 526 aa, unidentified
  source 1..526: note = Related to JAFWKC010000096.1; note = Eubacterium sp.
MKLQIEDFENVKVDIKEFIEYIMPSNKQSMNKLARILYPDSNEKDYDSLTNYLYVMLDGIEKDYEEFTIKKKNGKLRTISKPNEALADIQKRIYEYILRNAPVSPCAAAYVKGKSIRDATAKHIGQPILIKIDVKDFFYNIFFDSVNDAFTNLGFDKYQAITLANFCCYKGSLPQGTSTSPMLSNLVFRDFDDEMEKLCLKYNIRYTRYSDDMLFSGSFDNEFDTKRFVPYVKFMLEDFGFQMNLSKTKIIKQGQRQTALGVVLNEKQQVTKEYRKQIRQEIHYCSEHSVKSHLEHIQDERFLLPNGEPDYIGYIDNLNGRINFALQINPDDMEMVSYKNSLKSLSSSMYQAKVVEQNQLMECLYKVFSDYVNSKIKYTILYKKLLEYGFSNSQLSKIGIYEEKIVYGFDEVYLTKDDKGNYLSLITKHSCSEHLGNVIINPYCDGFFGSRFDKNLGYLTVTSDKIAAVTSGLTNYVSFNNAPSKFFLSKKKLEMIRKYGNKVVVADCSGAEYIRLQMIANHIEVI

SEQ ID NO: 2414 - protein, 321 aa, unidentified
  source 1..321: note = Related to DOBY01000149.1; note = Oscillospiraceae bacterium
ETVYITKASGKKREINKPDIVLKSFQKSVYKNILLHIPTSYYAVAYKKGSSLRYSTAVHIGKPMILKLDIKNFFGSILYKTVQEMFLKQGYDYFMATTLATLCCYKGRLPQGTPTSPAISNIIMKDFDDKVACFCYARNIAYTRYSDDMTFSGSFDSDEVIEFVKNKLNKSGFQLNNKKTKLIKQGQRQTVTGVVVNEKQQLPKGYRKQIRQEIHYCQKYSVKSHILHTNLTAYIRPNGDVYYKEYLLNLYGRINYALQINPTDEEMLKYRSVVKSAIDKLDIIKRKINDEIFRLAVDFFTSDKYKTNKIYLYLKESGYTN

SEQ ID NO: 2415 - protein, 357 aa, unidentified
  source 1..357: note = Related to JAFYNQ010000087.1; note = Oscillospiraceae bacterium
MYWNRETNAISISAGDMKIMRQCNISMERLMQKPANPQLPPLWSILSYAMLRSDGDAAVGIWRNFRLYQKLFENPNQFYFGKEICKTDGSVRELNVPMSRLRCEQEFVFENILSKLPVDSHAYAYRKGISMQDCARPHVGKKVLIRLDIQDFFGSVTENMVYNRLLEDTGYPRKLCRFLAKLCCYQHHLPQGAVTSPMLSNIVFRPLDEKLAEFAGFCGMAYTRYSDDLYFSGDEIDVTSFISCVKLVLGNSGFRLNGKKTRVRMPQHRQAVLGLTVNEKLQVSRTYRRNLLQEIYYLEKFGKNCLGAQKEGNYLRYVQRLLGKVNYAIASGAEDPKLKAAAEMLKKRIFLIEREFY

SEQ ID NO: 2416 - protein, 354 aa, unidentified
  source 1..354: note = Related to SVKT01000009.1; note = Oscillospiraceae bacterium
MKWKERSSTFCLEPQDMQIIAQCKMSLTEMVRHDHPNKNIPPLWSVLSYVMLQSTSHANIWYRYRALREMASNTKLWYYTQYIPKSNGGARRISVPTHAIRTQQKYILAKILKGLPVSDHAYAYREGRSIQDCAKPHESQDVLIHLDLTDFFGSISENMVFLTFYRETGYSRSLCRFLAKMCCLRGSLPQGTVTSPMLSNIVFYRCDEDLARLAARYGMNYTRYSDDLYFSGNSALDVGEVLKKITRILLYYGFRINEKKTKIRRRQHRQTVLGLTVNDHIQVSRKYRRDLLQELYYLDRFGENCKGAVACGDYLKYMQQLQGKLAYVLHADPENVKMREAHSKLIRRIHQYSE

SEQ ID NO: 2417 - protein, 365 aa, unidentified
  source 1..365: note = Related to JAFQFC010000021.1; note = Oscillospiraceae bacterium
MKWEGKQVLFSAADLQVLMQARFRPDEVPDMEEVKEGLPPLWSPLSYTLWKCHGETSRKNLWRQHREALLMAKSGSGYYHHMLVRKNGGSGVRRISVPCYELRDHQRFIYKNLLSRLPLSPRACAYRKGVPLRRCAEPHCGAEVLVHLDIRDFFPSITEEKVSFALHRATGYEEELCDFLAGLCCENGRLPQGAVTSPALSNLAMAGMDGTFGAMAAMLGFTYTRYADDIYLSSSDRSADAARIVKLARDFLRSEGFELNRDKTRIIRQGRHMAVLGLSVNEKVQVSRRYRREVRQKLHYLKRYGADAQGVQEAGGQEPYALHLLGKVGYILQVNPMDQQALRARLELLTGLHRLHRGMPFWWSA

SEQ ID NO: 2418 - protein, 421 aa, unidentified
  source 1..421: note = Related to JAFSHB010000043.1; note = Oscillospiraceae bacterium
MEWDPRREKLSLSERDLKIMKDCGMTPAEILRAVESRGRIVPLWSVLSFFMLYETSESPKAFWRTYRQGETAARYRDCLYHDRKIPKRCGGVRTIAMPMWPLAQMQTCIAEKILQHIMPDDHACAYRRGMSVSDCAEPHRKKRIVIHLDIRDFFGTIREDMVFDALLRETGYSKKLVRFLSRLCCYQDRLPQGACTSPALSNLVFKPCDEAIGGFAASLGMDYTRYSDDLYLSTSGEVDTGLVIETVRKILADHGFRLHNEKTKIMGRQQRQSVVGIVVNEKLRPSRTYVRTVLKDVYYVSRFGAGSNQVAAFGDYYSYLRQLQGRVNYVRCFMPEDRAVLEAVQTVRSLIGAYHRTLLDAVTALEAQCRDGYVVVFSENYYRPLVKLKEQLAVVRRFLPRDYRFHDAEERVYAMLGEELY

SEQ ID NO: 2419 - protein, 367 aa, unidentified
  source 1..367: note = Related to JAFXTM010000067.1; note = Oscillospiraceae bacterium
MRWYPSGKLNFTAADLAVLSHPAFASKPWAGAGAWLRADPAYPPIPSALVFSLLAGPRESRPERMWKQYRKLLEIANDPAQYYVSHEIVQHRKPRTISAPFYELAQYQRWILKNILERAPTTDFAFAYKKGLTLADNARVHLGRSVIVKLDLVHFFDSITFGMVYEVFAGQLRYPQETAVLLANLCCLNGRLPQGACTSPYLSNLCFAKADGELAGYCREKGLAYSRYSDDLTFSGDRIDVKELIAFVRETVKKYGFSLNYRKIHVDGKGRRHRVTGIVCNEKLNAGADYRRKVRQEIYYLRKYGAADHLRRRNDPAYRNADGTPCVERYYAALLGRISFILQVDPEQEEFWSYRDYVRDLMLRAAE

SEQ ID NO: 2420 - protein, 358 aa, unidentified
  source 1..358: note = Related to JAFTYM010000022.1; note = Oscillospiraceae bacterium
MIWRKRERINLSELDVFVLRKYAGQTNPMEEILNSEIPENLPPILTPYHLPLFMHNFKKMYYFWENYRDIMKCSNEPREFYRRYDIMKRYGKMRTVYKVSGVLADVQHWILRNILDELPVSRHATAYAKGRKIMDNAAPHVGKKLVVKADITDFFGNVKYLSVYDVFKNAGYSKSVATLLANLCCCDGHIMQGACTSPALSNLCFTKIDSVISEFCTERGITYTRYSDDMTFSGDFAPSELITYLRRVLKFYGFTMNDKKTKVLYRHHRQTVTGAVVNDKPQPTKEYRRRIRQEMYYIRKYGVLGHMDRLKDEKSYVSPINYLENLYGRMNYVLQYTPDDEELKRWMHEVDRIEQSLF

SEQ ID NO: 2421 - protein, 330 aa, unidentified
  source 1..330: note = Related to JAFQMH010000077.1; note = Oscillospiraceae bacterium
MDEILKSNIPENLPPLLTPYHIPTLMHNFPKVISFWKSYRELIHCSNHPEEYYRCLVLPKRDGKMRKVYAVSGALAQAQHWILRNILDELPVNPHAMAYVKGRSLLDNANPHAGKKLVVKADIEDFFGSVKYISVYHVFKSAGYSERVSAVLANLCCCKGHIMQGACTSPALSNLCFAVIDEKISAFCALRGITYTRYSDDMTFSGDFAPSELITYLRGLLKFYGFTMNDKKTKVLYRHHRQTVTGAVVNERPQPTKEYRRRIRQEVYFIRKYGVLEHMDRLKDNKCYVSPINYLESLIGRMNYVLQYNPHDEELLSWMDEIDKIEQGLF

SEQ ID NO: 2422 - protein, 342 aa, unidentified
  source 1..342: note = Related to NZ_LT835157.1; note = Proposed Anaeromassilibacillus sp.
MIQTLEEFCEWLDPSVSPRILQKKVYWLRSLRSAKKKRKEYGLFWLAKRGGGYRPVASPSPGLKQVQRGILSLLAYGEIAPPATAYRPGRNLLDNAAVHVGQPILVKLDLLHFFGSIHFPSVFCAIDRTLSQNPEIAPYSKESNGKNAGSTRADSFNALLSFFFTTFCTLDGILPQGSPASPMLSNLVFFPLDQQIAAFCGQRHIHYTRYSDDLTFSGDFSPEPLIRFVYQLLRKNGFLLNPAKTIIARQGRRQQVTGILVNDHPQVGRDYRRRIRQEVHYLRRFGVASHLLHEGQTGWALHPAPYLQSLLGRIQFVLQICPYDREFLEYRAYVLRLLKSSL

SEQ ID NO: 2423 - protein, 339 aa, unidentified
  source 1..339: note = Related to NZ_JADNJD010000005.1; note = Proposed Anaeromassilibacillus sp.
MIQTPEDFCQWLQPDASIRSVQKSLYWLLSLRSARKKRREYQVFWLAKRGGGYRPVAAPSLGLKKVQRGILSLLSVGEVSPHATAYQPGCTLLRNAAPHVGQPFVVKLDIANFFGSIPFPAVYAAIDRALCRNPEIQSSAKASSAREGATESYNAALSFFFATLCTLDGVLPQGAPTSPLLSNLVFFPLDCRIAAFCEGRKIHYTRYSDDLTFSGDFSPDTLIRFIRRLLCEHGFLLHESKTVIARRGNRQQVTGILVNDRPQAGRKFRRRIRQELYYIQRFGLSSHLLHEGRTGESCAPGPYLHSLLGRIQFVLQVCPYDREFLGYRAYILQQMKHYT

SEQ ID NO: 2424 - protein, 344 aa, unidentified
  source 1..344: note = Related to NZ_LN868536.1; note = Proposed Anaeromassilibacillus senegalensis
MLRTLEDFCRAVYPGLTPEQFRKNSHQLAAYADSRKRRKSYRECWIPKKHGGARRILVPSPGLKQIQRAAAALLKNGSVSPYATAYQTGRSVLDNAAPHVGRELLVKLDIRNFFGSIRFPAVFHAIDHALRRNPEVGRHCKDYPHGSRESHNYNSVLSFYLAQFCTLDGVLPQGAPSSPILSNLVFDSLDCKIAAYCERRNIQYTRYSDDMTFSGCFHPEVLIHFVRRLLAEYGFTLHEEKTVLAGRGCRKSVTGVVINETPQVSRSYRRNLRQQIYYIRRFGLREHLLHLGRTADAGQPEQYLRQLLGKVSFVLQICPEDPEFQQYRAYCLGLLRAHAGKKAL

SEQ ID NO: 2425 - protein, 367 aa, unidentified
  source 1..367: note = Related to CP042469.1; note = Clostridiales bacterium
MRRAMNHTLREFLESIKSKHTYLLFRYTDEAYKLRRCYRPVILKKKNGGFRVLQVPDENLKRLQRQLLTYLQHAEISPCAAAYVKGRGLSEHAHYHAGRSMLLKLDIEDFFGSISFSKVLFAVKEALKRSPLVGQEQRSEIGWFIAKACTLDGVLPQGAPTSPILSNMVFLHLDQEINSYCIQRGIHYTRYSDDLFFSGDFRPSEIIPLIRKLLRRNGYTLNENKIVAAGRGSKKLVTGVVVNQRPQADRSYRREIRQSIYYIGKFGLEEHLKRKGLLDEGMQPEDMRSEAAGNEDFGREDVIIRAQMVKELQRLIGRIVFVLQIDPQNREFQDYKKFCIGLLNRLPVIFNGRLLSEAEINEGWGSA

SEQ ID NO: 2426 - protein, 344 aa, unidentified
  source 1..344: note = Related to DXES01000132.1; note = Candidatus Anaerotruncus excrementipullorum
MLHTLEAFCAWHYGGGDPLRLARRTRWLMRLARGRRLEGEYRPQEIPKRKGGTRKLLVPSHRLAHLQRGILRLLEAGEVSAAATAYEPGCSLRQNALPHRGARLLVRLDLADFFGSISFQQVFQAVDRALRRSPLVGRHLLDGYDRLQREERVYNQVLSFYFARFCTYRGHLPQGAPTSPHLSNLVFFPLDEALLRYCTRRGITYTRYSDDLAFSGETFSVGELLRFVQRLLAAHGFRLNEGKTVVAGPGQRKRLPGVVVSHKLQADVGLRRQLRQEFYYIGRFGLASHLERTGEQRPPSAYLRRLLGRTGFVLQVNPEDREFQEYLERGKRWLKEQEERAAEG

SEQ ID NO: 2427 - protein, 331 aa, unidentified
  source 1..331: note = Related to VFMF01000001.1; note = Clostridium sp.
MLHTLEDFCRYLYHNRDERKFYRCYYQLLRLSREKYRCSCYTLRELPKGEAGTRLLCVPNRALRRVQKGILGLLPAAGPCCVTAYLPGKSVLDNARPHLGQPLVVKLDIRAFFDSISFAQVFRAVDRALEASPYVGCHYLNADDRSSLENRNYNSVLSFYFARFCTRGGSLPQGAPTSPLLSNLVFGPIDGQISAYCGRRGIAYTRYSDDMTFSGTFNPLALIDFVRRVLAENGFTLNDRKTRILNRGQRRKITGVVANQKLQAPREYRRDIRKELYYIRKYGWESHLSHENIAQGPEEYRRGLLGRVGFVLQLCPADGEFQQYRQWLLEN

SEQ ID NO: 2428 - protein, 352 aa, unidentified
  source 1..352: note = Related to JAFXOM010000274.1; note = Oscillibacter sp.
MEDAARFERETGLPYFPDAHQFADAYLPTDRSEEHGENVRRLYDLANAPRWYYRSVSIPKQSGGTRTLHIPYGTLKSVQHFLLHSVLERLPVSPCAVAYVRGVSLSESVRVHVGKPLLVRLDLKDFFDHIGFLQVYQNAFAAYPKAVRVLLSRLCTYTLPSGRSCLPQGAPTSPYLANLCMRRADDAIYAYCARRSIAYTRYADDMTFSGSFEPERLIETVRSILRREGGFELNEEKTRILRACRRQSVTGAVVNERPRASATYRREIRQECFYCKKFGVRSHLLRTKKAPFVRPSESVKDGYYVSQTRYLEHLLGKINFTLSLDPKDREMRLCRKEVLLWLAERNAAPRER

SEQ ID NO: 2429 - protein, 353 aa, Flavobacterium sp.
  source 1..353: note = Related to NZ_QNVY02000005.1
MDFNHYKEAFIKESRKIGFSLPNIQHCLDYAEVLFSHHVPVIYNPSHLSALVGYKKEYLKKASLFPNYFYRDFEVAKKNGTKRLISEPLPSLKEIQIWILRSILYKIPVSPFAKAYKPNVTLLENLRFHKNQSKIFTLDLENFFPSISAELVEAEFLELGYSKIVSKLLSRLCTRNGNLPQGAPTSPYLSNLIFKKADAEIASYCKDYKIRYTRYADDMSFSGDFDHEELLKKVTETVEKLNLRINAKKTKLMTPNMRQTVTGVVVNQKPQVIFYKRNELRQTLYYIQKFGFEEHKIFKKNNHNNYLEHLLGKINFVLQINPKDAEFIKYKAVLFDLKHKQDLTAIENELFPI

SEQ ID NO: 2430 - protein, 353 aa, Flavobacterium sp.
  source 1..353: note = Related to NZ_SMFN01000003.1; note = Flavobacterium sandaracinum
MDFTHYKDAFIKEAHKTGYSLTNIQRCLDYAEALFLHEVPVIYNPSHLSSLVGYKKEYLKKASLFPNYFYRDFEVAKKNGTKRLISEPLPSLKEIQIWILRSILYKVPISPFAKAYKPKVTLMENLRFHKKQPKVFTLDLENFFPSIRMETVQNVFLKLGYSKIISKFLTRLCTRDGTLPQGSPTSPYLSNLIFKQADAEIASYCKDYKIRYTRYADDMSFSGDFDENELLQKVTETVEKMGLRINAKKTNLMTPNMRQTVTGIVVNQKPQVIFKKRNELRQALYYIQKFGFEEHREYKEIDQKNYLEHLLGKINFVLQINPKDAEFIKYKAVLFDLKHKKGIKTIDNEFFPI

SEQ ID NO: 2431 - protein, 353 aa, Flavobacterium sp.
  source 1..353: note = Related to NZ_FODN01000006.1; note = Flavobacterium sinopsychrotolerans
MDFAHYKDAFIKEAHKTEYSLTDIQRCLDYAEALYLHQVPVIYNPTHLSGLVGYKKEYLKKASLFPNYFYRDFEVAKKNGGKRLISEPLPSLKEIQIWILRNILYKVPSSAFAKAYRPTVTLLENLRFHKNQPKVFTLDLENFFPSIRVEAVENEFLKLGYSKIVSKLLSKLCTRNGTLPQGAPTSPYLSNLVFKEADAAIATYCKEHKIRYTRYADDMSFSGDFDENELLQKVTETVEKIGFRINAKKTKLMTTGMRQTVTGVVVNEKPQVVFYKRNELRQALYYIQKFGFEEHREYKEIDQKNYLEHLLGKINFVLQINPKDAEFIKYKSLLIDLKNKQDLKALEDELLPI

SEQ ID NO: 2432 - protein, 353 aa, Flavobacterium sp.
  source 1..353: note = Related to NZ_SMLH01000005.1; note = Flavobacterium ranwuense
MDFAQYKETFTDKSHKIGYSLPNIQRCLDYAEVLFSHDVPIIYNPTHLSLLVGYKKEYLKKAAVYPRYFYRDFEIAKKNGTKRLISEPLPSLKEIQIWILRNILNKVPISPFAKAYKTNVSLIENLKFHKNQPKVFTLDLENFFQSITIKLVEKEFHQLGYSKMVSRLLSKLCTRDKTLPQGAPTSPYLSNLILKDADAQIAAYCKLHKIRYTRYADDMSFSGDFDENKLLHKVIEIVEKLNLRINKNKTKLMTSNTRQTVTGIVVNEKPQVVFHKRNDLRQAMYYIKKFGIEEHREYKEINQKNYLEHLLGKINFVLQINPKDIEFLEYKSILKDLKKKQDLKAMEDELLPI

SEQ ID NO: 2433 - protein, 353 aa, Flavobacterium sp.
  source 1..353: note = Related to NZ_JQMS01000001.1
MDFTQYKESFTEEAHKMGYIEQNIEHCLEYAEVLFSHDVPVIYNPSHLSLLLGYKKEYLKKVSLFPRYFYRDFEILKKNGSKRLISEPLPSLKEIQIWILRNILYKVAISPFAKAYKPNVCILENLRFHKNQPKVFTLDLEHFFPSITIEKVEKEFRELGYSKMVSKLLSRLCTKDGSLPQGAPTSPYLSNLIFKDADEAISDYCKQHKIRYTRYADDLSFSGDFNENKLLHKVTEVIEKLNLKINKNKTKLMMPNTRQTVTGIVVNEKPQVVFYKRNDLRQAMYYIKKFGFQEHREYKEIDQKNYLEHLLGKINFVLQINPRDTEFISYKSILIDLKKKQDQKELEDALIPI

SEQ ID NO: 2434 - protein, 353 aa, Flavobacterium sp.
  source 1..353: note = Related to NZ_JSYM01000001.1
MDFIQYKETFSHDAQKKGYSEQNIKRCLDYAEVLFAHDVPVIYNTTHLSLLVGYKKEFLKKAALYPKRYYRDFEILKKNGSKRLISEPLPSLKEIQIWILRNILYKVPISPFAKAYKPNISILENLRFHKNQPKVFTLDLEHFFPSISFEAVEKEFLELGYSKMVSKLLSKLCIRDGSLPQGAPTSPYLSNLIFKKADAVISDYCKQHKIRFTRYADDLSFSGDFDENKLLHKVTETVGKLNLRINKNKTKLMMPNTRQTVIGIVVNEKPQVVFHKRNELRQAMYYIKKFGFEEHREYKEIDQKNYLEHLLGKINFVLQINPKDEEFIGYKTILIALKKKQDLKTMEDELIPI

SEQ ID NO: 2435 - protein, 353 aa, Flavobacterium sp.
  source 1..353: note = Related to NZ_SMFM01000002.1; note = Flavobacterium caseinilyticum
MDFPHYTCVFTREASKLGYSPKNIQRCLEYAEVLFSHGVPVLYNPSQFALLVGYKKEYLQKAALYPNYFYRNFHITKKNGSKRLISEPLPSLKEIQLWILRNILYKVPVSAFAKAYKPTVSILENLKFHKKQPKVFTLDVENFFPSIKYDSIQKVFLQLGYSKMMSRLLTRLCSCNGALPQGACTSPYLSNLIFKEADAAISNFCMQRKIRYTRYADDLTFSGDFDENELLKHVTEIIERQNFRINGNKTKLMTPNSRQEVTGIIVNEKPQVVFHKRNDLRQALYYIKKFGFEEHLEYKEINHRNYLEHLLGKINFVLQINPRDMEFISYKSFLIDLKKKKDLKMTTVFPLLM

SEQ ID NO: 2436 - protein, 353 aa, Flavobacterium sp.
  source 1..353: note = Related to NZ_QKXH01000002.1; note = Flavobacterium aquariorum
MDFEQYRNNFSKEALKLGYSEQNVVRCLDYAAVLFSNNVPVIYNISHLGQLVGYKKEYLKKASTYGDNFYRNFEITKRNGTKRLISEPLPSLKEIQLWILKNILYKIPVSPVAKAYKPKARIIENLKFHRNQPKVLTLDLENFFPSIKMKATQNVFLNLGYSKYMANILSKLCTKEDSLPQGAPTSPYLSNLIFKSADALIFDFCRQREIRYTRYADDLSFSGDFDEKMLLGKVTDIIESLGFKINNTKTKLMTPNTRQTVTGIVVNQKPQVVAHKRNALRQALYYIKKFGLKEHQEYKEIVQKNYLEHLLGKVNFVLQINPNDNEYKNYKDFLIDLKKKNELGIKNASPSLI

SEQ ID NO: 2437 - protein, 350 aa, Flavobacterium sp.
  source 1..350: note = Related to JAHWYN010000011.1
MDFTQYSFAFSKEALKFGYTEQNIKRCLDYAVVLFSHDVPVIYNTSHLAQLVGYKKEYLKKATLYTNSFYRNFEIVKKNGSKRLISEPLPSLKEIQLWILKNILYKIPVSPVAKAYKPNVRIIENLKFHRNQPKVLTLDLKNFFPSIKINAIKNIFIDLGYSKFVSRLLAKLCTKEDALPQGAPTSPYLSNLIFKKADALIFDFCKQRKIRYTRYADDLCFSGDFNEEELLEKVTDIVEDMNFSINKSKTKLMLPNTRQTVIGIVVNEKPQVVFHKRNALRQAVYYIKKFGLNEHQECKGILQNNYLEHLLGKINFVLQINPKDTEFRNYKDFLIDLKKKNEWSKPVFHH

SEQ ID NO: 2438 - protein, 353 aa, Flavobacterium sp.
  source 1..353: note = Related to JAGGNA010000001.1
MDFAQYKNTFTQEASKNGYSEQNIQRCLDYAELLFSHEVPVIYNTSHLSNLVGYNKKYLKKASYYPQYFYRDFEITKKNGTKRPISEPLPSLKEIQIWILKNILYKIPVSPFAKAYKPNTALIENLKFHKKQPKVLTLDLENFFPSISVKSIEKIFIEMGYSRMVSQLLAKLCTRDKTLPQGAPTSPTLSNLIFKDADVAIADFCKQRKIRYTRYADDLSFSGDFDEKELFEKITETVENLNFHINKSKTKLMTPNTRQVVTGIVVNEKPQVVFHKRNELRQAMHYIKKFGIDEHREYKEINQRNYLEHLLGRINFVLQINPKDLEFIGYKAVLIDLKKKQALKMKKNQPLLM

SEQ ID NO: 2439 - protein, 352 aa, Flavobacterium sp.
  source 1..352: note = Related to NZ_FRCL01000005.1; note = Flavobacterium xinjiangense
MDFTHYKEAFIQEASKNSFSEHNIERCLEYAAVLFSNNVPVIYNTSHLSALVGYKKEYLKKASLYPKYFYRDFEITKKNGSKRAISEPLPSLKEIQIWVLKNILYKIPISPFAKAYKPNSGLIENLKFHKKQPKVFTLDLENFFPSISIKSIEKVFLTAGYSRMVSKLLSKLCTRDGTLPQGAPTSPYLSNLIFKDADAVISSYCIERKIRYTRYADDLSFSGDFDEKELLSKITSIVENLNLHLNTAKTKLMTPNMRQTVTGIVVNDKPQVAFHKRNELRQDMHYIKKFGIDEHREYKEINHSNYLEHLLGKVNFVLQINAKDLEFIGYKAVLIALKKKQQKTQMIQPLLM

SEQ ID NO: 2440 - protein, 351 aa, Flavobacterium sp.
  source 1..351: note = Related to NZ_FOFZ01000005.1; note = Flavobacterium frigoris
MDFSNYKDTFTNEAIKRGYSEQNIKRCLDYAAPLFSNDVPVIYNTSHLSVLVGYKKEYLKKAALHTKYFYRDFEIVKRNGKKRPISEPLPSLKEIQHWILKNILYNIPVSPFAKAYKPNISLIENLKFHRNQPKVFTLDLENFFPSITIDSIEKIFIELGYSKSVSDLLAKLCTRDGTLPQGAPTSPSLSNLIFIEADALIADYCIQRKIRYTRYADDLSFSGDFDEKELFDKVNGIIKKMNFNINTAKTKLMTPGSRQTVTGIVVNEKPQVVFHKRNELRQAMYYIQKFGIDQHREYREINQRNFLEHLLGKINFVLQINPKDTEFIGYKSFLIDLKKKRDLNYDTLKII

SEQ ID NO: 2441 - protein, 353 aa, Flavobacterium sp.
  source 1..353: note = Related to NZ_FNMV01000002.1; note = Flavobacterium degerlachei
MDFSQYEDAFTKEATKMGYSPQRIERCLDYAEMLYSNDVPVIYNSSHLAGLVGYKKEYLKKAALHTKYFYRDFEILKKNGKKRPISEPLPSLKEIQHWILKNILYKRPVSAFAKAYKPNVSLIENLKFHKNQAKVFTLDLENFFPSIGIESVEKVFADVGYTRSISDLLSKLCTRDGSLPQGAPTSPYLSNLIFEEADKVISQYCIQKKIRYTRYADDLSFSGDFDEKELFNIVTEAVEKLKLKINPSKTKLMTPDSRQTVTGIVVNEKPQVVFHKRNALRQAMYYIQKFGIDEHREYKEINQANYLEHLLGKINFVLQINPKDSEFIGYKSFLKDLKKKREASNNRIMPLLM

SEQ ID NO: 2442 - protein, 370 aa, Flavobacterium sp.
  source 1..370: note = Related to NZ_PVUB01000001.1; note = Flavobacterium granuli
MGVSDSKSPHSINDSDAMDFVHYKDSFTKEALKIGYSQQNILSCLDYAQILLTKDVPVIYNSSHLAVLVGYKKEYLKKAAHHTKYFYRDFEITKKNGKKRPISEPLPSLMEIQHWILKEILYKLPVSPFAKAYRPNISIIENLKFHKNQPKVFTLDLENFFPSIKIEAVERIFTELGYSKNISNLLAQLCTRDGRLPQGAPTSPFLSNLIFKDADLMISDYCKEHKIRYTRYADDLSFSGDFDEKKLLHKVTETIEKLDFKINAAKTKLMTPDRRQTVTGIVVNEKPQVVFHKRNTLRQTMYYIKKFGIDEHREFKEIDQTNFLEHLLGQINFVLQINPKDSEFIHYKAFLIDLKKKQDAKNIKRGLLLM

SEQ ID NO: 2443 - protein, 353 aa, Flavobacterium sp.
  source 1..353: note = Related to NZ_JADHEC010000014.1; note = Flavobacterium soyangense
MDFTKYKKDFTDEATKMGLSKRNIQDCLDYAEVLVSHNVSVIYNPSHLSALVGYKKEYLKKAALHTSYFYRNFEITKKNGKKRPISEPLPSLKEIQIWILKNILENIPVSPFAKAYKPKMRLIENLKFHKNQPKVFTLDLENFFPSIKIEAVEKIFLKLGYSKIVSELLAKLCTKDNALPQGAPTSPYLSNLVFRDADAIISEFCKQRKIKYTRYADDLSFSGDFDENELLDKVTETIKTLNLRINESKTKLMTPDMRQTVTGIVVNNKPQVEFNKRNELRQAMYYIKKFGFEEHRVYKEISQANYLEHLLGKINFVLQINPKDYEFSAYKALLIELKKKQNLKIKKELPLLL

SEQ ID NO: 2444 - protein, 353 aa, Flavobacterium sp.
  source 1..353: note = Related to PNNA01000057.1
MDFTKYKVDFTAEASKKGLSKNNVQRCLNYAEALISKGIAVIYNPSHLSALLGYKIEYLKKAALHPSYFYRDFEIAKKNGKKRAISEPLPSLKEIQVWILKDILEKVPVSPFAKAYKPKTSLTENLKFHRNQPKVFTLDLENFFPSIKIDLVEKVFLELGYSKMVANLLAKLCTRDNALPQGAPTSPYLSNLIFKEADAIIADYCKQQKIRYTRYADDLSFSGDFDENKLFEKVTNVVEKLDLRINKSKTRLMTPDKRQSVTGIVVNNKPQVAFKKRNALRQAMYYIKKFGIDEHRVYKEIKQANYLEHLLGKINFILQINPKDTEFMEYKTLLFDLKKKEDLKIRKPLPLLV

SEQ ID NO: 2445 - protein, 345 aa, unidentified
  source 1..345: note = Related to NZ_QNUG01000026.1; note = Epilithonimonas hispanica
MKFEQYKEAFEKKASIFGYSEDNIQLCLIYAELLFKNNVPVIYNTSHLSALVGYNKEYLKNATKHTPSFYRDFQIKKKNGTLRTISEPLPSLKEIHIWILENILANVKLSPFAKAYRKKIRIFENLKFHKNQPIVYTIDLKDFFCSINTDAVEAIFKSLGYSLLISNLLAKLCTKDNSLPQGAPTSPCLSNIFFKETDNLIANYCLEQKIKYTRYADDLSFSGEFNENVLLEFVKNSIEKIGLKINEDKIRLMRTGSRQTVTGIVVNEKPQVVFYKRNKLRQDLFYIKKFGLAGHMSHRKIEKTNYLEHLLGQINFVLQINPDDKEFQGYMTYLIELKKLSEIRD

SEQ ID NO: 2446 - protein, 344 aa, unidentified
  source 1..344: note = Related to JACPUU010000004.1; note = Bacteroidetes bacterium
MNFERYKEAFEKAASNSGYSEENINYCLGYAEVLFRNNVPVIYNTSHLSALVGYKKEYLKKAVVHTPFFYRDFQIKKKNGKLRTISEPLPSLKEIQTWILDSILSNVSVSPFAKAYRKNVGLLENIKFHKNQPLVLTMDLTDFFTSVKTNSVEEIFRSLGYSDLIANLLAKLCTKDNSLPQGAPTSPALSNLFFKPVDERIAAYCKLNHIRYTRYADDLNFSGDFDAEKLKAYVKGAVESVGLMVNDSKTRVMKSGSRQLVTGIVVNEKPQVAFQKRNKLRQDLFYIRKFGLEDHMKRRKIKQANYLSHLLGQVNFIVHINPDDKEFQDYKTYLVGLKQTLGHA

SEQ ID NO: 2447 - protein, 345 aa, unidentified
  source 1..345: note = Related to NZ_FTOB01000002.1; note = Zobellia uliginosa
MTFEQYKIAFEKAASNSGYSELNIKRCLDYAKPLIENNVPIIYNTSHFSSLVGYKKAYIKKAVYYTKSFYTDYAIKKKNGKTRTISEPLPSLKEIQTWILQNIFQQLKVSPYAKAYKRKVSIVENLKFHYNQPKVFTLDLKDFFPSIKIHSVEQIFKSLGYSDLISNLLAKLCTKENCLPQGAPTSPYISNLYFLPADNHISEFCKQHSIRYTRYADDLTFSGNFDENAVLNFVSEQIVKLELVIHPDKIKLMTPNQRQSVTGIVVNQKPQVVFHKRNKVRQELYYIKKFGLANHMERKGIKKRNYLEHLLGKVNFIIQINPTDTEFIEYKEYLIKLKSEISGQT

SEQ ID NO: 2448 - protein, 342 aa, unidentified
  source 1..342: note = Related to NZ_AMGM01000138.1; note = Cecembia lonarensis
MKFEQYKQEFEIKASQSGYSAENITRCLNYAKPLIDKGFPVIYNTSHLSVLVGYRKDYIKRAVVYTPYFYRDFEIKKRNGKMRKISEPLPSLKEIQDWILVNILEVEKVSPFAKAYRKKVGLIENVKFHKNQPKVLTLDLKDFFPSIKRENVESIFRSFGYSALISNLLSKLCTRGGCLPQGAPTSPYLSNIFFKSADDIIIKYCLANDIRYTRYADDLSFSGNFDEKMLIELVDDTVRQLGLTLHPDKIKIMKPNERQTVTGIVVNEKPQVVFHKRNKLRQEMHYIIKFGIQDHMQRKNIKYRNYIEHLLGKINFVLHLNPKDTEFQKYKEHLIELKKQTI

SEQ ID NO: 2449 - protein, 342 aa, unidentified
  source 1..342: note = Related to NZ_CP083760.1; note = Candidatus Sulfidibacterium hydrothermale
MNFEQYKVIFEKEASNSGYSETNIRRCLTYAEILFANKVPVIYNTSHLSVLVGYNKRYLKRAVVYTPYFYRDFQIKKKNGKFRKISEPLPSLKEIQTWILENILSNIPISPFAKAYKKNTSIIENLRFHVNQPKVFTLDLENFFPSIKTDSIESIFLNVGYSKILSNLMAKLCTRDNSLPQGAPTSPYLSNIFFKPVDDIISRYCIDNKIRYTRYADDLSFSGDFDENSLMEFVSNVISELNLTINKNKTRLMTPNMRQTVTGIVVNKKTQVVFHKRNNLRKDIYYIKKYGLHNHMKFRNIKQSNYLEHLLGKVNFVLQLNPNDIEFKRYKNFLIELKNKIE

SEQ ID NO: 2450 - protein, 346 aa, Flavobacterium sp.
  source 1..346: note = Related to NZ_MUHA01000018.1; note = Flavobacterium oncorhynchi
MDFDQYKTEFATLASSVGYTEQNIQKCLKYAKPLLDKKLPVIYNTSNLSNLVGYKKEYLKKAVRYTSSYYRDFEITKNNGGKRKISEPLPSLKEIQIWILDNILSQIEISPYAKAYRQNVTLIENLKFHKNQPKVFTIDLENFFTTIKQDSIQKIFGEMGYSRLISNLLSKLCTRDDSLPQGAPTSPYLSNIFFKSLDIEITKYCNENKIRYTRYADDLSFSGDFDEKILLEFVTEKITKAKLVINPDKVKLMKKNTRQIVTGIVVNEKMQVVFHKRNKIRQDMFYIKKYGLVNHMEHLKIKKNNYLEHLIGKINFILHINPNDKEFIDYKSFLNDLKNKVNKTNA

SEQ ID NO: 2451 - protein, 343 aa, unidentified
  source 1..343: note = Related to nan
MTFTQYKRKFTAEAFKSGYSQQNIDRCLVYAERLFSNKVPVIYNTSHLSGLVGYRKSYLKKAALFTTYFYRDFEILKKNGKKRQISEPLPSLKEIQLWILENILYKVKISKFAKAYIPKVNLKQNLKYHVGKPLILAIDIENFFPSIRQNNVEKIFQELGYSNLISNLLAKLCCRGESLPQGAPTSPYLSNIYLKPLDDDVSEYCLERNIHYTRYADDLTFSGMFNDKELCKYLHIEIEKLNLKINNDKTKVMTPNTRQTVTGIVVNEKPQVCFVKRNGIRQTIYYIKKFGLENHMDRIKIKKQNYLKHLLGQVNFVLFINPSDKEFIEYKNYLRTLIIHPLS

SEQ ID NO: 2452 - protein, 340 aa, Flavobacterium sp.
  source 1..340: note = Related to MQTN01000055.1
MSFEHYQKEFTSKAVNSGYSEQNIFDCLEYAKKLISNNVPVIYNTTNLSALVGYKKSYLKRAAIYTPYFYREFDILKKNGKKRKISEPLPSLKEIQLWILNNILYKVEVSKFAKAYIPKVSIKQNLVFHKKQAKVLTIDLENFFPSIKIDQVIVIFKSLGYSNIISSLIAKLCCLNDCLPQGASTSPYLSNIFLRNSDDIISKYCLGRNIRYTRYADDMTFSGDFDEVELLKFVRTEIKTLNLQVNDEKTKLMLPNSRQVVTGIVVNNKPQVEFNKRNKIRQEMYYIIKFGLENHMNRKNIKKANYVPHLLGKINFILQINPLDNEFIEYKKHLKALTLV

SEQ ID NO: 2453 - protein, 347 aa, unidentified
  source 1..347: note = Related to JADJAG010000004.1; note = Chitinophagaceae bacterium
MNFEQYSLAFSREASQSGYTEQSIIRCLKYAEKLFSNKVPVIYNTSHLSVLVGYRKNYLKKASFYTPYFYRNFEILKKNGSKRIISEPLPSLKEIQIWILNNILYNIEVSRFAKAYIRKSHIKQNLVFHKGQLQVLKLDIENFFTSIKLSSIQDIFMSVWYSQLISNLLAKLCCHRGSLPQGGPTSPYLSNLYLKSVDESIYHYCMQKEIRFTRYADDMTFSGVFEEKGLIKFVTEELRILDLKINEKKTKMMSRSSRQLVTGVVVNEKLQVPFYKRNKLRQDLYYIKKFGLENHMQRRKITKSSYIEHLLGKINFILSINQEDQEFLSYKNYLIELKRKSREIRPE

SEQ ID NO: 2454 - protein, 343 aa, Citrobacter sp.
  source 1..343: note = Related to QFQQ01000035.1; note = Citrobacter freundii
MSFIVYEKLFTAKAVKAGFSQDNIQKCLAYAKPLIDKGLPVIYNTANLCALVGYNKNYLKRAALHTQFFYRKFFIRKRNGKARLIVEPLPSLKEIQLWILHNILYEVKASRYAKAYIKGRNIVDNVRYHREKDIVLRIDIKDFFPSIGFSKIQLLFEQLGYSSNISNLLTKLCCVYETLPQGAPTSPYLSNLVLKNFDKRLAEFCVAKNIRYTRYADDLTFSFAKTIDPNEVRLFVENELSKEGFSANPDKTQILTPNKRQIVTGIVVNKVLQIPKIDRKLIRQEMYYISKFGLRDHMKKTQNTKASYLLHLLGKTNYALQINPEDKEMKKYKAIIWQMLNQE

SEQ ID NO: 2455 - protein, 349 aa, unidentified
  source 1..349: note = Related to NZ_UGYW01000002.1; note = Sphingobacterium spiritivorum
MDFLEYKVKFVKKALEAGYSEVEIDQYLTYAKVLLDKKLPLIYNTSHLAALTGYSTRYITRAALYPKSFYRTFKIKKKNGKMREINEPLPSLKEIQLWINKNILLNIKPNKFAKAYIKKTNILDNVKYHKRKKYVFNLDLVNFFPSISTKTVEMFFKKLGYSDNLSNLLAKLCCFGDGLAQGAPTSPALSNHILYEFDDLLGSFAVENNLRYTRYADDLTFSFNDEFDVSIIEEKVINTLDKTVLYSKLTVNREKTKLLRQNDRQIVTGVVVNDKTQVPSSYRKQIRQEIYYIRKFGLSNHLNRLNEVRYNYLYHLLGKINFVLLVNSEDKEMKEYRNAIKMLISNRPT

SEQ ID NO: 2456 - protein, 362 aa, unidentified
  source 1..362: note = Related to NZ_JAFEWD010000003.1; note = Pedobacter sp.
MFKGPARKLAGLNEINMTAAQYESAFRKKALVAGYSEENIQKCLSYAIPLLSKGFPIIYNTTNFAGLVGYNKLYLKKAALFTASYYRTFKVKKKKKKDYREIKEPLPSLKEIQLWILYNILYQERPSKYAKAYIQKRNLRENVKFHVGKNKVLNLDFKHFFPSIKQDAIEKIFLSFGYSSNISNLLSKLCCLDGSLPQGAPTSPYLSNLYLKTFDEDVFGFCKNKHIRYTRYADDMTFSGDFNELEVINFIKEKIEDSPLEINDEKTRVMRRNQRQVVTGILVNDKTQVSKKYRNNIRLEMYYISKYGIAEHLAKSKNSRANYLSHLLGKIEYTLHFNPDDVEFLEYRSKLKQLLPKKQDAE

SEQ ID NO: 2457 - protein, 344 aa, unidentified
  source 1..344: note = Related to JACHBZ010000008.1; note = Mucilaginibacter sp.
MNFQQYSEAFRKKALAATFSEDEIIYCLDYAKPIIEKGLPVVYNTTHLAALVGYRKVYLKKAVLYTSYFYRRFVISKRNGKPRTISEPLPSLKEIQIWILKNILENLPVSKFAKAYLAKKDVRDNVRYHIGKPIVLKLDIKDFFGSITQQSVQQIFLDANYSSNIANLFSKLCTLRGTLPQGASTSPYLSNLFMNKFDEVVGGYAIKEKTRYTRYADDLTFSGNFNPDNVIEFVQTEIEKIGLRLNLSKTAVMRQNSRQFVTGIVVNEKMQVPKKDRQNLRLEMHFIQKFGLENHLRRVKNKKANYLPHIIGRINYFITINPDDEEFVSYKKYLIETYVNENLT

SEQ ID NO: 2458 - protein, 355 aa, unidentified
  source 1..355: note = Related to BMHZ01000001.1; note = Pedobacter zeae
MGPEISFWPHKKMNFSQYEKTFRIKATKIGFSEEEITACLNYAEPLISNKLPVIYSTANLAALVGYKTNYLKRAVKFTKYFYRDFQIKKKDGKLRTLYEPLPSLKEIQSWVLKNILSEVKPNRFAKAYIKNKSLIENVKYHKGREGVLTLDILDFFGSIKTAHVAGIFSEMGYSANIASLLAKLCTYDGYLPQGAPTSPYLSNLYLKNFDDIVSKYCSENNIKYTRYADDMTFSGKEEDLNITSFIEVQLFNIGLYLNSDKSKLMKRNEKQVVTGIVVNDKLQVPREDRDFIRNEVHFLTKFGLNDHLNRTLNKKANYIEHLLGKINFALHINPDDLKMKRYKAKVIEYAKSIEE

SEQ ID NO: 2459 - protein, 343 aa, unidentified
  source 1..343: note = Related to NZ_FOAF01000001.1; note = Olivibacter domesticus
MNFAQYEKKFRLKALKSGFSEDNIVACLNYAKPILEKGLPVIYNTANLAALVGYRTTYLKRAAKFTKFYYRSFTIKKSNGKLRTLMEPLPSLKEIQTWILENMLSEIPVSKFAKAYVKHRSLKENVKHHNNKEGVLTCDIATFYDSVRFKDIEKIFNELGYSEVMSNLLAKLTTFNGSLPQGAPTSPYLSNLVLREFDQKISDYCINNNIRYTRYADDLTFSGEVKSLKLKNLVEAELNKLGLELNPDKTKLRKFSQRQMVTGIVVNEKTQIPKFERNFIRNEVHFLTRFGLKDHLRKTKNKRENYLLHLLGKINFALHINPADKKMESYRSQVQKIIQTDAG

SEQ ID NO: 2460 - protein, 346 aa, unidentified
  source 1..346: note = Related to QGTG01000019.1; note = Chitinophaga sp.
MTFPQYEKKFRVKAIKSGFSEYEISACLLYAKPLIESNLPVIFNTANFGALVGYKTNYLKRAVKYTPYFYRAFTIRKKNGGSRELVEPLPSLKEIQTWILENILREVKVSKYAKAYVKSRTLLENVRYHKGREAVLTLDIENFFGSITLLHIEHIFLGLGYSSNISNLLAKLCTYEGVLAQGAPTSPYLSNLYLRRFDEIISKFCNQNDIRYTRYADDLTFSGQKDALDIVEFIRKTLQKFSLKLNKDKEKLMVRNQRQVVTGIVVNEKLQIPKAARNFIRNEIFFIKKFGLDSHLEKTDNKKSHYLEHLIGKINFALHINPNDLKMQSYKSIVLKIYQSRDEDKI

SEQ ID NO: 2461 - protein, 339 aa, unidentified
  source 1..339: note = Related to NZ_CP094326.1; note = Zhouia spongiae
MTNQQLYAKKFTEKAIENGFSSDYIEKCLSYASPLLENNLPVVYNINHLSGLVGYNVSYLKRAVKFPKYFYREFEIEKSNGKKRKLHEPLPSLKEIQLWILDEILYKLKVSRYAKAYVPKRSIKEHTIYHTDEPFVLTLDIKNFFNSIQFDSVESLFKKIGYSEKMANLFTKLCFRDDELPQGAPTSPYISNLILKDFDFAVSKYCMEHNIKYTRYADDLAFSGDLNAEEIEKLIKDELSKIGMELNDEKRKLMKPNQPQLISGIIVNKKAQLPKKIRNSLRNEMYYIKKFGLPSHLERTNQKKPNYLKHLMGRINYILQINPRDKEFIEYRKHLHELK

SEQ ID NO: 2462 - protein, 339 aa, unidentified
  source 1..339: note = Related to NZ_VTZS01000003.1; note = Pareuzebyella sediminis
MNNQQLYVRKFTEKASENGFSSDYIKKCLSYANPLLEKNLPVVYNINHLSGLVGYSVSYLKRAVKFQKYFYREFQIEKRNEQKRTLYEPLPSLKEIQLWILDEILYKLKVSRYAKAYVPKRSIKEHTMYHTDEPFVLTLDIKEFFKSIKFESVESLFRNIGYSEKMSNLFTKLCFRENELPQGAPTSPCISNLILKDFDNAISGYCIKNEVKFTRYADDLAFSGNLNAEEIEKLVKDELSKIGLVLNDEKRRLMKPNQPQLISGIIVNKKPQLPKKVRNSLRNEIYYIKKFGLTDHLERTNQKKPNYLKHLMGRINYVLQINPRDEEFIEYKKYLHELR

SEQ ID NO: 2463 - protein, 342 aa, unidentified
  source 1..342: note = Related to NZ_AFPB01000170.1; note = Aquimarina agarivorans
MNNQQLYLEKFTQKALEHGFSSEYINKCLSYANPLLENNLPVIYSINHLSGLVGYSVSYLKRAVKFQKYFYREFEIKKRNGKNRTLYEPLPSLKEIQLWILDEILYKLKVSRYAKAYVPKRSIKEHTIYHTNEPLVLTLDIKEFFNSIKFESVEYLFFSIGYSRKMSNLFAKLCFRENELPQGAPTSPYISNLILKDFDTEVSKYCMKNKIKFTRYADDLAFSGNLNAEEIKKLVKKELSKIGLELNEEKTKLMKPNQPQIISGIVVNKKAQLPKKIRNSLRNEMYYIKNYGLASHIERTNQKKSNYLKHLMGKVNYVLQINPRDVEFKKYKEYLQEQYKSS

SEQ ID NO: 2464 - protein, 339 aa, unidentified
  source 1..339: note = Related to NZ_AFXZ01000051.1; note = Bizionia argentinensis
MNDQQIYTKKFTEKALENGFSSDYIKKCLNYAKPILANNLPVIYNIDHFSNLVGYNVSYLKRAVKFQKFFYRKFEIDKRNGKKRILNEPLPSLKEIQLWILNEILYKNKVSRYAKAYVPNRSIKEHTIYHTDEKFVLTLDIKEFFKNIKFEFVESLFKSMGYSRKVSNLLTKLCYLEKELPQGASTSPYISNLILKDFDNVISNYCISNKIKYTRYADDLAFSGNLNTDEIGILVNKELSKIGLELNDEKTKLMKPNQPQLISGIIVNKKAQLPKKIRNSLRNDMFFIKKFGLVNHMERTNQTKSNYLKHLIGRINYVLQINPRDKEFIEYRKYLYDLK

SEQ ID NO: 2465 - protein, 344 aa, unidentified
  source 1..344: note = Related to NZTP01000067.1; note = Proposed Altibacter sp.
MEKAFDKYKKQFVTKARKNGFSEDNINKCLDYSKPLITKDLPVIYNTTHLSQLVGYNLIYLRRAARFTKYFYRSFKVLKNDKTYRTISEPLPSLKEIQIWILKEILYKNKVSKYAKGYVPKRSIKDHVRYHTKESKVLTLDIKNFFDSIKIDYTLKMFIQMGYSKSVSNLLTQLCYLEKGLPQGAPTSPYITNVLLYEFDESIAKYCRQKELKYTRYADDLAFSGQIKKTELIKLVRSELRKIGLKLNNDKIILMKRNQRQTISGIVVNDKTQVPKYKRNSIRNEMFYIKKFGLNNHQKRTNQTRDNYLKHLIGKINYILMLNPKDKEFLDYKKYLYEQNKASR

SEQ ID NO: 2466 - protein, 349 aa, unidentified
  source 1..349: note = Related to JABXHT010000059.1; note = Tenacibaculum sp.
MNITFNKYKKLFTEKAINSGYSEDNIVKCLSYAEPIINKGFPVIYNTSHLSSLVGYNKNYLKRAVNHTKYFYRKFEISKKDGTKRVLLEPLPSLKEIQNWILNEILYKHKVSRYAKGYIPNRSIKDHVRYHTKEEKVLTLDIKKFFDNVSFELVEKIFIHIGYSKIISNLLTKLCFLDGKLPQGAPTSPYISNIILFEFDEKISKYCSNNNLKFTRYADDLAFSGKIKKTELVKLVRSELKALGLKLNNEKIKLMKRNQPQIISGIIVNEKAQVPKRTRNQIRNEMFYIKRFGIDSHMQKTNQTKSKLAYLKHLIGKINYLLTINPKDNEFIEYKNILHKEIKPAGNNV

SEQ ID NO: 2467 - protein, 352 aa, unidentified
  source 1..352: note = Related to PAVO01000044.1; note = Crocinitomicaceae bacterium
MDYNKYKTQFSAKAKNAGYSEDNISRCLAYAKPILEEGYPVIFNTTHLSSLVGYNKNYLKRAVAYQKYFYREFSITKKNGELRTLREPLPSLKEIQSWILNNILYKHEVSRYAKGYIPKRSIKDHAKYHTNELKVLTLDIKSFFDSISFGQVEAIFSNIGYSNIVSNLLAKLCFLEKNLPQGAPTSPCISNILLLEFDNVISAYCSEKKIKYTRYADDLAFSGDVKKTALIKLVRSELKKLGLRLNNQKIKLMKQSQPQIISGIIVNKKVQVPKKNRNKIRNEMFYIKKFGFQSHMEKTKQTKSNYLKHLIGRINYLLTLNPKDTEFLEYKKILYQLESTADNSTQMSNRPS

SEQ ID NO: 2468 - protein, 360 aa, unidentified
  source 1..360: note = Related to NZ_JADPVI010000001.1; note = Kaistella gelatinilytica
MKDFTKYKKKFREKAEDIGFSEDNIVKCLNYSEKLSNNNLPIIYDSSHLAGLVGYHRSYLTRALISTEFFYRTFKIPKKNGKIRIISEPLPSLKEIQYFILNEILYKQKVSKYCKSYIPKRKFREYLRFHTDEKQVLTLDIKDFFPSIKFNHIHEYFLNLGFAKDVSLYLACLSTYTHKENDFIEFKRFLPQGAPTSPYLSNLILTPFDDKVAEFCFDKKIKFTRYADDMAFSGEYIDQEELLIFIKNELNVYGLELNEEKINFMKQNVPQIISGVIVNKKLQLPKAQRNEIRKVMYFINEFGIDNHLEKTNETREYYLSHLLGRIQYALNLNPDDSAMKEYKNQIIEIKNEQNLKFLIE

SEQ ID NO: 2469 - protein, 358 aa, unidentified
  source 1..358: note = Related to NZ_JAELVM010000001.1; note = Chryseobacterium endalhagicum
MKDFESYKKIFREKALNSAYSEENIIKCLKYSENLVNNNLPIIYNSYHLSGLVGYQHDYLSRAILSTEFFYRHFKIEKKNGKSRKISEPLPSLKEIQYFILKEILYKQKVSKFCKSYIPKKKFKEYLRFHSNEKEVLTLDIKDFFPSIKFNLIHNYFSKIGYSKDVALYLSCLCTYTDVNVEKKNNTSIRYLPQGAPTSPYLSNLVLIDFDNDVANYCSEKKLKYTRYADDMAFSGDLIVKNELVEFVNAQLKKYNLELNDEKINYMKQNVPQIISGVVVNKKLQLPRKERNDIRKVMYFIIKYGIESHIEKTQETREYYISYLLGRIQYALNLNPNDAELKKYKDFLVELKKNILIL

SEQ ID NO: 2470 - protein, 359 aa, Flavobacterium sp.
  source 1..359: note = Related to CP013992.1; note = Flavobacterium covae
MDLELYKRHFREKALNSGFSEETIIKCLKYSEVLASKNLPVIYNSYHLAGLVGYKHSYLSRAIISTDFFYRKFKIQKKNGKYREISEPLPSLKEIQYFILKEILYKQKVSKYCKSYIPKKKFREYLKYHSNEKQVLTLDIKDFFPSIKYEFIYTYFMNLGYARDVSYFLATLCSYVPKAPKGEKTDLSKRFLPQGAPTSPYLSNLILSNFDDLVAKYCNENKLKYTRYADDMTFSGDIIQEDELISFVQSELNKIGLKLNIDKINFMKQNVPQIVSGVIINKKVQLTKEDRNKIRNVMYYISKFGLEDHLNRTNEKRDYFVFHLLGKIQYGLSLNPNDHELKRYKEILIEEKKKYYSKS

SEQ ID NO: 2471 - protein, 358 aa, unidentified
  source 1..358: note = Related to NZ_FWXS01000003.1; note = Moheibacter sediminis
MVDFELYKKHFREKALNIGFSEEIIIKCLNYSENLVSKKLPIIYNSYHLAGLVGYQHSYLSRAINSTEFFYRKFKIQKKNGNFREISEPLPSLKEIQYFILEEILYKQKVSRYCKSYTPKRKFREYLKYHTNEKQILTLDIEDFFPSIKFNNIFNYFLALGYAKDVSYYLSNLCTYVTKGKKGQRVNISNRYLPQGAPTSPYLSNLILSEFDDSVAKFCIQNQLKYTRYADDMTFSGGNINKEDLITFIIVELNKIGLRLNIEKTNFMKQNVPQIISGVIVNKKVQLPKAERNKIRNSMYYISKFGLEDHLKRTNEERNYYVFHLIGKIQYGLSLNPEDLELKRYKEILIEEKKKYYS

SEQ ID NO: 2472 - protein, 358 aa, unidentified
  source 1..358: note = Related to CP040516.1; note = Elizabethkingia miricola
MKDFELYKKQFREKALNNSFSEDIIQKCLNYSENLFSKNLPIIYNSYHLAGLVGYEHSYLTRAIISTDFFYRKFNIVKKNGLLREISEPLPSLKEIQYFILKEILYKQKVSRFCKSYIPKRKFREYLKYHSNEKQVLTLDIENFFPSIKYKHINNYFTELGYAEDVSSFLASLCTYSISKKKKEKVELNERFLPQGAPTSPYLSNLILMKFDDTIANYCKEKSIKYTRYADDMAFSGSDFDKEILIKLVQSELNKVDLKLNKSKINFMKQNVPQVISGVLVNKKIQLPKEIRNEIRNTMYFITKYGYEDHIKRTNETRDYYLLHLLGRIQYALNLNPNDSELIKYKSVLLEYKKKYYN

SEQ ID NO: 2473 - protein, 353 aa, unidentified
  source 1..353: note = Related to NZ_CP075682.1; note = Chryseobacterium sp.
MEKTNSYKKKFTELAISSGYSEEYIEKCLKYSEPLLNKNLPVIYSINHLSALVGYSQSYLTRSMISTSFFYRHFKIKKRNGNLRSISEPLPSLKEIQNFILKEILYTQKVSKYCKSYIPKKSIIEYLKYHVNEKEILTLDLQDFFPSIKFELIKNFFLQLGYSDEVSYYLSTLTTYCDKQEKFDDSQRYLPQGASTSPYLSNLILKDFDNNIGKFCNNKIKYTRYADDLAFSGDKIPSEDIIDFVNKELEKLGLKLNPKKVNFMKQNIPQIISGVVVNNKMQLPKQQRNEIRQKMYFINRFGIESHLERIQEKRENYIPHLLGRIQYGLNLNPDDLELKKYKKDLQEIYNKVK

SEQ ID NO: 2474 - protein, 343 aa, unidentified
  source 1..343: note = Related to CACSGR010000184.1; note = Tenacibaculum maritimum
MKTFEIYKQEFTKKALDAGYSADELNKCLIYAEPLYNRRLPIIYNLSHFSAYVGYNAKYIRRAIKTDSTKFFYREYSILKKNGSLRVINEPLPSLKEIQKWILDNALNNMAISAYAKAYTFNRSIKDHVKYHKNQKSLLTLDIENFFNNITADKVEKLFINKGYSLLVSNLMSKICTLKNCLPQGAPTSPRISNILMLPFDDKISKYCKTKGNIKYTRYADDLAFSGEINKEEIVELVTNELKELGLTLNIDKTIEKKQSQQQIISGIVVNKKIQVPRKKRDELRQSMYYIEKFGLENHLVKIKCSKSNYLKHLLGIANYIIFINPKDEKTIEIRTKLFKMIE

SEQ ID NO: 2475 - protein, 349 aa, unidentified
  source 1..349: note = Related to NZ_CP058984.1; note = Polaribacter sp.
MNTFNIYKKEFTKKALESGYSADELNKCLVYAEPLFNKRLPIIYNLSHFAAHVGYSTKFIRRAIKTNGTEFFYRKYSIPKKNGSSRVINEPLPSLKEIQKWVLDNILNNMPISAYAKAYTFNRSIKDHVKYHENQNVVLTMDIENFFNNITSDKVERLFIDKGYSPLVSNLLSRICTLNNSLPQGAPTSPRISNILMLPFDNEIAKYCKPKFIGGKKVQVKYTRYADDIAFSGEINKAEFVELVSNELQKLDLSLNEDKTIEKKRNQQQIISGIIVNQKIQVPRKKRDELKQAMYYIEKFGLENHLARIKCTKANYVSHLLGIANYIVFINPKDKKTLEIRTKLFEMKD

SEQ ID NO: 2476 - protein, 344 aa, unidentified
  source 1..344: note = Related to NZ_JPJI01000026.1; note = Nonlabens ulvanivorans
MKNFESYKSEFTKRAYNEGFSSDEISKCLNYSETLLKKNLPIIFNSSHLSALVGYNKDYLNRVSKVNKTSYFYRDYYIPKKNGEKRLIREPLPSLKQIQRWLLDNLFIKLPISPYAKAYRAKKGIRDHVRYHKKEEVVITMDIEKFFDNLESGLIVNILLSKGYSFQVANLITKICTLNDVLPQGAPTSPAISNILLYEFDNEISKYTNSKGLKYTRYADDLAFSGSIQDVDTLIKIVKENLAKINLKINHSKTRVMSKKARQIISGIVVNDKIQVPRKDRDDLRQAMYYIEKFSLEEHLKKIDCNKANYIEHLLGKANYMLKINPKDEKIKVIYNKLKVMKTG

SEQ ID NO: 2477 - protein, 351 aa, Trichodesmium erythraeum
  source 1..351: note = Related to JAGGDU010000099.1
MRFSSYEKEFRRIAEKRNYPSSVIENCLKYAKVLLDNGVPVIYNTTHLSNLIGYTKSYIKRATHHTPYFYRKYSILKKNGSKRFLSEPLPSLKEIQIFILTNILSSIKVSRYAKAYVSGRTLIDHLKFHKGQKCVLTLDIENFFSSISTESIEKIFLEIGYTDIVSNLLARLCTLENSLPQGAPTSPYLSNLYLKGFDQELAKIVRPMGINYTRYADDMAFSGDTIDKEAIIEHVSRMLSGLGLVLNPDKTLLMVKPSRQVISGIVVNEKIQVPRKIRRSIRQSVYYIRKFGFESHKQKTKIYKRNYDKHLLGLINYILFINPKDQEFQSYKEELEKIIKDADNNGYTQAG

SEQ ID NO: 2478 - protein, 342 aa, unidentified
  source 1..342: note = Related to JH719942.1; note = Saprospira grandis
MTFSSYEKRFTDLAKKRNYSSEVITKCLSYAEPLIRKKVPVIYNIAHFSSHVGYTVKYIKRAIKHTDYFYRHYEISKKNGGKRKISEPLPSLQEIQNFILTKILYKQKVSRYSKAYVPGRSILMHAKYHVNNHTVLTIDLKDFFSSIRTHHIEAIFKEIGYSQIVSNMLAKICTLNGGLPQGASTSPALSNIFFSKIDELIAKEVRPEINYTRYADDLAFSGETIDKEVLVAKVQSILEPYELKINASKTKLMTQHQQQIITGIVVNKKLQLPSKDRRKIRQELYYIKKYNMASHMSKKNIHNKKYAARLLGKINFALLLNPKDKEFIEYKKVMHEIIQHTI

SEQ ID NO: 2479 - protein, 338 aa, unidentified
  source 1..338: note = Related to NZ_RBCJ01000001.1; note = Ulvibacterium marinum
MEFEIYKKKFEAKALKTGLTDLEITDCLNYALPLIEKGLPVIYNTSHLSKLVGLRKTYVKRAAIYTKSYYRNFTIAKRSGMPREISEPLPNLKIIHKFILEEILENIKVSAFAKAYKKKSNILENTRYHINQNKVVTLDIENFFPSITTDKVENIFRGLGYSDLISNLLSKLCTLNNSLPQGAPTSPYLSNLFMKGFDSKLADFCLSKKIRYTRYADDITLSGDFNEKEAIDYISVLLKELDLDLNCKTKIMKRGQQQIVTGIVVNEKSQVPRKERLKLRQEIYHIKTKDLDSHKKFKQITQRNYLYHLYGKISYVVFVNPKDEEFIEYKKFLKTLMN

SEQ ID NO: 2480 - protein, 339 aa, unidentified
  source 1..339: note = Related to JAGIPR010000013.1; note = Chryseobacterium jejuense
MEYNIYKEKFTKKAIKEGLTETEVNECLIYAKPLIENGLPIIFNTSHFSKLVGVRKTYIKRAAIYSRSYYRSFTIAKRNGNPREISEPLPNLKLIQNYILSEILYNVKISAFAKAYKKKTTIIENTRYHVNQKKLVTLDIRNFFSSIKKEQVYIIFNKLGYSEIISDLFSKLCTLNDQLPQGAPTSPFLSNIFMSDFDMFVADYCTSKNIRYTRYADDISLSGDFDEKEIIELIIERLKEKGLELNNEKTKIMLRNQRQIVTGIVVNEKNQVPRKERLKLRQEVFHIRTKTLEVHKEIKNIKNRNYLYHLYGKISYVVFINPNDKEFIEYKEYIRTLFK

SEQ ID NO: 2481 - protein, 343 aa, unidentified
  source 1..343: note = Related to NZ_FSRQ01000001.1; note = Chryseobacterium scophthalmum
MDFTTYQKRFTEKATRQKMSDSDIADCLEYANVLFKNNVVTVYNTSHLSKLVGIRKAYIKRASIYTKSYYRSFEIAKRNGNPRTISEPLPNLKVIQDFILEEILNKVTVSAFAKAYKKNSSIKENVRYHVDQKIVLSLDIQDFFSSVSIEMVEKVFLDLGYSELLSDLFSKLCTLNKCLPQGASTSPYISNIILKGFDKKIADYCLDQNIRYTRYADDITLSGDFDTGTAITLIEDELLKLNLSINRNKTKVMTRNMRQVVTGIVVNEKIQVSGKERNKLRQNIFYLKKFGLLDYIEHEKIKFNNYLYHLYGKLSYIVYINPKDQEFIDYKIYVKDLIKKHYY

SEQ ID NO: 2482 - protein, 345 aa, unidentified
  source 1..345: note = Related to NZ_QBKT01000004.1; note = Kordia periserrulae
MSFEIYTRKFREKAENLGYSESNIVKCIDYASPIYEKGLPIIYNLTHLSRLVGYEKNYIIQAAIASKHSEAYYRYHKVLKKNGDVRKIKEPLPNLKAIQYWLLHNILEKIEPSAYAKAYVKKRGLKQNIRFHKGQKKVLSIDIKDFFPSITFEKVENIFLTIGYSVELSNYLAKLCCLKEKLPQGAPTSPYISNLIFKNIDEIIAVYCKNLNIRYTRYADDLTFSGDFDETSLLNYINEIMTENNFILNKDKTKLMLYSERQIVTGIVVNDKPQLDKETRKEIRQHLYYIKKYGLESHMERNNINSNTFLTNLMGKISFGLYLNPKDEHLRDSINYLSQLYKQIM

SEQ ID NO: 2483 - protein, 345 aa, unidentified
  source 1..345: note = Related to NZ_SNZW01000015.1; note = Maribacter caenipelagi
MSFEVYAKKFRVNAENLGYSEENVVKCINYARPIYENGLPIIYNLTHLSKLVGFEKNYIIQAAVVSKHSEAYYRYHKVLKKNGDFRKIKEPLPNLKAIQHWILANILEEIEPSVYAKAYVKKRGLKQNIRFHKAQKKVFTIDIKNFFPSININQIEKIFIETGYSIELSNYLAKLCCLKNTLPQGAPTSPYISNLILKDIDNSIAIFCKELKVRYTRYADDLTFSGDFEEESLYEFVNALLEKNGFELNKEKTRLMLSSQRQIVTGIIVNSKPQLDKETRKLIRQEIYYIKKFGLESHMERAKLSGSLYLNQLMGKISFGLYLNPSDMKLRSYIKYLAGLYKELY

SEQ ID NO: 2484 - protein, 347 aa, unidentified
  source 1..347: note = Related to NZ_VFPD01000001.1; note = Chryseobacterium aquifrigidense
MDYKTYSERFKIEAYNVGYSESSVALCLNYAKILFDKNLPVIYNVTHLSNLTGIKKNYIIQAATVSKHSHAYYRDFSIAKKKKGERRFISEPLPNLKQIQYWILNNILYQVKVSPYAKAYIKNFGLKQNLRFHKNKKKVLNLDIENFFSAIKFEKVEKVFLNLGYSNTVSKTLSKLCTLKEQLPQGSPTSPYLSNIIMMSFDTEVSLFAKNLNISYTRYADDLTFSGDFDENVVEDFIETKLLEIGFTLNRNKKKLMYDSQRQIVTGVVVNKKIQLSKEQRKKLRQIHYYIKRFGIESHLERQKLSKKKYLSKILGQINFGLYLNKQDKNLLEMKACILKYKKEFDL

SEQ ID NO: 2485 - protein, 518 aa, unidentified
  source 1..518: note = Related to JABZUV010000100.1; note = Prevotella pallens
MDFKEYKQLFSEKAKNKGRDLNYIDSCLAYAERLYDKQVPVIYDITHLSLLVGVKEDYIRRSITYTKKYYWSFDIPKSNNKKRTINEPLPLLKEIQLWILHNILEKQATHPCAKAYVPHKKLKENAKYHTRQKIVISFDVQNFFPSINLEGVSKIFNIIGYSKKNSYLLAKLCCLDDKLPQGAPTSPYLSNLYMFSFDENLICYCRKNGMIYTRYADDITISSQKDVDINALTKLVEEELSKKGLSLNISKSKVMHKSDSQVVTGIVVNERMRLPKKKRQKLRQEMYYLITRGLEDHINFIKCKKRNYLKHLAGKVMYALHLEPSNTEFKDYYIFLQRLINPDFKRKKKRLILDSNVILNEVLIEKLPEDYTTYIANNNSIKKIKNLDLCYGPNLCHANSLLFAIMLKEQYPTIEVNISEGIVVRTNGFAYTHFWVHILHNNEQEFCDVTRDCFEKKILQAKERRYYKVKNHTIDEMTQRMASNNVFLDSKEYLSLYYKKYPKYFELYNTLNIMLHQQ

SEQ ID NO: 2486 - protein, 468 aa, unidentified
  source 1..468: note = Related to NZ_HE999448.1; note = Prevotella sp.
MDFKEYKRLFTEKAQNNGRDSDYINLCLSYAEKLYNQQVPVIYDIKHLSLLVGVKEDYIRRAITYTNKYYWNFHIPKLNGGKRTINEPLPLLKDIQLWILHHILEKQETHPCAKAYVPQRKLKENAKYHTRQKLVISFDVHNFFPSIDLEAISKIFINIGYSKKNSFLLAKLCCLNNELPQGAPTSPYLSNLYMFSFDDNIMRYCREKGIIYTRYADDITFSSKSDINIKTLTEFIKHELRNKKLSLNPAKSKVMYKSDAQIVTGIVVNERMRLPKKKRQELRQEMYYVITRGLENHINFIKCNKKNYLKHLAGKIMYALYLEPSNTEFQDYHTFLQRLMNPNYKRKKKKLALDSNIILNEVLIEQLSENYITCIENDNSIQRVGSLELHYGLNLCHANSLLFAIMLKEQYPTVKVNISEGIVVLTNGFAYTHFWIHVVQNNKEEFCDVTRDCFEKKYYKQKNVDIIR

SEQ ID NO: 2487 - protein, 345 aa, unidentified
  source 1..345: note = Related to JADYUK010000009.1; note = Prevotella loescheii
MEFDKYSFQFAQLAILNGYTTEYVDSCLKYAKKLADNNLPIIYDSEHFSELVGFKLSYIKTVVEYPKSFYWMYKIKKHSGGIRKINAPLPNLKQIQYWILENILNTQKVSPYAKAFVQGKKLKENVRFHRNRKIVIKFDVHDFFGSIRENSIKAIFRSLGYINPVADLLAMLCCLDHVLPQGAPTSPYLSNLYMLDFDTHIAQYCKEHTIYYTRYADDLTFSSDSNIDEYELTSLVKKELNIIGLYLNNDKTKVMPRNTRQVVTGIVVNQKLQVDKDKRRKIRQEVFYIKKWGLESHLQKIGCSKKNYLKHLLGEMTFMLSLTPQNLQLKADIEYIRKLWEENLM

SEQ ID NO: 2488 - protein, 354 aa, unidentified
  source 1..354: note = Related to JACOOE010000015.1; note = Bacteroides sp.
MTFDEYRIKFSTKAYQYGYSEVYVSKCLNYAARLFDKNLPVIYDFEHFCRLVGYSSSYIKRAVNSPRSFYYDYNVPKKNGNGVRLISQPFPSLKEIQYWILNNILYKLEVSPYAKAYVPHRKFKDNLRFHKNKKFVITYDVANFFPSIKKEKIEAYFIELGYTELLSNLFSKLVTHRGYLPQGAPTSPYLSNLYMKQFDNKIAAYCKCRKIFYTRYADDLTFSSNEDVDINDLFNTIKIELSILNLELNQDKTHIMNSSSRQIVTGVVVNKRLQVPKEFRSEIRKECYYINKFGLSEHLARIKQTNEKYYIKGLLGRINYVLQIDPTNKEFKSYKKEMQRFVIRDINLDDYDVL

SEQ ID NO: 2489 - protein, 342 aa, unidentified
  source 1..342: note = Related to SEFL01000207.1; note = Sphingobacteriales bacterium
MNYNDYKREFTEKALRSGFSYEVLQACLQYAEKLFSNDLPVIFNLTHFASLVGYKQTYIQRAIVFTHHFYRKFEISKANGSQRKISEPLPSLKEIQGWILKHILYKLKVSRFAKAYSPGISIKQNLQYHRDQPLVLSIDVKDFFTSLTRDKVEQVFKMAGYSSSLSNLFSKICTLDGRLPQGASTSPYLSNLILYKFDEEIGSFCKQQSIRYTRYADDITISGNFDPDLLRQKVQIELDKLSLVVNEKKVKVMKAGVRQVVTGVVVNKKIQVPRNKRKEIRQAIYYITKFGLQGHLSRESVNRRNYINHLLGQVSFVLFLNPLDKEFIGYKDFLVMQKQQDS

SEQ ID NO: 2490 - protein, 341 aa, unidentified
  source 1..341: note = Related to JACHWX010000002.1; note = Mucilaginibacter gotjawali
MELELYKRRFTEKALATGYSAEKIERCLKYAEKLLSYDLPVIYNLEHLCALVGYHSSYLLRAVDHPNFFYRSFKIKKNNNQFRDIDEPLPSLKEIQDWILTNILYQIAPSKYAKAYVPGTSLKQNILFHRDQPIVLTMDIKDFFPSVKRSQITALFFRLGYSIAISDLLAKLCCLNDCLPQGASTSPYLSNLILASFDDAIAVYCIPLGIRYTRYADDLTFSGKFDCEVLKLQVIKHLSIHGLKINEQKTRIMRFGERQIVTGVVVNKKMQVSKEKRMAIRQQMHFIKRFGLEEHMKARKLSKGNYVRHLLGKINFILYINPDDLEFIKYRDDLLKLGIEK

SEQ ID NO: 2491 - protein, 341 aa, unidentified
  source 1..341: note = Related to NZ_WQOA01000003.1; note = Oscillibacter sp.
MRWDSYERKFRDLAGKSGAAQEKIESWLLYAKELTSNNLPIIFDQTHLALLLGIDNEYLHRMSNAPEYFYRTFYIRKRNGKQRRIDEPLPDLKKVQSWILTEILYKVPCSKFAKAYVPHTSIKDNSRFHRNQKIVAGVDLKNFFPSIKSGSVLSVFLSMGYNLPTAVFLTRLCCLRESLPQGAPTSAYLSNLIMRHFDEQISAYCMERKIRYTRYADDLTFSGDFDVAALLYRIDGELKYLHLRRNPQKLKVMRGGDRQKTTGIVVNEKQQLPREYRMKIRQEIHYIQKFGLDDHLAHIGETRTHYLQHLMGKIEYALFINPKDEKMKAYREVLRAYRPRE

SEQ ID NO: 2492 - protein, 341 aa, unidentified
  source 1..341: note = Related to JAFQBT010000084.1; note = Oscillospiraceae bacterium
MRWDLYEPRFRDLAERQGILDKNINEYLAYAENLYKKNLPVIFDHTHLSLLIGIDNEYLHRISNAPKYFYRTFHIKKRNGKLRRIDEPLPDLKKVQTWILKEILYKIPCSKFAKAYVPKTSIKDNTRFHKKQKIVLTLDIKDFFPSIKSGYVLNLFLSCGYNLPVAVFLTRLCCLNESLPQGAPTSAYLSNLVLKKFDYNISEYCKKNNIRYTRYADDLTFSGDFNIASVLFLVDTELKYLNLKRNNKKVKVMRNNSRQCVTGIVVNDIQQLCREYRMKIRQEVHFIEKFGLDDHLAHIGEQRVNYVEHLSGKINYVLSVNPKDEKMQEYKKSIDTIKYQT

SEQ ID NO: 2493 - protein, 345 aa, unidentified
  source 1..345: note = Related to NZ_BJEY01000003.1; note = Listeria newyorkensis
MMEWNEYKDRFTKKAEQSGYKESYIEKNLAYAEVIVKKGYPIIYDVVHLSKLVGVSYEYIFKVSNASKYFYRRFEIKKKNGKKRTIHEPLPLLKSVQMWILRNILEKKEVSIYAKAYKKEVSLKENVRFHRGQKIVMKLDVLDFFSSIEPRFVDNFFRSIGYSKNLSRVLTNICVLNHGLPQGAPTSPYLSNIVMYNLDRKISSYCRVEKIRYTRYADDMTFSGDFKPAKIIHFLKKELSKLNLELNYKKTKILRQNDRQNVTGVVVNQKIQIDRTTRNNLRLEMYFKKKNQKKHLSNACEAGQERKYLIGLLGRVNYGLHINEKDTVLLNYKEIIYEVLSRYRI

SEQ ID NO: 2494 - protein, 344 aa, unidentified
  source 1..344: note = Related to JAARWV010000001.1; note = Listeria booriae
MEWSEYKDKFTEKAKQSGYTERYIEKNLAYAEIIANKGYPIIYDVAHFSKLVGVSYEYIYKVSNASKYFYRKFDVKKKNGKKRVIHEPLPLLKSLQMWILRNILEKKEVSIYAKAYKKRVSLKENVRFHRGQKIVLKLDILNFFSSIESIYVYDFFRSIGYNKSVSRVLTNLCTLNRGLPQGASTSPYLSNIVMYNLDRKISNYCKKKKIRYTRYADDMTFSGDFKPAGIIHFVKKELSKLNLELNYEKTKILGQNDRQNVTGVVVNQKIQIDRITRNNLRLEIYFLKKNQENHLRNICEAGQESKYLMGLLGRVNYGLHINEKDTVLLKYKEIIYEALSHYRT

SEQ ID NO: 2495 - protein, 343 aa, Bacillus sp.
  source 1..343: note = Related to NUVJ01000020.1; note = Bacillus cereus
MEWELYKESYEKEAQNHNLSDETIKSNLKYAYNLYKQNVPIIYDQLHFSLLVGISYEYILKVTNAPKQSYRRFSIAKKNGDKRIIHEPLPTLKIIQEWILHEILNNIDVSPYAKAYRKKVSLKDNVKFHRNQKKVLRLDIKDFFGSIKQNQVLSIFLKIGYTIDVSTLLAKICTLSGKLPQGSPTSAALSNLVMRGFDKEISLYCNEKKIRYTRYADDMTFSGDFKEQKLIKKVKSYLSWIRLELNLDKTNLMRKHNRQLVTGITVNEKIQVNVQKRRKLRQEVYFIRKYGLCSHLRHRGFAEYDSEMYIKSLIGKIGYCLFINPKDEEFREYLKFLKSELSK

SEQ ID NO: 2496 - protein, 348 aa, unidentified
  source 1..348: note = Related to CP065770.1; note = Enterococcus faecium
MNNDEWENYKKIFEKIARKNGKSQNYINKNLQYAEMLVKNNMPIIYNADHLGLLIGIKSSYFYKVTNEDKLFYRKFSIKKKNGDSRIIHEPLPNLKIIQKWILENILYKLEVSKFAKAYIPTISVKDNVRFHRKQKYVLKLDIKDFFSSLSEIHVYKIFKKIGYTDSLSVLLSKLCTLKGVLPQGASTSAYLSNLILLDFDKSVSLYCLERSIRYTRYADDLTFSGEFDHKALLNFIDYKLKALGLKLNQSKTRLLRQNQAQVITGIVVNEKIQVPRDYRKRIRLEVYYIKKFGIYNHLKSNHSKVDAKTYLKALNGKINYCLFINPNDLDMKNYRDIIEDAYQKLSI

SEQ ID NO: 2497 - protein, 353 aa, unidentified
  source 1..353: note = Related to NZ_CP032418.1; note = Paenisporosarcina cavernae
MDWEYYKKKYCLVAFENNISSHEIENNLFYAKKLYDRGLPIIYDEIHLGQLIGISHEYMFKVANDASYFYKSFRIKKLNGGSRKISEPLPNLKIIQKWILEEILYKLNIHPSAKAYVKGLSIKDNVKFHRNQKTVLKLDIIRFFNNVKEDLIYRIFKEIGYSKEISWLLTRLCILNGALPQGAVTSPYLSNLVMLNFDRKIYSYCKKKRIRYTRYADDLTFSGEINKHHVISRVKNELLKIHLQLNESKIRVLKNHQRQIITGIVVNKKIQTSIIYRKKIRQEVYYIKKFGIYNHISKTLGITDINTELELKYLKSLIGRIHFVIFVNKFDKEMSTYLHDLKMVYDELSNTHE

SEQ ID NO: 2498 - protein, 352 aa, Bacillus sp.
  source 1..352: note = Related to NUJF01000002.1; note = Bacillus thuringiensis
MDWSIYKQKYTSMALDQGIETKTIEENLSYAEVLYNKQLPIVYDEVHLGQLTGISHDYMFKVSNDSKKFYKTFRIKKRTGGYRKISEPLPNLKIIQNWILNEILYKIVAHPSAKAYRKDISIRENVKFHRNQEIVLKLDIQSFFNNIREKYVYRIFKELGYKKNIANLLTKLCTLSGSLPQGAVTSPYLSNLILRKFDKKIYTYCRRKGIRYTRYADDLSFSGEFNKRHLISRVENELSKLKLKLNTKKIRVLRSHQQQIITGIVVNEKIQVSKKYRKLIRQEVYYINKYGLNNHLSVKYNLEESDEFKKTVYLKSLIGKAEYVLFINKNDKEMPEYIALLRNLLVKLKLEN

SEQ ID NO: 2499 - protein, 364 aa, unidentified
  source 1..364: note = Related to PJWF01000007.1; note = Enterococcus faecalis
MILNWEEYEIAFREKNSELNRFSQSELENKLRYAKKIYENRATVIYDAKHLAELVGVKYFEVYKIANSNSRFFYKEFLLQKKNGGERKIKAPLPTLNIIQKWIFENILANLKCSVYCKSYQKNLSLKDNAKFHRRQPILMKLDISSFFDNISWGLIYNIFKNLGYSVEVSTLITKLVMYTENGKVKGIPQGAITSPMLSNLVLKKFDENIGYYCVNNKIRYTRYADDLTFSGNFDTYKLKAFVNKELHKNGFFLNNRKTKILKSNDRQVVTGIVVNEKMQVSRKYRKNLRLEIYHLLFRTQQHFEYKKLKNYDEKSMYLKTIIGKVNFVLQVNSSDKEFKTYKKEIYKIIDSINNSELNKNNWN

SEQ ID NO: 2500 - protein, 352 aa, unidentified
  source 1..352: note = Related to NZ_JACCEL010000030.1; note = Ruoffia tabacinasalis
MNWEEYKKKFIERNELTKRFSESELNEKLNYAKNLHNNKMPIIYNVDHLSRLIGVSYSEIYKITNSESKYYYKEFKLKKKSGGFRKIKAPLPTLNIIQKWIFENILQNTKASIYCKSYSKGVSLKDNAKFHRRQNIVLKLDIANFFDEISYEVVYKLFKDFGYSNEIVIVLARLVMYTNNKITKGIPQGASTSPIISNLILKKFDNEIASICLKENIRYTRYADDLTFSGDFEVTFIEEIIKEKLRLLGLKLNAKKRKILHKNNRQIVTGIVVNEKLQAPRKYRKNLRLELYYILNHSKNHFNKNGLYNHDARKNYLITVLGKVNYVLQINPQDSEFIDFKKKLYKLLTTQF

SEQ ID NO: 2501 - protein, 356 aa, unidentified
  source 1..356: note = Related to FSLI01000179.1; note = Mycobacteroides abscessus
MNWEQYKNNFIQKNKIHKKFDENELSLKLNYAYNLYENNLPILYNVDHLSKVMGINKEYLYKVSNSNFKYFYRTFYLPKKNGGTRRIDTPLPNLKLAQKWIYDNILLKLETSIYCKSYKPNFSIKDNAKFHRNQNLVLKLDIKNFFKNIRHKDIYLLFKEIGYNNDICNLLTKLVILNDDTKIKKIGIAQGAITSPSISNLILKGFDNKIAEYCKQSKIRYTRYADDLTFSGDFNPNNIINFVEKNLNKQGFVLNKNKIKKIYKNESQIVTGIVVNEKLQVSRQYRKNIRLEIYHLLNHTKEHLNKKEVTNYFEQREYILALMSKINFVLSINKNDKKMIEYKNKLYKLLRSLDRM

SEQ ID NO: 2502 - protein, 316 aa, unidentified
  source 1..316: note = Related to NZ_KE136496.1; note = Enterococcus columbae
MNVKYLTIEKLLTDCNLSKKDFLTLCDLDSKYVYDIFLIPKKTTGFRTIRVPNAQLKILQCWINKNVLSKADISKFCKSYRKNMSIVTNARLHKNQKIVLKLDIADFFSSISWSQVYKIFVELNINEEISEYFAKLVTINDGEVRLGIPQGACTSPTISNCILKDFDNKLGSYCIKRKIRYTRYADDLTFSGDFNYKKVILFVKKLLDKFGFKLNNSKIRVMKSGQSQIVTGIQVNEKIQVPRKYRHNLRLEIYHILNHPNDHFKMKNLYNSAEKSQYLKSVLGKVNYILQVNKKDGEFIKYKNLLHKILVEVLTI

SEQ ID NO: 2503 - protein, 346 aa, unidentified
  source 1..346: note = Related to CP007689.1; note = Listeria monocytogenes
MNDKQWEDYKSKFIELAKLNNKTQKYIDQNINYAFNLFQKGLPIIYDTTHLGLLTGIKKEYIYLVVSSPRHYYRHFKIPKSNGFLREIDEPLPNLKIIQKWILNNILQNVPVSPYAKAYLHKTTLIDNAKFHKRQKIVYKLDIQNFFPSISSHMIYNFFCEAGYDLKLSRVLSRIVTLNNGLPQGAPTSPYLSNIIFKEIDLKIAKYCQQHKIRYTRYADDLTFSGDFNYNKLKTFVEWNIQKSGFNLNNSKTKILPKNKRQIVTGIVVNEKLQISKNERKKIRHELHYLKLDTNKHLSLRANNEKAQIKYLQQLLGKINYGLQINGKSKELLLGKIFILNILKQF

SEQ ID NO: 2504 - protein, 362 aa, unidentified
  source 1..362: note = Related to FPKH01000001.1; note = Janthinobacterium lividum
MMSSCFFFAKEMNWENYATSFENAALSNNFDASYVKRCLAYGKVLFDKSLPIIYSLDHLANLVGYDSEFIVAVSFRQNGYYRNFFIPKKSGDYREISEPLPSLKIIQRWITENILYRISASRFAKAFVPTRSIKDNARFHKNQKLVLTVDIKDFFLSLSSKLVYKFFLGCGYSKRVSYFLTRLTTLNGSLPQGAPSSPYLSNLLFSESDEEISTFSRSEAIRYTRYADDLTFSGDFSPCKIITRVRRVLGKLDLRINEKKTRVMKPHQRQIVTGIVVNNKLQAVREIRRNLRQNIHYIEKFGFEYHVARIREHRANYQFHLMGQANFILFINPRDKDAIFALEVLRKNLQHSANSESQHDNN

SEQ ID NO: 2505 - protein, 348 aa, Nitrosomonas sp.
  source 1..348: note = Related to JAHBZZ010000012.1
MNWIDYQKEFTAKSISAGYKKDYIERCLTYAHRLYERNLPIIYSLDHFASLVGYEKSYLNYIAYRQNPFYRNFEIPKKSSGKREISEPLPNLKKIQRWVLDNILYRVSPSQYAKAFVPGRSIKANARFHRNQKMVLTLDINNFFPRLSSKLVKQFFTKCGYSKKVTYYLTRLCVLNGGLPQGAPTSPALANLMLKDFDLNIAKYCKSKTIRYTRYADDLTFSGVFAENELIKQVKKELKKIDLELKNSKTRLMLKHQRQEVTGIVVNNKLQAPREFRRNLRQAIFYIEKYGLENHLAKLNEFRANYVSHLLGQANFVLFINPRDQDALKALEILKDCRSSNFMITSDD

SEQ ID NO: 2506 - protein, 326 aa, unidentified
  source 1..326: note = Related to NZ_JWZY01000031.1; note = Herbaspirillum rubrisubalbicans
MDWEIYSSRFAKAAQDRGDHYIERCLAYAKRLNDQSLPIIYSPDHLGKLTGYDPAYLRYVAYKQRSFYREFSIPKKSGGVRSISEPLPNLKSIQQWILTSILYKLEPSVYAKAFVPQRSIKENARFHRSQEMVFTVDIRDFFPSLSVKRINNIFLSLGYERRVAYYLTRLCSLDGGLPQGAPTSPALSNIIFSPTDNRIAKYCTPLGIRYTRYADDLTFSGNFSVSDLLKIIRRELSALELTLNDSKTRLMKKHERQIVTGVVVNEKLNATRELRRGLRQSAYYIQKYGLENHINRIDEKRGNYLLHLIGQATLGVSEFLCKRDFV

SEQ ID NO: 2507 - protein, 353 aa, unidentified
  source 1..353: note = Related to NZ_CP014167.1; note = Paenibacillus yonginensis
MNWNEYKNKFYYFAKFHNKDDNYINDCINYAEKLFSKNLPVIYDVTHFSYLVGYKESYIMKVANSQSPFYREFLIPKKNKDEYREISEPLPNLKVIQRWILDEILHKLNPSPFSKAFRIGYSIKDNAKYHRKQKLVLNMDIKDYFNSISNDKVFMFFKSLGYSKQVALVLSKLCILDNGLPQGAPTSPMLSNLVTQQIDKRIASFSAKHNLRYTRYADDLTLSGDFDEGFVINCVKRILNSEGFCINEKKTRVRKQNQQQEVTGIVVNEKLQASKKYRKNLRQKMHYIKKYGFEDHISKLEIDNKIKYLYHLLGTANFILNVNPYDKEAKDSFEYLKQLLFHYKLKTSISEFD

SEQ ID NO: 2508 - protein, 353 aa, unidentified
  source 1..353: note = Related to NZ_FNAZ01000007.1; note = Paenibacillus sp.
MNWDDYKNRFYHFAKYDNKDDNYIDSCLNYAEKLFLKDIPVIYDVTHFSKLVGYKEAYIMKVSNSQGSFYREFKIPKKKKGEYRDIYEPLPNLKNIQRWILDEILNKLKPSPYSKAFRVGYSIKDNAKYHRNQKKLLNLDIKDYFKSIGYKKVYNFFRSLGYSKHVSVVLANVCTLDDELPQGAPTSPMLSNLITQRLDLRIAKFASKNKIRYTRYADDLTFSGDFEEGIVINFVRKVLLSDGFLINEQKTRVRKQNQQQEVTGIVVNEKLQASKKYRKSLRQKIYYIKRYGLEDHISKIEFDNKIRYLYHLLGTANFILNVNPNDEEAKEYFNYLKQLLFQYKLKKLDQEVE

SEQ ID NO: 2509 - protein, 346 aa, unidentified
  source 1..346: note = Related to NZ_JADBEL010000024.1; note = Sporosarcina limicola
MNWEVYRDNFYSSAKTKGYKENYINRCLEYSKILFDQKLPIIYDQKHLSLLIGYQEIYLIKVSNSQEPFYREFKIPKKNKNEFRKIHEPLPNLKNIQRWILEEILNILEPSPYSKGFRKGYSIKDNARFHKKQKKVLSIDIENYFGSISYDMVYSFFRNLGYSKQVSVMLANLCVLEGRLPQGSPTSPMLSNLITKRLDNRIGGYAKKRGIRYTRYADDLTFSGDFNEGALINFVKNVFESEGFVINEKKTRVRLQSQQQEVTGIVVNEKMQASRKYRREFRTKMFFIKKYGLDSHLDYVEEEKKIEYVYHLLGTANFIVNVNPNDLETREHYIYLKELLSDLKKS

SEQ ID NO: 2510 - protein, 344 aa, unidentified
  source 1..344: note = Related to NZ_VCBL01000006.1; note = Rummeliibacillus suwonensis
MEWEEYKSKFYHYASFEGKDPDYIDNCLNYAEKLFNKGLPVIYDQLHLSLLVGYEEIYLIKVSNSQDSFYRKFDILKKNKRDYRTISEPLPNLKNIQRWILSEILSKLKPSEYSKAFRPGLSIKDNARFHRKQKKLLTVDIKDYFGSIDFKKVFIFFRNLGYSKQVSVMLANICTLNNGLPQGAPTSPMLSNLITKNLDQRIAGFSKKNNLRYTRYADDLTFSGDFNEGHVIEFVKEVFKSEGFTINDSKTRVRKRNQRQEVTGIVVNEKMQASRSYRRDFRQQMYYIKKYGLDSHVNNIEGGDTLKYLYHLLGMANFIININPNNQETKEDYHYLKDLLQKLK

SEQ ID NO: 2511 - protein, 343 aa, Bacillus sp.
  source 1..343: note = Related to JAEACL010000003.1; note = Bacillus halotolerans
MNWEEYKFKFYHYASFNGKDQDYINSCLNYAEKLFNKGLPVIYDQFHLSLLVGYDEKYLIKVSNSQELFYREFNILKKNKKDYRTISEPLPNLKNIQRWISKEILSNLEPSEYSKAFRTGYSIKDNAKFHRRQKKVLTIDLKDYFGSIDYKKVFTFFRDLGYSKPVSVMLAKICTLNDGLPQGSPTSPMLSNLITKNLDHRIAGFSRKQNIRYTRYADDLTFSGDFSEGYVIKFVKMILNSEGFTLNDSKTRVRKRNQRQEVTGIVVNEKMQASRKYRRDFRKRMYYIKKYGLNSHVEKIEAGNSLNYLYYLLGMANFIININPNDKATKEDYNYLKNLLLKS

SEQ ID NO: 2512 - protein, 355 aa, unidentified
  source 1..355: note = Related to NZ_LFXJ01000013.1; note = Lysinibacillus xylanilyticus
MVIGLNENGDIMKWEEYKKKFYHYATYNQKSEEYISSCLDYAERLFMKDLPVIYDQKHLSQLVGYREEYLFKVANASELFYRNFKVLKKNKKDYREISEPLPNLKDIQRWILDQILYKLEPSEYSKAFRKGVSIKDNAKFHRKQKKVLTIDIENYFGTIKFKAVFKFFKSLGYTKQVSMMLAKLCVIDDELPQGAPTSPMLATLITKNIDKRLSAFANKEKIRYTRYADDLTFSGDFNEGYVIKFAEKVINSEGFKVNPFKTRVRLQHQRQEVTGIVVNEKLQASRQYRRKFRQNMFFIRKFGLESHIININVSDPKSYVYQLIGTANFIRNINPKDIDVQVDYEYLKELLQTYK

SEQ ID NO: 2513 - protein, 347 aa, Bacillus sp.
  source 1..347: note = Related to JAEKFM010000007.1
MIWEKYKRNFTESALKAGYDSMYIEENLKKAHSLHLQGIPIIYDQMHLSYLVGYDIEYLLKVSNSQKGFYRYFKIPKKNGGFRNIAEPLPNLKSIQKWILEEMLYSCKTSEFAKAYKKNVSLKDNARFHRGQKMVLTIDIKDFFGSIRHIDVYNFFSSLGYSQDVATLLTNLCTLKGALPQGAITSPALSNLLMKDIDKRISAFSKKKKIRYTRYADDLTFSGDFQVGEIIKFVTTVLRSKGFSINDKKTRVRFPHQRQEVTGIIVNQKIQAPCEMRKELRKNIYFIKKYGLNSHLEFIKKDKYQYLKHLLGIANHIYFINPTDSRVYEYLNYLKELWQVEKITSED

SEQ ID NO: 2514 - protein, 338 aa, Bacillus sp.
  source 1..338: note = Related to NZ_CP071813.1; note = Bacillus mycoides
MNWKSYSEAFSKKAKQNKYDQNYINECLGYAKPLFEKKIPIIYNQEHLSLLVGYSEEYLLKVSNASDRFYRNFSVPKKNGSSRQIFEPLPNLKDIQRWILEEILYKCPISDYAKSYVPRRSTKDNARFHRRQKKVLTLDIKDFFPSIRFHKIYLFFFNLGYTESLSMMLANLCCLNGSLPQGAISSPALSNLIFKSFDKRISVFCKSNNIRYTRYADDLTFSGDFQPGMLIKFVENILVPEGFQLNNKKTRVRLQHQRQEVTGIVVNQKLQAPRKMRRELRQKIHYIEKYGLDSHLERSQITRVNYIKHLLGIAHYIRHINPGDEKINSYIEKLKAYL

SEQ ID NO: 2515 - protein, 338 aa, unidentified
  source 1..338: note = Related to LR134338.1; note = Brevibacillus brevis
MNWETYRVNFTLRAKEFEYDEEYINKCLQYSKNLFDRSLPVIYDQQHLSALLGYKYSFLLKVSNSAKNFYRNFAISKKNGGFRKISEPLPNLKEIQRWILEEILYKNNVSEFAKAYLKGKSIRDNVRFHRGQKYVITIDIKNFFPSISEEKVFVLFIEMGYSKPVSVMLAKLCCLNGKLPQGAVTSPMLSNIIMKRLDKRIAAFAVKNRVRYTRYADDLTFSGDIEPGKVINFVKKVLDADNFKINDSKTRVMTKNQRQLVTGSVVNEKLQAPREVRRKIRQELYYIKKFGLASHLEKLNSYKANYLKRLLGLINYCLLLNPKDAELIKGKNYLKELL

SEQ ID NO: 2516 - protein, 351 aa, unidentified
  source 1..351: note = Related to JAFQBM010000021.1; note = Lachnospiraceae bacterium
MNWNEYENNYIRLAKLSGKSDEYCIKQLEYAKHLFEQDLPVIYTQEHLCRLVGYATEYVYAISNSASCFYRTFSIKKKNGKERIINEPLPSLKEIQDWILKEILERINISPYAKAYVKGRSIKDNARFHKRQNKVLTMDLKDFFPSITFGRVLNVFRKVGYRENVAVMLANLCCLHNELPQGAPTSPALSNIIVSGLDYKIAEFLKGKEIRYTRYADDLTFSGDFIEGDIIKSIERIVCRQGFKINHSKTRIRKRNQRQEVTGVVVNEKLQVNRELRRRIRSDAYYIEKYGFYSHVDYTSQNRSNYLYYLIGIASYSLFINPYDDKMREYLEIFKKELARCKQEGVDVCSP

SEQ ID NO: 2517 - protein, 347 aa, unidentified
  source 1..347: note = Related to NZ_LT969517.1; note = Eisenbergiella sp.
MKWNEYENNFIQIAKMQGKTEEYCIQQLEYAKKLFANNFPIIYNQVHFCKLVGYAEEYVFSACNQPKSFYRTYYIPKRNGKKREISEPLPSLKEIQNWIYQEILCNVKVSSYAKAYVKGKSIKDNARFHKRQIKVLSMDIKDFFPSIGFKRVLNVFRNIGYRENVAVLLANLCCLNNSLPQGAPTSPVLSNIITSKLDDKIVNYVSKERIRYTRYADDLTFSGDFNEGDVIKNVERIANSLGFKINEEKTRVRKRNQRQEVTGIVVNEKMQLSRKIRKRIRSDMYYIQKYGVESHLEHIGESRENYLYHMMGLVSYAAFINPYDENLKKYRLFLKEELNKHVALVDN

SEQ ID NO: 2518 - protein, 338 aa, unidentified
  source 1..338: note = Related to NZ_FOLQ01000021.1; note = Spirosoma endophyticum
MKWSDYASKLIEEAIKLDYTKEAIDEYLSYAEHLHRAKLPIIFDQIHLSFLVGYKYEYLLGVSNAPQSFYKIFYIPKKNGEVRTISEPLTSLKEIQSWILKEILYKCKVSSNAKAYVIGKSIRDNARFHKKQNKVLTIDIEDFFPSIKINKVIGVFRRAGYSKAVSTLLARLCCTDNGLPQGAPTSPAISNLVMYYLDMRIFGFCRKRAIRYTRYADDLTFSGDFDDNELISFTRSILERKNLFINNQKTRLRKRHQQQEVTGVVVNEKLQVPRDYRERFRQELYFIKKYGLVGHVKHINAGDPDRYIRVLIGKANFISQINPNDTEIKDYLKILYTL

SEQ ID NO: 2519 - protein, 346 aa, unidentified
  source 1..346: note = Related to QRIC01000038.1; note = Dorea longicatena
MKWIEYKSKFIEVAQKNNKNKKYCDRWLKYARNLWERDVPIIYTQDHLCALLGYEPTYVYAVSNSPHNFYHCYQISKKNGGKRSISEPLPNLKEIQRWILENILYRFEVSPYAKAYIKDKSIKDNVRFHRRQRKVLSLDVKNFYDHLTDWMVYQLFIEVGYSESVAMMLTNLCCLEGSLPQGAPTSAALSNILMKDFDYKIGAFCKMYKIRFTRYADDMTFSGDFDEVKVISFVRKSLKDLQLTINDAKTRVRKQGQQQEVTGIVVNYKPQLAKSVRKGIRKDVYYINKYGLQSHLKYVQEERSNYLEHLFGLINYALFINPNDEEMKRYKIDIKYLMKKENDEFK

SEQ ID NO: 2520 - protein, 342 aa, unidentified
  source 1..342: note = Related to FMEZ01000001.1; note = Ruminococcus sp.
MEWIEYELKFAEIAKKHNKSQKYCKRWMEYAKKLWDRGLPIIFTQNHLCALLGYQPVYVYAVSNAPCNFYHYYKVQKKNGGTRNISEPLPNLKEIQRWILENILYRFEISPYAKAYVKNRSIKDNVRFHRRQRKVLSLDVKDFFGHLTDWMVYQLFIESGYSESVAMMLTNLCCLEGSLPQGAPTSAALSNILMKDFDYKIGDFCKMFKIRFTRYADDMTFSGDFDETKVISFVKKNLRDMQLTINDAKTRVRKQGQQQEVTGIVVNYKPQLARSIRKDIRKDVYYIKKYGLQSHLQYIQEERSHYLEHLFGLINYALFINSDDKEMKRYKMDIKYLMSNEK

SEQ ID NO: 2521 - protein, 350 aa, unidentified
  source 1..350: note = Related to JACRSZ010000030.1; note = Proposed Jingyaoa shaoxingensis
MEWNEYKIAFIEAARKSGKNNAYCEKYLNYAEQLWMHHMPVIYTQEHLCALLGYLPTYVYAAANAPEDFYRQFLIPKKNGGSRMISEPLPNLKEIQEWILKNILYKAEISTYAKAYIPGKSVKDNVRFHRRQKKVLSLDIKAFYDHLTDWMVFQFFIEKGYNEAVAMMLTGLCCLRGCLPQGAPTSAALSNLLMVEFDEKVGLFCKEKKIRYTRYADDMTFSGDFDELEVIRFVRQELKSIGLRLNMKKTRTRKQGQQQEVTGIVVNYKTQLPKSIRKEIRKNMYYIQKFGLESHLEYIGLECRNYREHLLGQIGYALFINPKDQEMKRYKEIIHDVDICCKKQTPDRFV

SEQ ID NO: 2522 - protein, 342 aa, unidentified
  source 1..342: note = Related to RKBT01000103.1; note = Solobacterium sp.
MNWDIYKENFIHEAKKHHKNENYINKWLEYAHNLNSKKLPIIYDQNHLCELIGFDKNYVYAISNGGKHFYRTFEIKKKNGGTRIIHEPLPNLKDIQHWILKNILDYVEVSPYAKAYRKGYSVKDNVKFHRRQKKVLCLDIHSFYDSLKSNLVLDVFIELGYKNDVAIMLTNLCCLNYKLPQGAPTSSSLSNIIMKNFDYSVSDFCKDNAIRYTRYADDMTFSGDFDEINVIRFVRNELKKINLRLNNQKTRVRIQGQQQLITGIVVNEKTQLPKKKRKEIRQTMYYIKKYGINEHMNFKNIDKSYYLEHIMGIVNYGLFLNPRDSELIEYRSILQVLKNSQD

SEQ ID NO: 2523 - protein, 342 aa, unidentified
  source 1..342: note = Related to JAFYBR010000063.1; note = Lachnospiraceae bacterium
MSEEKKCPQIGRPRELCSLLGHKAEYVYGIANETHKYYQHSRIPKKRGGFRELYEPLPELKKMQTWILHHILDLLEPSPYAKAYRKGYSVKDNAKFHRRQKKVLSLDIEGFFDHIRRYPVFRVFLDAGYKKDVAMLLAALCCRNGCLPQGAPTSAALSNLVMLGFDAKVGAFCRERGIRYTRYADDMTFSGDFEETEAIRFVKEECGKLSMKLNREKTRVRKQGQQQEVTGIVVNEKTQLPESERKKIRQEMYYIRKYGLESHLRHLREGLASGKNHLQEASGNGKESCLRETGTSRDLSKERYLSQLLGRISYALFINPRDEAMREYKKAVIEWMKTDIIK

SEQ ID NO: 2524 - protein, 346 aa, unidentified
  source 1..346: note = Related to NZ_LT635539.1; note = Blautia sp.
MDWNKYREDFLIKAKNQKKDKKYCDKWLSYAHNLYEQELPIIYNQEHFCKLVGYMPEYVYAASNSADHFYRTFFIPKKSGGLRKICEPLPNLKEIQKWILETILSKMQVSVYAKAYIKGKNVKENARFHRAQKKVLSLDIQDFFSKISPFLVYETFINVGYNKDVSMMITMLCCKEGGLPQGAPTSALLSNIIMKNFDNVIGDYIIKNKIRYTRYADDMTFSGEFDELEIIRLVRHELKKYGFCLNGKKTRLRQEGQRQEVTGIIVNKKLQISKDQRKKIRQEIYFIKKYGLQSHLTYTNEQRKGYIEHLFGKISYALYINPKDEELKEYREFLLQYKSNSEISLN

SEQ ID NO: 2525 - protein, 349 aa, unidentified
  source 1..349: note = Related to NZ_CP028101.1; note = Fusobacterium nucleatum
MEWIEYREQFITTAKKASKNSGYIKKNLKYAEKLYNQKLPIIYNASHFSKLVGYSLQYLYAASNDSSKFYREFEIKKKNGGSRKISEPLPSLKEIQKWILENILNKIQKEKVSKYAKAYQKKISIKENVKFHRGQKKVLSLDITNFFLNIKIDKIYEVFYNLGYSKSLSTLFSNLCTLNYSLPQGAPTSPILSNIVMLNFDNEIEKIVLEKRIRYTRYADDMTFSGDFLEKEIIKYVKENLNKIGLKINNKKTRVRKNWQQQMVTGIIVNEKIQISRKKRDELRQTMYYIEKYGIDSFLKYKGIKNKVYYLSHLKGILEYAYFINKNDKKLFNYIEYLKNNFFKEKSSI

SEQ ID NO: 2526 - protein, 341 aa, unidentified
  source 1..341: note = Related to WWTL01000016.1; note = Clostridium sp.
MNWKNYCVEFRKEAALKGKNEEYCDTWLQYAKVLFDKGLPIIYNQEHLCLLLGYKEEYVFAVSNSASNFYRNYEIPKKNGGVREISEPLPSLKEIQRWILDNILSSINISVYAKAYVKKKSIKDNARFHKRQEVLLTLDVSNFFDSISSDKIYNLFLDLGYKEDVVVMLTNLCCLNGWLPQGAPTSPMLSNIILRQFDNVMGKYTNEKKIRYTRYADDMTFSGTFNPGQIISVVRKELFRLGLQLNENKTRVRRKGQCQEVTGIVVNEKLQLPKNVRKKIRQDLYYIRKYGLESHMEYCDISKEKYLQHLKGRIQYGLFINPYDYELQGYLSYLENMYGQY

SEQ ID NO: 2527 - protein, 341 aa, unidentified
  source 1..341: note = Related to NZ_LT635469.1; note = Blautia sp.
MNWDKYCNEFCKEAEHNGKNATYCNTWLQYAKSLYEKKLPIIYNQKHLCLLLGYKEEYIYAASNSAINFYRTYKIPKKNGGTREISEPLPSLKEIQRWILDNVLAPVNISVYAKAYVKKKSIKENARFHKRQPIVLSLDVERFFDSITSDKIYSLFLKLGYKEDVSVLLTNLCCLNGCLPQGAPTSPMLSNIVLTEFDNIIGKYTNEKKIRYTRYADDMTFSGDFKPGQIISFVKYNLSNLGLKLNERKIRTRKKCQRQEVTGIVVNEKMQLPKPVRKQIRQEMYYVRKYGLESHMQYCDISKENYLQHLKGRIQYGLFINPYDYELQDYLGYLDKVYGKY

SEQ ID NO: 2528 - protein, 339 aa, unidentified
  source 1..339: note = Related to QTVG01000007.1; note = Eubacterium sp.
MDWEDYKNEFIRVAKKNEKNEDYCDKWLKYAKKLYDKRLPIIFNQEHLCLLLGYKKQYVYSVSNSPADFYRYYKIPKKNGNFRQISEPLPSLKEIQKWILDNILVNVDTSVYAKAYIKKKSIKDNARFHRKQKVLLSLDIKNFFDSISSDKIFDLFWNLGYKEDVVVMLTNLCCLNGSLPQGAPTSPMLSNIVLEDFDNEIGLYTMEQKIRYTRYADDMTFSGDFHPGKIISKVKRQLNDLGLKLNDEKTRTRGRGQRQEVTGIVVNEKMQLPRPERKKIRQEMHYIIKYGIESHLEYCKIEKANYLSHLKGKIEYGLFVNPYDYELKEYLSYLNNIKD

SEQ ID NO: 2529 - protein, 352 aa, unidentified
  source 1..352: note = Related to VMKF01000001.1; note = Geobacter sp.
MTILLVLVEGSFFIMQWEIYKRKFTHKAKSARFDEGYIERCLNYAENLHKQGVPIIYDIEHFSHLVGYDVSYLLRASNAQARFYRHFTIPKKNNTERSISEPLPSLKEVQRWILDNILDKLALSRFAKGFVKNRNIKENARFHRKQRYVLSLDIKNFFPSIKYKQVFHLFSSIGYCESVSTLLSNLCTLDNSLPQGAPTSPAISNLVCRRVDSRLSGFALKNKIRYTRYADDITFSGDFDPGRILRFTSKVLSESKFTVNKTKTRLMEQHQRQEVTGIVVNSKMQAPRELRKKLRQQIYYIKEFGLESHLKATNNKRANYLSHLKGLAGFVLFINNKDSDAKEAIDFLETFS

SEQ ID NO: 2530 - protein, 348 aa, unidentified
  source 1..348: note = Related to QZJW01000035.1; note = candidate division WS5 bacterium
MGLVEKKFNWEDYSEKFTVLARNEGRDAIYAELCLSYAHRLYSNNIPIIYDVEHLCKLVGYDKYYVLGASYETEKFYRKFKIPKKSGGFRTIHEPLPSLKEIQRWILDNILYNINISKHAKGFIHDLSIKDNAKYHRNQPCVLSLDIKDFFPSIMRHRVYGIYRSIGYTQLISNILSRICTLNESLPQGAPTSPALSNIICFNLDRRLAGFSKKYDYRYTRYADDITISGNIVAGRVIRFVKKILGDYDLFLNDNKTRLMQRHQRQEVTGIVVNEKMQTPKEIRRHVRQEVYYINKYGMDSHLDKIKDVRSNYVKHIIGIVNYIKFVNPNDRHAAQALSILMENYNKK

SEQ ID NO: 2531 - protein, 345 aa, unidentified
  source 1..345: note = Related to JAEINN010000002.1; note = Maridesulfovibrio ferrireducens
MPSSLIWKKYSQAFAKKGKKEGHSKEYIHTCLNYAEQLYKRSAPIIFDPVHFSLLVGYSPKYIMAVTNSPDNFYRQFSISKKNGGSRNITEPLPSLKEIQHWILTNILNNIPVSKYAKAYISKESIKSNARFHRKQPTVLCLDIKDFFGSIHGGIIFNLFRTIGYRSSIASLLTNLCIYDDALPQGAPTSPALSNIIMKGFDQRAAGFCKKREIRYTRYADDLTFSGTFFPKEIIRFITSALSDLKMDLNPTKTRILGQGQQQRVTGIVVNEKMQVPRKTRRNLRQSIFYIKKYGISSHQNHEKIYKSNYVRHLLGIANHILFINPKDADALNALSVLKPLLNKK

SEQ ID NO: 2532 - protein, 341 aa, unidentified
  source 1..341: note = Related to NC_020304.1; note = Desulfocapsa sulfexigens
MNWKKYRKEFTIQATAKSLDEKSMQHALSYARGLYKANLPIIFSQNHLSRLVGYNIDYIRNASSTKSDQFYRCYKIKKKSSDTMRTICEPLPSLKEIQRWILDNILSQVTISKFAKAYVVGFSIKDNARFHLRQKQVLRIDVKDFFPSIKGQNVFHIFKNIGYSAEVSAMLTGLTTLKNCLPQGAPTSPTLSNIFMNRCDARIAGYCLARKIRYTRYSDDLTFSGEFDVGKLISFINMVFKDSGLLLNKTKTKQMFKHQRQFTTGLVVNERINVCREKRRKLRQEIFYIKKYGLDGHLIRTEEKRTNYIMHLLGLSNFITHINANDRDALEAKEILRKYIT

SEQ ID NO: 2533 - protein, 342 aa, unidentified
  source 1..342: note = Related to NZ_CP040896.1; note = Hymenobacter sp.
MEWQQYKALLIAEAQAKGYSDEKLLETLDYANNLINKSLPVIYDLKHLSLLVGYKTAYIQRATHRSQFFYRRFEIRKKSGATRVIFEPLPSLKEIQLWILKNILNNCPISKYAKAYVRKKSIKDAARFHKNQKYVVTIDIVQFFEFINYPTVLGKFILMGYSREVSTILTKLCCKNDSLPQGAPTSPSLSNIVFADIDFEISEYCYANNIRYTRYADDLIFSGDLEPKLLIGKIEGILLNNGFILNNSKTRIMRPWQRQIVTGLIVNEKSKVQVPIEARRKLRQEMYYINKFGLDSHLSYTKNYKAKYLIHLLGVAKYMFFINPNDTKVANYIYQLESYINN

SEQ ID NO: 2534 - protein, 370 aa, unidentified
  source 1..370: note = Related to SEFI01001149.1; note = Sphingobacteriaceae bacterium
MMPLRLRLRDYIISYNHCNAAVSSSIMVWQTYQADFTAKALAARRPIAETEILLAYAKNIHDKGMPIIYDIGHLSLLVGYKVDFLVAASTYPRAYYRNFRIKKKSGASRVISEPLPSLKAIQTWILENILEKFEVSLYAKAYVKGRSIKENARFHRNQNNVLTIDIKNFFGSITKVRIISFFSSLGYSRQVALLLARLCCKNSRLPQGAPTSPTLSNIVLVAFDEKLFNVCSLNKVRFTRYADDITFSYENKNLTGPLIEYARELLRGEGLVLNRDKTRLMERHQRQEVTGVIVNKKLQVPIEIRKDLRQIFYYINKFGLDSHIERIQEKRSRYLYHVLGLCNFVLFINPNDKEVKGYLITARDYLTSEE

SEQ ID NO: 2535 - protein, 345 aa, unidentified
  source 1..345: note = Related to JAFVUY010000108.1; note = Bacilli bacterium
MKWEVLKDKIIKECKFANKSEKYTSAYLEYCRKLYEKELPIIASPKHFSLLVGIDHEYVCKMAYSQNLFYRSFKINKSNGKKREIKEPLPDLKYVQKWILNNILNKVEVSDYAKAFVKNRTLKHNAKFHKKQNVVVTLDIKDFFPSITLYDVADIFKDLGYFENVALFLANLCCYKKQLPQGAPTSPYLSNLRFRKIDDSISSYTKELNIRYTRYADDMTFSGDFNPHQLIKKISDIIHNSGFNINSKKTRVAYKNARQEVTGIVVNSHMQVSKNKRRDIRQQVYYIKKFGLDSHLTHIQETRANYLNHLLGQINFCLFVNPKDNEMKQYFGQIKDLMQKQNSDD

SEQ ID NO: 2536 - protein, 342 aa, unidentified
  source 1..342: note = Related to SVPN01000006.1; note = Oscillospiraceae bacterium
MKWEVVEKNIKKECKARHKDSVYIQKYIAYSKNLFDNDLPIISSPEHFSLLIGMEHQYVCNMAYAADRFYRHFTIPKSNGKKREIDEPLPDLKFVQSWILENILEKCPISEYAKAYYKGRTLKHNARFHRAQSIVLTMDIKEFFSSISVRDVTKIFEDMGYFHELSCFLAYLCCLNNVLPQGAPTSPYLSNLRMRILDNKISQYTSQRKIRYTRYADDLTFSGDFNPHHVIKDISKLVYDEGFVINPDKTRVARRNARQEVTGIVVNSHMQISKEKRKQIRQQVYYIKKFGVESHLERINESRANYLNHLLGQINFALFVNPKDEEMKEYFNVIKTLLVDQN

SEQ ID NO: 2537 - protein, 346 aa, unidentified
  source 1..346: note = Related to NZ_CP060696.1; note = Caproicibacterium amylolyticum
MEWSTLRNAIIRKCKEHRKGDEYSEALLSYSEKLFVQNLPIITCPAHLSLLIGLEHDYVCRMAFSPEHFYRHFTIKKANGKDRSIDEPLPDLKFVQQWILSNILENVPVSTYAKAFIKKRGVKENARFHRAQTVVVTMDIKDFFPSINLQQIVNIFCTLGYSNDVSNFIAHLCCYHYSLPQGAPTSPYLSNIRMREFDKKVVDYSSPLKIRYTRYADDISLSGNFNPHTAIKYLSSLVFKEGFSINAEKTRVAYQNARQEITGIVVNSHMQVPKAQRKKIRQEVYYIKKYGLDSHLSHISETRENYLNHLLGKINFARYINPKDQEMQEYYETIKKILILFRNESF

SEQ ID NO: 2538 - protein, 363 aa, unidentified
  source 1..363: note = Related to NZ_FOAT01000022.1; note = Ruminococcus albus
MYAKNSLVVQSIKCYVALLGDYMKKNYYDKIILECKKHNKSQEFVDTYLAYYENLTQKGLPVISSPKHFSMLVGMDHDYICSMAYSPKHFYRTFYIEKANGMKRKISEPLPDLKYVQKWILKNILEKVKVSPYAKAYVSNSSVKHNARFHRKQKVVLSMDIKSFFPSVKVKSIVDIFKSFGYTENVSCFLAYLCCNNYCLPQGAPTSPYLSNLRLLKFDSIISQYTSLRKIRYTRYADDLTFSGDFDPSNLIRFVSKCVWEEGFKINSDKTRVAYGNTRQEVTGIVVNDKMQIPKTGRKKIRQEVYYIRKYGVSSHLSHINETRVHYLNHLLGKINFALFVNPNDIEMKGYYDYIISIIEDVD

SEQ ID NO: 2539 - protein, 347 aa, unidentified
  source 1..347: note = Related to NZ_BQKV01000037.1; note = Faecalibacterium gallinarum
MMDWDKFKTQAIQKARVDRIRDIELRSYLSYAEKLVKQNLPVIVDAASLASFVGIDLLYLCQMAYGTEYFYRRFQISKKSGGMREIAEPLPDLKAVQNWILTNILNYTSVSKYAKAYVKNQSIKSNARFHREQKVLVSMDVKDFFPSIKIEDVFKIFVNLGYIENVSWFLAHLCCLNGELPQGAPTSPYLSNLRMRNFDSEVGTYALENGWRYTRYADDLTFSGDGNVKELIRTVSGLLLKNHLYPNTKKTRVARQNTRQEVTGIVVNKKIQTAKQYRKKIRQEVYYIKKYGLDSHLTFCQISQKNYLNHLQGKILYALFVNPKDKELLEYKEFISDLLIKTKSSLK

SEQ ID NO: 2540 - protein, 344 aa, unidentified
  source 1..344: note = Related to WKQN01000003.1; note = Faecalibacterium prausnitzii
MDWNEFCNHAKFQASVDGINEEELKKYLQYAKRLVRKDLPVIVDPYSLAKFIGIDFHYLCNMAYGTEHFYRNFLIPKKSGGTREISEPLPDLKQVQHWMLNNILNYIEISKYAKAYVKKQGVKSNARFHRGQKVLVSMDVKDFFPSIKKIDIFHVFHGLGYDENVSWFMAYLCCLNGELPQGAPTSPYLSNIIMSSFDKDVASYAIEKKWRYTRYADDLTFSGDGNVEELIRVVSELLLKYHLYPNTKKTRVAYQNARQEVTGIVVNKKLQAARQYRRKIRQEVYYIKKYGIESHIAFCQISQKNYLEHLQGKIGYALYVNPKDIELLEYQKFLHEVSDSLQNQ

SEQ ID NO: 2541 - protein, 351 aa, unidentified
  source 1..351: note = Related to DUPM01000091.1; note = Clostridiaceae bacterium
MQNKNCTWDQYRSAFIELAQKSNKSKPYIRRCLEYAEPIFERGLPIIFDVHHLSKLTGRSAKHIFSLSRFARCHYRSFSITKKSGGERRIDEPVEDLKYIQRWILHEILERLPVSPYAKAYVPGLSVRDNARFHQNQDKILTVDIKDFFPSVRSKSVFFVFRNAGYSDTVATILSNLCCLEHRLPQGAPTSPMLSNLVFSDLDKVIADFSIQRGLRYTRYADDLTISGSLDIRETLHFLYPLLNNRGFRLNPEKTRVLSRNMRQAVTGIVVNQYLQVPLNIRKNIRQDVFYIRKFGLKSHMEHIDETGDNYIDRLIGIVGYAIFVNPHDNEMKDYFSYLRSLKNDEKVQTA

SEQ ID NO: 2542 - protein, 356 aa, unidentified
  source 1..356: note = Related to NZ_QGNY01000001.1; note = Pedobacter sp.
MKESNYSWNEYKFRFEQKAIDFGHPLSKIEGLLLYAQKLFAANLPVIYDLRHLSYLTGYREEYMLRATSRPENFYRYFRIAKKNGHSREISEPLPGLKEIQYWLLDNVIKKLPPNKLNNAYLEGRSIISNAKFHTKQQKLLNIDIEKYFNNITKKQVEGFFSSLGYNLEVSSLIAGLLTMKDGLPQGSPSSPYLSSIMTVQIDVTLLAECRALGLRYSRYADDISISGEFNTEEVVKKVNAVLLANGFKANSRKTTVKKSHQRQMVTGVVVNKKLSVKKKVIKELRQELYYIHKYGLEQHLRRKEIQRRNYLNVLEGKLNYFCSVKRNNAELSYIRRMLSEIKIRESAEQLRSAFE

SEQ ID NO: 2543 - protein, 347 aa, unidentified
  source 1..347: note = Related to NRSW01000001.1; note = Mucilaginibacter sp.
MQESIFSKNEYLFKLEKKAQELGLPNQSVLGLLSYAKTLQEKNLPVIFDIKHLSYLTGFKVDYILRAIKSPDKFYRTFFIRKKNGRSRQIKEPLPGLKSIQYWILNNIIKKVPTSRFNNAYSIGKSTVSNAKFHTKQQFVLNLDIEAFFDNITASMVSLFFSNLGYNSDVVSVLSSLCTLNGSIPQGSPSSPYLSSILTIDIDENLYKYCRERNLRYSRYADDITISGSFHAGVVIAGVRKLLNSLNFSINDSKTRVKSQHQRQLVTGLVVNKKIAVKRSDLKEFRQEMYYIMKFGIESHVIKQNVTKNNYIDHLLGKANFYLFVRKKDSDLFKYKTYLIDVLKGKK

SEQ ID NO: 2544 - protein, 347 aa, unidentified
  source 1..347: note = Related to CDNR01000033.1; note = Paeniclostridium sordellii
MNYNKYSIIFKQEANNQGLSEDEIEVYLTYAKVLLDKSLPIIYNQDHLSKLLGIHPIYLYTLTNSSDKFYRKFKINKKNGKKRNIEEPLSILKEAQYWILEHILLKCSCSNYTKAFKANSSIKENAKFHKKQNIVINLDIEDYFGTIKGHKVYEFFRTLGYNNEVSIMLTKICTNKDSLPQGSPTSPYLSNIITENLDNKLAELAKKEEYGLRYTRYADDITFSTNNKINITNLIIDTKYVLKQEGFKINYKKTKVISSNKRQMVTGIVVNDKLQVSKQQRRKVRQAMYYIEKYDLESHIRNIGWQKGKDKYLRHLLGNINFVLFINPKDKEHLKYKSQLIQKLKEI

SEQ ID NO: 2545 - protein, 346 aa, unidentified
  source 1..346: note = Related to SEFT01000010.1; note = Sphingobacteriales bacterium
MFTTKPSLSEYKLSFSKEARRKDYNDYDIKEFLDYAEILYLKDLPIIYNIKHFSLLVGYKETYLARAAETTFNFYRSFDIRKRNGKLRKIDEPLPSLKEIQTWILTNILYKLDCSKYSKAYKKKNSIKTNAKFHRDQDVVLSLDVKDYFGSIRVEDVEFFFADLGYEENLSGMLASLCCLNGSLPQGSPTSPYLSNLITIELDNDLSELAKLYNVRYTRYADDITFSGTFTVGVLINKAKEVATRYGFEINDKKTRAMGKHEQQLVTGIVVNTKKLQVSRERRKDLRQQLYYIQKFGLENHLAKRNINKRNYLQHLLGLTNHILMVNPKDEEALRYKQVIFSYMND

SEQ ID NO: 2546 - protein, 346 aa, unidentified
  source 1..346: note = Related to JAFYNR010000020.1; note = Clostridia bacterium
MNFLTYEQKFKEQAELSGKSEYYIDECLNYARNLNKNGLPIIYDDVHLSKLLGIRLDFLISISNSQKDYYRFFSISKSNGKSRKIAEPLPLLKEIQHFILDNILLKVPCSVYSKAYKPGAKLKSNAKFHRNQPVLIKMDLKDYFPSLDEHRVYKFFHHLGYKDSVSVLLAKLCTLNKALPQGAPTSPYLSNLLTRELDEDIYLFCKENGNLRYTRYADDISISGNMIPTNIIKGVVKIIAKHGLKINKEKTAVIPNSNRQVVTGVVVNQKLQASKPYRHSIRLEMHYCMRYGIEDHIKKSKKISNNTNKRKYCQQMLGKVNHCLQLNPNDSEMKSYRDFLLQKIVE

SEQ ID NO: 2547 - protein, 351 aa, unidentified
  source 1..351: note = Related to JAKNGR010000030.1; note = Flavonifractor plautii
MNFSTYQREFIAEARKHDKNDEYIEKCLAYAKNLVDKRLPIIYDEKHFSQLVGIDLDYLLSAANSPKHFYRYFTIPKRNGKIRRISEPLPVLKEAQYYILNNILKKVPCSIYAKAYKPGATLKGNAKFHRKQPILVKLDLKDYFPSLHESRVFQLFHQSFGYGKSVSILMSKLCTLDGGLPQGAPTSPYLSNLLTSEMDDKIYQFCSSNGNLRYTRYADDISISGSMNPSDIISGVSRIVSEHHLQINKSKTAVFRPHKRQVVTGVVVNNKIQAPKDYRRSIRLEMHYCMKYGIESHILRATKRSSDAVDRVKFCQSMLGKINYCLQLNSKDTEMQRYRDYMLEQLHGNAQ

SEQ ID NO: 2548 - protein, 360 aa, unidentified
  source 1..360: note = Related to QUJF01000028.1; note = Butyricicoccus sp.
MNFITYEKMFTEAARKAGKSDDYIKNCINYAKALADKHVPIIFDIHHFSQLIGIRLDFLLAISNSPRNFYRYFTIPKASGKFRKIAEPLPILKDIQHYILHNILKKIPCSIYAKAFKPRASLKGNAKFHRNQQTLIKLDITDYFSNLHESKVFYLFFHTVGYSKSLSTLLTKLCTLNGGLPQGAPTSPYLSNLLTIDMDTAIFQFCSENGGLRYTRYADDISISGAMNPSSVIHAVTKIVSDNGLKINKLKTAVIKHHSRQIVTGVVVNQKLQAPKNYRKSIRLEMYYCQKYGLISHLQKSGKSSTPLDAANYCQSLLGKINYCLQLNAYDTEMKKYREYMLKQFHHYNQSLYSASQALK

SEQ ID NO: 2549 - protein, 303 aa, unidentified
  source 1..303: note = Related to NZ_CP028107.1; note = Fusobacterium necrophorum
MEFTIYDVLKFNPFIIKKILANKDKYYKIFIIKQRNGKTRQITAPVRELKVLQKNILKSLLEKMEYSKFAKAYTKQKSIKDNANFHQKQALVICLDIKNFFDNIRFNSVKDVFQKISIGKAEILAEICTYHGKLPQGGVTSPYLSNLIMEPIDKKISNFCFKYDLNYTRYADDITISTHLLSKNERERFVKLVIENINNILSEYSFTLNEKKIKVQYAYQQQRVTGIIVNNTMQVPKEYRMKIRQEIYYIKKYGLDSHLMRNHQEKQKYINILKGKINYVLFVNPKDEKMKEYLHYIENHLRC

SEQ ID NO: 2550 - protein, 346 aa, unidentified
  source 1..346: note = Related to JAFVWM010000017.1; note = Alphaproteobacteria bacterium
MDLNEYIEQFTKNAIHKLNPEEINVCVRYATNLMNKGLPIIYDLKHLSYQTKYETGFLYLCINFKDKVYRQFSIKKRNGSDRNISEPLPNLKNIQTWIKKNILEKLSVHKVAKAFRKNQSIKNNAYFHKNQDTVLALDIKDFFNNIDGKTVYLLFRRCGYSRRVSNILKELCTFNDCLPQGAPTSPIISNLIFAAIDNRIYNFTRKENLYYTRYADDITISGNDIKIKKVISFISMVLKENNFELNQDKIKIMRKNSCQLVTGIVSNNSVLNAPKYKIKDLRKEIYYIRKYGIDDHMAYVGIKKAHYIEHLMGIANFILFINKNNKIATEALDFLRELQKQRNHPF

SEQ ID NO: 2551 - protein, 346 aa, unidentified
  source 1..346: note = Related to JAFWOM010000088.1; note = Fibrobacter sp.
MNWTDYKKQFELKCDLKKIPQVQVDVWITYARCLWEKSFPIIFDKAHLSKLLGYECSLLDKIIHRPGKFYRSFSISKRNGEFRELNAPYPTLNEIQKWILVNILEKKKVSPYAKAYIKRKKILDNIRFHTNHEVVIKLDVDDFFGSIHKSAIIKIFNSMGYSRQLSFDLASLCCLKKSLPQGAPTSPCLSNIFCEQIDARLSKYLKKLNLCYTRYSDDITISGNISDVQIPQIMSFCKYLLSDYGLNLNEKKTKVLRQHQKQYVTGAVVNKKMSADIKLKKDLRQQMYYIQKYGLNSHMVYKRIDQQNYVYHLMGKIQWVLALEKSNQEFLRYKEHLTEILKNLKF

SEQ ID NO: 2552 - protein, 346 aa, unidentified
  source 1..346: note = Related to JAFXYS010000380.1; note = Candidatus Saccharibacteria bacterium
MNWISYKEKFKETCQKKNISEIQIQKWLGYASVLYQNGLPIIFDKKHLAGLLGFKWELLRNIIHSQTKFYRTFYIPKKSGGRRCLKEPYPSLKEIQNWIKDFILKKCSISRFAKAYAPKRSVYENVRFHKKHAVVMKFDVEDFFGSINKWQVTSLFEKMGYNQDLAEILAGLCCLDNHLPQGAPTSPYLSNIFAKDIDNRLSKYLLKRGLYYTRYSDDITISGNISDKQVPQIISFCKYLLSNYGLRLNNEKTKILRQHQKQYVTGAVVNENVSVESKTKKKLRQQMYYIQKFGLESHMNHLEIKKQNYVYHLMGKICWVLTLEKKNEEFKRYKDVLKELLDAPKN

SEQ ID NO: 2553 - protein, 346 aa, unidentified
  source 1..346: note = Related to JAGBFB010000015.1; note = Spirochaetaceae bacterium
MDWGNYQKRFKISAKKRNLPDSFISECLDYAKKLYDNKVPIIFDTEHLSLLLGCKIQFLYKITNNLNKNYRIYKIPKHNGKMRTITEPYSDLKNIQQWILVNILQKMPVSIYAKAYISNTSLKSNVRFHVKQPVIIKLDVQDFFPSIHQISLVKLFRKYGYELNLSRMLSRLCTYEGVLPQGAPTSPYISNLYCRRIDNRIGKYITNAGFRYTRYSDDITISGNISDKQIGTIIQFCRKCLAEEGLKLNEGKTQILRSHHRQLVTGVILNQKISAGTKKKKDIRKQVYFIKKYGLESHIEHEKIEKQNYIYHLAGLINWVLFLENNNKEFLEYKKFVNEIIKQINS

SEQ ID NO: 2554 - protein, 350 aa, unidentified
  source 1..350: note = Related to NZ_VTYX01000020.1; note = Prevotella copri
MDFFKYISDFTLAATESGYNEEEILSFLQYARTLYDKSLPIIYDQEHLSLLVGFDYYCCLLPISNWQVDFYKKYEIPKKNGGIRIIEEPYPALKEIQTWILKHILEPASLRYVSPVAKAFMPGKNLRENARFHRKQELVVALDLHDFFGSVKAVSIFQLFRKFGYNKSVSMMLSKLCTLRNSLPQGAPTSPMLSNLIFYELDKKLFRYCQARNIRYTRYADDMTFSGDSFSVSHLIAYVKMLVGTRHYKLNEEKTNVMRKGCCQKVTGVVVNDKIQVSKSYRDKIRQEVYYCIKFGVADHMRKISLPGWITTPTIYLHHLLGKVNYVLQINPKDKVFLEYRKCLCDLLLN

SEQ ID NO: 2555 - protein, 345 aa, unidentified
  source 1..345: note = Related to JAGZTO010000032.1; note = Prevotella sp.
MNFKKYRSEFLKRALEHGYQRSEVDSLLVYAKVLFDKNLPIIYDQEHLSLLLGYDYDYLLALCNSQTMFYKQYEIPKKNGAKRLILEPFPNLKDIQTWILKSILEPASVKMVFPQAKAFMPGKNLRDNARFHRNTNVVVALDIHDFFGSVKEKYIYNVFYTMGYKMPIVVMLTKLCTLNGFLPQGAPTSPMLSNMVFSNIDNKIFKYSRKRSIRYTRYADDMTFSGKEIDVENLIRYIRSLIGHKQFLLNEEKTKVMRRGCRQIVTGVVVNKVLQVPKKYRDKVRQEVYYSMKYGFTSHMRSIELPSWISTVEVYKHHLLGKVNYILQINPKDTEFLRYRDWLRA

SEQ ID NO: 2556 - protein, 349 aa, unidentified
  source 1..349: note = Related to SUXO01000014.1; note = Bacteroidales bacterium
MDFKEYKKAYIEQALAFGISTNAIDIAIEYAEHLHNRKLPIIYDQQHFFQLVGYDEAYVMAIVNQPKSFYKEYSIPKRNGDRRIIHEPLPSLKEIQTWILKYILNPGAKIFVSSVAKAYIPKQSVRDNARFHKRQKYVLCLDLKDFFDSISFQQVFSVFRNMGYSKALATLLSNICILNNSLPQGAPTSPMLSNMVFKYYDDKIFDYCKSRNIRYTRYADDLTFSGDFNCKAVVSFIRKVLSKTSFAINDNKTKFVSRGNRQEVTGVVVNEKLQTAAIYRKKIRQEVYYIIKFGVDKHLEAIEWKRPIIEYLHHLLGRINFTLTINKNDSEMRKYYEYIHSVLKEYKEE

SEQ ID NO: 2557 - protein, 327 aa, unidentified
  source 1..327: note = Related to MKRS01000610.1; note = Bacteroidales bacterium 45-6
MELLLNYAQSLNSHNFPIIYDQSHFSKLVGYRYGYILCICNSPDVFYKEWKITKRNGKLRTIHEPLPSLKEIQNWILKEILNTAVNEFVSPVAKAYTPDRNIRDNARFHKNKKIVVCLDIVDFFGTVTYKQVYSIFRQFGYNKSIATLLSNLCILEGSLPQGAPTSPMLSNLIFYHIDTAIFKFCKERKIMYTRYADDLSFSGDFNVGLLISYISNLLSYHGFSINEKKTKVLSRGRSQQITGIVVNEKIQVSRRYRKRIRQEIYHIIKYGLENHLKKIAYPKSSIQYLHHLMGKINFVLLINKSDNEAIRYMEYLKSIYNSYKTLI

SEQ ID NO: 2558 - protein, 343 aa, unidentified
  source 1..343: note = Related to NZ_JAJJWI010000010.1; note = Pontibacter silvestris
MNWVKYQTNFINRASDRGLDEGTINFLLAYAKALYDNELPIIFDKYHLANLVGYKVSYLERATKNTSRFYKTYEVPKKQGGKRIISEPLPSLKHIQKWILVEILNKLKPSKYAKAFIKRRNTKSNAVFHRNKNIVLTIDIKDFFGSIKAPAIIDLFKKLGYTNHLSCLLGDLCTLNGKLPQGASTSPALSNLIFFEVDNKISDYCSSNNIFYSRYADDLTFSGDFNVGKMITFVRECFNEANFTINEEKLRTRRPHQRQEVTGIVVNQKLQAPKDYRRHFRQEVYYIKKYGLQGHLEFIKEKRNNYLLHLIGKGNYIYFLNKNDIYVKESLIFLKELYFKMMR

SEQ ID NO: 2559 - protein, 342 aa, unidentified
  source 1..342: note = Related to JACIGQ010000001.1; note = Rhizobium leguminosarum
MLNFRFSKEYVQLDLFDDFGNEDRGAVVQQYIKCISDNKAKPILDTQHLSKLVGYTEQFLFSVSASPLHFYREYKIAKKNGGVRTLNEPLPTLKAVQKFIAGEILNDVEPHKVAKAFRKNHTLRGNAVIHRRRPFMLKIDIKDFFSNITEHAIYTMFFEIGYTRQVSRLLTGLCTLNNGLPQGAPTSPMLSNLVMREFDHTVFEHCVQNDIFYTRYADDMAFSASDDRVKSLIPFIRSELKKYGLEINQKKTSYSGPGARKYVTGIVVNERLNVLRIDRKNIRQEMYYIRKFGINGHLRKTNNSSPNYVDRLMGRLNFAFFVTKEPHFLEDMRYLKELKKVL

SEQ ID NO: 2560 - protein, 342 aa, unidentified
  source 1..342: note = Related to JACYUZ010000001.1; note = Rhizobium sp.
MLNFRFSEEYIQLDLFHDFGLADRESVVSEYIERISSNRAKPIFDTQHLSHLVGYSEQFLFSVSASPVHFYREYKIAKKSGGLRTLNEPLPTLKAVQKVIVHDIFRDVEPHKAAKAFRKNHTLRGNAVIHRRRPFMLKVDIKDFFSNIDQHAIYTLFYETGYTEQVARLLTGLCTLNGCLPQGAPTSPMLSNLAMRSFDNAVFEHCVQNEIFYTRYADDMTFSAVDERVRNIIPFIRSELKKCRLQINEKKTSFSGTGARKYLTGVVVNERLNILKEDRKNLRQEMYYIRKFGINGHLRKTENHSSNYIDRLAGRLNFAFFITKEAHFQEDMRYLQELKKVL

SEQ ID NO: 2561 - protein, 342 aa, unidentified
  source 1..342: note = Related to NZ_LJIB01000039.1; note = Rhizobium sp.
MLKFQFAQEYVQLDLFSDFGSEDRYEIVQEYIDGIAINNAKPVLDSLHLSKILGLSEYFLHSVSASPENFYREYKVPKKSGGMRIINEPLPTLKLVQKSIVDDLLRNVEPHKAAKAYRKNHTLRGNAVIHRKRPYMLKVDIKDFFPNIDTHSIYQLFFGLGYTAQVARLLTGLCTLNNGLPQGAPTSPLLSNLVMRGFDAAVFGHCIEKEIFYTRYADDMAFSSKAPDLPSLLPFLRQELKKCRLQINDKKTDFAGKGARKFVTGIVVNERLNILKDERRKLRQEMYYIRRFGLNGHLRKTDNDSANYIDRLLGRLNFAYFVTKEAKFQDDMRYIIQLKRVV

SEQ ID NO: 2562 - protein, 345 aa, unidentified
  source 1..345: note = Related to NZ_LSVB01000004.1; note = Brucella anthropi
MSKFKITQSLTHTQLDLFNNSSFLDHEEIVTRYGNNIRSNGAVVIYDTKHLSRIIGYAESLLHAISSSPQHFYRTFEIPKKSGGVRVINEPLPTLKEIQRFIIDYILRGVEPHKSARAFRKNYTLRGAAVIHKSRNYMLKLDIKDFFGSIKSFGVYDIYYNLGYTSQVAGLLSGLCTLDGELPQGAPTSPLISNLFLKDFDEYIFDYCKNNSIFYTRYADDMTFSSNEDTMKHIIGIVRSRLSKHGLKLNQKKTSLSGKGARKFVNGIVVNEKPNILRSERRSLRQTMYYIKNYGIDGHIRVAKIDTPNYLDHLLGKLTFAHFVTKEEVYKNYIDYIRSIKSILK

SEQ ID NO: 2563 - protein, 342 aa, unidentified
  source 1..342: note = Related to JAAXMM010000032.1; note = Agrobacterium sp.
MPDFRFSQEYVQLDLFNDFGSLDRREIVATYVTELTRNKALVLFDVSHFSRLVGFSEGLLHAISAAPFYFYRRFDVPKKSGGLRTICEPFPTLKLIQRFIAEQVIANSEPHKAARAFRQNHSLRGAAVIHKARPYMLTLDIRDFFPTISGFSVYRVFFDLGYTAQIARLLSGLCTLENGLPQGAPTSPALSNLVLRRFDEVIFNECKSRGVFYTRYADDMTFSSREDNLADLIGVVRKELRTDGLKLNSKKTVMAGKGARKYVNGVVVNERPNILREKRRNLRKDLYYIKKYGINGHVRFSNIDIPNYLDHLIGKLTYAHFITKDQKYKEDAAYLYELKKLT

SEQ ID NO: 2564 - protein, 343 aa, unidentified
  source 1..343: note = Related to NZ_VZDO01000003.1; note = Aureimonas leprariae
MSTFAFDKDLQQLDLFDSFKNENREVIVAEYSRIILENGAAVIFDTEHLSRLLGFSQELLFSISAASNKYYREYTVLKRSGGRRVINEPLPTLKMIQRFILAELLDGVRLHKAARGYRKNHTLRGGAIIHRGRPYMLTLDVQDFFPSINQYQVFQALLKLGYTKQISRLITGLCTLHDGLPQGAPTSPLLSNLVLYQADKAIFDHCVVRGLFYTRYADDMTFSSKEDNVVEIIPVVRTQLSNVGLRINPRKTNVSRRGSRKYVNGIVVNVKPNILKTERRSLRQEMFYIKKYGIEGHIRWSKVEAPYYVDKLIGRLTFALFVTKDKRYSQEIRYLSALKKAMQ

SEQ ID NO: 2565 - protein, 343 aa, unidentified
  source 1..343: note = Related to CP015231.1; note = Tritonibacter mobilis
MTPSALNIRFDDGVDENHRELVYLYASRIESKGLTVILSPEHLGHLLQMRLEDIYAISNAPQHFYREYRAKKKSGGTRKISAPLPLLLSIQRWVLKNILEPQAIHPAAKAYLKKSSIKQNARFHRGQRHLFKSDVRDFFGSISSRWVYSHFQSLGYSRAVSMVLTAICCKENALPQGAPTSGYLSNIYMTSFDKAVFSYCTERKFRFTRYADDISISGSGINFSELSAFVNRELRDIDLKMHSGKTRLIRSHQRQKVTGVVVNEKLGPGRDFIRKLRQEYYYISKYGVEEQSRVSGWNNSIAYLNNIHGRIAHAIFLTGHDARLLEMKNAVESLLRKSEYIRG

SEQ ID NO: 2566 - protein, 343 aa, unidentified
  source 1..343: note = Related to NZ_KI421513.1; note = Leisingera caerulea
MNFSDLKIKFDDGVEDGHKDLVHQYISRLESQGLSVILSPEHFGHLLQIRLEHIYAISNSPRHFYREHQAKKKGGGTRKISAPLPLLLFIQRWVLKNILEPQAIHPAAKAYLKKSSIKHNARFHRGQAHLFKSDVKDFFGSISSGWVYNHFLGLGYSRAVSMLLTAICCKENCLPQGAPTSGYLSNIYMTNFDQVVFSHCLKRKFRFTRYADDISISGSEINFKELSTFIDRELRNIDLKMHTGKTRLIRSHQRQKVTGVVVNEKLGPGRDFMRKLRQEYYYISKFGVNEQARVSGWNSSTAYLNNFHGRVTHALFLTGHDEKLSEIKNAVENLLQRSEYILG

SEQ ID NO: 2567 - protein, 339 aa, unidentified
  source 1..339: note = Related to JADCGC010000017.1; note = Roseomonas sp.
MTSSGIKIVFAEAMKPEQSAAVRAYIKHFEEKNLPAILSGEHLSLQLGIKQSTLYAISNSANAFYRTFYVQKKNGGKRQISAPLPLLLATQQWILSKILQSVTVHPAAKAYKKGSSIKENARFHKGQESLFKSDVEDFFGSISQFWVYEFFHSLGYTTAISRLLAGLCCKDGVLPQGAATSGYLSNIYMCVFDDAVFTYCQTNRLRYTRYADDIAISGAGIDFDKTKDIVSTLLENHKLRINLRKTRIQRRNTRQKITGVVVNDRLGPDRQFLRRIRQDLHYIRKFGVHGHARQRGFKSPLFCINNLLGRITHAKFLLGRNTPLEGEKKYLERLLDQIS

SEQ ID NO: 2568 - protein, 339 aa, unidentified
  source 1..339: note = Related to NZ_WWEN01000004.1; note = Thalassobius mangrovi
MSLLSDNFEFGGKIGIAEREAVEKYAQRLIDKGLPVIFSPEHLSHITNIRLEALYAMSNSQESYYRSFDIPKKSGGRRRIDAPLPSLAFLQRWTLDNILNSVPLHASAKAYRKGNSIFDNARFHRKQRVVLKVDVKNFFGSIEEHSAFLIFKGLGYSKRLSKLLSMTASLHGSLPQGAPTSGALANIYMKTFDDAVFNACKESKVRYTRYADDLTFSGSDFDTDAQIRLVDKQLSKIGLSVNARKTRVLLPHVRQDVTGLVVNEKISVPQDYRRRLRQECYFIQKFGIHGHAREVNAANPRVRLEEVIGMLSYVKSIHKNEPYWSDAHSRMLEIRASFF

SEQ ID NO: 2569 - protein, 339 aa, unidentified
  source 1..339: note = Related to JAEPMN010000068.1; note = Shimia sp.
MDFQVERIEFGEKIGLAEREAVNKYAQFLASQSLPVIFSPGHLSYITNMRIESLYAMSNSQESFYRRFEIPKKSGGRRRIDAPLPSLAHIQRWILDNILQGVALHPSAKAYRKGYSTFDNARFHRKQSIVLKVDVKNFFGSIEEHSVFSIFHDLGYSKRLSKLFSMIATLDGVLPQGAPTSGALSNIFMRAFDEKIFADCKRQGIRYTRYADDLTFSGDAIDLREHIRLVDKEFSKVGLTLNSKKTRVLFPHMRQEVTGLVVNDSVSIPQAFRRQLRQECYFIKKFGIHGHAREVNARNPRILLEEVIGKLSYVKAVHAKDPWWAKNHAIMLEVRKNLI

SEQ ID NO: 2570 - protein, 359 aa, unidentified
  source 1..359: note = Related to RZOF01000138.1; note = Mesorhizobium sp.
MQKSELISRNINVIFDGLTEAQIAAVQSYSASLADRDLPTIYSPVHLCQVVGVSPQYLFAVSNDPKRFYRGFSIPKRNGGRRFIQEPLPLLKAVQRWLLANILEKVGVSPFVKSYIKGINLKHNSRFHIGQDFVFKLDLESFFDRILTKDVVEVFYKAGYTRDVSIFLAKICVSNGRLCQGSPTSGAISNIVLLEFDLTLFEFCRSRGFRYTRYSDDITISGKMDAGTNFHEILLFISELASANGHKINKGKSQVLYRHNRQKVTGIVVNEKLTVPRPVRRRFRQELFYFERYGPRGHAERIGEGLDQCVARLIGQASHLLFVRPDDEFVRVKKDLLLRVLRQMDADPQFGFDLGGRPL

SEQ ID NO: 2571 - protein, 354 aa, unidentified
  source 1..354: note = Related to SIPE01000001.1; note = Rhizobium leguminosarum
MLITREIDLVLDENLGVAAKENISAYCGKLSERGLPAILSADHFSLMIGVDGRYIYGVSNNADRYYRVFQLPKRREGFRTICEPLPILKMIQRWILDNILSKIPPAKCVNSYIVGRSIKSNARLHLGQESLIKLDVKDFFGSISSHHVYKLFFDLGYTKAVSVFLSRLCTYKGFLPQGSPTSGSISNLVLRGVDEALLTFCTERKIRYTRYADDMCFSGTNIAAPDLIEFVRKNLGELGLKLNNDKMRILKQSHRQIVTGIVVNKRLAVPRLRRQRLRQEIYYLKKFGFVSHAMNTDDSDPVALLRRLIGECAFLMHIHSKDVVDIRDIEFLKALLREELARQRHWTNGDEDLF

SEQ ID NO: 2572 - protein, 342 aa, unidentified
  source 1..342: note = Related to JAJBAV010000004.1; note = Candidatus Cloacimonetes bacterium
MNWSEYEAAIRRACREIHGIPPDRTRLLLERARRLYDQELPVILDQKNLAWFLGFDISLVMCIANRPHKYYRCFRIPKRNGGFRELHEPLPTLKEMQRVILDLILARLPVDPAAKAYQPGSSVKDNANFHTRQPLLLKLDVSDFFGSLREYQVYQVFHGVGYHPQVATLLAKLTCLNGSLPQGAPTSPTLSNLIFREADQRIFHFCRQANIRYTRYADDLTFSGDFKPGLVIRRVASVIETLGLRLNPEKNRVIRRHRRQEVTGVMVNNGLRAARSRRMHLRQQLYYLSRFGLADQAAKHGTKTHLWINHLLGLAGYIRFLDPSDREAARAIAMLKTLRGST

SEQ ID NO: 2573 - protein, 351 aa, unidentified
  source 1..351: note = Related to NZ_CP090423.1; note = Stenotrophomonas maltophilia
MTAHSLQSLPDFNEYSARFTEALISRDGEDYDPSYLSRCLSYAKGLLERRLPVIFDREHLCALTGYSSRFIESAVGSPHLFYRNFEIPKKSGGFREISEPLPSLKDVQRWIYQNLLLRIPVSVAAKAFVPGKKLRDGVRFHVGQKFVIRVDIADFFPSITRGRVFGLFRSLGYSSEVSGDLASLCCVCDCLPQGGVCSPYLSNIIMRSADRRLLAYARENSLRYTRYADDFTVSGQKFSKSIIEEVMSVIKSEGFTVNQKKTRVSRSGGRQVVLGHVVNGKVNAPREYRRELRKVAYYVDRFGLDNHLAYLNERRSSASDYYLGKASFVLSANHRDRDALDLKRILLDEVE

SEQ ID NO: 2574 - protein, 313 aa, unidentified
  source 1..313: note = Related to NZ_KL638873.1; note = Xanthomonas arboricola
MKYSKKLLDKGLPVIFNREHLCALTGYTPHFVESAVGSPHLFYRHFNVPKKAGGVRLISEPLPSLKDVQRWIYENILLRVQVSVAAKAYVPGRKLRDGARFHVGQKFVVRVDISDFFPSITRKRVFGLFRAMGYSPSVSADLSNLCCSEECLPQGGVCSAYLSNIILRSADARLLKYARARGLRYTRYADDFTISGEAFSPSILNDIQWVIRSEGFEINPKKTAVMRAGGRQMVVGHVVNSRVNAPREYRRGLRQAAHYIEKFGLDNHLARLGETRGSAREYYLGKVSFALSANRSDRDALKLSEVLSVGGSE

SEQ ID NO: 2575 - protein, 354 aa, unidentified
  source 1..354: note = Related to NZ_JVIE01000007.1; note = Stenotrophomonas maltophilia
MNAHSLHALPSFEEYKKLFVERYVMRYGNGSDDGFLERCLEYSKNLLSNGLPVIFSRQHLCALLGYEEGYIDAVANSPHLYYREFEIPKRSGEKRLISEPLPSLKEVQRWIYKEILLRVPVSSAAKAFVPRRKVRDAARFHARQKHVLKIDIADFFPSITRDRVFGIFRLIGYSSEVSSTLARLCCVNESLPQGGVCSAYLSNVVLRSLDGDILKYCRGRSLRYTRYADDFIFSGDSIDYGFVKFISSLIVSHGFNVNPKKTTVMGRACRQVVVGHVVNDRVNAPREYRRRLRQIAYFIAKHGMDSHLSHISENRSGAREHYLGRASFVISANPRDRDALFLRNVLTCRMVDIE

SEQ ID NO: 2576 - protein, 352 aa, unidentified
  source 1..352: note = Related to NZ_CP029551.1; note = Methylobacterium sp.
MISSIRHVKQSSNYETEWRRYAAAFLSAAKAKKLSQDDIDACLQYAKPLTLGGFPVIYDTDHFCGLVGYTPHYVLGAIKSTDRYYRQFSIKKKSGGDRTILEPLPSLKEIQHWILRNVLERVAIHRAAKAFQKGTSIRDNARFHRGQACVLTIDIKDFFPSIGINRVFSVYHRIGYSKQISSLLADLSCFELSLPQGAPTSPYISNLICRSLDERFFAYARSAKLRYTRYADDLTFSGADIGSSFVSNAYEIIREYGFEPNLSKTRLLRQHQKQMVTGVVVNSKLQADRALRRQIRQYAYYIERFGLEGHAAATSVQRRNFERHLMGLAQFVCSLNPYDRDARNLIELLKID

SEQ ID NO: 2577 - protein, 344 aa, unidentified
  source 1..344: note = Related to NZ_CP039546.1; note = Methylorubrum populi
MNADEKETEWRIYSASFFEEALDVGLTANEIEICLAYAQPIFERGLPVIYDNDHLSNLVGYKIKYIQRAAKAPVNFYRNFTISKRSGKPRTISEPLPSLKEIQLWVLRNLLDKMPVHPAAKAFVAGRSIKNNARFHRGQRRVLTVDVKDFFPSISSDRVKAIFVKAGYNSRISSLLANLCCLNGKIPQGSPTSPAISNIVCLDMDEEFFQYARSRKLRYTRYADDMTFSGDVIRHSDIKHIYRIMRSYHFEPNLEKTRLMRPHQRQQITGIIVNNHMQVSREYRRELRQNAYFIGKFGIEEHAVVNEITHIRFRDHLLGRANHALHVNSSDRDAIRLKEALKRF

SEQ ID NO: 2578 - protein, 344 aa, unidentified
  source 1..344: note = Related to JAGQPV010000303.1; note = Planctomycetaceae bacterium
MQDASTAPSFEEYSAIFRSTAGADALQPEYVERCLQYARKHLQDGRAVVYSANHLSSLVGYDISYLYGVANSGGNYYRTFSVPKKSGGKRRISEPLPSLKEIQRWILTYILSPVQVHTHVKSFRMGYGLRANARFHRAQKIVLRLDVLDFFGSIRVKRVADFFLKLGYAKPVATLLAGVCTLNGKLPQGAPTSPALSNLVPWPVDVRLSTFARNEGIRYTRYADDMTFSGEFKPGKVISMASRVLRENGFQLNVKKTNVMGEHQRQLVTGVVVNEKLQVPRGVRRGLRKEVYYIEKFGLTEHVRRMGVSDPKYVSRLRGMAAHILAVNPNDEEAKNALRFLGSL

SEQ ID NO: 2579 - protein, 354 aa, unidentified
  source 1..354: note = Related to NRRE01000008.1; note = Rhodovibrio salinarum
MRTHRDLASSWAAYEAAFIIEARRRGYSDDDVRTCLSYAKKLHLSNLPVIYDQAHFSDRVGYDISYIRRASNDPEHFYRTFNVPKKSGGVRQINEPLPSLKEIQRWILDNILGAMSVNPCAKAFVVGRDVRDNARFHRNQRIVINVDVKDFFPSITHRQIRMIFLKAGYSPEVGELLTQLCCLDGVLPQGAPTSPYISNLVCRPLDERLFGYAKKNGLRYTRYSDDISVSGDMEPAEVLQFVKKVCREHGFKIHPDKIRVLGPGRQKRVTGIVVNKHLQVPRKKRRVLRQSVYYIKKFGLDEHLSKTKNNRRNFLDHLMGQVNYVLFVNPKDREAQDWLRQLREIKNGAIDYRD

SEQ ID NO: 2580 - protein, 354 aa, unidentified
  source 1..354: note = Related to NZ_JACDIT010000005.1; note = Chthonobacter albigriseus
MNSLYTPEYFVKVAEHCSNAGFAADAIEDVLVYAIQIANQGLPIIYDDQHFSQLVGYDLQYIYGVTNDQSKFYKSFTKKMRSGKKREIDQPYPSLMEIQYWILHNILEKIECSPYAKAYIKGRTLKDNARYHVGKNFIVKVDIKNFFPSIKTGSVYKLFYDCGYTKQLATLFSRVLTLNGHLPQGAPTSPAISNLVCRSLDEVLSTIAHDRKLSYTRYADDIAFSANEYPKFLIREIRSCMRDHGFELNETKTRVMRQSGRQQITGIVVNKKMNVSKERRRRIRQELYYIEKYGIEDHIRYINETRKNTIAHLAGSLSYAIWIQPRSAELKKYSKMLATLHKDLEGEDDIQTEQ

SEQ ID NO: 2581 - protein, 347 aa, unidentified
  source 1..347: note = Related to NZ_AP022332.1; note = Methylosinus sp.
MTTLDLPYVTDRYKEIALQCGLSSKDILSIERYAQKLEANGLPVIFDEKHFSALVGYDISLLYAISNDQRKFYRSFNIPKRNGKLRQIDEPLPTLKEIQRYILDNILSNVEISKASKAFSRHSDIKKNARIHIRQPEILKVDIKDFFPSVNISSVYKALYALGYTDSLAMLFAQICCLDKSLPQGAPTSPALANIVCRDLDHDLLKYCTDRNLRYTRYADDITISGERIKKETITEVRFMIKSFKFKLNEEKTSIMRSGSRKVVTGIIVNTRMQAPRETRREFRKNVFFIRKFGVDGHISQIEEDRNNYLRHIIGVGEFILWVDNKNKEVVSDLNFLKRLLKSESVV

SEQ ID NO: 2582 - protein, 373 aa, unidentified
  source 1..373: note = Related to JALLPZ010000001.1; note = Thalassospira xiamenensis
MKRKYRHDWTAYAARFKRAAKSINKDDEYIANCLSYAKKLYEKNLPVVYSQEHFSFLCGYEYNYILSACNSEKYFYRKIVIKKKNGGNRILNEPLPSLKDIQRWVVENILEKVEVHPAAKAYVPKKSIKDNARFHVNQNVVISVDIKDFFPSIHISRVYNIFSSLGYSAAVSKMLAEICCYKNCLPQGAPTSPYLSNIVMHDLDDDLFAYARRNGLRYTRYADDITFSGDIKPSKLIATLYQLITEYGFKLNKQKISVMRRGARQIVTGIVVNQKMQFQRVRRKKLRQDVYYINKYGLNSHCIREGINKRNYLSHLIGVANSILFINPNDKDAQDAYQIIIDLLKDESKLDGQGRLDLRVSVEDSRTESPKTH

SEQ ID NO: 2583 - protein, 332 aa, unidentified
  source 1..332: note = Related to SUWI01000086.1; note = Lentisphaerae bacterium
MISGITVERIAEETGLNRRFLLLLSNNIPDYYRIYRIPKKNGNFRTIEAPASVLKRIQQYILWTILPRQIPCTPEKLAETAEILKGNGISFHRSNLARMLSAATAFEPRSSIKKNAQEHCGKPVVVSLDVKNFFPSLKYDLVRSLFQRIVHEDGVAVMLSKFCTLNGHLPQGAITSPHLSNLLLHDFDIKLRQYCLAHKLAFTRYADDLTFSGDPGNEEITGLIRYVKQELGKLGLRLNHEKIRIQRQGMRQEVTGVVVNAKTSAPREVRRRLRQQMYYLNKHWEREWRKLDEHSLNVLLGQANFIWDMDRDNPEFTEYRRQLLEIKHFFHN

SEQ ID NO: 2584 - protein, 317 aa, unidentified
  source 1..317: note = Related to JAFSTP010000085.1; note = Lentisphaeria bacterium
MNSKFLYLLGNHIPDHYRIYRIPKKNGNFRTIEAPAPILKLIQRYILVRVLPVRLPWGESRLRETEARLRENGIRFRPGEIPRMLSAARAFERGCSIGRNAAAHCGKPIVVSLDVKNFFPSLKYGPVRAIFQELAEDDASAVMLAKFCTLNGHLPQGAVTSPHLSNLLMRDFDAALAEYSLLHGLAYTRYADDLTFSGDPSNEEITELIRRCRSELATLGLRLNRDKIRIQRKGMRQEVTGVVVNAKVSAPRKIRRELRQRMYYLNKHWETEWRKLDEHSLNVLLGKANFIWDLNRNDPEVAEYRRQLLEIRRFFHN

SEQ ID NO: 2585 - protein, 453 aa, unidentified
  source 1..453: note = Related to DNXH01000048.1; note = Lentisphaeria bacterium
MNGDGESLSLTGSCRKGMSGKQMFTRIPCAPLARTSTPIICVISPWNFLGGHTLRCAQVRSAAVNSKSLCRKASEYLFRALFAKFVFSDKTAVSGFLRVFMKQNTFTIQKMAEDLGINVKFLYLLSNRTQEFYKIYRIPKKNGKFRTIEAPCAILKRIQEYILRFVLPDKISLGGTRCTKALQSLRRQDPEADVTRNEITGLMSAATAFEPGTSIKGNAENHCGRPVVIALDVKDFFPSLKYSRVLALFRRYTETENAAVMLAKLCTLYGHLPQGAVTSPHISNLLLHDLDFTLKLYALDHNLEFTRYADDLTFSGNPDNGEISGLIQICRQELRKSGLRLNNDKIRIMRKGMRQEVTGIVVNSKMNAPREDRRHLRQQMYYLNKHWEHEWRKLDEHSLNVLLGKANFIWDLNRENPEIAEYRRQLLEIKRSFQREAKKAICSAPQDSAEQAN

SEQ ID NO: 2586 - protein, 317 aa, unidentified
  source 1..317: note = Related to JAFXSU010000015.1; note = Victivallales bacterium
MKMATFLLTMYCKIPKTLSELTQCLGSTTEFLYWLSNHIQEQYTIFQIPKKNGKTRTIEAPSQLLKKIQRRILSKILFQRAERSAMAFEKRRNIRKNASAHLGAAVVLCMDVKDFFPSLKFSQVTDYLESLGMQRNVSVLVAKICTLQGHLPQGAVTSPHLSNLLLAPLDKAIRNFCKVKKYHFTRYADDLTISGKMNDEDIREAIAVCKKNFMTIGLKLNPDKTHVMRNGNRKMVTGITVNQKLSAPKSLRKRLRQRMYYLNHFWEKDWHRLTEEELNNLLGLVNFVWSIDRENQEFSQYRTQLLEIKRFWNSVPR

SEQ ID NO: 2587 - protein, 314 aa, unidentified
  source 1..314: note = Related to JAFTIQ010000013.1; note = Lentisphaeria bacterium
MINGKLSEKLTSVNMLARKLGLTVKQLFFIVYNLEKFYTVYQIPKKNGKFRTIEAPDPLLKKIQGRILQKLVSRHTSKTATAFEKKRNIIQNAQIHLNQPVIVGLDVKDFFPSLKFELVWKYFRDQNIAREPARLIATLCTFKGHLPQGAVTSPFLANRLLHDFDEVMSQHCRQVKVNYSRYADDITLSGNISDALKEKLISFAREGLYLYGLQLNNEKIRILRRNNRQEVTGIVVNEKLQAPRELRRILRQKIYYLNRFWENDWQKLTENDLDKLLGQVNFVWSIDKTNSEFTEYRKQLLEIKHYFTLSTKEK

SEQ ID NO: 2588 - protein, 328 aa, unidentified
  source 1..328: note = Related to JAFRDO010000027.1; note = Kiritimatiellae bacterium
MGGPLLSCAFSLFFVGGSVMVRFPDGSLSIATVEAIADVLQVSPKFLYYLSNNVGKHYRITKIPKKNGKFRTIEAPDSYLKHIQRMILDNLLPQSVGEIATAFEPGVGLMDNVVQHVGNPVVLALDLKDFFPSLRLHRIVRVLRELDFPRASAVLLAKLCTLNGHLPQGAPTSPHLANLAMRTFDDRLSLLCRQENLAVTRYADDITISGNIDRHCAESLIASCRVMLKEIGLRINYRKLRILRQNARQEVTGVVVNEKPSVPRHIRRELRKKMYYLRRHGVVGYEPVTLEALRSLLGSVMFVNYVDPDNFEFRQYAEELKVRIKECA

SEQ ID NO: 2589 - protein, 306 aa, unidentified
  source 1..306: note = Related to JAFTIA010000086.1; note = Lentisphaeria bacterium
METLPIIRTVDELAELLCTDARLLYAISNETPAWYKCFQIPKNNGSMRNIEAPRPYLKTIQRRIQKKILSCFTVHDCATAFLPGKNIRRNALFHVNKSVVLNCDIKNFFPSLKSRAVFEFFRRRTGYEPDVCMMLSRLCTLYGHLPQGAPSSPMLSNLLMFEIDETICQWCAKHYLSYSRYADDMTFSGEIDVRVQADILQMVKRNLTLLHLKLNIAKTKVYRSNRRQLVTGLVVNEYVGVPREKIREFRTWLYYTELDIINENFYYDSDEIESRLGLLNFYYSINCNENLLRWRDRLLEIRRMYS

SEQ ID NO: 2590 - protein, 330 aa, unidentified
  source 1..330: note = Related to JAGZDB010000161.1; note = unidentified bacterium
MFEKVHWEYSEFLPVLPTVRDLAGCLDADPRLLYRISNHSAEFYTIHTIPKRNGGCRTIEAPHPILKRIQQRILRKILMQVSTHPAATAFEPGRSIRDNAIRHVGRPVVISLDIRNFFPSLKAGVVYAFFRKLGYDVPVAVLLTRLCTLYGHLSQGAPTSPRLSNLLLLPVDCGLAAWIGTKPVVYTRYADDLTLSGALEREDVSEAIGVCRAALARMGLRLNSRKTKVRRRGSRQTVTGLVVNESVRVPRETKRALRQFMYYLDCFGWESCREHFGPGDEMLLDRVIGFVNFMWDMDKTDLVLREWLDRLLLLKLHPEQVPPPAYRAFQ

SEQ ID NO: 2591 - protein, 321 aa, unidentified
  source 1..321: note = Related to NZ_QEKH01000020.1; note = Victivallis vadensis
MDAEETASGLPELPDVEALSELLQIAPKWLYRISNHTPRFYRVYAIPKRNGKFRIIEAPRPLLKRLQRRILTSLLNPVEASPYATAFERGRSIADNARFHLNQPVVLKLDIRNFFPSLKSPPVYRLFFELGHPPPVAALLTRLCCLCGHLPQGAPTSPRLANLLLRPADYRIAAWIGRRPIQFTRYADDITLSGDFGPEHIAEAIQVCRHELGRLGLRLNRGKIRIERRCRRQTVTGLTVNETLHAPRQMIRKLRQEMFYIRKYGWEDRPESELHRLIGIANFIRDVDPGDAACTAHLEKLHAILWNRRQKQLSEQFRRGL

SEQ ID NO: 2592 - protein, 1424 aa, unidentified
  source 1..1424: note = Related to RGCV01000062.1; note = Flavobacteriia bacterium
MKERISPEVLERQVLDASVFEDLFAFLYLLDIESPLDERYYLQHVIPRSDGTKRVLYEPKPVLKALQQKLLQVLYDVLEKPQPYTEYYRFQQKYLLSPCATAYRPKMSVIQNANFHQGNEVVLKVDIHDFFGSIPAAKMKSTWVELLYFCSNRLIQSGLLVHRMKREFVAQVINTLADKIIYITSLNGALPQGSPTSGAIANLYMVQLDRKILHYSVRNRLNYSRYSDDMTFSGEAEDLKTGKILHFLNGLLGRNGLRLKRSKTQVLRKHKRQTVTGIVVNASKNAGRTYQRSVRQSMHYFKKFGKEHALRTHRTLDAFLREITGQVAWILQVQKSNTEFLRYKAELNIISRFHRQGKPVAEAMDYLRNLAQQAEQWKANETVVIGGLEWKKESEVYEGEDMDGIYTFQRRGQKRSFFTRKALEKYVNNHPEWRLPTLHEYERYFDETRYHDRIQLGLTLPSDPRYNGIVNGTEFLHFNRVGAYWTCDLRPRMTLRMAKNRLGRKVLCVAAKNWPFQHHLAKIRCDLSYVRHDHVMDLRVPVNVPGTMEYSSSSDDTQVLLPEEAFSVKLVREIRPNEPMTNFQGMDFALRKLSNSRFSTNFKGLQLTEIPKEVLASWQSSSMLFANNQIEHFDLRNVPPVKLLNLENNRLKGFDFSALHPGLRHLLLKGNPGLKGVEIPWIQLMRQLHELSLDDLPDLVGTMPLESIYLQALGGEVWTILENEQELDALIGQQKPVSHLLVRYRVGIDTLDSRTLFEKLNRIAPKHLYVCFEPQDEGLRRRLDRLKYMTASWEKEIEELDGYIKNLSLRKDIETRVTLFPQHLDNNRIKHLMIDFSWLPNLCFEGDFRIKPDSYHLLHPGIPTLLLPAISQRFHRPTVLMKIIGNKIVPTQHEFPEAVSLDVCYPLAKKHRKIRLSNLHTLVPMHQEHVGDLVLVLSEDAGKQLEQGRIEEVYPRAYELRSGSQFWHDVMAHSKSEKTTFRQRISSIPLLGLSMQFDVYSLSLPIESVPKINRFGVLNLTEVGENNTMTYNDTDLKQFLERSSPSTEFAYLSIFAHKTPAILQLVRDSKRKRNADLPYVIRKNIYATEPLERSQTIDALRAGELLAISLSKPNRRDREIMLAAVEANPFAMAFAHKALKQDAGFILAAMNISLRTLVFLSKDLFKSRNHPNSALQQVLKALMERYNPEDFNFIVGRLSRHINIEKEPVYRFVLEPKPLDSSAVLMSFEQEKKILNNRFCQRSGMYKPIRNYFFKEAERRGFINVNGYFNDIFKALSQNTSVRFLDLSFAGGRTLYALDRLGDIPGLRKLKLTECKFINSLPGLKTLEVLNINRTSNFWSYHDGKTMHQSLPNLKRLEAKYIHISMQEIEDLMVHHPCLEYLAISVTYDDELAEINAIIEKVSAQGKVIEIVLDKSEYIGELPF

SEQ ID NO: 2593 - protein, 1417 aa, unidentified
  source 1..1417: note = Related to VGML01000001.1; note = Bacteroidetes bacterium
MIDQNNQIVQISVNDFLKTDFNVTRLKFNALKLLHELELSEELSEECYIKHVIPKHDGTKRILYEPKPLLKEIQKQLLNLLYTLKKHRDYPVLSRNIKYKYLPTRSSTAYLKGSSVVKNANFHIGKDVVVKLDISNFFNSIPKNKIELFWFDILNLKVKYLIHLGIIEKDETEDKKQLIISGLAKKVLSSTTLNGFLPQGSPTSGYIANSYLVSFDKKMLEFCVNKSLCYSRYSDDITVSGSNSELVSKQVIKFVQHQLYKKSLKLKKSKTKVLKRHKRQTVTGIVVNEKRSAGRAFKRGLRMQMYYLKKFGLDHVSRTHSNINSFLLELAGKVNWVLQVNKVDPEFKRYKGELSIIKRFLALGKTVGDATNYISELENKDFKIKNNSVFIAGLFWRISDDDTQTDYPSIDRKNKSVQLFTEESIELALKNNPGWRLPTMDEFNNFIKETNFEDRRVLGIRYPFDPHFNGLADENGYRYYNRVGLYWTSDLAHLSKERSTKGRIARKAICFLSFDQRIKKKINHNTACYISSKTFSLSVNKKQKFELTNNRSIDYYLNPPLNEDFQAIVGACSIRLVMSEEMTKKPMISKTLWDSIQLSKFSVDLSNLNFEEFSFSLKNVNASSILLYNNNLKHVNLTEIAPVKRIDLRNNKLESIKLNNLPKGVKHIRLEENKDLKLLDIPWKRLLQSSHELTADQLIFERQKSLGEIYLSALGGESWRTVSSDHELNELIDSKNAVEFLKVRFEIGTNKIDSKELFNRLSKLEAIHLFIEFETNHEQINQLIHRLKMSFGSITPLNEHLNSLERDNNHQENIFLKQYVFNASDLKNIHLKSLIIDFSWIPNIKFIGDFHVKPDLYHLLHPGTSFTSLPATSVEFHRPNILVKVLGEKRIGNEQTYLHVTYPFDSIEERHQNIQTIIPKNQIFIDELILVLSNENEKELKKGQIEEHFPKLYAINRYNSKPHASKLTTNLIYSKRVSGFPLLGFALQFDVHKLSVPLESFYKKDKLLFNPERFKREKGPIMDWTEVNFNQKIHSEKKTRLGKENLLSDLDIFSHKKESKPPTIPPSDDRPLNRPYIIKHGVFAKHKLYSASDNSRNKVMTMLASGEIAAKHLPSKLKNDEEVMLIAIKRNPYSMVFASKRLKENPAFLLKACKISARTLVFLPKKLATKQVKSDSIFNQLIDYLLSFLTPAEFHFVIHKLGTHISQSDGEYRYFTCEETALEKSHVISSFESEVFYQESTTRAGMPNIIRKTFLSEATKQGIFNSNGYYNSLELAKQNKENCRYLDLSFSGYHHDLTALESFKNLKTLNLSYTSVNCKLPNIPSLENLFVDNTRNFFSYNTPTLLNPIFPNLKIIYARETGYLSLKEITSLLNLLTKIEIIDLRPYFYINEKEILALQQQLIQQGRTLEIPIKTPK

SEQ ID NO: 2594 - protein, 1231 aa, unidentified
  source 1..1231: note = Related to JAJTDX010000087.1; note = Cryomorphaceae bacterium
MNNSELTHRSFTADFLKSDKIEYTFNALRLIHDLTLPEHFDESYYNKHVIPKSDGSSRVLFEPKPVLKEIQHQLLEFFNSILEQVPRGYRQKDRIRKKYLPSSCATAYRKGKNVVTNANFHIGNEALLKADIENFFDSIDVSEMSSMFMDFLYIKSGYLSLIGILDENWSDIEKAKVRLSLAKKIVTVSSLNGGLPQGSPTSGILANFYLAKFDRKFLNYCIRHKLNYSRYSDDLTVSGNQKDLAPGALLHQMNKLLKPLKLRLKKSKTKILRRNKRQVVTGIVLNEKRSAGRLLKRSLRQEIYYLKKFGESHVSKHSSSTKKYLRELSGKVSWVLQVQSADNEFRRYSGELQIISRMVRSGKTLADAASYIQFLENKAKELKGPEPLMVCGLEWRKNDLFYARDLYNLFEREMYAGRVGGNKEEPGLVFTRRGVEKKLYTEEMMLRVVSRLIKWRLPTSEDFADYIRETFYEDRALLGLRVPSDPQYNGIAENHGLCFYNKMGAYWTADMVHVKDPKSSVRAKVGRGVFYVKSRHWSTKNRLDLFGGEWMSKTTGIKPVNAVYYFLDQRFHKNLATNVPIKDRPWVESTQLACSIRLVRTQSIEWEAHHISDKFWQSVSSTRFSSDLSGKHISSVPTTYLKNWNSSSLLLARNKLDQFDLTACPPVKRIDLSGNKLKHFDFSSLPKGLRHLLIDDMDALEGAKLPWDKLFSSLHELTIKNPHDEPQLTDISELYALGFGYSDCVEVTSDEELQALIQNGEKIKFLKVKVLLGSGAISNEGLFGLINQIAPLTVLITFLCLDQGLQQTLDRLKMASGNIQPYMEELEAYLQTVYSTSLEEYNWLHKPLVLNPDQLNSNRIRHLILDLSWFPNIVFNGDFGIKPDLYHILHPGVDSLQLPSTSTEFHRPGILMKILADSYQPVPQEYPFIVTYQPLNRWNKRVAKKHMLTLLPANQNHVSEIVIVVAGKSAKEFQIGRINVNFPRAAHVMFEKEFLFYFTREKYSFTVSRKTFEFPLLGYSRRFDVHKLNFPPESIFRNGRWSSLISDVLEQDSEHESAVHWLDFYSQNMGYFEGGEPNNNVPHKSFNNNFEFAIFPAFKDPDFSRLNSRNLEKFGFPYSVKDGVRFSGVDYRSLSREELLTGLNSGELNPKYLPSKYKKDAELMLAAIRFNSFAFLYAHKGLKGDSDFVIKAMQISLRVLVFLTKDTFKNRLHPNGLLQQIFSILSAKFSP

SEQ ID NO: 2595 - protein, 1452 aa, unidentified
  source 1..1452: note = Related to JAJTDQ010000005.1; note = Cryomorphaceae bacterium
MRVRRVSQVSLVNYQDLGKEVLSFDNIPNLPTFNALCLVHQLEIDGPLTEEFYTKHTIKKQNGKLRILHEPKPVLKEVQGQLLQFIYTNENKEWKNRRYPRKVNKFILRDCAVAYRPGISVVRNANFHVANELVMKLDIKDFFGSVKTDKLLPFWLNLLSTKSHYLYQLGILARELSQEEKLVELTKLSKKLVNVISLNGFLPQGSPTSGILANHYLVRFDKFFLDYCIRNGLNYSRYSDDITVSGSKDKLKPQAVLGTINRLIKLEQLQLNRTKTRVLRKHQRQIVTGVVVNEKKSVPKTLKRGLRQQMYYLKKFGEEHIEKLKTTRPKYLQKIKGEISWVLSVEKANAEFHRYFGELSIIIRFCEANKKITEAVDYIESVEALAAKLNTQEFTIIGDVEWKKEDELAVEQSGTATEGLVQLSKWGKNRTLYTEASMIEIVSKLNDGWRLPSTDEFELYLKETLYEDRQRLGLRIPMDPQYNGFFNSITHARAFNKVAAYWTSSMTHLPHMSQSNTRLGRNVFLFLPKKGGYKASLNRRFKKCSRTSGYIPVNDFLSLSGTVSDGDGHFYPRLFSLYRKTQTYSSAFSLRLVRSLNIEAKLKTIDLSVHFWNSVSTAKHSTDLGNLGIASVPSNVLINWQSSSILLANNKLTSIDLEQLAPVNRIDLSNNELENFDVNLLPSSVKHLILHQNTKLVDMVVPIKKLIPRLHEFTLDAPELPTLDFSELYENALELMFYRCDSDEELDQLIQQQITVVALQVTVQIGSNKIESTRLFERLNQVKGLETLSILFEPFHEDLRNRLTILKNAEVFHLSSLLELNEFVGLDQSQSELFVDPIDAELLSKKHVFYPEHLQSNCIHSLIIDFSWLPNLVFNGNFNVKPEKYHLLHPGIQVTDLPATSESYHRPNLLLKIIGVRGACPSDYFSNGQFQNLTIFYPLNSLLFEQETNVLFDILPTKQFHVENFVLVCANNEKRSVRRGNVLSLFPGSKAFKGVAQSQGRSYNKIVGLGKSKTFFNFPLVGYSLKYDVYKLSVPFRTMFRVVSEYRNSLVLNEETGLLKRMSEGRTEFSVFHSSTKYDLSQMNQLNRISIFPMLYDDAAKRLQVLPSILRKKYVIKRKQHANDPMIGSLNREDLLANLKQGAIDPFKLSRRMFKDEEIMLAAIYGNPFSFILAHPSLKLNSSFVLAALERSLRILVFLNQTIREEKRRKNAVLPAVANYLTEKYAAQDLYYILNQIYRRVSYDTKGMYTFVHEGNEHSKLSDLQSIEQELFTFFLGNRAGMSVKYYDYFVKYAIEKKYFNANGFYMSLNISDEAALDCVCLDLSYLKLSQPLTLPSMPNLKTLKLSFTRFFNIANVPLFPSCEELYFDGLNASNLGDINIFCSKFPKLKKLYARCSNFLMPEHFKTIIEHCLELNFIDVSHFNEFDSMGKELRELCKKLDRTIEIREDIKK

SEQ ID NO: 2596 - protein, 319 aa, unidentified
  source 1..319: note = Related to DNNR01000174.1; note = Spirochaetia bacterium
MIRLISPVPQINSLLDLTVVLKTQVPIINEILRNVKNEYNCFSIYKRNGKKRNIFAPNPLLKDIQKNILTKILDKCRISRYAYGFKKNYSIIDNARMHIGSKKLVKMDIKDFFPSIRHNRILRIFMEIGYSRNISLYLTKLCCLDNKLPQGAPTSPALSNIFFKDIDNEIIGFSICRNIIYTRYADDLAFSGNIHPHSIFDKISXLQRYKLKVNQKKCVLRRPYQQQKVTGIIVNEKLNTQKKYRKKIRQEMYYIKKFGLRAHCQNINNKILRKKYLMGLYGRINFVLRVNPNLQEFSEYKQYLLSLYDLNHYDLLRVG

SEQ ID NO: 2597 - protein, 408 aa, unidentified
  source 1..408: note = Related to QTRC01000029.1; note = Burkholderia cepacia
MGTYCSPTTRAQVRAQLVATLWPADKFFIRENLDQNIKASFNVVGKAAPKMTANSEELLRLVGATYKSQKKISQYKNYINTLTNRGLPVIFSFRHLADVLGVAPATLHTMSFRTDLYYKRFDIPKRSGGIRKISAPHETLAAIQRWILENIISRAYQIISPSVVGYVKNKSIKDHVTVHAQSKQLVKFDLKDFFPSISVENVKHIFSEIGYSHSVSRTLAALVTLEGGLPQGASTSPAISNVFMQSFDNAMTTFCDEKCFLYTRYADDIVVSGESGVTESLFDLKAKFSEFGLTLNHGKTRVYADLQRVKFVTGLILCDGNVRLPKSMRRRIRVQCHLFLTQLERMTGLGPTEDNVSVPSSWRSRERVFDPTFPERVLGKLNYWLFIEPDNAYANRMKASILERLEAL

SEQ ID NO: 2598 - protein, 358 aa, unidentified
  source 1..358: note = Related to NZ_UGHR01000001.1; note = Iodobacter fluviatilis
MLSNADLLELVKAKYKTEKKINLYAEYISKLEERSVPVIFSFYHFSDILGISPKTLRAMSFDTHLFYKSFEIPKRSGGIRNIYAPYPSLESVQRWILTNILEKAFCDFLPMVVGYQKNKSIKDHVSPHASSECILKFDLKNFFPSILFDHVYLIFKNIGYCHSVSKILSSLVTFNGSLPQGASTSPCLSNIYMKIFDAELTLYCEQKGFFCTRYADDIAVSGGVELINCLKSIKKLFNDNGLSLNHAKTKVYDRAKEVRFLTGLVVNKGVVRIPKEMRRRIRAQCHLFIKEIDCLVSNLPRPEYKLPSESWKNKELVFDPIFPERILGKLNFWLFIEPDDKYALSMKKMIEEKLNEIV

SEQ ID NO: 2599 - protein, 350 aa, unidentified
  source 1..350: note = Related to NZ_JAJAVF010000002.1; note = Methylobacillus methanolivorans
MLEINEEIYEHLSSHMELDQRDDLLKLIQKFDDMQIPAIITFDIFARTVNINKKSLAAMCYGAEKFYRTFKIPKRSGGMRQIDSPFPSLSLVQKWISNNILEKLDIDNESACAYIKEKSIKNHVEKHIDSAFILKIDLQDYYPTISTRDIIYTFSEIGYPVNISTSIAHILSLNGGLPQGAPSSPLLSNIITLGLDVKIKEYCQKNNFLYSRYADDLAISGENISEDNILEIYRLISSEGFIVNTSKSKLYTPKQPVRHLTGLIINNGKIRIPKQTRKMVRQKLFYIRNYYLSDLESSSNHNLFSLHDPLLLERVLGYLNFWLWIEPDSEFATVSIQEIKSIKTKLLESI

SEQ ID NO: 2600 - protein, 342 aa, unidentified
  source 1..342: note = Related to JAAXXU010000024.1; note = Geobacteraceae bacterium
MNWEEYKSKFQDQAIIVGLPLGDVEECLSYAFGLYERGLPVIYDQAHLSYLVGYDVKFILKASNSNGPFYRTYEIPKRNGGLRIIDEPLPTLKSIQRWILDEILSQVEISEHAHAFAKNCSIVKNARPHLASKKILSLDIENFFGTIDFPRVYSLFTRLGYNSVVATTLSHLVTIRGVLPQGAPTSPAISNIVTLKMDRRFSGYAKKLKLEYTRYADDITFSGEFTSGTVISFARRVVEEEGFKLNEAKTRSMGRHQAQEITGIITNVKLQVPRQTRRKLRQIAYHISTYGLDDHLRMTGELRVNYISHILGLASHVLHANPQDKDAMFLKSVVCVNQTDSF

SEQ ID NO: 2601 - protein, 363 aa, unidentified
  source 1..363: note = Related to JAGBVG010000074.1; note = Alistipes sp.
MDFPRDSFIKEINSARPEYKKAVLDYADNLLSKNLPVIFSLNHFAELFGIDINELRFMLNNIDEFYAYYLIKKKHGGKRRIVSPYRNLKRIQEWILHEILDKIQVHPQCKGFVRGSSTLQNAKPHIGQQYIRKFDLKDFFESITIDRIYGIFHSIGYSPAVSYDLATICTLKLSDYKYVSMSRLQKNWFGYLYSKEKPVLAQGAPTSPALANIACRRLDARFWKYALSNNVQYTRYADDLTFSSEQIRSLPNTAFVNKVIQEEGLTLNYSKTGTYGRCSRQMVTGILIDGEKPRVPQKFKRQIYRHLHFCKKFGAKNHFEHIMPQHTNARQWLYGKIMYVYSIEPEEAKKMLKLAESLEWGIM

SEQ ID NO: 2602 - protein, 363 aa, unidentified
  source 1..363: note = Related to CZAO01000003.1; note = Bacteroides uniformis
MDFSRDSLLKELENTNVEYKKVIIEYTDNLLKKDLPVIYSLNHFAGILGLDLSELKTIIHNIDGYYAYYLIKKKHGGKRRIVTPYRNLKMIQTWILHEILNKIPVHSQCKGFVKGSNTLQNAKPHISKQYIRNFDLKDFFESITIDRVYGVFLSLGYSTAVSFDLASLCTLKISDYKFENLSRYKKNYFRYLHVKPQAVLAQGAPTSPALANLICRHLDERFWKFSLSRGIQYTRYADDLTFSSNQLELLPNTSFVNKIVNEEGLQLNYQKIGTYGKSSRQMVTGILINGESPKLPQKFKRQIYRHLHFCKKFGTYSHFNHIMPNYAHARQWLYGKIMYVNSIEPDEAKKMLSIANSLDWGLL

SEQ ID NO: 2603 - protein, 321 aa, unidentified
  source 1..321: note = Related to NZ_LR134384.1; note = Prevotella oris
MAGIVSVEYSELISIKDHIDGYYAYFTIKKKHSSKRRRIVVPYQNLKCIQRWILHEILDKIPVHPQSKGFVKGGSTFQNASPHVGMSFIRKFDFKDFFESITVQRVYGIFLEIGYSPAVSHDLATLCTLKLKEEKYQSLRGYKQSCFRYLYNKPKAVLAQGAPTSPALANLICRGLDSRLAKFADLNGIHYTRYADDLTFSANELEKLPTQSFLKKIVEEESLKLNYSKTGTYGPESRQMVTGILIDGEKPRVPQKFKRQIYRHLHFCEKYGTQAHFDHVMPGYSHARQWLYGKILYVYSIEPEIAKDMIAKANALDWGLL

SEQ ID NO: 2604 - protein, 364 aa, unidentified
  source 1..364: note = Related to JAFBIU010000027.1; note = Parabacteroides distasonis
MEFPRDSFIQQLNGCTPEYRSAIIQYTDNLLAKKLPVIFSLKHFAGIVGMDEGEIRRILDHTDGYYAYYTIQKKHSKKRRRIVVPYQNLKRIQRWILQEILDKVAVHRQAKGFVKGGNTLQNALPHLGKKYLRKFDFKDFFESISAERVYGLFYELGYSPAVSHDLAALCTLKLSDYKYISLKGYKQRCFKYLYDMNKAVLAQGAPTSPAIANLICRGLDGRFAKYADLNGIQYTRYADDLTFSADSLDLLPSFGFVNKVVREEALKLNYSKTGTYGPESRQMVTGILINGVKPRVPQNFKRQIYRHLHFCEKYGAQEHFSHVMPGYSHARQWLYGKILYVYAIEPEVGKDMLVKANSLDWGLI

SEQ ID NO: 2605 - protein, 363 aa, unidentified
  source 1..363: note = Related to JAGHRT010000012.1; note = Bacteroidales bacterium
MEFPRDSFLSLIKDSPDEYKKATTEYADRLLSKGLPVIFSLKHLGVLLNVEYRDMCMLVHFPDGYYAYFLIKKKKGGYRRIVVPYDNLKHIQRWILHNILSKIPVHKQCVGFMKGKNTLDNAKAHVGKKYIRKFDFKNFFESINARQVYYVFRNVGYSPSVSRCLASLCTLKIEDNKYDYLPPYKKIWFKDLHDTTIAVLPQGAPTSPALANIICNNLDKRFFSYAFKKNLTYTRYADDVTFSCDDPSLLPNVSFVKKVVESEGLSLNEKKTGTYGQDSRQMVTGILIDGEKAHVPQKFKREIYRHLHFCKKYGTHEHFRHIAPDKSNPRAWIYGKIHYVNAIEPEEAKKMFALADELDWGIL

SEQ ID NO: 2606 - protein, 367 aa, unidentified
  source 1..367: note = Related to JAAVFK010000042.1; note = Bacteroidales bacterium
MTMEFPRNDFITKAKKAGHSADFIKATLRYADSLDEKGLPVIFDRNHLAFLLMMDIQELLCFVRESSCFYKYFAIKKKRGGLRRIIAPYSNLRKIQVWIKECILDKIEQPYYVTAFAKNRNTLKNARIHEDKKYILKFDIADFFESICFKQVNSAFCNMGYLPEVSSCLARLCTSKIDEYKYSQLEEQKDIQALFDDLKTKNEAFLIQGAPTSPALANIVCYRMDRRIIGLSKGIKFNYSRYADDMTFSADRLSDLPKVGMIRRIVESEGFHLNDQKTQLLHVGKRQIVTGLLVDGHVRVPGRYKKDIWRHIHFCLKYGGRDHFNRIAPGLAYGKEWIEGRIRYVHSVEPDVAKKMWVEFEKIDWGY

SEQ ID NO: 2607 - protein, 365 aa, unidentified
  source 1..365: note = Related to JAFQIH010000031.1; note = Alistipes sp.
MGFPRNDYLTAAKDKKHSDEFISETLSYADGLDSKGLPVIFDQQHLSYLLCMEHRNLRQLVKSASSYYKYFAIKKRRGGLRRIMSPYSELRDVQIWIKENILDKIELPNCVKAFVKGRNIMENAKMHEGRKYILKVDITNFFESIGVRQVYVAFRKMGYDRSVAAWLANLCTAKIEDYKYEQLEDQEEIQKLFNDLYHKSEPFLVQGAPTSPGLANIICNRMDKRMMGLANKHGFTYSRYADDMTFSADKKDRLPKVSMIRKIVETEGFHLNEEKIELLHEGNRQIVTGLLVDNHVRVPGRYKKDIKRHIHFCLKYGGREHFHRIAPGKAFGKEWLAGRIRYIHSVEPETAKKLWAEFERIDWGY

SEQ ID NO: 2608 - protein, 365 aa, unidentified
  source 1..365: note = Related to SUYB01000005.1; note = Bacteroidaceae bacterium
MGFPRNDFITEATLQGRSQQFITEALRYADVLDGKGLPVIFDTSHLAFMLNMSHRDLVHIAFMASVFYKYFAIKKRSGGYRRIMAPYMHLRQIQVWINKNILSKVQQPEYVTAFVKGRNTQMNAKMHENRAYVLKVDLSNFFESINVRRVCAAFMWMGYESSVASCLAKLCTAKIDDYKYDMLEEQPEIQTLFDELMQRHEPFLIQGAPTSPALANIVCGRLDKRMKRLSQEMGFNYSRYADDMTFSADDRAMLPKIRLIRKIVKEEGFTLNEKKTELVHQGNKQMVTGLLVDGRVRVPGSYKRDIMRHIHFCQKYGGRGHFDRVMHGKAYGREWLEGRIRYVYSVEPEAAKKMWAEFEKIDWGY

SEQ ID NO: 2609 - protein, 362 aa, Flavobacterium sp.
  source 1..362: note = Related to BJSX01000096.1; note = Flavobacterium psychrophilum
MNFPRNLFIENANAEKRSAEYLTKTLNYIDRLSAQNLPVIFSTKHLAQLLNIEYHELNNIIENRTYFYTYYLIKKRTKGHRRIIAPYSNISEVQNWIKNNILDNLTTNINSTAYQKGNSISNNAKIHENNQVIFNIDLENFFETITERRIYGVFKSIGYTKNVAIDLAKICTTIISQEKFDDLNDDVKTHFEDYIKLNECVLPQGACTSPTLSNLICRKLDIRLSKLANKLGIQYSRYADDITFSGSLEKLPNIKLLKKIIEEEKFKVNDNKVKLLKKGNRQMVTGLLVDGKVRVPQKYKKEIFRHLRFCEKFGGFTHFNKINPEKSFRKEWLHGKICFVHSVEPEIAKIMFQKLKDINWEK

SEQ ID NO: 2610 - protein, 362 aa, unidentified
  source 1..362: note = Related to JAGPFU010000113.1; note = Paludibacteraceae bacterium
MDFPRNLYIETANNEGHSPEFLTSTLGYIDNLTSKNLPVIFSLKHFSLLIGMELSDVIKIIHNRNYYYSFYLIKKKKGGYRRIVAPFKKLKLMQSWIKENILDKLEVSQHATGFIKGRSILNNAKSHENNDVILNLDLSNFFETIVERRVYGIFSSLGYSKNLAVEFAKICTAQMPKEKYDEIDPEKQEYFNKLYRLKESVLVQGAPTSPTLSNLICRRLDLRLSMLANKLGLIYSRYADDITFSGKASNLPSIELLKKIIEDENFEINWEKVGKYKKGQRQMVTGLLIDGKVRVPKSFKKEIYRHLHFCSKYGAFSHFQRICPDKAYRKEWLLGKIYFVYAIEPEEAKKMLKIANAINWEI

SEQ ID NO: 2611 - protein, 362 aa, Flavobacterium sp.
  source 1..362: note = Related to NZ_CP016907.1; note = Flavobacterium anhuiense
MDFPRNIYIEAAKNEGHTSTFLENTLSYIDNLRSKNLPVIFSLKHFSILIGMELSDVIKIIQNRNNYYSYYLIKKKKGGLRRIVAPYKDLKFMQSWIKENILDNLEVHQLATGFIKKKSILNNAKNHENSDVILNLDLRNFFETINEKRVYGIFSSLGYSANLCVEFAKICTAQIPEDKYEIMSSEEQEYFEELYNLKESVLVQGAPTSPILSNLVCRRLDLRLSKLANKLVVNYSRYADDITFSGDRNNLPNIGILKKIIEDENLKINWDKVGKYKRGQRQIVTGLLIDGKVRVPKKFKKEIYRHLHFCSKYGAYSHFKRICPEKSYGKEWLLGKIYFVYSIEPEEAKKMLKIANSINWEI

SEQ ID NO: 2612 - protein, 362 aa, Flavobacterium sp.
  source 1..362: note = Related to JAEUTX010000024.1; note = Flavobacterium lindanitolerans
MNFPRNTYLELANTSGKSPEFIESTLNYADNLIHYNLPVIFSLKHFSQIIGVDFHQLLNVIENRGHYYSYYLIKKRKGGYRRIIAPHKNIRYLQDWIKINILDKVKIHSSATGFTKGKSILDNAKSHLDSEVLLNIDLENFFESITEKRIYGVFKWLGYHKNLAIEFAKICTVKMPEEKFDNLNDISQEYFFDYYLLKEAVLVQGAPTSPSLSNIICIKLDNRFNKLANKRGISYSRYADDITFSGNKDSLPSYNLVKKIIESENLKINWTKVGRYKKGQKQVVTGLLVNENIRVPKKFKKEVLRHLFFCEKYGAASHFNRIAPDKSFRKEWLIGKILYINSIEPEVAKSMFERIKKISWEI

SEQ ID NO: 2613 - protein, 362 aa, unidentified
  source 1..362: note = Related to AP023049.1; note = Alistipes indistinctus
MNFPRNLYKQEAIRLKRSAPFITSTLNYIDNLISCNLPVIFSRQHLAILTGMSRYDMDKILENREYYYKYYLIKKKRGGFRRIIAPYKQLKELQRWIKENIIDQVDINQFATGFVKDKSIYHNAKIHEDANVILNIDLKNFFESITEKRVYGLFKSLGYAHNLAVDLAKICTSPICDEKLDELDESALPYFQDIQMQFESILIQGSPSSPAISNLICRRLDRRLSKLANSTGANYSRYADDITFSGSEDNIPKVSLIKRIIEGEGFSINWEKVKRHKKGQRQIVTGLLVDNEIRVPKKYKKDIYRHLHFCEKWGSRSHFEKINPGKGYGKQWLLGRIMYVNSIEPTEAKKMMALVKQIDWDR

SEQ ID NO: 2614 - protein, 350 aa, unidentified
  source 1..350: note = Related to PDLQ01000082.1; note = Lewinellaceae bacterium SD302
MAFLRSLFINEAKKKGRSEEFLKTTLEYADFLDGKGLPVIFSPLHFSLLVQTDYHYLKHLISVRSDFYANYYIRKRRGGKRKISVPFVPLRIVQKYINDFILNKVDVHPKAFAFVRNKSIVDNAKVHVNQEWILNIDIKDFFTSIGVDKVYTTFRSLGYVDNLCYDFAKLCTAKLEAKSKREFLPQGAPTSPNLSNIIMRNVDRRFENFSIKNDICYSRYADDITFSGKKSKLPKISFLRKVFKEEGFQLNEKKTQYYGPNSNRRFVTGLIVKDDVKIPNRFINSTSRQIYMCEKHGVDNHIDWLKKNHGITGNYYYEWLMGKIAFINMVEPSEAKFLYDRVNRIDWGLK

SEQ ID NO: 2615 - protein, 364 aa, unidentified
  source 1..364: note = Related to NZ_FNBN01000017.1; note = Chitinophaga filiformis
MSSPRNLIIQEAEETHHSKEYLNDILAYYDKLYNQGLPVIYSIHHLCLLMGDLDKKVPKIITSRNSNYATFKIKKRSGGKREISAPFVPLRNIQQWIYQNILSKVPIHPSAYGFVKHKSIMDNAKVHVNQDFILNIDLLDFFTSIPEKRVYGIFKSLGYHPNLAVYLAKACTKNLVKEIDIEVLDWLNQAPFHQNNSVLPQGAPTSPQLSNLVCRRLDKRLNNYAVKNGCKYSRYADDITFSGSEVNNIKLGVIFRIINDEQFNVNLDKVKFFHKSSNRKIITGLIVSDKIRIPKKFKREIARHLHFTTMNGTQNHIQHLRQYHNFDKVNYRDWLYGKICYIKMIEPDFGLKLMTKFKSIDWGI

SEQ ID NO: 2616 - protein, 364 aa, unidentified
  source 1..364: note = Related to PPEG02000004.1; note = Chryseobacterium viscerum
MTFNKDLFIKVSRLRNHSNEFIKETVDYANNLLEKDLPVIFSLKHFSLLANVDYDELVKIINIRSSLYKFYQIKKKNGKGFRQIVVPYNNLRCIQDYIKTEILDKVQIHDNATGFVKGKSIYDNAKKHSNQQEILNIDLFKFFDSITERRIYGIFKSLGYAKNLALDFAKLTTVALPEEYLSSFKFDERRLYDEIVRKGECVLPQGAPTSPILSNLITRRLDLRMSSLADKLKVNYSRYADDLTFSGNYGTVPTFTLLDKIINDEGFRINWSKAKISKKGRLQMVTGLTVSNDIHVHRKFKKEVKKHIYGCLNFGVNNHLAHIQKDDIGYYKEWLAGKIYFIYSVEPDYAKKLLDDYNKIIWPL

SEQ ID NO: 2617 - protein, 364 aa, unidentified
  source 1..364: note = Related to JAAALB010000001.1; note = Cellulophaga sp.
MPFSQDEYIATAKSHGHSQEFIDITVAYAQNLVAKNLPVIFTTEHLSSILDMPILELKTIINHRSSFYKFYQIKKRNGNGFRQIVSPYNNLRVIQQYINEEILSKIPLHESATGFTKGKSILNNAVPHKNKKAILNLDLLKFFDSICERRVYGIFKSLGYAKNLSIDLAKLTTVELPEDYLKTFEEKELKSYRELVPKDSCVLPQGAPTSPTLSNIILRRLDFRLSKLAEKLKVDYSRYADDITFSGDLENLPKIKLLRSIIRDEGLNINWKKVGIYKKGRKQLVTGLTVSNDVHIHRDFKKEVKKHIYACCNFGVETHLRFMELENTHLYKEWLLGKIYYINSIEPETAKKMMNDFNKIVWTI

SEQ ID NO: 2618 - protein, 364 aa, unidentified
  source 1..364: note = Related to JALKBC010000033.1; note = Arenibacter sp.
MAFPFSEKSTSEPVNHSDEFLTDINNYGDNLKKNKLPVIYTLYHLCQMAEVPVKEILRVCESTRIEHYKRFKIRKKRGGFRVIQTPSDSLKYLQRWILVNILNELDSHERCFGFEKKSSILKNASVHLNQPAILKLDLQRFYDSINEKRIYGVIQSFGYHSNLSVYMAKLLTVLPNDYFFESFKKTESNLKNKLQKLNQGVLSQGAPTSPKISNLVCRRLDQRMYELAIKNGLNYSRYADDITFSGNIEVLRKVKKAAYYIINDEKFFVNYGKTKFIKAGGKFLVTGLNIENGSVTVPKKKKMEIEHHLYHCLNNGVINHLKTSKMPQRNFKDWLLGNIAFVHSIEKNVAKVYFEQFNKINWPI

SEQ ID NO: 2619 - protein, 351 aa, unidentified
  source 1..351: note = Related to NZ_LXTT01000008.1; note = Muricauda sp.
MDHSQEFLSDIKEYRERLDEKGLPLVFSIHHLCLLAGVSVTEILEICKSDRIRYYKRFKLKKKRGGFRVIQTPENTLKFLHRWILKNILNRVESHEKCFGFDKESSIVKNASAHLGQPAILKIDLQRFYDSINEKRIYGVILSFGYHPNLAVYMAKLLTVRPDSYFLSTFKKKESSLKDKLEMLNEGVLSQGAPTSPKLANLVCRRLDERLNKLALKNQLNYSRYADDITFSGNLVQLEKIKKTVYFIVRDENFYVNYSKTRFIKSGGNFFVTGLSIKDGVVKVPGKKKKEIEHHLYHCLKNGVINHLKSAGVSQRNFKDWLLGNIAFVHAVEKDVAKDYFEQFNKINWPI

SEQ ID NO: 2620 - protein, 365 aa, unidentified
  source 1..365: note = Related to NZ_FNQK01000016.1; note = Bizionia paragorgiae
MTYPFYHIKRNQEPIVHSSEFNQDIKIYSDLLAKKGLPVIYSVPHLCLLAGVHIERILTITKSNRIESYKRFKLKKKRGGFRVIQTPNDELKYLQRWILKNILEKVPSHPSCKGFDKNTSIKHNADTHLKSEALLKLDLLRFYDSINERRIFGIFKSLGYHPNLAVSLAKICTIVPDEMFISSFRKKETELKEYIVSKNEGILAQGSPTSPKLSNLITINLDKRLAGLANKNGLNYSRYADDLTFSGNFKQLQKVKKVVYRIIREESLFPNYSKTKFIKLGGKFLVTGLNIQNNVSTVPKKKKKEIEHHLFHCIENGVENHIKTAKINNRNFKDWLYGNICFVFSIEEKKGIQYFKEFEKIQWPI

SEQ ID NO: 2621 - protein, 360 aa, unidentified
  source 1..360: note = Related to NZ_WNKF01000001.1; note = Cyclobacterium roseum
MTSPLNKTLENHSAEYQNEIKAYQHVLEKNGLPVIYSLNHLCLMAGVNLEHIKNCCISNRQENYKRFKLKKKRGGFRVIQTPQDELKYLQRWILENILNKKNSHNACKGFDPDTSIKLNAEKHLKQEGILKIDLLRFYDSINEKRVYGLFKSLGYHPNLSVSLAKICTIVPDNTFLSSFKQKEQHLKQKIKQDGLGVVPQGAPSSPKISNLITISLDNRLQNLADKHNLNYTRYADDLTFSGTIETLSKIKKVVYRIIREENLYPNYSKTKILKRGNPFFVTGLSVHNDTVTVPKKKKLEIEHHLHHCIKNGVQNHLTTSKITNRNFKDWLLGNIAFVNGVEKELGKKYFKQFNEIQWPI

SEQ ID NO: 2622 - protein, 364 aa, unidentified
  source 1..364: note = Related to MENU01000192.1; note = Bacteroidetes bacterium GWE2_29_8
MTSPLDNISEETPPIHSVEFLADIMAYDLKLNSKNLPVIYSLQHLCLLAGVNIKNITKVCNSTRISEYKRFKLRKKRGGFRVIQTPTDELKYLQKWILVNILEKVPSHSSCKGFDKTLSIKLNAEVHLNKESILKIDLLRFYDSINEKRIYGVFKYIGYHPDLAVSLAKICTIVPDNKFLSSFKKKELDLKCIIIKKTEGLLPQGAPSSPKLSNLISISLDNRLSKLALKNELGYSRYADDLTFSGSLETLKKVKSTIYRIVEDENLFVNYSKTKLLIKGNPFFVTGLSVNNDHVTIPKKRKIDIEHHLFHCIKNGVEAHITRCEIKNKNFKDWLLGNIAFVYSVEKELGEKYFTDFNKIQWPI

SEQ ID NO: 2623 - protein, 367 aa, Flavobacterium sp.
  source 1..367: note = Related to NZ_CP030261.1; note = Flavobacterium fluviale
MTIPSIIKNSIPKEIPAPPSPEFLNDIAQYRAHLIDQGLPVIYSVHHLGLISKFNINNMIHLCNMPRDGFYKRFKMKKKKGGYRVIQTPSSELKYLQRWILKNILENRPSHECCKGFDLKASIKNNAESHLNKEAILKIDFLRFFDSINEKQIYRIFKGMGYHGNVAFALAKICSVVPDKMFFKSFKKNEKHLKKVVLEHDGGILPQGAPTSPKLSNLFCLSLDHRLTLLASKNNLSYTRYADDLTFSGDYETLISVKKTIYKIIKDEKLFVNMGKTKILKRGSLFFVTGLSVNNKKVTIPRKKKKDIEHHLHHCIKNGVENHMQKSNITNRNFKDWLFGNIAFVYSVEKELGAEYFKIFGSIQWPI

SEQ ID NO: 2624 - protein, 366 aa, Flavobacterium sp.
  source 1..366: note = Related to NZ_JADHEC010000003.1; note = Flavobacterium soyangense
MTFPFNKLIPISNEEIVHSEEFYEEIRKYGSFLSDKKLPIIYSLPHLCLLSGVNINNIKKLCGSNRIDDYKRFKLKKRRGGFRVIQTPNEELKYLQRWILFNILDKITVHDSCTGFEKEKSIKQNAEIHLKSEAVLKIDLMRFFDTINEKRIYGLFKNFGYHKNLAVSFAKICTIEPNEKFMKSFKKNEIGIKNFIIENEEGILPQGSPTSPKLSNLVAFKLDKRLYGLALKSKLNYSRYADDITFSGNLDTLKKIKSIIYKIINEERFFVNHSKTKLLIRGNPFFVTGLSVNNNYVTIPKKRKIDIEHHLFHCLENGVEEHMKICEIKKRNFKDWLLGNIAFVYSVEKELGQKYFDSFNKIQWPI

SEQ ID NO: 2625 - protein, 365 aa, unidentified
  source 1..365: note = Related to NZ_CP074436.1; note = Polaribacter sp.
MTYSLDIYKKRAAELKRSEEFIKETSEYIELISKKGFPPIFSLPHLCLTSSVSIKNTITICESNRRVFYKRFKLKKKKGGYRVIQTPVSELKFLQRWILDNILEKIPSHHSCKGFDKNTSIIKNAECHLNSECILKIDLLRFFDSINEKRIYGIFKSLGYKENLCVSFAKICTIEHEEKFYDSFEKSEQKLKSYLTNKKEGVLPQGAPSSPKLANLILRRLDHRLSKLCEKRKINYSRYADDLTFSGNSIELQIIKKIVYKIIHNENLFVNFSKTKFLKRGSPFFVTGLSVHNSEVKVIRRKKKEVEHHLFHCLKNGVMGHLTKAKITNRNFKDWLFGNICFIYSVEPIIGQEYFDKFNKVDWPI

SEQ ID NO: 2626 - protein, 365 aa, unidentified
  source 1..365: note = Related to NZ_LR824569.1; note = Chryseobacterium sp.
MTFLLDKYKEHALASNHSNEFISETIQYANFLSSKNLPVLFSLPHLCLASAVSIKNTLEICNSSRIEYYKRFKIKKRRGGYRTIQTPTNELKYLQKWILRNILEKFPSHKSCTGFDKLSSIKKNAEIHLNAECILKIDLLRFFDSINERRIYGIFKSFGYQNNLCVSLAKICTVKQNETFYNTFKKNEDNLKQYLLSKDEGILPQGAPTSPKLANLILRNLDKRLERLCSKYNVNYSRYADDLTFSGKKENLLYLKKIIYKIIYSENLFVNIGKTKFIVRGNPYLVTGLSVHNEEVKVIRRKKKEIEHHLYHCIKNGVILHLIKSNIGNRNFKDWLFGNICFVYSIEPKVGQNYFNDFNKIEWPL

SEQ ID NO: 2627 - protein, 365 aa, unidentified
  source 1..365: note = Related to PASE01000008.1; note = Muricauda sp.
MTFPLDNFITKAKFQRHSDEFIDDAKNYIQKLEKAELPILFSIFHLCLSAKISIKLILALCRSDRIHYYKRFKIAKKRGGYRIILSPNNELKYLQKWILINILEKIPSHKSCQGFDKNKSIKKNAEIHIGSECILKIDLLRFYDSINEKRVYGIFKSLGYHKNLAVSMAKICTVEVKENFLKAFTKNESDLKNKISSQKEGILPQGAPSSPKLSNLILRRLDQRLHCLAKKNGINYSRYADDLTFSGKEEKLKELKKIIYMIIKDENFFINYGKTNFLKRGNRFFVTGLSVHNEKVTVPKKFKSNIEHHLYHCIKNGVIAHTKKNGIENRNFKDWLLGCICFINSVEPELGEDFFEKFNEINWPI

SEQ ID NO: 2628 - protein, 365 aa, unidentified
  source 1..365: note = Related to NZ_FSRA01000001.1; note = Chitinophaga niabensis
MTYPLDVFFEYAKEMDHSPQFTEEVEKYVSSLLNRNLPVFFSLPHLALAASFSINHVERIVKSNRRDYYKRFKLAKRRGGFRIIQTPDQELKYLQKWILLNILNKVNSHPACKGFDPKSSIILNAQDHLNKEAILKIDLLRFFDSINEKRIYGVFKGLGYHPNLAVSLAKLCTLKPDNTFFIAFKKNELMLKELIKKRDEGILPQGAPTSPKLSNLIARNLDIRLDKLCKKHGISYTRYADDLTFSGEKTKLMLLKKVVYKIVKTEGFYINYGKTKFLTRGNKYFVTGLSVHNKTLKVPRKKKLDIEHHLHHCLKNGVHVHMIKSKIKNRNFKDWLLGSICFVWSVEQELGQKYFDEYNKIEWPV

SEQ ID NO: 2629 - protein, 365 aa, unidentified
  source 1..365: note = Related to JACCBZ010000002.1; note = Mucilaginibacter sp.
MTFPLDDFLIKAQAAGHSDKFIAETTAYIHKLSKDNLPVLFSLEHFALEAQVNIGRLGMIVRSDRTFYYNKFKLKKRNGGFRTIQIPNSDLKYLQKWLLINILNKITSNAACKGFDPGTSIKGNAEIHLNKQAILKIDLLRFYDSINEKRIYGIFKSIGYHANLAVYLAKACTIKPDNTFFIAFKKNELLLKQVIEKRDDGVLPQGAPTSPKLSNLIARSLDKRLQGLCDKHDVNYSRYADDLTFSGDKATLAKIQKIIYSIVEKEGFFINYGKTKMLVRGNKYFVTGLSVHNNAVKVPKKQKKEIEHHLYHCLKNGVHLHILKSGLKKRNFKDWLLGSICFVNSIEQNLGSKYFELFQRIEWPI

SEQ ID NO: 2630 - protein, 364 aa, unidentified
  source 1..364: note = Related to VFPL01000001.1; note = Arcticibacter tournemirensis
MDYPLDDVLEAARDEGHTTLFVADIEAYVKYLTARQLPVIYSLAHLAISMGMNIDMMVRLAESNRRDYYKRFKLQKRAGGFRTIQSPDNPLRYIQRWILANILNKIPSHPACLGFDPTTSILKNATVHVNQKAILKIDLLRFFDSINEKRVYGIFKSIGFHPNLSVSLAKLCTIVHGKNFFSEFREHEVEIRDRIISDSTGILPQGGPTSPKLANLVARRLDSRLQGLCEKNGLKYSRYADDLTLSGDKDILERVRKTVYKIIRDEGFFPNLSKTRLLLRGQKFMVTGLDISNEKPRVSRKKKKEIEHHLYHCQKGVQRHIQKAKITQRNYKDWLLGSICFVHGIEPSVGKLYFSEFAKIEWPL

SEQ ID NO: 2631 - protein, 369 aa, Bacillus sp.
  source 1..369: note = Related to CP095875.1
MNGDFPRNDFIHQAKAEGHSKEFIQSTTEYAEKLENLGLPVLYSLKHLALTLDIPYIQLREIIRNRRKYYGLFKISKKVKGYREIRCPQNTLKDIQHWILYSILAKVRTHKSCIGFKKGDSIKKNATIHLGQPAILKLDLYCFFDMVTEKQVYNVFKSLGYHPNLAVDLAKLCTVPETGEYVKKLYQDTCPTNFIYHDNPFLPQGAPSSPALANLVLYHLDVRLKGLADFLGIQYTRYADDITFSGEDDRLPKISLIDKIVRDEGFYLNHSKILLRKKGQQQKVTGLIVSGTSLRVPRKYKRDIWKHLLFLKKRGVKEHLEYIKNKNGSNKSAYRDWLLGKIMFVKSIEPTVGNKMLFEFNQIKWPFYD

SEQ ID NO: 2632 - protein, 365 aa, Bacillus sp.
  source 1..365: note = Related to JAJPGG010000002.1; note = Bacillus toyonensis
MNNIFPRDAFEKVAEARGHSKEFILSALEYADKLIKSELPVLFSTKHFCEVIDITYGELKKIILNRTNQYGNFKIRKKSGGFREIRSPKEKLKNIQKWILNNILSKVSPHGSCIGFKKGDSIIKNALPHLGKEAILKFDLFHFFDTVTEKRVYSIFKSLGYHSNLAVDLAKLCTVPSFPSHKKKFLENFNISDNPFPFDSFLPQGAPTSPALANLVAGHMDKRFKGLADFLGLDYSRYADDLTFSGNYECLPNVNFVKKIILEEGFYINESKTCLRREGQQRKVTGIIVSGDTSKVPKAYKKDIWKHLYFLNKFGVKKHLRNIKNNKSSFQDWLLGRIMFVRSVEFEEGNRMLYKYNQVNWPFYE

SEQ ID NO: 2633 - protein, 377 aa, unidentified
  source 1..377: note = Related to VFNO01000006.1; note = Brevibacillus sp.
MNCEFPRNDFVKEAIKQGHSQEFINECLLYADNLTYKGLPVIFSTKHFCELLDISFKQLNYILDNREDFYGTFNLRKKRGGYRRIQYPLPILKNIQRWILDYILTRVPLHSSCKGFRRGESILTNATPHLTKKTILHLDIEDYFGSITQKQVFNVFSKLGYNKSLAHDLSKLCTIHKVEIEKTIETDSFLATEQKEFLESIKRYSQKKIDFILPQGAPTSPTLANLVSVKLDKRLFSLAEKLGVTYTRYADDLTFSTDTEILPRLAIIKKILSEEGFQLNKSKTATRKQGQRQIVTGLLVSGEKAKVPKKYKQDILKHLFYADKYGPKDHSMEIQKNPATFQEWLLGRIMFVRSIELETGNMMLEKYNQIEWGFNLK

SEQ ID NO: 2634 - protein, 350 aa, unidentified
  source 1..350: note = Related to NQMO01000005.1; note = Paenibacillus sp.
MDIRFPRDAFVQEAQNQGRSQLFIEECLLYADGLQYKNLPVIFSTKHLSLLLELEYKELNNIILNSYRYYKTFSIAKKRGGERQIKCPNHILKSLQRWILNNILINVRVSSACKGFRKGESIITNADTHLGCQAILRVDLENFFDTITENQVRKSFIRIGYSTNLSVDLAKLCVTSRLDSTTGEYVSSLPQGAPTSPMLANIVAYRLDKRLSSLANKLGVRYSRYADDLVFSGNTTQLPKIELLKKIITEEGLKINNQKTLLRREGQKRMVTGIIVSGDKLRVPKKYKKDIWKHLHYALLYGPDGHTSRIKVNPATFKEWLLGRIMYVRSVEKDAAEDMLKVFNEISWGF

SEQ ID NO: 2635 - protein, 344 aa, Bacillus sp.
  source 1..344: note = Related to CP026036.1; note = Bacillus subtilis
MNFPRNDFEKYARDEGKSQQFIDATLSYVDKLNSMQLPVIFSIKHLALTLDYPYNKILDIANHSEKYYKSFKIRKKRNPQQFRRILAPNPDLKVIQRWIYNNILKNIEPDESSVGFSQGCSIQKAAAMHTNQEVVLRVDLSNFFENITQKQVYYVFRNLGYHKNLAVDLAKLTTIYTKEGSYLPQGAPTSPALSNLVVRKMDKRLRCLSEKLGVNYTRYADDLIISGNKKDIPRLGLIKQIIKEEGFKLNSEKTAIQRAGNKQLVLGLTVTNGVHVPKDFKKEIWTHLRYCKKYGPIDHLRYINKSDKGAFKDWLFGKISFVKSVEPAVGEKMMNLFNEINWPL

SEQ ID NO: 2636 - protein, 344 aa, Bacillus sp.
  source 1..344: note = Related to CP043830.1
MNFPRDVFEQQARKEGKSDSYIKSALVYIDRLNSMEIPVIFSLKHLALILDFPYKKISDMANNPNTYYSTFKIRKKRGGFREIQAPQPEMKIIQKWIYQTILKEIRTDSSCMGYSKGSSIRENANVHKNQEVILRVDIYKFFENISFKQIYYVFKSLGYTKYVAIDLAKLTTVKSEGSNVRYLPQGAPTSPALSNLVVRKLDKRLRSLSNKLQVNYTRYADDLIFSGEKGCLPQIGLVTKIIKDEGFKINPNKTAIQKKGNRQIVLGLSVTNGVHIPKKYKKEIWTHLKYCKKFGPIKHLENIGESNKAAYKDWLFGKICYVKSIEHEVGKKMMAAFNDISWPL

SEQ ID NO: 2637 - protein, 346 aa, unidentified
  source 1..346: note = Related to NZ_JAIZAP010000009.1; note = Aquibacillus sp.
MYFHRDIFEEKAREQGKSNAFIESSLAYVDKLNSMQLPVIFSLKHLAVTLDISYKKISHMIKFPNEYYNTFRLRKKSGGVRIIQAPKPELKIIQKWIYVHILKNIKVDSSCTGFTVGSSTSKVARMHQNKEVVLKLDLENFYDNIDRNQVYYVFKSIGYKDHVAIDLAKLTTVNPIKTQRNVFILPQGAPSSPSLSNLVSRNLDRRLRLLSEKVNVIYTRYADDLTFSGEKKNMPSLKLVTKIISEEGFQVNNKKTSYQKKGNKQIVLGLTVSNDVHVPKKFKREIWTHIKYCKKYGPVKHLININQANRASYKDWLYGRICYVKSVELKVGEKMMEEFNLIDWPF

SEQ ID NO: 2638 - protein, 315 aa, unidentified
  source 1..315: note = Related to NZ_JAEQNB010000004.1; note = Tumebacillus amylolyticus
MAGVDRTRLLRITEQRDRNYHRFLLEKRAGGFREILTPKPLLKRIQRLIYVNILATVELDQSCLGFREGRSIKDNAQIHANQDAVMKVDLYRFFDTISEKRVYGMFKSLGYHTNLSVDFAKLTTLHPSEQYYLEIMNDKNLPDHYPDPHFARLPQGAPTSPVISNIIARNLDFRLRKLAEKLGVNYSRYADDITFSGVLTKLPKIHLINDIVRSEGFFINGSKISLRKKGTKQLVTGLTVSNGVHVPKKYKQETWRHLYYSKKYGAKDHLRRIGKTGISGFEEWLLGRIHFIRSIEPEVGDAMLEKYEVIDWSLI

SEQ ID NO: 2639 - protein, 366 aa, Bacillus sp.
  source 1..366: note = Related to JH792281.1; note = Bacillus cereus
MSTNIPRDEFVLVSKESGHSKEFISKALSYINTLENKNMPVIFSIKHLSQILNLNYSLVLDIIKTREQYYRGFKLKKRRGGFRYVQSPNSNLREIQTWIHNNILLNVPIHENCFSFIKQKSIRDNASLHANAEAILKLDLYRYFESIDQRKIYKVFLDFGYTKNVAIDLSKLTTILPNQYYEDIISKDKLTPEKFVLSKHGFLPQGSPTSPILSNIVAEKLDIRLNGLAKALNVKYSRYADDITFSGKRDKLPKVSFVEKILNEEGFYLNNKKTKLRVKGQRQIVTGLSISNGVHIPKHYKRKIRQHLYYCKVLGPKRHLQNINLEKSNFKDWLYGSICYIRSIEKNLGDKMLEDFDKINWLFYYD

SEQ ID NO: 2640 - protein, 402 aa, unidentified
  source 1..402: note = Related to NZ_VATY01000001.1; note = Maribacter algarum
MTLPLKHILKNIKFNIQERVTATMSFPFNQFALEAKEQNKSQEFIDACLAYASNLSEQGYPVTFSIEHLAMQIGVQSDYLRNLIGDGKRDITYDYEHKYKRYNYFKLKKRDGNFREIMSPAKDLKFIQKWILVNILSKYRLAESCKGFRKRISIYDNAKVHENSEIILKVDLLKFYDTITEKRVYGLFKSLGYATNLSFSLAKITTAKHRKNYWRDFNNSSKEILSELVQTKPAILPQGSPTSPMISNILATKMDYRFEGMAKKQNFRYSRYADDLTFSITKEGSLPSLNVISKIITQEGFFINHKKTQYLKKGCKQYVTGLTTTNGINVNKKYRKQISEHIYFCRKYGVKSHLARRKKDFPNSNSLSFHNWLYGHLCFINSVNSKASKTLLEEFNKINWSV

SEQ ID NO: 2641 - protein, 378 aa, unidentified
  source 1..378: note = Related to NZ_CP058986.1; note = Polaribacter sp.
MSFSFKQFEIEAKKQEKSQEFIDACLVYAKKLTQNDYPVTFSLEHLAMQIGIQSDYLRNLIGDDKNGITNNYEHKYKRYNYFKLKKRHGGFREIMSPAKDLKFIQKWILVNILSKYKLADSCKGFRKGISIFHNANVHENSELILKVDLLKFYDTITEKRVYGVFKSLGYAKNLSYSLAKITTAKHRDKYWRNFDDDSKERLKELVMAKPPILPQGAPTSPMLSNILATKMDYRFEALSKTQNCRYSRYADDMTFSITKEGKLPSLKLITKIISDEGFFINDKKTRYMKKGCKQYVTGLTTTNGTNVSKKYRKEISEHIYYCRKHGVDGHLERRVDFSGYNNIKFHNWLYGHLCFIKSVNEEASKKMLDSFNKINWYI

SEQ ID NO: 2642 - protein, 379 aa, unidentified
  source 1..379: note = Related to NZ_QREI01000003.1; note = Winogradskyella pacifica
MSFPFKQFEEQARKQEKSQEYIDFCLAYARKLSENGYPVTFSLEHLAMQIGVQSDYLRNLIGDDKNNIEYNYELKYKRYNYFKLKKRDGGFREIMAPAKDLKFIQKWILVNILSKFKLADSCKGFRQGVSIYDNAKVHENSEIILKVDLLKFYDTITEKRAYRAFRLIGYVKNLSYSLAKITTAKHRDSYWRNFDDISKETLKELIIVKPPILPQGAPTSPMISNILATKMDYRFDALAKKQNCRYSRYADDLTFSITKEGKLPSLKLITKIITDEGFFINDKKTRFMKKGCKQYVTGLTTTNGINVSKKYRKEIYEHIYYCRKYGVSSHLSKREEEFSGFNSIKFHNWLYGHLCFIKSVNKAASNKMLEDFNKIDWFV

SEQ ID NO: 2643 - protein, 379 aa, Flavobacterium sp.
  source 1..379: note = Related to NZ_VLKO01000001.1; note = Flavobacterium tiangeerense
MSFPFEQFIIQAREQNKSLEFIDACLSYGKALEEKELPVIFSLEHLAIQIGIQSVYLRNLIGDGKWDINYEYEHKYKRYNYFKLKKRDGKFREIMAPAKDLKYIQKWILVNILSKYVLADSCKGFRKGISIKDNAKVHENSEVILKVDLLKFYDTITEKRVCSVFKSLGYVSNLAYSFAKITTAKHRESYWKDFDENSKEILNELVDNKPPILPQGAPTSPAISNILATKMDYRFEALSRKLNFRYSRYADDLTFSIKNGGKLPSLKLITTIISDEGFFINSKKTKYMKRGCKQYVTGLTTSNGTNVSKEYRKTITEHIYYCRKYGVNSHLERRKEEFPKYNNIKFHNWLYGHMCFIKSINEKASKKMLEDFNKINWYV

SEQ ID NO: 2644 - protein, 379 aa, Flavobacterium sp.
  source 1..379: note = Related to NZ_MUGY01000012.1; note = Flavobacterium hydatis
MSFPFEQFIIESKEQNKSQEFIDACLTYGKKLDDKEFPVIFSLEHLAMHMAIQSDYLRILIGDDKKNLVYGSEYKYERYNYFKLKKRDGKFREIMSPSKDLKYIQKWILVNIVSKYVLADSCKGFRKNIFIAHNAKVHENSEVILKVDLLKFYDTITEKRVYGLFKSLGYINNLAYSFAKITTAKHRDSYWNDFDENSKEILKELIENKPPILPQGAPTSPMISNILATKMDYRFEALARKLNCNYSRYADDLTFSIKREGKLPSLKLITKIISNEGFFINDKKTKYMKKGCKQYVTGLTTTNGTNVSKGYRKTITEHIYYCRKYGVNSHLEKRIKDFPKYNNIKFHNWLYGHMCFIKSINENASKKMLEDFNKINWYI

SEQ ID NO: 2645 - protein, 379 aa, unidentified
  source 1..379: note = Related to JABXHT010000077.1; note = Tenacibaculum sp.
MSFPFKEFTEKAKEENRSQEFINACIQYAKKLSSKKLPVIFSLEHLAMLMGVESNYLRTLIDDGKNDFVYSYEHKYKRYNYFKLKKRDGGFREIMSPAKDLKFIQKWILVNILNKYKLRNSCKGFRKEISIYHNAEVHQNSETILKVDLLKFYDTITEKRVYGLFKSLGYANNLAYSFAELTTAKHRDYYWRSFDANSKKVLNTLYNHRPPILPQGAPTSPMISNILAAKMDVRFEKLAEKLNCNYSRYADDLTFSIKNEGKLPSLKLIYKIISDEGFFVNEKKTKYMKKGCKQYVTGLTTTNGVNVSKAYRKSIKEHIYYSRKLGVKKHLKNRNEEFGGYNNIQFHNWLLGHLCFIKSVNQEAYKKMIKDFNKINWYI

SEQ ID NO: 2646 - protein, 379 aa, Flavobacterium sp.
  source 1..379: note = Related to NZ_MUGW01000002.1; note = Flavobacterium hercynium
MSFPFEKFIIKAREHNKSEEFINACLVYGKNLVEKKLPVIFSLEHLSIQIGVKSDYLRNLVGDGKNDIIYNYEHKYKRYNYFKLKKRNGTFREIMAPAKDLKYIQKWILVNVLENYPLAESCKGFRKKVSIYDNAKVHENAEVILKIDLLKFYDTITERRVYGIFKSMGYVENLAFTLAKITTARHRESYWIDFDRNSQEILSKLLKEKPSILPQGAPTSPMLANIIATKLDYRFEALARKINFNYSRYADDLTFSIQKKGKLPPLKLINKIISEEGFFVNTEKTKYMKKGSKQYVTGLTTTNGVNVSKKYRKEISEHIFYCRKYGVVSHLKRRENEFPKYNSMNFHDWLYGHLCFIKSINETASKNMLEDFNKINWFV

SEQ ID NO: 2647 - protein, 381 aa, unidentified
  source 1..381: note = Related to DTTW01000005.1; note = Flavobacteriaceae bacterium
MSFPFKEFISKAKEENRSQEFIEATISYADKLDKNNFPVIFSVEHLAMLMGIQSSYFRHLIGEPKKHHYQDEPHKIFRYNYFKLKKKREGYREIMSPSKDLKFIQKWILVNILEKKNLQNSCKGFRKGISIKDNAMPHENSDLILKIDLLKFYDTITENRVFGVFADMGYRKNLAVSLAKITTAPHRFQYWKNIPKAELDIMGYKHNNFPSILPQGAPTSPMLANIVASKLDLRFEKLSEKMGFNYTRYADDLTFSIKGNQRLPNLKLIRKIISDENFFINETKVKYLRKGGKQYVTGLTTANGINVSKKYRQEIDSHIYYCRKYGVKGHLSWIGEENEKSQRVLPFHDWLYGHICFIKSINPKAAEKLLKDFSRIDWLFD

SEQ ID NO: 2648 - protein, 383 aa, unidentified
  source 1..383: note = Related to NZ_RAQH01000007.1; note = Epilithonimonas arachidiradicis
MKPFPFEQFITNAIKEDRSNDFIEECLRYAYKLEVKNYPVLFSIQHLAMAMGVKSQFLLALIGEDKRNIFDYLTDNRATIKHYNHFFIKKKRGNYREIMAPHKDLKYIQKWLLFNILSKFPLAESCKGFRSGISIYDNASLHNNAKIILKVDLLKFYDTITEKRVYGVFAKMGYAKNLAYSLAKLCTAKHHEKYWSDFNLNDKEVLSYYLEFKPPILPQGAPSSPTLANIVATNMDKRFEGLSKKLKFSYSRYADDLTFSIKDIGTLPSLDLIRKIINEENFYINEDKITYMHRGSKQYVTGLTVTNGVHTSKKYRKKIARHIYFCRRYGVENHLIKNIDHFPNYNILKFHDWLYGHICFINSVDKEASKRLLNDFNKIIWPL

SEQ ID NO: 2649 - protein, 382 aa, unidentified
  source 1..382: note = Related to CP015199.1; note = Chryseobacterium glaciei
MKSFPFEQFIKNANSEGRTQNFIEACVQYAHNLEDRDYPVFFSIQHLAMAIGIQSDFLTALIGENENSRYLYENEGVKLKKYNHFFIKKKRGSYREIMAPHKDLKYIQKWLLFNILSKVPLAESCKGFRSGISIYDNASIHSNAKIILKVDLLKFYDTITEKRIYGVFEKIGYAKNLAYSLAKLCTAEHHDKYWSDFNQNDKKILSYYLEFKPPILPQGAPSSPTLANIVATKMDKRFEGLGEKLKFSYSRYADDLTFSINHIGTLPPLNLIRKIIEEENFYINEDKITYMHRGSKQYVTGLTVTNGVHTSKKYRKKIARHIYFCRKYGVENHLLKNIEQFPTYNSLKFHDWLYGHICYINSVDKEASKKMLSDFNKITWSI

SEQ ID NO: 2650 - protein, 382 aa, Flavobacterium sp.
  source 1..382: note = Related to CP059431.1
MSFPFEQFIQNAREENRSEKFIDACVKYAEKLESNNYPVIFALPHLAIVMGVQSDFLKALIGESKDIRYILQSNEGFKIKKYNHFFIKKRNKGFREIMAPHKDLKYIQKWLLFNVLSKYPLTDSCKGFRKGISIRDNALVHSDAKVVLKVDLLKFYDTITERRVFGVFEKMGYAKNLSYSLAKLCTAKHHDKYWLDFSYSDKQTLTELYKERPSILPQGAPSSPTLANIVATKMDKRFDALAKKMNFSYSRYADDLTFSIKDEGRLPNLKLIREIISDENFYINENKISYMYKGSKQYVTGLTVANGVHTSKRYRKEIERHIHFCRRYGVEEHLSRNKKKFPYYNSLKFHDWLYGHICFIHSIDRKASEKLLNDFNKINWFI

SEQ ID NO: 2651 - protein, 382 aa, unidentified
  source 1..382: note = Related to NZ_JAFLHF010000002.1; note = Chryseobacterium scophthalmum
MKSFPIEQFKEVAINQGHSQEYIDFCLKYANQLIDKNYPVIFTIEHLAVVIGVESDYLRFLVGDIKHEQFEFDRFEYKEKRYNYFKFTKKRGGYREIMAPHKDLKYIQKWLLFNILDKYPFKNSCKGFRQGISIKDNALPHEKSDVILKVDLLKFYDTITEKRIYGVFKTMGFHGNLAVSLAKLCTAKHQSDYWENFTEKEKLILSEFIKTSPSILPQGAPSSPALANIVATRMDGRFDALSKKMNFSYSRYADDLTFSVKEKAVLPPLKLISKIIQEEGFYINEDKIQYMKRGNKQFVTGLTIANGVHTSKKYRKQIARHIHFCRKYGVENHLDKNNKEFKGYNILNFHDWLYGHICYINSVDKEASKKMLNDFNKITWSI

SEQ ID NO: 2652 - protein, 382 aa, unidentified
  source 1..382: note = Related to NZ_JABBGF010000003.1; note = Chryseobacterium cheonjiense
MKSFPIEQFKEAAKEQGHSKEYIDLCLKYANQLIDKDYPVIFTIEHLAVVIGVESDYLRFLVGDIKWEEVEFDRFEYKEKRYKYFKFKKKRSGYREIIAPHKDLKYIQKWLLFNILNKYPLKESCKGFRQGISIKDNAKTHEKSDIILKVDLLKFYDTITEKRVYGVFRAMGFHGNLSVSLAKLCTAKHQPDYWEAFTEREKLILSELVKTKPSILPQGAPSSPALANIIATKMDSRFEALSKKMNFFYSRYADDLTFSIKGDGMLPPIKLVLRIINDEGFYINEDKIQYMKKGTKQFVTGLTITNGVHTSKKYRKQIARHIHFCRKHGVENHLNKNYNEFKGYNSLNFYDWLYGHICYIHSIDEKYSNRLLNDFNKINWFI

SEQ ID NO: 2653 - protein, 383 aa, unidentified
  source 1..383: note = Related to NZ_JALDNB010000003.1; note = Chryseobacterium aahli
MNSFPIERFKILAKEQGHSDEYIRICLEYALKLTEKKYPVLFTLEHLAIAIGVKSSFLRLLIGDLKTEEKISKLKYPLKEKRYKLFFIKKRRGGKREIMAPDKDVKYIQKWILFNILGKYPLRDSCTGFRPNISIKDNALMHEGAFKILKIDLLKFYDTITEERVYGVFKSMGYRSNLAVSLSKLCTYKHKPEYWNSFNSKEKELLAYYVKEMPAILPQGCPSSPMLANIIASKMDYRFEELGKKMSFSYSRYADDLTFSIKGNGILPTLSFINKIITEENFHVNTDKTRYMLKGQKQYVTGLTITNGVHTSKKYRKKIARHIHFCRRFGVEVHLNRIRKDFLGYSTLNFHDWLYGHICFINSVDKEYSQKLLTDFNKINWFI

SEQ ID NO: 2654 - protein, 376 aa, unidentified
  source 1..376: note = Related to NZ_PVSS01000003.1; note = Brumimicrobium mesophilum
MEFPLNEFIELAKTKDKSQEYINSVIHYVKNLESNDFPIIFTRQHWASMMQIQSTFIDYLLNDYGEDFEDVLQSKYSCFTLRKRNGGERLIMAPKEDLKYLQKWIQFNILNNYKFEDSCTGFIIGKSIKDNAKKHEFAETILKIDLLQFFDTIKVERIYYCFKKMGYIGNVSHDFANLCTVVHPKEYWKKVDSEVKSVIGQTINSSSRVLPQGAPTSPLLANIVASKMDKRFGGLSKKLGFNYTRYADDLTFSIKKGQKLPSLNVIYQIIESEGFYVNKKKTKFINKGCAQYVTGLTIANGVNVNKKYRKMIERHLYFCRKYGVDNHLNKNKKTLFGFNRLSFHDWLYGHICYIKSINENCYKKLIEEYKKITWTI

SEQ ID NO: 2655 - protein, 371 aa, unidentified
  source 1..371: note = Related to MDJS01000005.1; note = Mucilaginibacter sp.
MPFDFEEFRKIAKSNNHSEEYIFETIKYAEKLNKKDLPVIFSTVHLAIELKIPSNILNSLLKSYNYTFFNLHKRSGGFREIMVPNEKLKYVQRWINFNILQKLPLEKVCTGFRPNYSILTNANIHANSKMVLKVDLLRFFDTITDRRVYGYFKSLGYLKPLSYDLAKLVTARHKKSYWDFVSKDNCPQLADIANSNSPVLPQGAPTSPMLANLLASRMDERFIILSQKLNFRYSRYADDLTFSITEEGQLPFTRVIKKIIEEEGFFMNDSKTKIFSRGMKQYVTGLTVTHGVHVSKKDRKDIFMHLHFCKKLGPNEHLKNWSKKNGLNREPYGFQDWLLGKISFIYSIDKIIGTKMFKEFDKINWSFENSN

SEQ ID NO: 2656 - protein, 377 aa, unidentified
  source 1..377: note = Related to NZ_FNDW01000013.1; note = Chryseobacterium taeanense
MPFPLELFILEAEKQGKSKEYIDVCVEYIKKLDSNGFPVIFSLHHLAQEIGVQYKYLRFLIGENDNKYEHKYKRYNYFSIKKKRNGYREIMAPSKDLKYIQKWILLNILYVYKLEDCCKGFMPNQGILNNAIVHENSEKILKVDLLKFYDSITFDRVVQVFESVGYIKNLAISIAKIVTASNRESYWNCFDEYSKLKLSSIRNAKTPVLPQGAPTSPMLANIIATNLDKKIINLSKKLNFRYSRYADDLTFSVKKNEGVLPYSKLIIKLIESEGFFVNPSKTIIKKKGQRQYVTGLTVTSDVNLSKKYRKEIFKHLHYCRKFGVNNHLERNKDFRKYNIIQFHDWLFGHICYTNSINKDVANKMFDIFRKINWSISE

SEQ ID NO: 2657 - protein, 393 aa, unidentified
  source 1..393: note = Related to NZ_UYXD01000050.1; note = Aquimarina sp.
MIYSPETFAISARNQGHSEPFIELCLAYLNKLNNRGYPVLFSIHHLAQEIGIQTSFLNELIGDTYYFYDGEEKIVVRSKVDYFDQGRYRYYKKFKIKKRTGGYREIMAPQGELKYIQKWIYINILLKYQLTDNCTSFRKGRSIYDNAKPHERKKYILKIDLLKFYDTISEERIFGLFKAMGYVENLSFALARICTAKHSRDFWNSISGDSAKILKTLIENKPAILPQGAPTSPTLANIVANRMDKRFVKLGQIRDFEYTRYADDLTFSSNNFNSLPSISFIKEIVKEEGFFVNQKKTKLFKAGGKQYVTGLTVTNGVNVSKKYRKNIFQHLYYAKKFGPRNHLIKWAKDNKKNPDIMAFQDWLYGHICFISSINKIAGKKMLSEFNKIDWTIL

SEQ ID NO: 2658 - protein, 377 aa, unidentified
  source 1..377: note = Related to DPWF01000030.1; note = Chitinophagaceae bacterium
MPFLFEEYIEEARKKQRSEAFIESTVQYAKKLDDNGLPVIFSRAHFASLVGMPSREIFTILHYRVTQYVQFSIKKKNGGLRHIMTPEKKLLYLQKWINKNILQQVSVLDCCTAFVPGTSLATNAYTHRNAHRILKVDLTRFFDTINEKRVFGLFKYLGYHPNVAYDLAQLTTAFPSYQYWKSQSLKDLRQTVEKITFYDAFLPQGAPTSPQLANLIAKPLDSRLLMLSEKFGCRYSRYADDLVFSTNKPEGKLPPLHLVKRIIESEGFLVNEDKTAYLKKGMKQYVTGLTVTHGFHVSKKQRQEIYKHLYYARKYGPFEHLKRWTTDNWGDERKTPYGFKDWLLGKISFINSIDRKNGIRMLDEFNKIHWGFECEDG

SEQ ID NO: 2659 - protein, 363 aa, unidentified
  source 1..363: note = Related to CP068086.1; note = Sphingobacterium multivorum
MSFDRKLFIEECKNQEKSEQYIVNTLKYADNLVNRGFPVLFSLKHMAYELGINYEDLKTIEDHRENYYKHFHIKKKKGGLRHLSVPFTNLKLIQSWIYHNILLHHHPTSSAYGYIKNRSIKENADQHVAKRFILNVDLLKFFETITEHKVFKLFVEIGYTKTLSWSLSKLVTVPIKEDYYLQLSHIEQKLFNKTFEQEYGVLPQGAPTSPSISNLVLRNLDGKMVELAELKGSTYTRYADDITFSGNDIKNIPTKTEIMRVVMSENLLINWNKWTLRKKGMRQKVTGLNTTHGLSVPKSYRKDVKRHIHFCLKYGPESHQKKIGVDKQFYRYWLLGRIHYIRFISPEIGNKMLKDFNNIQWPL

SEQ ID NO: 2660 - protein, 373 aa, unidentified
  source 1..373: note = Related to BMFQ01000008.1; note = Bizionia arctica
MSNEIVNSVMSSSLYKIVEQISKSNHGDDYKKSLIEYSQNLSSKNLPIIFDAYHLAYSIGIQPYRIINIIKDRDHLYNTYRVRKKTGGHRWIMSPIEELKTIQTWIKINILDKIQTHNSANGFVKEKSIVTNAEKHINKETILNIDLYRFFDTITEKRIYQLFKKLGYTNKLSYDLSRILCVNPPKKYWKELKKENKLKKKFIKMKPSILPQGAPTSPIISNLLCIKLDEILFKYCEKSHLSYTRYADDITMSGDNKNMPELKKIKSIIRHNGFTVNIKKIRFISKHKKQTVTGITVNNGLFVDKKIIKEISQELYYCIKYGYKSHLEYKFKKSKIKANYKDWLYGKICFVYSVEKEKGESFFKKFNMIDWNI

SEQ ID NO: 2661 - protein, 373 aa, unidentified
  source 1..373: note = Related to SJXJ01000003.1; note = Tenacibaculum sp.
MSNEIVNFIMSTSLHKIVEQINQSNHGNDYKEKLIEYSQNLSSNNLPIIFDAYHLAYSIGIEPYRLINLIRDRDDLYNTYKVRKKSGGYRWIMSPMEELKIVQTWIKVNILDKVNIHESANGFIKDRSIVTNANKHVKKETILNIDLYRFFDTISEKRVYHLFKKLGYTEKLSYDFSRLLCVNTPKKYWKEIKRENRLRKKVIRMKPSVLPQGAPTSPIISNLLCLKLDQVLYKYCEKSNLDYTRYADDITISGNKKSMPKLKKIKSIIRQNGFTVNINKIRFTSKHKKQTVTGLTVNDGVYVDKRIIKEINQELYYCIKYGYKSHLEFKFKDSKIKSNYKDWLYGKICFVYSVEKEKGQQLLKKFNMIDWNI

SEQ ID NO: 2662 - protein, 364 aa, Flavobacterium sp.
  source 1..364: note = Related to MUFX01000009.1
MSTSLYKTVELINNSDHSLEYKTLLINYSQDLTSKNLPIIFDAFHLAVMIGIQPYRIINLIRDRDALYHTYKIRKKSGGYRWIMSPQNDLKNIQNWIKTNILEKVEIHESANGFTKDKSIITNANEHIGKEIVLNIDLYRFFDTITEKRVYGLFKMLGYTEKLSYDLARLMCVNAPKKYWKEIKKENKLNKKIIKLKSPVLPQGAPTSPIISNLLAKNLDISIFEYCNKSNLSYTRYADDMTISGDKKDLPNLKLIKGIIRKNGFTVNIKKIKYISNHKKQTVTGITVNNGLFVDKKILKEVNQELYYCIKFGYINHLKFKFQNSKIKSNYKDWLYGKICFIYSVENKTGEELFKKFNLIDWSI

SEQ ID NO: 2663 - protein, 365 aa, unidentified
  source 1..365: note = Related to QSQY01000003.1; note = Parabacteroides sp.
MSSPLLHILEQVENSNHSTEYKRLIKDYSIRLASRNLPIIFDIYHLSYLIGIQPYRMINMIKDRHSLYNVYKIRKKAGGYRWIMSPIDDLKRVQYWIKLNILDNINICDSACAFIKGKSIRDNAQKHVGKELILNVDLYRFFDSITEKRIYGVFKSLGYTEKLSYDLAQLVTAQPPKAYWKEIKKENRFKKKHIKSTPAILPQGAPTSPSLSNIISIKMDEIFDKYANECKISYSRYADDLTFSGERGSIISLLAVKKIIRQQGFTINLKKTKYLRNSGKQSVTGITVNNGLFVDKSVINMIKQELYYCLKFGYKAHLKYKQAKGESIKSGYKEWLFGKICFIYSIDKNRGVNFFKIYNQINWDI

SEQ ID NO: 2664 - protein, 305 aa, unidentified
  source 1..305: note = Related to SEDT01001166.1; note = Proteobacteria bacterium
MVNDTANYYKTFKLRKKTGGYRWISVPNEELKLLHRKLNLMIFMRIRPSESVHSFVKKSSIRTNAEVHVNAKTCLNVDLYRFYESITDKRVFGYLCKLGYHPNVSYVIAALVTIQLPKAFWQEVRKENKFRSKYIRRKPKARVLPQGSPCSPFLSNLVLTHLDFRIEQACKGLGFSYSRYADDITISSKGDNFFALTTLKKIIRSEGFTINIQKISFRRSSSRIQVTGITVNNGIFVNKSLYKKVVSHLYYCKKYGVRDHLEKVKLTNKSNYKDWLLGNILFINSVEPDKAKKLFTEFNQIDFLL

SEQ ID NO: 2665 - protein, 366 aa, unidentified
  source 1..366: note = Related to JAEUTP010000018.1; note = Bacteroidia bacterium
MTSPLDNILDKAKAEEHSPEYISDITAYAKNLIDKKLPVIFSRTNLALSIGIPRSHLEFLLANREMKYKFYKLRKKHGGYRWISSPEKELKYIQGWIKVNIFDNIEIHPAACGFSKGTSIKKNATAHQKQDLILNIDLYRFFDSITENRVFGILNWLGYHKNIAIDMAKLLCYQPTDKYFEEVAKEGIFSKSILDQKPSILPQGSPASPVISNLLSYKLDVRLSKMASKLGINYSRYADDITFSGERKNMVSLNTVKKIITEEGFYINKDKIKYLAQNRRQDVTGIVVNKGLKINSKYKKKVLTEIYFSEKYGVKNHLGYLIDRKGAEKKANYKDHLLGKIYFIYSVEPEVGKKMLEKYDQIKWEI

SEQ ID NO: 2666 - protein, 366 aa, unidentified
  source 1..366: note = Related to NZ_LBIQ01000028.1; note = Mangrovimonas sp.
MPSQLDNIKNSLDEANASKDFKIEIINYSQNLEKKGLPIIFSLPDLSFKIGLPFHVIQEILKNKSNHYKTFKIQKKTGGHRWITSPDEQLKRIQRWIYENILKNVPEHDCSFGFVNERSIIDNAKKHVNQDTILNIDLYRFFDSIEQKRVAGVFKHLGYQPNLAYSMAELLTAKMSRAYWKEIEDEKVLSDTFIEECPQILPQGSPASPRIANFIAHSLDTRMAKLAKKLDVNYSRYADDLSFSGDYKKLPSIKTLRKIIMNEGFFLNEKKVKYFKRSHRQIVTGVVVNDRISVPREFKEKLRTELYHCIKKGPAAHLNWLMSNKDFKIKTNYRDHLLGKACFVYAVEPETGKDFLEMYNQIKWEL

SEQ ID NO: 2667 - protein, 349 aa, unidentified
  source 1..349: note = Related to SUYI01000044.1; note = Prevotella sp.
MTMTDTWESLFKERAVEEKHSEEYIAQCIEYAGKLHERNLPVIFDFVHLAYYLGIYSDKLRGIVANAETHYRAYEIKKKTGGTREIEAPDEILKDVQRWIYANILCRDKSVQSCVHGFVPRLSEADKVRGVLSNAVPHSGHDWLINLDLKNFFPTVTLTMVRDYYDSLGYEEEVSKTLTALCTYKSRLPQGAPTSPMLSNIIATKMDIALLEYCKKYGITYTRYADDLTFSANLDVEVPPLKDLYAIVFKHGFIVNRQKTKIRGRGYKKEVTGLTVTEGVHVPKKYRKEVWRELYFCKKFGVYEHYHNMGTNKGLYKDWLRGRIMFIRQIDPACGNKMLEKFNELNWLV

SEQ ID NO: 2668 - protein, 347 aa, unidentified
  source 1..347: note = Related to JAGCRH010000046.1; note = Prevotella sp.
MTETWESLFKEQALEEKHSDEYIVQCLEYAGKLHERNMPVIFDFLHLASYLKCLAKQLQGIVANVESHYQEYDIKKKSGGKRRIEAPDYLLKNVQRWIYVNILCRDKSLQNCVHGFVPVLTENDRARGILTNAMPHSGHDWIINLDLKNFFHAVTLDMVKDYFDSLGYEEEVTKTLTALCTLKSRLPQGAPTSPMLSNLIAAKMDKAMLEYCKERGITYTRYADDLTFSANLDVEMPPLKELYAIVFKHGFIVNRQKTKVRGRGYKKEVTGLTVTDGVHVPKKYRKEVWRELYFCKRFGVYEHYHNMGTDKGLYKDWLRGRIMFIRQIDPACGNKMLEQFNELNWLV

SEQ ID NO: 2669 - protein, 347 aa, unidentified
  source 1..347: note = Related to JAGCCF010000043.1; note = Paludibacteraceae bacterium
MTETWESLFKERALEEGRSEEFISQCIEYAGKLHEKNLPVIFDFVHLAYYLGFYSEKLQGIVANVEGHYRTYHIRKKSGGTRMIEAPDAMLKDVQHWIYGNILCRDKSIKDCVHGFVPALTEKDKVRGILSNAAPHSGHEWLINLDLKDFFHTVKLDMVKAYFDSLGYVEEVSKTLTALCTMKSRLPQGAPTSPMLSNLIATKMDEEMMAYCGKRGITYTRYADDLTFSANYDVEMPLVKELYAIIFRNGFIVNRKKTKIRYSGYKKEVTGLTVTNGVHVPKKYRKEVWRELYFCKKFGVYEHYHQMDTDKGLYKAWLRGRIMFIRQIDPACGNKMLEQFNELNWLV

SEQ ID NO: 2670 - protein, 347 aa, unidentified
  source 1..347: note = Related to NZ_RBXN01000012.1; note = Coprobacter fastidiosus
MTDTWESLFKECAVENNHTENYLKECFEYAGSLHQRNLPVIFDFVHLAMYFECCAETLKGMVANVEKHYTEYKIRKKSGGDRLIEAPDFLLKNMQRWIYINILCKDLSINDCVHGFIPAFKNRDKVRGILTNAAPHAGHDWLINVDLKNFFHTVELDNVNNYFHSLGYEDEVVKTLTALCTYKSRLPQGAPTSPMLSNIIASRMDEMMLEYCKKRGIVYTRYADDLTFSADYDVKIPALEDIYKIVYLNGFKVNRMKTKVRYKGCKQEVTGLTVTNGVHVSQKYKKEILRELHFCKKFGVYEHYQHLKTTKGLYKDWLRGKIMFVRQIDPACGNKMLEQFNELNWLV

SEQ ID NO: 2671 - protein, 346 aa, unidentified
  source 1..346: note = Related to MKTD01000020.1; note = Bacteroidia bacterium 43-41
MEETWESLFKKQAVKKKHSDEYINECMQYAFHLHEKNLPVIFDINHLSEYWNLDIDLIKSIIECPPRYYAEYDIRKKSGGTRHLCAPHQVLKYIQRWIYHNILLKDITISEHVHGFIPKDQFDSKRTILSNAQAHEKCKWLINMDLKDFFNTIKQERVKKYFLSIGYTEDICELLAKLCTLHYRLPQGAPTSPTLSNLIAREMDKELECLCAKNHWCYTRYADDLTFSGIYIDETPSINELEKIIIQNGFLVNRQKTKFRLRGNCQMVTGLTVTHGVFVPKKYRKEVWKELYCCKKFTPYAHCQYRYPDKGFYKDWLKGRIMFIRSIDPACGNKMLDAFNQLKWVL

SEQ ID NO: 2672 - protein, 346 aa, unidentified
  source 1..346: note = Related to VZAS01000054.1; note = Prevotella copri
MEQTWESLFSEQAGIEGHSQQYISECLAYAGILHSHNVPVIFDKCHFFSFFPDIKKGRMEMFLLNLCCYKNYSIKKKAGGVRMISAPYSDLKRVQRWVYENILLKDLYSVSPCAEGFMPKDKDDIRNIVTNARRHARSKWLINVDIQNFFDSIKYDSVWEYFSKLGYEKEVADVLAKICTYQFRLPQGAPTSPMLSNLIVRSMDDAFVELASKCKCFYSRYADDITLSGNSDSIMPSMRDIYQIVYAHHFRPNKKKTKISFSCDRQMVTGLTITDGVHVPKKYRKDVWKELYCCKKFGVASHIAYRHPDQGMYRYWLLGRIMFIKSVEPECGEKMLQEFNSINWGI

SEQ ID NO: 2673 - protein, 305 aa, unidentified
  source 1..305: note = Related to JAGBLT010001022.1; note = Bacteroidaceae bacterium
MKDTWESLFKKEAKKQGHSDAFIQECIGYAAKLHANNVPVIFDFKHLSAIFDMESRDLFFMCKHLGQQYTTYSIKKKSDPKAIRLLTAPGWQLKKIQLCILRNILMRDNSVSEHAHGFVRKKSIVTNAKAHEGARWILCMDLKDFFGTVRKGKVYDYFESLGYEKSVVETLATLCTYENHLPQGAPTSPCLSNLMAKGMDEEIEAYSEQNGFVYTRYADDITISSKTDIKPEKNTINAIVRKHGFRVNHDKTKLRHNGQRMEVTGLTVGRGVHVPKAYKKALFRELYFCRTQGPKEHSEMVYKGK

SEQ ID NO: 2674 - protein, 304 aa, unidentified
  source 1..304: note = Related to NZ_FUFJ01000030.1; note = Porphyromonas gingivalis
MEHLLDYYWTGQFPRANACCQFDWAYRDYRIQKKTGGFREISAPNPTLKWCQHWIQHNILEHVVNRLPSSVHGFVQNRSIQTNALPHVNSEWIINIDLKDYFDSIFQKKVLDFFLQLGYEDSVSEFLSNVCTKFSCVTYQRALPQGAPTSPLLANFLTINLDKDLERLAQELDMRYTRYADDITFSGLQKTCPVTPRDIENIIYEHGFRPNKSKTRIRHKGSRMMVTGLTVGNGVHVPKEYRKQVLRELHFAKKYGPENHCRKVRNEKGYFREWLLGRIMFVRSIDKEAGARMLEIFNEINWMM

SEQ ID NO: 2675 - protein, 316 aa, unidentified
  source 1..316: note = Related to WSNW01000001.1; note = Coprobacillus cateniformis
MEDLGNEFIKKLPVILDIYHLSNLVGIKYNLLKDILSNKDKYYHTFYISKKMGGKRKIEAPNEVLALLQKYIKNEILDNILVSEYAFGFVKEKNILLNAKRHLNQEMILNIDLENFFPTIKEKRVFYIFYKLCKYDYHISKVLTNLVTLQGRLPQGACTSPVISNIAAYKLDKRLSTYAKKLNLIYTRYADDITFSGSKKIINNFFLKNIQNIIKECGFVINDKKTRFCSQYGRQEVTGLIINDNYIHINKKYIREIRQELYYINKFGISNHRNNKDFSNMYYREHLLGKILFVKSIHQDIGLSFFNQFQNIDWEK

SEQ ID NO: 2676 - protein, 348 aa, unidentified
  source 1..348: note = Related to DPQP01000004.1; note = Firmicutes bacterium
MSKKNIYEQYKAKVSNNENYTDEKKKKYLEQIEILKAKNSEIILNTYHFSNLVGIKWNTLKKIIDDPDKFYYNFQISKKTGGKRTINVPNNSLELCQKYIKEKILDNVKLHSAAHGFVNNKSIITNAKVHVNSEMILNIDLKNFFPSISRKKVFYIFNKICGYDNSLSHCLTKLVMYKNGLPQGACTSPIISNIVTFKLDLRLKKLSDKLGLNYSRYADDITFSGNKNVINSKFLDFVKTIINECGYQINDKKTRFESKCGRQEVTGLIVNNGKVSIPKQYIQNLRKDLYYIKKYGIEEHKKRNNIYNAFYQEHIKGQIMFVYSVSKNKGIKLLKKYNLIFDDTKYGN

SEQ ID NO: 2677 - protein, 354 aa, unidentified
  source 1..354: note = Related to CP074573.1; note = Tenericutes bacterium
MENKNLYRKKIENSDISFNEKQKLLSNLGNIKDDYPIILNGYHISNKVGIKWNDYLKLLKNTNKYYHVYYMAKKSGGRRKITIPDQILMDIQYFIKNNILENIKIDESAFGFRKQKSILANATYHREGEKVLIMDIENFFPSIHKGRVYYVFNKICGYSREVSYDLTRLVTYNNGLPQGAPTSPIISNIVAYKLDLRLKGLSYVIGIKYSRYADDLTFSGAENKINDKLLYTVSNIIEDEGFKLNLKKIRFYGKNSTKIINGLVINNGYVTIQKRYIDKIKQELYYIRKFGLESHLNYVGFKNKHYAEHLKGKILYVYSIDKEKGKQLFSLYNELNIENKPNLVRGGFDEMPVL

SEQ ID NO: 2678 - protein, 361 aa, unidentified
  source 1..361: note = Related to NZ_NQYJ01000016.1; note = Candidatus Izimaplasma sp. ZiA1
MFTRLRMFLMSLLEKKKKYTKSIKVTQIKNENVTPLKKHTPLKYDLPAISNALHLSNKIGIKWEVYKDIARHPENHYHVFHIKKKNGGFRTIAAPNEELSMIQNYINENILFAYKIHKSAFGYVKGKSIIDVANHHLKSENFLSLDLENFFPSIGAERLYYYFGKLGGYDKSISDNLVRFCMYGTGIPQGACTSPQISNIIAYKLDLRLGELCQSKGLKYSRYVDDLTFSGETEHINDKLLFTVQKIIADEGFKLNSKKTRFGNNRNGFIITGLMIRNNSICVPSSYIKKIKNELYYINKYGLLDHKKREKIENSNYLEHIKGKINYVMHVDESKGLLVKEQFDKTILKINSMESDMRGLL

SEQ ID NO: 2679 - protein, 336 aa, unidentified
  source 1..336: note = Related to KE150412.1; note = Paenibacillus sp.
MDLNLLESSLTQKGYGKRYKKICINYAKALNEQGLPVIFDNNHLSLLMGIESKILGHYIMNSNKFYKEYQIAKSNGSLRTISTPSYNMKTIQRWVLDNVLSSFAIHSNAFGFVKGRNIKDNALLHTKKKVVLNIDIKNFFPTIKFDRIFYMFYHHGYTKELSYTLAALTTYNGSLPQGAPTSPYISNILCQRMDKRLLALAKKMNADYSRYADDITMSGDENVRQYIETIKSIIINEGFDINYKKLRLQTDNNMQEVTGLIVNEDVKVKRKYKKRLEQHIYYCKKFGVYSHLKKIESESKSYFKEYLYGIANFIKMIEPDEGLEFLKKLDEINWGN

SEQ ID NO: 2680 - protein, 331 aa, unidentified
  source 1..331: note = Related to NZ_MKQM01000043.1; note = Paenibacillus odorifer
MEAMLIKKGYGQRYKETCMQYAQELADHGLPVIFDNKHLSLLMGIESNILGYYIISSNKFYKEHQIAKSNGSLRTISTPSYNMKTIQRWILDNILSSFAIHSNAYGFVKGRNIKDNAIIHTKKKLVLNIDIKNFFPSIKFERVFYMFYHNGYTKEISYSLAALTTFNGALPQGAPSSPSIANIICQRMDKRLLALAVKMNADYSRYADDITISGDENIRKYIETIKSIIINEGFDINYRKLRLQTNKNMQEVTGLIVNEDVKVKRKYKKRLEQHIYYCKKFGVYSHLKKNESESKSYFKEYLYGMANFIKMIEPDEGMEFLEKLDEINWGS

SEQ ID NO: 2681 - protein, 338 aa, Bacillus sp.
  source 1..338: note = Related to NPDG01000102.1
MDYIAALQEALIQKGYGNKYQKLCVDYASNLLNNRLPVIFDKKHLALLMGVNYQTLTYYLINTDNFYKEHKIIKSNGGYRTISAPSFNLKAIQRWVLDNILYKYQVSDNANGFVKGKSIKNNAESHIGKEIILNIDIKNFFPSITFQQVFYLFYNSGYTKEMSFTFAKLLTFKGRLPQGSPASPYLANILCKKLDSRLNGFAIKIGASYSRYADDITFSGDADIYRHISFIRNIIESENFKINEKKLRVQKSNSKQEVTGLIISNGEVKVKRNYKKKLEQHIYYCKKFGVFNHLKYTGASDKSYFKEYLYGMASYVSMIEPDTGKSYLNSLNEIIWDY

SEQ ID NO: 2682 - protein, 337 aa, unidentified
  source 1..337: note = Related to NZ_JAERMG010000001.1; note = Priestia flexa
MDYINSLREALIQAGYGRRYQKLCLEYADNLLNNQLPVIFDKKHLSLLMGVEPSILGYYIFNSDNFYKEYKIPKSNGDLRVLSAPSFNLKSIQRWILENILYNYQVSNNANGFVIGKSIRDNAEPHIGKEIVINIDIKDFFPSINFERIFYLFYNSGYTKEISYTFAKLLTYNKLLPQGSPASPYLANIICNRLDKRLSGLASKIKASYTRYADDITFSGEANIVNYIKTLRNIIESENFSINENKLRIQKQNSMQEVTGLTVNNGVKVKRKYKKNLEQHIYYCKKYGVYSHLEHTGAKDKSYFKEYLYGMASYIKMIEPDVGEYFLRNLDEINWDY

SEQ ID NO: 2683 - protein, 337 aa, unidentified
  source 1..337: note = Related to JALMMK010000003.1; note = Clostridioides difficile
MDYLSRLEKKLIELDYDNNYKSICIKYAKKLLDNEALVVFDKKHLSLLMGIDLKILNYYIVNTDEFYNEKKIPKKNGRYRIISMPSYNLKRIQRWILDNILYKLRVHSNATGFIRNKSIVDNASCHVNKDVVVNIDISDFFPSIDFDKVFYMFYNLGYTKELCYALSKLLTYKGILPQGAPSSPYIANVIMINIDLRLDGLTKKINSNYTRYADDITISGNKYIVLQLPFIKTIIESQGFKVNLEKLKIQYRKSRQEVTGLVVNDRISVKREFKKNLRQHIYYCKRFGVYEHLKYTGNEEKSFYKEYLYGHAYFIKMVEPECGERFIKELDSINWDS

SEQ ID NO: 2684 - protein, 337 aa, unidentified
  source 1..337: note = Related to NZ_NOJY02000076.1; note = Romboutsia sp.
MDYLNRLEKKLNELEYDDYYKSACITYAEKLIDNEVPVVFDKKHLSLLMGINLATLNYYLVNTDEFYNEIKIPKKNGRYRVISMPSYNLKKIQRWVLDNILYNIKVHNKATGFVRNRSIVDNAKYHVKKDVVVNIDISNFFPSIDFNKVFYMFYNLGYTKELCYVLSKLLTYKDTLPQGAPSSPYIANIIMMNIDLRLDGLAKKINSDYSRYADDITMSGNRDIVVHVPFIKSIIESQGFKVNLDKLKIQYRKSRQEVTGLVVNDRLSVKKELKKSLRQHIYFCKKFGVYGHLKYTGNEGKSFYKEYLYGHAYFIKMVEYECGKRFINELDSINWNS

SEQ ID NO: 2685 - protein, 339 aa, Bacillus sp.
  source 1..339: note = Related to JAIUKX010000001.1
MDYLSKLELKLTDNGYSKKYKELCISYASALQNRNLPVIFDIKHLSKLMGVRYSVLFYYITKSEEFYKEFKIPKKMGGIRAIYAPSLNLKKIQRWILENILTYFDVDDSAKGFKRSMGIVENAAIHTNKSLVYNIDIRNFFPSISYEKIYFLFYNAGYSSEVSFAISRLVSYQGYLPQGSPCSPILSNIVCRKMDEEMKRLAFKVGASYSRYADDMTISTDDIRLFVSKKEAFKEIIERNGFILNNKKERMQYYNQPQFVTGLLVNEGVKIRRSFKKEIEKHIYFCEKYGIFNHLKQIGMEEKSFYKEYLYGKVNFIRSVEPETGKYFLERLNKLDWTY

SEQ ID NO: 2686 - protein, 339 aa, Bacillus sp.
  source 1..339: note = Related to NZ_HG428741.1
MNYLDELKVKLIAKGFSDKYIKRCTQYAENLYNENFPVIFDVKHLSMLMGINYNTLFYYIINTETFYKEFKIPKKSGDYRIIEAPSLNLKKIQKWILDNILLHFPVNACATGFKKQTSIVDNAKVHVNKELVYTIDIKDFFPSISFKDVYFLFYNVGYSSQISYAFACLTTHCGKLPQGSPCSPTISNILCNKMDESMKVMANEISANYSRYADDMTISTNDIPLFLSKRKAFKQIVEFYGFNLNNKKERMQFKNQAQFVTGLLVNNGVQVKRAFKKEVEQQIYYCEKYGIYGHLRAKGMAEKSFFKEYIYGKVYFIKSVEPEVADQFLERLNRLHWSY

SEQ ID NO: 2687 - protein, 339 aa, unidentified
  source 1..339: note = Related to NZ_CP038015.1; note = Paenisporosarcina antarctica
MDYVDELKMKMINRGFSTKYIDKCTTYAENLYNKNSPIIFDIKHLSKIMGISYPILFHYIYNNQKFYKEFKIPKKSGSYRVIDAPSLNLKKIQRWILDNILVNFSISKYAMGFKKQVNIVENAQIHTNKELVYNIDIKDFFPSISFENVYFIFYNIGYSSEVSYAFAKLMTYKGYLPQGSPCSPIISNILCINLDESMNSLSKNIGANYSRYADDMTISTNDIPTFLVKKGAFKNIIEFYGFKLNDKKERMQYKNHPQFVTGLLVNNKVRVRRVFKKEVEQQIYYCEKYGIFNHLKELGLEDRSFFKEYIYGKVNFIKSVEPEVAERFLERLNRLKWSY

SEQ ID NO: 2688 - protein, 340 aa, unidentified
  source 1..340: note = Related to NZ_CP009286.1; note = Paenibacillus stellifer
MQNTFLDELKQKLYDNGFDDAYIGLCLDYSKRLIANRLPVIFDKIHLSMLFGMEVKELTVLVKSIENQYTIRNIPKKNGDTRELYIPSLKLKEIQRWILDEILYNIKVSPYCTGFMKEKSILENARIHENKACVMNLDIRNFFPSIRFESIYRVFYYYGYTSEVSYYLARLCTVHNFLPQGAPTSPYLSNIVCLRLDKRLSSLASKYDANYSRYADDITLSGTGSSIVPRLPLIKIILDSEGFKINYKKVRVQKQQERQIVTGLVVNNKARVPREVERELRQQIYYCKKFGVNEHLKRKKKNKLSGFKEHLYGLAMFIKMIDNRKGERYVSDLNEISWDY

SEQ ID NO: 2689 - protein, 340 aa, unidentified
  source 1..340: note = Related to NZ_MPTF01000003.1; note = Paenibacillus odorifer
MKEYEYISRLKAALIQENYDDDYIKLCNDYSYRLLENSLPVIFDKEHLSRLLGLEERYFFQLFMMADGFYKEVQIPKKKLGQFRNISVPTEVLKYVQRWILDNVLYNIRVSEATTGFVKGKSIVDNAKKHVRKECVINMDLKDFFPTITYDSVFRLLKYYGYTNEIAFILSKLCTFRDVLPQGAPTSPFISNIVCYKLDIRFIKLCNKIGADYSRYADDLTISGPRYIVGYLNLFSDIIVEEGFQINESKTRIQYPNNRQEVTGLIVNDKISVPKETKKYLRQQIFYCKKYGVNSHLRKINIQKSNYKEHLYGIAFFIKMVELELGEKFLEQLNEIEWDY

SEQ ID NO: 2690 - protein, 300 aa, unidentified
  source 1..300: note = Related to NZ_MDER01000051.1; note = Paenibacillus sp.
VIFDKNHFAKLIGLKKEYIFQILMVTEMFYKEISIPKKRLGEYRDISIPAQGLKYIQRWILDNILYNIPVSEVCTGFVKEKSIIDNAKKHINKDCVINMDIKDFFPSITYNDVFFIFKYYGYTNEVSFLLSKLCSYKGSLPQGAPTSPYISNIISYKLDVRFMLLAKKLKADYSRYADDITISGNKYLVKYLKVFKNILIEEGFKVNERKTRIQYSNKRQEVTGIIVNNKLSVPKETKQYLRQQIYYCKRFGVNSHLARIGIQKSNYKEHLYGMAFFIKMIQQEEGENMLNNLNDIDWDY

SEQ ID NO: 2691 - protein, 338 aa, unidentified
  source 1..338: note = Related to SADX01000003.1; note = Lysinibacillus sp.
MSSYIESLVSGLREKGYRDQYINLCVEYCERLINNNLPVIFDKDHLALVMGIRDEYLAKLFMFPEKFYKQARIPKKKKGEYREISIPYQTLKHLQRWILENILYRLKVSDSSKGFVPKLSIVENANKHLQKECVINIDIKDFFPSIQFNEIFNIFYYYGYTKEISFILARLCTYEGRLPQGSPASPYLSNLVNVKLDRRFENFCKKIGADYTRYADDITISGPKYITKYIHQLKEIITDEGYNLNEEKTRILFKHQRQEVTGLIVNDVLGVPIKMKKYLRQQIHYCKKFGVSNHLMKIGNQRSNFKEHLFGLAYYIKMVEKEKGEKFIEDLNTLNWDY

SEQ ID NO: 2692 - protein, 338 aa, Bacillus sp.
  source 1..338: note = Related to NUBN01000013.1; note = Bacillus wiedmannii
MDTYTHRLKYEMNLHNYDENYIKLCCDYSKRLETNNLPVIFDKVHFSLLLGIEENYLAKLFMITEHFYKLARIPKRKPGMYREILVPFKNLKEIQRWILHNILYNIDVSSATTGFKPDSSILENAKPHVNKPCIIKLDIKDFFPSIGFDQVYRIFAYYGYTNEVSYLLAKLCTYKGYLPQGSPTSPYISNIICLKLDKRFKELCKTLNADFTRYADDITISGDSFIAKYIDTFKSIIESEGFVVNEDKLKVRYSNERQIVTGIIVNTKLSIPRETKKSLRQQIYYCRKYGVYNHMLRTNLDRANYKDYLYGLAYFIKMVEKDVGQKFIDDLNTIYWGY

SEQ ID NO: 2693 - protein, 337 aa, unidentified
  source 1..337: note = Related to NZ_CP053893.1; note = Clostridium beijerinckii
MEDYINRLKEEIELREIEESYGQLCIEYAERLIENNLPVIFDREHIALLLGINYDYVNKIMLFTDKFYKVYKMKKKNGDYREISIPNVRLRYIQRWLLDNILYKISVSEHVTGFVPKKSIVDNAIKHVNKELVLAMDIKEFFPSVKFEKIFNIFYYYGYTKEVSYCLARICTLDGSLPQGAPTSPYLANIVCKRMDMRIESLCGKINAIFTRYADDITISGKRNIIEYLSLMQNIIKDEGFEINNKKTRAMYSNRQQRITGLIVNEKVNVPKNKIKYLRQQIFYIKKFGVTRHLEKNGYCYGNLKEHLYGLAYFIKMVNEEKGIKFIEELDGINWES

SEQ ID NO: 2694 - protein, 337 aa, unidentified
  source 1..337: note = Related to NZ_LN879457.1; note = Proposed Desnuesiella massiliensis
MSDYLYKLKEALNFEKVDIKYSELCIEYASRLINNNMPVIYDKKHFSLLLGIEQQYINKLVLCTDRFYKKFSIRKKNGGDRIISIPNIRLRCIQRWILDNIIYNIRVSENVTGFIPNKSIVDNARAHVDSDAILALDIKDFFPSISFDKIFRLFNYYGYTTEISYCLARICTLNNTLPQGAPTSPYLANIVCKKMDKRISSLSKKIGAKYTRYADDITISGKKNITSYSKLIKDIIRDEGFLVNNEKTRVMYRNRQQRVTGLIVNKKITVPKEKIRYLRQQIYYINKYGVVGHREKSKVKHRNIKEHLYGLAYFIKMVDEIKGEKFLNDLNKINWES

SEQ ID NO: 2695 - protein, 337 aa, unidentified
  source 1..337: note = Related to JABSWM010000001.1; note = Clostridium beijerinckii
MENHIEKFIDKLKVMQYSDDYINLCIEYAERLTDNNLPIIFDIEHFSFLVGLEKEYINYIIHKKKHFYIEFTIKKRKGGNRLLSIPSKKLKYIQRWILDEILYKIPVNEHAKGYIPNKSIVDNAKPHVKKKCIIKLDIKDFFDNIDYNRVFRIFYYYGYTKNMSYKLAELCTYENKLPQGAPTSPYISNIVCLKMDKRFSKLCNKFNATYTRYADDITISGDNSITKYFKAYVRIIESEGFEVNAEKVISIKGNRTKRVTGIVVNEKLSVGREMKRKLRQQIYYCKKYGVRDHLKKIECEKSFYKEHLYGIAYYIKSVEPIDGEKFLEELDEIMWEY

SEQ ID NO: 2696 - protein, 344 aa, unidentified
  source 1..344: note = Related to NZ_CP017603.1; note = Clostridium formicaceticum
MECYRMDYIERLREQLIKQGYGKRYIYLCEQYCTRLLQNGLPVIFDNIHFSLLLGMTTQDLGKMIFLTDSLYNSISIPKKSGGKREISIPTVNLKYVQRWILDNILYNIRVSSQATGFVKGLSIVDNARPHVNKECVITIDIENFFPTISFETIFRLFYYYGYTKEMSYVLAKLCTYEGKLPQGAPTSPYLSNIVSLKLDKRFNSLVNKLSDLNASYSRYADDLTVSGDKKIVKYVPLFKEIIQDERFIVNEKKFRVQNKPDRQMVTGIIVNEKISVPIQTKKYIRQQIYYCKKFGVDRHLEHIKSIRSNYKEYLYGIAYFIKMVENDYGTSLLEELNTIVWDY

SEQ ID NO: 2697 - protein, 338 aa, unidentified
  source 1..338: note = Related to CP013121.1; note = Fusobacterium nucleatum
MDEYIKKLKLLLENSDYEEEYKRKCIEYAERLLLNGLPVIYDLEHLILVLGIKKKILTKMIFAYHNFYSTVEIPKKSGGSRKLQIPSVELKYIQRWILDNILKKIKISKHAIGFCNEKSIVDNAKIHIGNKCILNMDIKDFFPSVNFEMVFRIFIYYGYTKELSFIFTRLCTYDGFLPQGSPASPYISNIVSLKIDKRLSRLAEKYHANYSRYADDITFSSNSSMKKLPEIIQKILLEEGFMVNKKKTRFQYFYQRQEVTGLIVNNGRVRVKKSYKKELYQTIYYCQKFGVNNHLEKINCYKNFYKEYLYGKAYFINMVEPEEGKKIFKLLEEIQWDY

SEQ ID NO: 2698 - protein, 338 aa, unidentified
  source 1..338: note = Related to JABXYS010000002.1; note = Peptostreptococcaceae bacterium oral taxon 081
MENYIYKLKILLKKSGYGKHYSEKCVEYANRLIENNLPVIFDIQHFSLVSGAPKELIGKMLFADSKFYSLALIPKKSGGVRELHIPSAELKYLQRWILDNILSRIHVSQFAMGFCNNKSIVDNAKMHIGNECILNMDIKDFFHSITFKMVFRIFAYYGYTKELSFVFAKLCTYEDVLPQGSPASPCISNIVSLRIDKRLSLIAEKYQACYSRYADDITFSGNRGIKKLIEITSNVLEEEGFSLNNKKTRMQFPHQRQEVTGLIINGGMVRVNKKYKRDLYQACYYCKKFGVDSHLKKIKCDKSFYKEHLYGKAYFVNMVEPDEGKKLFNLLDKIHWDY

SEQ ID NO: 2699 - protein, 338 aa, unidentified
  source 1..338: note = Related to NZ_JAHLDH010000001.1; note = Clostridium algidicarnis
MENYLESLKIEITEQGYDEYYTTKCIEYAERLLSNGLPVIFDTDHLSLVTGAPKQLILKMIFANSCFYSEARLPKKSGGIRVLNIPSIELKYVQRWILDNILKKINVSSYATGFCDNKSIVDNAKVHIGRECILNMDIKDFFPTITFKMIFRIFVYYGYTKEVSFTLARLCTFENFLPQGSPASPYLSNIVSLKIDKRLSLLAKKYKANYSRYADDITFSGNHGIKKMSSIVSEILEDEGFKVNDGKTRLQYSYQRQEVTGLVINNGKVRVNKHYKRELYQILYYCIKFGVNSHLQKINSTKTFYKEHLYGKAYFVNMVEPDEGRKLFDLLECIQWDY

SEQ ID NO: 2700 - protein, 341 aa, unidentified
  source 1..341: note = Related to JAFUNX010000099.1; note = Clostridia bacterium
MNKEEYLQELKNGLAYQGYDSRYIQACFEYAQNLLIHGLPVVFDVHHLSLLLGMTTKQLNAYIFGSGKRLYSTKHISKKDGGVRVLSIPCETLKYIQRWILDNILKRMYISECCKGFVDDCSILDNASCHLGAEVILNMDIKDFFPSISLLQVYRVFRYYGYTQELSYVMAKLCTYRDQLPQGSPASPYLSNIIALKIDKRLMALAESYGAHYTRYADDITISGFGCLEKMIPIISSVISEEGFVVNSKKTRVARKGQRQEVTGLIINSGKACVPKEYKRKIFQEIYYCQKFGVTNHQEHIGDDHRYYKEHLYGKAYYVHMIEPHIGKKMLSELDKVNWEV

SEQ ID NO: 2701 - protein, 341 aa, unidentified
  source 1..341: note = Related to CP042469.1; note = Clostridiales bacterium
MDKEKYISELRIQLESMEQSQKDIDSCISYAIRLIDSSLPVIFDKRHLSLLLGIELEELTTILATLEENYYNEMSIPKKSEGYRTLNVPAMKLKMIQRWILDNILEHIPVSDHVTGFCKERSIVTNAKKHIGKQCVISFDIKDFFPTIDIESIFMVFYYYGYTKEISYALARLCTYDGYLPQGSPASPYISNILCLKLDKRLSLLAEKYVADYTRYADDITFSGNYGLSNIINIVKNIIQEEGFTVNERKIRVKYKHQRQEVTGLIVSDNKVSVSKLYKRKLWQEIYYCQKYGVSSHLEHINCKKSFFKEHIYGKVYFIYMVEPEEGRKLLIALDKIAWDY

SEQ ID NO: 2702 - protein, 341 aa, unidentified
  source 1..341: note = Related to NZ_CP065321.1; note = Acutalibacter muris
MDKERYLKKLEEALSESSSSIPESLACIRYASNLLTFDFPVIFDRTHLAHLLGIKPSDLSALIYSIDSYCYHEFHLAKKSGGMRVINIPSVDLKDIQRWILDNIISKMHISEFANGFCKGKSILTNALSHIDQECVINLDIKDFFPSVGIDRVFMLFKYYGYTKEVSFALAKLCTYRGILPQGSPASPAISNVICLKLDKRLSKLAESYNGVYSRYADDLTLSGTKNITQLIPTVIAIVEEEGFCVNAQKTHIAYAHERQKVTGLLVNEGKVRVSQKYKRRLRQEIYFCQKFGVSDHQKYCNENFQFFKEHLYGKAYFVSMVEPEVGNAFLEALDNIAWEY

SEQ ID NO: 2703 - protein, 341 aa, unidentified
  source 1..341: note = Related to JABMAY010000023.1; note = Dialister sp.
MDKIKYLASLRSAIIASGKSEKYSIVCCNYASSLLNSNLPVLFDNSHLARALGITPLDFGKLLYSIDDYCYHEIKIPKKNGGVRTLDIPSMDLKYIQCWILDNILNKMHVSDYANGFVKNRSILTNAQNHINSECVVNIDLKDFFPTVKFEQVFRIFKYYGYTKEVSYTLSKLCTYRGILPQGSPASPAITNIICLKLDKRLSALGQKHEATFSRYADDITFSGKKAIVHLLPYAINIIRDEGFAVNLDKTHTSFKHQRQEVTGLIVNGDKVHVSQKFKKRFRQEIYYCKKYGVQSHLKHINDHHAFYKEHMYGQAYFINMVEPSLGQELLRLLDSISWEY

SEQ ID NO: 2704 - protein, 341 aa, unidentified
  source 1..341: note = Related to JAHRFW010000235.1; note = Erysipelothrix sp.
MDKTNYLKEIEILLKNNDESNENISNVLKYAANLLNLDMPVIFDKSHLATLLGLSVSDFNHYVIGSNDSQYNTLMIPKKSGSFREISIPSVELKKMQRWILDNILYKIEVSEYATGFVRKKSIKDNAKCHLENNCVINLDLKNFFPTIHFDRVFKIFYYSGYTKEVSFLLSKICTYKSILPQGSPASPQISNIACLKLDYRLSKLSKCFRASFSRYADDLTFSGDYGITKIIDTVKKIVNDEGFEVNEKKIRIQFKHQKQNVTGLTVNDFKVRVSREYLRKFRQEIYFCQKFGIRDHLRFINSDRRYFRDYMYGKAYFINMIDVDEGKLLLNKLNQINWEV

SEQ ID NO: 2705 - protein, 340 aa, unidentified
  source 1..340: note = Related to PGZS01000061.1; note = Firmicutes bacterium HGW-Firmicutes-3
MNNNPYVKELYSVLSQKGEKQEDIDAACKYAENLIALNLPVVFNKEHFSLLVGRKYKEITTLMATLETNYYHLAYIKKKNGGERTLNIPAVSLRIIQRWILDNILKNMYISQYAMGFCKNKSIVTNAKYHLGKTCVINVDLKDFFPSITQKQIFNIFYYYGYTIDVSYMLSRLCTCEGRLPQGAPTSPCLSNIVCLKLDKRLSEVSKRFKAEYTRYADDITFSSNSDISNILPIVKEIIQDEGFQLNEKKTRILFKHQKQEVTGLLVNGNQIRVDKKYIKKFKQEIYYCKKYGVEDHLEHIDCKKHFYRDHMYGKAYFVKMVDEKVGKKLINELDSIDWE

SEQ ID NO: 2706 - protein, 341 aa, unidentified
  source 1..341: note = Related to JAJFDX010000002.1; note = Proposed Lachnoclostridium pacaense
MNNEGYLENLEKELIDSNEKVKDIEAAKKYAKNLLNLGLPVIFDKQHFALLVGRELSEITKMMAMIETNYYHEANIVKKSGKMRTLNIPAVSLRLVQKWILDNILYKIRVSQYCNGFCKKKSICTNAQNHLNQDCIVNMDMSDFFPSISQKQIFRIFYYYGYTVEVSYILARLCTYDGYLPQGAPTSPYLSNIACLKLDKRLAGLAKKYESTYSRYADDITFSGKCGIQKIIPVAEKIIQDEGFSLNVNKTRIAYYYQRQEVTGINVNGKKMHVDKRYVKGFCQEIYYCEKFGVHDHLQHIKCNKHFYKEHMYGKAYYINMVDKDLGRKLLSRLDNIDWDD

SEQ ID NO: 2707 - protein, 353 aa, unidentified
  source 1..353: note = Related to QUMM01000064.1; note = Lachnospiraceae bacterium OF09-6
MGNRCTETWRLYMKTEEYLNELRTVLVAADECEADIVAAEQYAENLMQLGMPVIFDLHHFAKLVGKEARDIGNMMMHQEDFFYRQVQIEKKHGGYRTLDIPAMNLRNIQKWILKNILYQISVSEHACGFCKKRSIVTNAERHVGKECVINVDIKDFFPSVHGDQIFKIFYYYGYTTEVSYLLSRLCTYRDYLPQGAPTSPYLSNIVCLKLDKRLSRLAKSYQAEYSRYADDITFSGNAGIKAMLPIVEGIVNEEGYLLNKDKTRIAYKHQRQEVTGLLVNGTTVRVSKQYLKKFSQEIYYCKKFGVRSHMEHIHCEKRFFRDHMYGKAYFIQMVDRDMGKRYFAELEQIDWES

SEQ ID NO: 2708 - protein, 337 aa, unidentified
  source 1..337: note = Related to QVIB01000063.1; note = Dorea longicatena
MNYIQKLQEKMRESEQSEQYIKTCSTYAQRLIDNGVPVVFDFSHLALLLGFKTADIAFYLFAEDDLFYKEIEIPKKRGGYRKIDIPSERLKCIQRWILDNILDNMEVHECCYGFCKGKSIYDNALLHVGKKCVLNMDLKDFFPSIKQKDVFNIFYKKGYTKKVSYYLSKLLTKNGELPQGSPASPMVSNIVAEHLDTRLSALAKRYCAEYSRYADDITFSGALNVKNMIPIITGIIEDEGFNINEKKTRYAYYYQRQEVTGLIVNKKVSIPKEYIKELKKEIYYCEKFGVTSHLERTNMHKSFYKEHLYGKAYFVNMIDKNMGQQILKHLDTIMWEY

SEQ ID NO: 2709 - protein, 337 aa, unidentified
  source 1..337: note = Related to JAGZKG010000016.1; note = Roseburia hominis
MGYVQKLKDKMIEQGADENYVELCVSYAQKLCSNSVPVIFDFKHLSLLLGYEPSELAFYLFAPEDSFYTQMKIPKKSGGMREIEIPSDKLKSIQRWILRNVLENIEVHEACYGFTKGKSIYDNALLHVGKECVLNMDLKDFFPSITQKDVFNIFYQKGYTKRVSYYLAKLLTKDGVLPQGSPASPKISNIVALHLDKRLSELAKCYRATYSRYADDLTFSGASNIKNMIPIINKIIHEETFLVNEKKTRYSYYFQKQEVTGLIVNKKVSVPKEYLKELNKEIYYCKKFGVSSHLKKTENHKSFFKEYMYGKAYFINMVDKELGQKILRELDTILWEY

SEQ ID NO: 2710 - protein, 337 aa, unidentified
  source 1..337: note = Related to WQOO01000018.1; note = Eubacterium ventriosum
MEYCQELQKMMREQEMDETYIELCTSYAKRLLKNDMPVIFDFKHLSMLLGIEPYEMAFYLFADEKLYYTEIQIPKKRGGVRIIDIPSERLKDIQKWILDNILSRYTVHECCYGFIRGKSIYDNALQHVNKRCVLNLDLKDFFPSITQEQIFKIFFSVGYTKKVSYYLAKMLTKNKKLPQGSPASPMLSNIVAKKLDSRLNGLAKKYGAVYSRYADDITFSGEGNIKNMIPIVEKTIQDEKFQVNKSKTRYSYYFQRQEVTGLIVNKKVSIPKEYIREINKEIYFCKKFGVSSHLEKIQNYKSFYKEHLYGKAYFIKMINKRKGNQILEQLDEIEWDY

SEQ ID NO: 2711 - protein, 338 aa, unidentified
  source 1..338: note = Related to JAAVHR010000078.1; note = Clostridiales bacterium
MIRIDLEKYKEFLSKKNIKKKNKELLIQYAERLTNNNLPIIWDIRHFSIITDIPYKRILSYIYETEKFYHEIDIPKKRGGVRTLEIPSLELKTLQRDILHELLECINTSEQAYGFLKGKSIVDNARQHVGKRYILGIDIENFFATINVDRIFKIFYYYGYTKEVSFMLSRIVCKDGYLPQGAPTSPYLSNIVCRKLDRRLLGVAKKYGATYTRYADDITFSGEIHPDVYVDLIKKIIVEEGFCINSNKTRILGNNQRQEVTGIIVNKKVKVNKKYKEYLRQQIYYCNKYGIDSHLEKIGNNVTGFKEHMYGIANFIKMVEPDEGEKWINKLNEISWYY

SEQ ID NO: 2712 - protein, 344 aa, unidentified
  source 1..344: note = Related to NZ_CAKODJ010000004.1; note = Adlercreutzia muris
MTYDAQSDQYLLELDSLLEANGTPFEDRAICIEYATNLRRSGLPVIFDRDHLAFLLGITLHDLMYFVMQQDDHYARYYLSKKRGGRRPVDAPSERLKSVQRWILSSILEKMRVSDYAFGFVKGRSLLENARVHLGKHCVVNVDIEDFFASVQADNVFRVFSYYGYSKEVSFCLSRLCTLSGVLPQGAPTSPCISNLVFLKVDKRLARLAKTYEASYSRYADDLTFSGRGNLGNIIPAVEHILREEGFTLNDAKTRVAFSHQRQEVTGLNVNGDSVRVPRSFKRDFFQQVYFCKRYGVDSHLDRTNQLFAFYKEHMYGKAYYLCEIEPEVGRRALGELDAIEWTY

SEQ ID NO: 2713 - protein, 392 aa, unidentified
  source 1..392: note = Related to QSJW01000007.1; note = Blautia obeum
MCCVSSAWQHIAHGASPIVGLPIVSLAFHAKDGFATGTVGTGTITVIVDSNVCFYMEEENLQIALEKGIIEPAVYERVIAYKERLEENQVPVIYNLRHLRKIFRIYKKEQDFFFGDKKEELYRTFKIPKKSGGYRTIEAPCERLKQIQRWIKDEIIDKLVMSEYATGFRKNLSIVDNAKKHVGKELVIGMDLKDFFPSVTYEEIFLMFRYVGYRKDVAHLLSKLCTNAENVLPQGSPASPSIANHVLLKLDKRLGILAETIGADYSRYADDITFSGKKSIASIIPLVEKIVAEENFTINKTKTRLQYKNQRQEVTGLIVNNKISISREMENEIKNAIYFIGKYGVCEHMRHIECNKSFYKEHLYGIAYFINMVDREKGQKYLRQLDLLEWEY

SEQ ID NO: 2714 - protein, 336 aa, unidentified
  source 1..336: note = Related to JAFTTZ010000019.1; note = Lachnospiraceae bacterium
MEKNNLQIALQQGVITQDAYNSITEYKQRLNDNNVPVIYNLRHLRKIFRIKKREQDIFFGENKRSLYRSFSIPKKSGGVRQIEAPCKRLKEIQRWIKDEIVDKFVVSEYATGFRKNMSIVDNARKHVGKELVINMDIKDFFPSVTYADILLMFMYIGYRKDVAHLLTKLCTNAENVLPQGSPASPSISNHILLKLDKRLGRLAESVGADYSRYADDITFSGKRGISTIIPLVEQIIEEEGFLVNENKTRLQYSNQRQEVTGLIVNNKIAVSTAIEDEIRNAIYFIKKYGVDDHMKHIGCNKSFYMEHLYGIAYFINMVDRDKGKKYLAQLDEIIWA

SEQ ID NO: 2715 - protein, 336 aa, unidentified
  source 1..336: note = Related to JABLYG010000002.1; note = Ruminococcus sp.
MGNDKLYEASRRGVISEKTYREILKYKERLQKNGVPVIYNLRHVRKIFQIRRKEQELFFGAQREALYYQFEIPKKSGGKRTIEAPCDRLKKIQRWIKDEIIDSFYPSEYATGFRKGISIVDNAMPHIGKELVINFDLKDFFPSVTYAEILKLFVYMGYRLDVAHLLTKICTNSENVLPQGSPASPSISNLVLLKLDKRLSSLAKTISCSYSRYADDITFSGNKSIKSIVPLVIQIIIDEGYTVNENKIRLQYANQRQEVTGLTVNTKLAVSKNITDEIEKAIYFCNKFGVSSHMKHIACDKHFYREHLYGIAYFIMMVDPQKGKIYLKELNDLNWV

SEQ ID NO: 2716 - protein, 336 aa, unidentified
  source 1..336: note = Related to JAFXDF010000036.1; note = Clostridia bacterium
MARQEELLAAVEKGIITEDSANRILEYNARLDEHGLPIIYNLRHLRKILKIRKRDQEIFFGPRRNELYREFQIPKKSGGIRKIQAPNEELKAIQTWIKAEILDKYSASKYATGFRKGYSIVDNANRHVGKELVINLDIKDFFPSITYADVIKIFSYMGYKLEVAHLLTQLCTNGENVLPQGSPASPALSNLAVIKLDKRLGTLADSLNCDYSRYADDITFSGKKNIRSIVPLVKKVISEEGFEVNESKVRLQYAHQRQEVTGLIVNKKVSVSESVVSELKNAVYYCGKYGVESHMQHIGCDKAFYKEHLYGLAYFVKMVEPAKGRAYLNKLDSIVW

SEQ ID NO: 2717 - protein, 333 aa, unidentified
  source 1..333: note = Related to NZ_FRFD01000005.1; note = Anaerocolumna xylanovorans
MYEDAKEKSIISQDAYQLIKIYIGRLEDNDIPVIFNLRHLRKILKIPKQKQSAYFGVNRNEMYRKFMIPKKSGGYRKIEAPSEELKLRQLWIKENIIDKFKISDSAQGFRKNHSIYGNALPHVGKELVINIDIKDFFPSITYQKVFKFFRYIGYTNQVSHLLTKMCTNVDNVLPQGSPASPSLSNIVLLKMDKRLSKLAGAVECDYTRYADDITFSGKKVIKSLVPIICKIIEEEGYDVNKGKLRLQYSNQRQEVTGLTVNKKVSLSKRTIKEIENAIYYCKKYGVQEHMTRIKCDKSFYKEHLYGIAYFIKMIDKEKGKKYLEELNRIEWLY

SEQ ID NO: 2718 - protein, 310 aa, unidentified
  source 1..310: note = Related to JAGAKL010000084.1; note = Clostridia bacterium
MATKEKIDNALQKGIITAETANELKEYNDRLTRNNMPIIYNLRHLRKILKIKKKEQNKYFGNERNEYHTFYIPKKNGSKRMIEAPSDRLKSFQLWIKENILDKINVSTNARGFRKNYSILDNAKEHVNKDLVINIDLKDFFPSITYNRVYKIFAYVGYTNEVAHLLTQLCTNKENVLPQGSPASPVISNIVALKLDKRLGALANKFNCSYTRYADDITFSGCVGIKNMLSTVERIIIEENFSINDAKVRLQYKNQRQEVTGLIVNKKIAVSPKIIKEIDNAIYYCLKFGVASHMQKIGCDKSFYKEHLYG

SEQ ID NO: 2719 - protein, 336 aa, unidentified
  source 1..336: note = Related to MNSK01000018.1; note = Eubacterium sp.
MMEHIEKAYQAGVITEEEKRLIEEYNQRLTDNNVPVIYNLRHLRQLLGIHKSAQDRLFGDKKCDSYRVFHIPKKNGGLREIEAPNEELKRIQLWIKENILDKFSVSQFAKGFVKGVSIYDNAVQHTGKELVVNIDLKDFFPSIQYREIYKIFKYIGYTDSVSKLLTNLCTNARSVLPQGSPASPTISNLVSLKLDKRLGRLADKIGASYTRYADDITFSGKKTIQKYIELIRKIIYEEGYEINEGKFRLQYAHQRQEVTGLIVNKEVAIPQKRINELENAIYYCKKYGVVDHMSHIGCEKGFYKEHLYGLAYFIKMVNPEKGLKYLLQLNEIEWPI

SEQ ID NO: 2720 - protein, 330 aa, unidentified
  source 1..330: note = Related to SVIM01000022.1; note = Clostridiales bacterium
MASTKELQKAYESGYITQGDMSLIEEYNQRLLSNNVPIIYNLRHLRQLLGIRKKDQDKLFGKDRKDSYRNFKVPKKSGGFRSIEAPNEQLKKIQLWIKENILDKFTVSEHAKGFKKGFSIYDNALPHVGKELVINFDLKDFFPSIDYCDIYKIFKYIGYTDGVSKLLTKLCTNPENVLPQGSPASPVLSNLVSLKLDKRLGELAKRIGASYTRYADDITFSGEANIQKYEILIREIIFEEGYRVNEDKFRRRLYFQKQEVTGLIVNDKVSIPKRKIKEMENAIYYCKKYGVTNHMKHINCEKGFYREHLYGLAYFIKMVNQPQGEKYYKN

SEQ ID NO: 2721 - protein, 330 aa, unidentified
  source 1..330: note = Related to JAFVRR010000006.1; note = Clostridia bacterium
MAFDKGIIDECQKKLLTEYIERLHMNNVPIIYNLRHLRKLFDIPRDEQNKFFGHERSLLYKTFYIPKKNGGYRKIEAPNEKLEKIQCWIKEKILDNFNVSEYAKGFKKGTNIVDNALPHCSKEVLINIDINNFFPSIKYSSVFRMFNYMGYTKEVCHLLTRLCTNAENVLPQGAPTSPAISNLVNLKLDKRLSSLAISGGAAYTRYADDITFSGDKLILKYIKLIKRIINEEGYSINDKKFRIQFKNQRQVVTGLIVNSRVKANKQIFNELDKAIYFIKRYGIQDHMAHENINRSAYKEHLYGLAYFINMIDRTQGKYYIEQLNSIEWLY

SEQ ID NO: 2722 - protein, 335 aa, unidentified
  source 1..335: note = Related to JAHZTB010000004.1; note = Planococcus glaciei
MSNYIEKLKKRMLQQELPNDYIEECISYATKLLNKGLPVIFDSEHFAKLVGINYEDLRKLTISDNYKEVKIPKKNGIRTLLIPNQDLMFVQKWMLVNLISKVKISKHSRGFIKNTSLVDNAKHHVKKEYVITLDIKNFFSSIHNVVVYRIFRSLGYTKELSGLFTKLLVTKDGLPQGAPTSPYLSHIVCKKLDRKIFIELKSLKNCDFTRYADDITISGEYDITEKIENIIGIIESLGFEINLKKKRHQLRSQQQMVTGLVVNDKVNIPKSYIRKLKQEIYYCKKYGVNSHMNKTNINNSNYKLFLFGKAYYIKMINKDLGEKFLKELDEIDWPY

SEQ ID NO: 2723 - protein, 335 aa, unidentified
  source 1..335: note = Related to NZ_CVRB01000003.1; note = Neobacillus sp.
MHDYLIKLKSAMQSQGCPPNYINDCTKYASKLLNKGLPVIFDREHFSRLIGFKLEELEELLKKDNYRVVKIPKKDGHRDLYIPNPRLKLIQKWMLMNLISKVKISKHARGFITDTSLVDNAIEHVNKDFVVSLDIRDFFPSINKYRVYRIFRSLGYCNDLAGIFTALLVTNNGLPQGAPTSPYLSHIVCKKLDSRISKELKHFEGCSFTRYADDFSISGGNEILEKISNIIYIISSEGFELNFSKTRIQSNSQKQLVTGLVVNEKVNVPSSYKRRLKQEIYYCKKYGVNSHMKRLGINKSNYKLYLYGKAYYIKMINQKLGEKFLSELNEIDWPY

SEQ ID NO: 2724 - protein, 363 aa, unidentified
  source 1..363: note = Related to RQPI01000007.1; note = Paenibacillus rhizophilus
MVLNLSFVFFCNNPLLCCLKSSLGSGTMSEYLDSLRGKMVSTGYSTEYIELCIKYANDLENNNVPVIFDKAHFLLLTGLKTSELRNILTNKPEHYHEFELLVNYRLRNILAPNPLLKQVQKWIQVFILKPLKVSSWATAYKPGTSIIKNAKVHVKQDCVINLDLKNFFDSITSVRVHKIFRSAGYTKELATLFTQICTLEKCLPQGAPTSPYLSNLICRNLDQDLAIFCQSRAIRFTRYADDMTFSGGVEIENYIPNIRKTITKHGFVINEDKSQVLFRNQRQVVTGLVVNDKVAIKKEFIRKLSQEIHYCLRFGVSNHILNSRINKSNYKDHLFGRVYYIRMVNKPLGDILLKKLESIDWEY

SEQ ID NO: 2725 - protein, 336 aa, unidentified
  source 1..336: note = Related to AP019308.1; note = Paenibacillus baekrokdamisoli
MSEYTDNLRKSMLELGNSNDYIELCINYARKLEKSHVPIIFDKIHFLVLTELKSSQLNDFLNNRAGYYREFELIINNRKREIHAPNNILKELQKWIQLYILKPLRVSDWATAYIPGTSIIKNAAIHIGQECVVNLDLKNFFNSISAVKVHRVFRVAGYTKELATLFTKICTVNNCLPQGAPTSPYLSNLVCIKLDQELADFCQSLGIRFTRYADDMTFSGGKEIVKVLPQIYKIISKQGFLINNDKTKILNCGQRQEVTGLVVNDKVSVKKEFIRKLSQEIHFCLRFGVSNHILRTGIRKSNYKDHLFGRAYFINMVDKSLGDDLLKKLQSIDWEY

SEQ ID NO: 2726 - protein, 340 aa, unidentified
  source 1..340: note = Related to NZ_CP075175.1; note = Paenibacillus sp.
MSNSLNYLILLEEQMVQEQYPTDDIQLVKLYAQRLISNSVAVIFDFDHLCYLLECSPEDMRSYMYNKEYNYHSFEIPKKSGGTRQLEAPSYPLKMIQRWILDHITCQVPISSHAFGFRKKRSILDNAKIHEGQECIVNIDIANFFPSIKGIQIYKLYRYLGYTKQVASILTTLCTKDDCLPQGAPTSPYLSNIVCKKLDKRISGLANAIGAKYSRYADDITLSGSSSITNYIGTLKKILTDEGFIINYKKLRIQFNNQKQMVTGLVVNQKVNVPNEMIRSLRQEIYYCKKYGVNGHMRQRNIRNSNYKEHLYGKAYFIKMINPDLGLDMIRQLDQILWEY

SEQ ID NO: 2727 - protein, 323 aa, unidentified
  source 1..323: note = Related to VIVN01000020.1; note = Neobacillus bataviensis
MYKQNCNSQYIKLVIDYAENLLKNNVEVIYDLDHISLLTNKSIGDFLDINNYYKEIQISKRNGETRTLAIPDDNLKSVQKWILKSILEKMPISNSAKGFKKGLSIVENAKPHTNKDCVLSLDLKDFFPSITQGSVYFIFKEIGYTEEVSRLLTRLCTYQGQLPQGAPTSPYIANLVCRKLDIKLQEFACNQNIAYTRYADDLTFSANKELSEYIPRIKEIVIIQGFKVNDSKTRCRYRHQRQLVTGLVVNNEKVSIPRELKRKLRQEIHYCKKFGVHGHLYWGIKYYSNYKDYLLGMALYVKMVDKNLGKKLLEEIKSINWEY

SEQ ID NO: 2728 - protein, 354 aa, Bacillus sp.
  source 1..354: note = Related to KB976825.1; note = Bacillus cereus
MWLIKDFLVGSPLIGVENMDNYLEKLEREMRNRNFDLEYINLLKDYAKRLLDHKVAVIFDQEHFSLLTEVPVDTIKALLNNFNSYNEIQIPKKNGGNRTLLIPNEELKSIQRWILNNILNSIPISDYAKGFKKGLSIVKNAEVHTNKECLLNIDLTDFFSSIESQRVYKAFRYIGYTKEISAMLSRLCTYNNFLPQGSPTSPYLANIICKKMDKRLFSLCKDKGIDYTRYADDLTFSGDIKLSKYLPIISEIVEDEGFQINTTKTRISYQHHRQVVTGLTVNKGLNIPRDMKKKLSQEIYFCKKYGVQGHLAQTGQTYSNYKHYLLGKAYFIKMVNKELGEKFIRRIAEIAWDY

SEQ ID NO: 2729 - protein, 335 aa, unidentified
  source 1..335: note = Related to JAJNAF010000001.1; note = Peribacillus sp.
MNLLSLEKEMIKQNYDKEYINIVKVYAHRLVENNIPIIFNFEHLCFLTNYSTEKLRYFIHNNQSLYKEIEIEKKSGNTRLISIPNNELKVIQRWILDEILSKIPLSPHAKGFRKGQSIINNAQLHTNKECVMNLDIQDFFGSVTQKQVYKIFRYVGYTKQVSSILSLLCTKDGVLPQGAPTSPYIANLVCKKLDKRISNLFINKPINYTRYADDITVSGEATIKDYLPILIKIITDEGFEINTNKTRIQYSYNRQIVTGLVVNQKINVPKKMIKQLRLEIYYCKKYGVAGHIDKRHIEYSNYKHHLFGKAYYIKMVNPKLGQKFLNELNEINWDY

SEQ ID NO: 2730 - protein, 335 aa, unidentified
  source 1..335: note = Related to NZ_CAJGBF010000001.1; note = Rossellomorea arthrocnemi
MNIDTLKKMMENEQLSEDYINLCVTYARSLEDKGLPIIFDSIHLAKLIGIGTKELYSYYELAQTLYSTAVIPKKTGGSRKLNAPSENLKYIQKWIVENVLYRLDTSKVATGFVPQKSIVDNAKPHVGKECVINLDLKDFFPSIKYVWIYNLFISLGYTRHLSMLFTGICTLNNELPQGAPSSPYLSNLICEKLDSRLSSLAENMGASYTRYADDLTFSGDKEITKYIKLIKRVIKEEKFELNEKKVRVRFSYHQQMVTGLIVNEKLSVPQKTKKYLRQQIYYAKKYGVSSSLQKQGVTKSNYNGHLFGLAYFIKMVEPDCGTKFIEELKQIDWET

SEQ ID NO: 2731 - protein, 335 aa, unidentified
  source 1..335: note = Related to NZ_VTEU01000001.1; note = Sutcliffiella horikoshii
MKIDTLKTKMEDEQFSEDYINLCVSYARNLEEKGLPIIFDSIHLAKLIGIETKELYSYYELAQILYRTAVIPKKTGGSRKLNAPSENLKYIQKWVVENVLYRLDTSKVATGFVPQKSIIDNAKPHVGKECVINLDLKDFFPSIKYIWVYNLFKNLGYTRHLSMLFTGICTLNNELPQGAPSSPYLSNLICEKLDSRLSGLAEHIGASYTRYADDLTFSGSKDIVKYIKLIKRVITEEKFELNEKKVRVRFSYHQQMVTGLIVNDKLSVPQKTKKYLRQQIYYAKKYGVSSSLEKQGVTKSNYNGHLYGLAYFIKMVEPDSGTEFIEELKQIDWET

SEQ ID NO: 2732 - protein, 335 aa, unidentified
  source 1..335: note = Related to NZ_JACSLM010000003.1; note = Exiguobacterium sp.
MDIKSLAAEMMKKNYDKEYIDLCISYAINLEKNGMPIIFDSIHLAKLIGIETKELYSYYEFAPRLYKVAVVPKKSGEKRFLDLPSENLKYIQKWILENILYKIKVSDYATGFVPQKSIVDNAKPHIDKECVVNLDLQDFFPNIKYIWVYNLFYNIGYTKHLSMIFAGICTLENKLPQGAPSSPYISNLICHGLDTRLSDLAIHIGAQYTRYADDITFSGNKEIAKYISLIKRIIKEEHFIVNERKVRVQFKHHQQIVTGLVVNTKLSVPKKTKKYLRQQIHYAKKYGVNDSLIQQGINKSNYIDHLYGLAYFIKMVEEKCGSEFIEDLDTLDWES

SEQ ID NO: 2733 - protein, 326 aa, unidentified
  source 1..326: note = Related to JADCLJ010000021.1; note = Cytobacillus luteolus
MVEEQFSEEYIKLCVTYATNLIENGLPIIFDARHLSCLIGIDTKELYSYYQLASTLYRKAVIPKKSGGSRTINAPSENLKYIQRWILENILYKINSSQEATGFVPQKNIVDNASYHVGKECVINLDMKDFFPSISFVQVYNLFNRSGYTKHLSMILTGLCMYNNELPQGAPSSPYISNLVCKNLDLRLSKLASQIGAKYTRYADDITFSGEKVIVKYIKLIKRVIKEENFNINHKKVRVQFSYHQQMVTGLVVNEKIRIPPKTKKYLRQQIYYAKKYGVTSSLSKQGQTKANYKGHLFGLAHFIKMVEQEYGDNFIRELKEIDWES

SEQ ID NO: 2734 - protein, 335 aa, unidentified
  source 1..335: note = Related to VENA01000064.1; note = Firmicutes bacterium
MDINKLKNNMLTEEYDKEYIDLCISYAYNLEKNGFPVIFDSTHLAMLIGIKVKELYSYYELAQSLYKKIIIPKKTGGNRILNAPCENLKYIQKWILDNILNNSESLDVSTGFVQGKSIVDNAKQHIGKECVINLDIKNFFPSIRYIQIYNIFRSFGYTRHLCMVFTGLCTYKNVLPQGAPTSPLLSNLVCKRLDTKLLDLANHIGASYTRYADDITFSGEKVITKYIKLIKRVIKEEYFQVNEKKVRVQFKHHRQMVTGLVVNTKLSVPKKTKRYLRQQIYYAKKYGVNNSLDRQEVSKSNYEGHLFGLAYFIKMVEPKNGVEFIEQLKQIDWES

SEQ ID NO: 2735 - protein, 335 aa, unidentified
  source 1..335: note = Related to LFJO01000006.1; note = Alkalihalobacillus pseudalcaliphilus
MDIIKLEQSMRLEGHRADYIKLCKDYAINLKRNELPVIFNIEHLAKLIGINADECYAYYQLSSNLYNELLIPKRTGGQRVINAPSENLKYIQRWILDNILSNVSISVHANGFINERSIVTNAIQHIGKKCVINLDIKDFFPSITYIQVYNLFNRLGYSRHLSMVFTGLCTLDNKLPQGAPTSPYLSNIICKNLDDRLSLLASHINASYSRYADDITFSGDRGITSYIKLIKKVVQEERFLINEKKVRVQFQYHRQMVTGLIVNEKLSIPKKTRNYLRQEIYYCQKYGVKDHMSKKGLYKTNYQGHLTGLAQFIKMVDSKLGEEYLKSLDKIDWES

SEQ ID NO: 2736 - protein, 378 aa, unidentified
  source 1..378: note = Related to SMZU01000020.1; note = Rhodococcus qingshengii
MTLFRRALNKVIPQRRSFWGMRKKKPSSVVNWKEPVENILERKMDLQKLYEELQNGNHDEDYTELCINYARTLLNNGMSVIFDTDHLSKLIGISSHELYSYYLFANNLYTEVKLPKKNGSFRTINAPSENLKYIQKWILDNILYNKNCSHFANGFIKDKSIVDNARPHVGKPCVINLDIKDFFPTIKYIDIYKLFKGFGYTSHLSMVLTGLSTYNNVLPQGAPTSPYLSNLICRNLDVKFESLANRISASYTRYADDITFSGEKSITKYIALIKSIIKSEGFTINEKKVRVQYQYHKQMVTGLIVNEKLSVPKSTKMYLRQQIYFSIKYGVTNNLERQNINKSNYKDHLYGIAYFIKMVEPLVGEQYIKQLNGIDWES

SEQ ID NO: 2737 - protein, 337 aa, unidentified
  source 1..337: note = Related to NZ_CP060287.1; note = Sporosarcina sp.
MNNYISTLTDRMIKEGYETDYIKTVVGYSERLMQKDLPVIFDLAHLALYLDESEETLSEMVNNSTSFYSKAKIKSKKGKVRNIYIPYEKLKKIQIWILYKILYKVETPKCVKGFKLGSSIVDNAIPHVNKNYVLNLDFKNFFETIKEKQIITVFTSLGYNKIVSSALSKICNYNGSLPQGSPSSPYLSNLVCRNLDNKIIELIKFEDVTYTRYADDLTFSSNQKLDSLIPLLEELIVSEKFKINESKTRMQLKNQRQLVTGLVVNSQVSVPRKYIRELRSEIYYCKKYGVSGHMDRKGILYSNYKLHLYGKALYIKMVDKSKGESFLKELDKINWQY

SEQ ID NO: 2738 - protein, 337 aa, Streptococcus sp.
  source 1..337: note = Related to PKIG01000001.1; note = Streptococcus oralis
MSQLEELKKLDIPVFCNLEELRENIGTNKKFFYKVLYSHNKLYKEITIPKRNGGNRVLNVPNIALKSMQRWILDNILYKVQSDPSATGFMPMKSIVLNASIHLKKKYILKMDIKDFFPSIDFRKVRSLFFELGYNKDVATALANICVFRGQLPQGAPTSPYLANLVCRELDKRIDNLCRKYRLSYTRYADDITISGNSKIFWIKGIVEEIIRSYQFSLNNEKTIFLKPGDRKRVTGIIVNEKLSVPRSVTRNLRKEIYFIKKFGLEEHLDKNSFTGSKEQYIAHLYGVASYIKMVELTKGIFFINQLNSIFSGNEQLETGKNLHIEFASIDWTIFGE

SEQ ID NO: 2739 - protein, 340 aa, Streptococcus sp.
  source 1..340: note = Related to APLR01000002.1; note = Streptococcus sanguinis
MSEKINLTVLSIESITSLEDLRKKMGVKKKYFYRVLFSHDKFYREIEVPKRKSGQFRKLSVPSMALKNMQRWILDSILYKISVNENAMGFVPSKSIVTNAYNHLAKKYILKLDIKDFFPSIGFGKVLDIFQKLDFPAEISSALANICIYKDELPQGAPTSPYLANIICKQMDFRIGSLCKKYELNYTRYADDITISGDRRVFWIEKQIEKIVNSCHFTLNKEKTVRLKPGDRKRVTGIIVNEKISVPKNIKRTLRQNIYYIEKYGLESHLDKIQFTGLSNQYIRHLYGMASFIQMVEIERGIEFIDKLNSLFNQKNDTDYQISEDDLLSFDHIDWSILDI

SEQ ID NO: 2740 - protein, 341 aa, unidentified
  source 1..341: note = Related to NZ_JAGYWS010000004.1; note = Lactococcus piscium
MRHLDFSFSNENIPVFSSLEDLRKKMGISTAFFYKAIFASDFFYKEILIPKRKVGKFRTLKVPPVFLKNMQRWILDNILYFISCHRNATGFIPNKSIVDNALVHVRKKYILKMDIEDFFPSINFYLVREVFIKMHYSKVISNALASLCICEGQLPQGAPTSPYIANLVFIDIDIRISQLCLKHNLNYSRYADDITISGSSNIFWVRKVVEKILKEKKFKVNKDKTVIIKPGDKKQVTGLIVNDQLSVPKSTIRELRKNIYYIKEFGIDSHLNKIKYEYAKEKYIDSLYGTASFIKMISPEKGINFFNELNSIFRRGNQYNSEQIEPSFIDFSETQWTVFEN

SEQ ID NO: 2741 - protein, 405 aa, Streptococcus sp.
  source 1..405: note = Related to JYOW01000001.1; note = Streptococcus parasanguinis
MDESSYLSINGYKYLSLYEAPLPITRAKFCKFLPWGVLLRGGPQPHCPTGKGFYKVKLVLVTQKRFNMIKFDKIISLDIPVFLTLEALRKNIDIDKKYFYRTLFYRNNLYKSIQILKKNGSDYRQINAPILPLKRIQRWILENILYKIPIEDCAHGFVRGKSIITNAYPHVNSKYILKMDIVDFFPSIHFGLIKKFFYDLGYSNTIACALANLCTFNSQLPQGAPTSPYLANIICIEMDKRIQGLCKKNRLKYTRYADDITISGNSNVFWIKDIVEKIVNCYGFQINQNKTVVIKPGDRKKVTGIIVNEKLSVPKSIVRKLRQDIYYIKTFDLESHMERISFTGTKQQYISQLYGVASFIKMVDIDKGLYFISTLDSIFKPFSPSIAEVDLELDDYFDNLFNDLF

SEQ ID NO: 2742 - protein, 332 aa, unidentified
  source 1..332: note = Related to NZ_PZJH01000006.1; note = Macrococcus epidermidis
MKYKVEVFPAIDSIEDLRNMIGVQSNYFYKCLYSNEYFYKTVKIPKRRNDEYRELTIPTMALKNIQRWILDNILYKFSVHPCAKGFVPGKSIIDNAIPHINKKYVVKMDVKNFFPSISFKDVRILFLNLGYKIEVAIALANLCTYKNTLPQGSPTSPYIANLIFYKIDKRISGFCNKNNLTYTRYADDITISGKSNISFSIKIINQILTQNRFELNDKKTKVLKPGDRKIVTGIIVNEKLTIPKDFIRNVKRDLYYINRFGLLNHLNFISIAEDNSEYYLNSLSGKISFIKMVDYKQGYILQNELDNIIGYNDKHEEKYIDLEDIDIKWEKL

SEQ ID NO: 2743 - protein, 313 aa, unidentified
  source 1..313: note = Related to nan
MIGIKSDYFYKCLYSNEYFYKTVKVPKKRNDGYRELTIPTMALKSIQRWILDNILYNFPVHHCAKGFIPGKSIIDNAIPHINKKYIAKMDIKNFFPSISLKDVIMLYLNLGYNYKVATALANLCTYKNQLPQGSPTSPYIANLIFFKIDKRIFGFCKKNYLTYTRYADDITISGRTNIAFSIKIINQILNQNKFELNDKKTKILKPGDRKIITGIIVNEKLTVPKDFIRNVKKDIYYIKKFGLASHLNFIDFPIENSEYYLDSLYGRISFIKMIDYKLGNMLQNKLNNFIDYSKRREEKYIDLEDIDIKWKKL

SEQ ID NO: 2744 - protein, 331 aa, Staphylococcus aureus
  source 1..331: note = Related to JAJHOZ010000001.1
MVNKTYLAINSLEELRNMIGIKSDYFYKCLYVNDHFYNVIKIPKRKKDEYRELMIPNMALKNIQRWILDNVLYRRQVHKCATGFVPRKSIVNNAIPHVGQKYILKMDIENFFPSITFKQVRKIFSEMGYKFELATALANLCTVNNQLPQGAPTSPYIANIIFYNIDKRIFSYCQKNNLRYTRYADDITISGSNKVSFSKEIIREIVNQYNFRINESKTIMFKPGDRKKVTGIIDNEKISVPKTLIREVRKQIYFVNKFGLEEHLIRNNYSLDYEQQFIMSIYGKISFIKMIDFKKGVSLQKKFNEVLGNIESSNMYRDNIDFDDIELHWIN

SEQ ID NO: 2745 - protein, 315 aa, unidentified
  source 1..315: note = Related to JAAECV010000003.1; note = Lactococcus piscium
MKLIDNGLDDLSRPVFLCTKDIQQAIGIDPKIFYTFLNPKNISYIKIKIPKRKKGEYRELSIPSPALKNLQRWVLEHILYSFPCHGSANGFIPNKSIVTNAIPHISKEYILKMDLKDFFPNITFSMVKNQFLTMGYNDHVSHSLALLCTYNDSLPQGAPSSPYLANLLFSPFDELIYTHCSKNNLSYTRYADDLTISGGKYILNIPQYVKDILRDSDFQINNSKTLIIKKGDKKQVTGIVVNEKISIPKNYLRELRQIIYYINKYGLDSHLKKIDYKGSKYKYINSLYGKASYIKMVDFKKGIKIFTELNKISLD

SEQ ID NO: 2746 - protein, 333 aa, unidentified
  source 1..333: note = Related to NZ_CP045040.1; note = Carnobacterium maltaromaticum
MSSDKNPLSLKEEWSAEDIKKYSSMLKRNNVPVIFDTEHFRRLLGLEKTDFYNILFKLEYQYHEVEIPKKKQGELRTLFLPSIKLKYMQRWILDNILYSQECNNEVTGFVPSKSIIDNAKPHIGQKYILKLDIQDFFPSISKIRVFLMFKHFGYTNDLSNTLSNICIYKNELPQGAPSSPYIANLICKKMDNRFLGLCKKNNLKYTRYADDITISGGKSVYKFKQFFINIVTDEKFFVNKKKVKLLKNGDRKQVTGIVINEKLSVPKNVIRDLRRDIYYITKYGLNSHLKRTGNIASSNYKAHLFGKAKYIYMVDREKGALYLEQLDAIDWET

SEQ ID NO: 2747 - protein, 332 aa, unidentified
  source 1..332: note = Related to KQ130593.1; note = Listeria newyorkensis
MNSDDKLSKLKENWTAMEIENYSSSLKKKGVPVIFDVEHFRRLLGLRSEDFYSILFKLEYHYHKLEIPKKIVGTYRQLLLPSIKLKYIQRWILDNILYTQSCITEVTGFIPGKSIVNNARPHLKQKYILKLDIEDFFPSIDEKRVFNLFKNFGYTNRLARTLSRFCSYENELPQGAPSSPYIANLICRKLDARLTALCAKYALNYTRYADDITISGGRMVFKLKKHIINIISDENFSINKSKIKLLTAGDRKKITGIIVNEKLSVPKKVVRELRQEIYYIKKFNLESHMKKTGNVSKSNYKGHLFGIAKYIFMIDKDLGTYYLDKLNGIDWE

SEQ ID NO: 2748 - protein, 327 aa, Streptococcus sp.
  source 1..327: note = Related to NZ_LS483375.1; note = Streptococcus gordonii
MKKWTDQDIREYRNKLEANGVPVIFDLEHLRRLIGIEKKYFYKVFYKLEYQYREITIPKRKPGQFRILSVPSRNLKLIQRWILDNILYCIECGEIVTGFIPLKSIADNAKPHTQKKYIYKFDLKDFFPSIPRRKVYYLFRNLGYSSDLSNALATLCCFNNYLPQGAPTSPYIANILCGKLDRRINSFCQKNNFTYTRYADDLTISGDEKLVHYKSLFRKIINDSGFCFNEDKARLIRCGQRKLITGIVVNEKVTVPRSYVRSLKKELYYIHKYGLKGHLEHCDIKTPPNIYSKEIIGKINFISMVDSKLGEEFKSLFKDALKKNKIF

SEQ ID NO: 2749 - protein, 319 aa, Streptococcus sp.
  source 1..319: note = Related to AJMM01000006.1
MNWTEENITNYKNRLIEKGVPVIFDIEHFRRLLGIKKSYFYKLFYGLKYQYKEVEIPKRKIGEYRKLTVPSKNIKKIQRWILEFILYSNLCDDCVTGFIPTKSIVENALPHIGHDYIYKFDLKDFFPSIPRSKVFYLFKDLGYTAELSNYLASFCCYNDCLPQGAPTSPYIANLVCKRLDKRLKILCERNGFTYTRYADDITISGDFKIVHFRNLFETIIEDSGFIINELKTKLIRNGQRKIVTGVVVNEKPTISREYVRELKKEIYFINKFGIENHMKRIGEAGSVKDYRRKIYGKINFVKMVDRELGLELRRKVNSF

SEQ ID NO: 2750 - protein, 357 aa, unidentified
  source 1..357: note = Related to VTZR01000027.1; note = Paenibacillus sp.
MDLDLLKSKLIEKNIPLNDIEATISYAQTLKNNGVPIIFDMQHLRRLLKLTESDFKRLYYARDLQYRTIEIPKNNGSGTRTLSLPSIDLKYIQRWILDNILYNVHVHEYAIGFVTGKSTVLNASHHINQEYVLKMDIKDFFPTISGGRVYGLFKCLGYSSSVALTLTNFCIYQNSLPQGAPTSPYISNLVCRKLDQRLELLSRKRKLKYTRYADDMTISGGRKIKKTIPYVKQIIEEEGFRCNESKTKLIYKSNRQQITGIVVNEKLSIPKSMFKSLRQEIYYMKKFGVSSHLDKKGLKHKSHVKEHYFGLANYIMKVDREKGKQILNDLNAIDWISKSHKGNKQFTAQEKNKDIYE

SEQ ID NO: 2751 - protein, 334 aa, unidentified
  source 1..334: note = Related to NZ_JACXZA010000007.1; note = Paenibacillus sp.
MIERNVPNEEIESTLSYAHILQENGVPIIFDSQHLRRLLKLTDTDFKRLYYSKEMQYRTREIPKNNGSGTRTLCIPSLDLKYVQRWILDNILYKVKINEHAIGFVKGKSTVSNAGYHMNQEYVLKMDIKNFFPTISNSRVFGLFKSLGYSSSVAMTLTNFCTYNNELPQGSPTSPYISNLVCRKLDRRLELLCRTRGLQYSRYADDITISGGRKIKKTISFVQRILEEEGFKNNENKMNLIYKSNRQQVTGVVVNEKLSVPKVIYKSLRQEIYYIRKYGLESHLDKKGLNRKSHVKEHYYGLANYMMMIDKDKGQQFINELNAIDWKRKSLGRD

SEQ ID NO: 2752 - protein, 356 aa, Bacillus sp.
  source 1..356: note = Related to NZ_CP084677.1; note = Bacillus safensis
MKDSMGSVIYALLNKKDGKMDLAILESKMIEQNIPTMDIESTISYARALKDNGVPVIFDIQHLRRLLRITKSDFKRLYYAKKNQYKTVEIPKNNGTGSRLLSIPSIDLKYIQRWILDNILYKVEINNLAIGFAKGKSVVVNASYHIKQEYVLKMDIKDFFPNITANRVFGLFKSLGYSSSVAITLTNLCTYNDSLPQGAPTSPYISNLICRKLDSRLKNLCQKRNLNFSRYADDITISGGKKVKNTIPCVEKILEEEGFNVNEQKTRIIFKSKRQQVTGIVVNEKLSVPKSIYKNLRQEIYYMSKFGVESHLDKKGLKNKSHVREHYYGLANYFLMVDRVKGEKVLSELNSINWND

SEQ ID NO: 2753 - protein, 336 aa, unidentified
  source 1..336: note = Related to LKPY01000055.1; note = Lysinibacillus sp.
MNLEVLESKMSEENISLEEIESTLSYARNLKENGVPVIFDIQHLRRLLNLNKTDFKRIYYARQHQYNTIEIPKNNGKGTRTLSIPSLDLKYVQRWILDNILYKIEVSEYANGFVKGKSVVTNANYHVKQEYVLKMDIKDFFPTITAGRVFGLFMSIGYSSNVAIVLTNLCTYNNSIPQGAPTSPYISNLICRNLDLRLSLLCNKRNIKFSRYADDITISGGRKVKKTIPFIRKIINEEGFIVNQEKTKLLYKSGRQQVTGIVVNDKLSIAKEILRKLRQDIYYIKKFGLNSHLEKKNMINKSHVREYYYGMANYILMVDQNKGQKLFNELNKINWK

SEQ ID NO: 2754 - protein, 337 aa, unidentified
  source 1..337: note = Related to LR733429.1; note = Exiguobacterium sp.
MDLSILKQELMSRDLNSVDVEFIISYAQSLLDKDIPVIFDLEHLRRLLGLKRSDFKQVYYANSNQYHNIEIPKNNGSGTRKLSLPSDKLKKVQRWILDYILYNFEVNEKATGFTLDKSIVTNANFHTNQKFVLKIDIKDFFPTITSNRVYGLFKSFGYNNSISLALTKLCTHENCLPQGAPTSPYISNLICRHLDIRLNGLAKKNNLNFSRYADDITFSGEFIPSNIVEMVQWILIEEGFWINELKTKLLNKSQRQKITGIIVNQKLSVPKEITKTLRQEIYYMKKFGVQSHLERKNLQTKTNVKEHYFGLVRFILMVDNEMGKKLSYELKKINWDS

SEQ ID NO: 2755 - protein, 382 aa, unidentified
  source 1..382: note = Related to FNHY01000009.1; note = Psychrobacillus sp.
MDLILLEQELKAMELDNDIINNYISYASNLKNNNVPVIFELEHLRKLLHISREEFFGIYYSIKYQYHTIYIPKSKIKYETNKGITRQSKKYILPKVYYDNEVRHKFKRYNKVITDLTNNKSSYYRKLDLPSKKLKYIQRYILDNILYRVDVHNAAHGFVPGKSTISNARVHVGNEFVAKLDMRDFFPAITAQRVYGLFRSFGYNKSLSFTLTKVCTYNGSLPQGAPTSPYISNLICRKLDYRISTLCIKNNLNFSRYADDITISGGRKVKRVLPIIKDIIKNEGFRINDEKTKILHNSHKQKVTGVVVNQKVSIPKSFYRNLRQELYYMNKFGVSSHLLEKQTMFKSNTKAYYFGLVHYCYMVDPIKGEKLLQLLEKINWNS

SEQ ID NO: 2756 - protein, 332 aa, Streptococcus sp.
  source 1..332: note = Related to VFSH01000008.1
MWTKESIKIYERQLESNRLPVIFNIEHLRRLIGVEKKYFYKLTNSVDASYISRFIDKRNGGKRKLLIPGFNLKLIQTWILHNILYTQPVFTSATGFIKQKSIIDNATPHIGKKYIFKTDISDFFPSIKFKNVFLLFLNFGYTKEVSNVLAILCTYEGYLPQGAPTSPYLSNLIFRDFDKKLENICSLSEYKYTRYADDITISSNEKISSIEVDYLSKTIEQSLQTINNFLKLNLDKTTVLRPGQRKIITGVLVNETLNVPKKILSEIRLEIYCLQKYGASNRIEAYNQKHNTNLDKYSYRQKLYGKICFVNMINPKKAEKFYEQFYDINWIK

SEQ ID NO: 2757 - protein, 332 aa, Streptococcus sp.
  source 1..332: note = Related to NZ_JVKT01000024.1; note = Streptococcus parasanguinis
MWTEESIENYERLLESKGLPVIFDVEHLRRLIGVKKKDFYKLTNSIDACYTCRLIDKRNGGKRELLIPSFNLKIIQTWILNNILYTQSVSSSATGFIKGKSIVDNAEPHIGHKYIFKTDILNFFPSIKLRNIFLLFFYFGYTVEVSYILASLCTYEGYLPQGAPTSPYLSNLILRDFDIKLQNICSSLNYTYTRYADDITISSDTKITKFYIEYLLDTISQLLNSITYFLKLNLDKTKVLHPGQRKIITGVLVNKRLNVPKELLSEIRLEIYCLQKYGASNRLKAYNLKNNTDLNIASYRQKLYGKICFVNMINPIKAEKLYDQFYDINWMK

SEQ ID NO: 2758 - protein, 332 aa, Streptococcus sp.
  source 1..332: note = Related to JAGZIK010000037.1; note = Streptococcus salivarius
MMWNEQSIRNYIGLLESKGLPVIFDLEHLRRLIGVEKQYFYKLTNSINESYSFFTIRKRNGGSRTISIPFSNLRTIQNWILNNILTTQQVAESATGFIKGKSIVDNAKPHIGHKYIYKTDIVDFFSSIKFKSVLALFLRLGYVKEVAYILARFCTYDGYLPQGAPTSPYISNLILYNFDIELQKICCLSKFSYTRYADDITISSNGEHLIDSNLLSATITKLLQDISFELKINFKKTKVLHPGQRKIVTGVLVNEKLNVPKEIISDIRLELFCLNKHGLSKRIKHYNEKHKTALSVALYRQKIYGKICFVNMINPKKAEKLFQEFYKIKWLL

SEQ ID NO: 2759 - protein, 340 aa, unidentified
  source 1..340: note = Related to JABBEA010000018.1; note = Paenibacillus sp.
MIKQVIFNIQLSDLPEQEKKDLIYYAENLYFKQCPVIFDNQHLMKLFELQDHDLKRFMTENTNHYSIKKRNGDLREVWKPNYKLKTIQKWILKNILNEIKVSECAHGFVKSKSILTNAETHQYKEQFWVFSMDIKDFFPSIKYHEVKRIFMGIGYSNEVSEALSLLTTVHGKLAQGFPTSPMLSNLFFRDIDEEFQQIASRYHIRYSRYADDITFSGVQKKGYLVLSEKLKQIVTSVLSKHNFIVNEAKTRLMKGKHPKIITGLVVTSQGVRIPQKYIRRLNKEIYYCRKFGVNGHLKYQGLITIANYKGYLIGLARFIYMVDPVKGAKFIKMIKDLDWD

SEQ ID NO: 2760 - protein, 340 aa, unidentified
  source 1..340: note = Related to NZ_AVBF01000002.1; note = Pontibacillus yanchengensis
MFDKILDNIKKSSLLEKEKEAYIQYARNLHLKNSPIIFDINQLVMLFDLPNDNIKEFVLENTNQYTISKRDGSSREVWKPSYKLKTIQRWILKNILFNIKVSESAHGFVKNKSILTNAEVHQYNEPFWVYSTDIKDFFPSIKQNEVKKIFLEIGYTEKVSEALSSLTTINESLVQGFPTSPMISNIYCREIDEEFKKQANKLNISYSRYADDITFSGPQKNGYLKLIKNIKNIVLHNFRENNFLINEKKTRVRKNKHTKIVTGIVVSQYGVRIPQKYYRRLNKELYYCQRFGVNEHLKYHGLITISNFKGYLIGLARFIYMVDPDKGSEYIKKIQKLDWE

SEQ ID NO: 2761 - protein, 340 aa, Bacillus sp.
  source 1..340: note = Related to JH792149.1; note = Bacillus cereus
MIKQVLHNIVLSDLSEEEKKFFMQYAKDLHSNHCPVIFDINQILRLFELPDDDLEKFVIDNTNHYYVSKRNGEPREVWKPNYKLKTIQKWILKNILNKIEVSACAHGFVKSKSILTNAEVHQHQEPFWVFSTDIKDFFPSIKYKEIKKIFIGIGYSDAVSEAFSLLTTVNKELVQGFPTSPMLSNIFFREIDEEFQQLASRYNIRYSRYADDITFSGVQKKGYLKLVKKIKEIVSCVLSKYNLIINNKKTRLMKDRHTKIVTGLVITPQGVRIPQKYIRRLNKEIYYCQKFGVNEHLKYHGLITIANYKGYLIGLARFIYMVDQSKGIELIKKIQELDWD

SEQ ID NO: 2762 - protein, 340 aa, unidentified
  source 1..340: note = Related to NZ_FODJ01000007.1; note = Amphibacillus marinus
MLNKVINNIRLSDIEEVEKRELIHYSEQLYSKNCPIIFDVNQLLLLFEIESDDLENFVLNNTLHYFVKKRNGEMREVWKPNYKLKAIQKWILNNILYNIKVSPHSHGFVKKKSILTNAQVHLHEDPFWVFSTDIKDFFPSIKQNEIKSIFMEIGYSKPVSEVFCLLTTVNQKLVQGFPTSPYISNIFFRNIDEKFREIEYKYSIRYSRYADDITFSGIQKKGYLTLVNKLKQIISNTLSKYNLTINEKKTRLMKDKHTKIVTGLVLTSKGVRVPQKYIRKINKEIYYCERFGVNEHLKYHGLITRANYRGYLIGLARFIYMVDSIKGAELLKKIEDLDWN

SEQ ID NO: 2763 - protein, 340 aa, Bacillus sp.
  source 1..340: note = Related to CP035226.1; note = Bacillus subtilis
MIKQVLHNIELSDICEEEKRKLIHYAEQLYSIHCPVIFDVDQLLLLFEIKVDELEKFVTDNTNHYFISKRNGKSREVWNPNYKLKAIQKWILKNILNNIEVSNCSHGFVKNKSILTNAQVHLHQEPFWVFSTDIKDFFPSIKKNEIKKIFMGIGYSESVSEALCLLTTANESLAQGFPTSPAISNIFFRKIDEEFQQVASKFSIRYSRYADDITFSGIQNNGSPSLVKKLKRIISYTLSRYNLYINETKTRLMKNKDTKIVTGLVVTSQGVRVPQRYIRMINKEIYYCQKFGVNEHLKYHGLITIANYKGYLIGLARFIYMVDSIKGAELIKKIQDLDWN

SEQ ID NO: 2764 - protein, 340 aa, unidentified
  source 1..340: note = Related to JACHHE010000004.1; note = Planococcus koreensis
MIKQILHNIISSNLSKEDKEILTQYAENLYLKNFPIIFDVNQFFLLFELTDNDLEKFIIDNTNHYHINKRNGELREVWQPNHKVKIIQKWILKNILNKIEVSPYAHGFIKNKSILTNAEVHLYQEPFWIFSTDIKDFFPSISYNDVKKIFMEIGYSDKVSEAFSLLTTVDGKLIQGFPTSPMLSNIFLRDIDEEFQKIAVRYNIRYSRYADDITFSGIQKKGYLTLVKNIKRIVSFILEKHDLAINNEKTRLMKDKHTKIVTGLIVTSKGVKIPQRFIRKLSKEIYYCQKFGVNDHLKYQGIITIANYKGYLIGLARFIYMVDKIQGAKFIKEIYDLDWD

SEQ ID NO: 2765 - protein, 340 aa, Bacillus sp.
  source 1..340: note = Related to NVGO01000019.1; note = Bacillus toyonensis
MINDILKNIKLSKLSEENRASLTRYAISIHNNNCPILFDKNHVLLVFNLVEEDLQKFIKENSNKYFIKKRNGSLREVWQPSYKVKEIQKWIYKNILNDIQVSECVHGFVKNRSILTNAQNHIHEDKFWVFSMDIKNFFPSIRIERIEQIFLKLGYSLEVSKALSLLCTVDGKLVQGFPTSPSLSNIIMREIDEEFKTIADRYNLKYSRYADDITFSGDQKKGYLILVKRLEKMICFILKNADFEINNSKTRLMKNKHAKIVTGLIVDSDGVRIPKKYIRKLKKEIYYCKKFGVNEHLKYIGLITIANYKGYLFGLARYIYMVEKELGIMFIKQLNDLEWD

SEQ ID NO: 2766 - protein, 345 aa, unidentified
  source 1..345: note = Related to SAAR01000159.1; note = Erysipelotrichia bacterium
MDNIVFQNINRSSLTDNEKNHLTIIASSLIIKGVPVIFDIHQVRLLFGIDGEIGIFVQKNCAKYSILKKNRDERTIYQPSYKLKKIQRWIVSNILSKIKISKSCHAFVPEKSILTNAKAHVHEDPFWIYKTDIINFFGEINFITVKDIFFSVGYSQDVSEILTSLCMYDGVLAQGFPTSPIISNIVLSNFDEELDVISQRYNFVYSRYADDITISGTQLRNKDIEKIKNIITYKLHHLGFEINKNKTKFFGFKADKKVTGVVIKNGQLFCPQKYKKLLNKELYYINKYGVDSHLIHNEKTLISNYIGYLYGYAGYIKMIEPDVGDEYVKKLNSIFWISNSEQAPS

SEQ ID NO: 2767 - protein, 309 aa, unidentified
  source 1..309: note = Related to BJZH01000076.1; note = Companilactobacillus nantensis
MNFTNTKQIKSVFKISQDMTVEKFVSKNINQYYFIKKKSKNPRQIYIPSIQLKTIQKWILKKILTKEFSSSEVAHGFISGRSIVTNAREHLYKEPSWILTMDITNFFDSIRFDSIEHLFRQHGYTKEVSRTFATLCTYRGKLVQGFPTSPFLANLYLKSFDVYLKSNLQKYNVKYTRYADDLTFSGNIEKNYESFILESERMVEKGLTKLQLRVNSKKTNIQTKERKIVTGIWLYKNKLSVSNNYLKKFRREIYYCKKYGVIDHLIHTNKVEISNFHGYMYGKAYFVKMVDENLGMKLLKELNDLNWPM

SEQ ID NO: 2768 - protein, 310 aa, unidentified
  source 1..310: note = Related to PZPN01000074.1; note = Lactiplantibacillus plantarum
MKLKNTNQIKKLFKITGNDISSFVTDNIASEFKIKKSNKERIIVVPSLHLKSIFRWLLDNIFEKEFIPHECVHGFVKNKSIVTNAKAHLYHSPNWVYTIDINNFFGSITRNDVLSIFIEKGWPTSVANAFADLCTYKNTLPQGFPTSPCLANAFLNKFDTHIHDFCKTYGIRYTRYADDLTFSSTDFVSVKKINEEVSCTLKKQNLFLNPKKEHLQKGKHKKITGININGHKLVSSRRFRKKFDNEIFFCKKYGIMDHLARTGTLTRSNFKSYMYGKACFINMIDQDLGQQYFRKLQHLNWPEIPNNAYF

SEQ ID NO: 2769 - protein, 339 aa, unidentified
  source 1..339: note = Related to LZRJ01000059.1; note = Solibacillus silvestris
MLETILNNINLGNIDKENKNILIENSKYLYSKGLPIFLDERHVSLVFNIEGNIKSFVENSTSHHIIKKHNGDSRDVFVPSEHLKEIQNWLLVNILEKKMISNSTYSFVKGKSIIDHALNHIYLKDFWLVTFDVKDFFPSIRKDAIKNIFFELGYTSDISDTLSSFCSIKNNLVQGFPTSPIISNIYLNELDSVLQEFCQSHNITYSRYADDLAFSGEGEKIQKSLYDKLYQLVVNTLAIYELKLNKNKIKIYDYNHPKKLTGIMLTTNGIRVPLKIKKKILKEIYYCEKYGVEDHLKKTGRLELANYKGYIYGIAGFIRMVEPETGIQLFRRLDNIYWG

SEQ ID NO: 2770 - protein, 311 aa, Streptococcus sp.
  source 1..311: note = Related to SSXP01000002.1; note = Streptococcus suis
MNSILVSEQQIKLLFKIAMTEDVIDFVKDNNLVYSKCKYNGETRFISSPSEHLKIIQRWIVDNILVQKSISDVAHAYVREKSIFTNARVHVGNKAILKMDISNFFDSIPITKVKEIFLSLGYNSAVSQVFAELCTNNGYVRQGFVTSPFISNIILKDFDDKLINTLKKSCYSKYEFKYTRYADDITISSKYKVKSKLKEIEQEVMDILEVSGFSANLGKTRLIIGESPKKITGIIVKESSISVPNRFKKELLKELYYCRKFGVISHLIYTGNYGKLNYIEHLKGLAMFIKNTDQKFYESVISQISELDLNS

SEQ ID NO: 2771 - protein, 311 aa, Streptococcus sp.
  source 1..311: note = Related to NCUR01000009.1; note = Streptococcus oralis
MIPKLISVQQLKKLFKIELTSNIEDFVENNNQVYPRIKKNGEIRFISSPTIHLKSIQKWIVEHILSKKDCSEFCHAYVKEKSIFTNAGTHIGNQNLLKMDIHNFFDSIPHISVKNIFITMGYNLEVSHSLALLCTYKGYVRQGFVSSPMISNIIMKEFDDWIIKSLHEEEYLKFDFKYSRYADDIAISSKKKAVAPLVIIKENISDYLEKYGFIVNNDKIKLIKGKGPKLITGIVVKDNSISVPNKYKRKLLKELYYCEKYGVESHLLYTGQYGKTNYKEYLLGIAMYIKNTDNQFYNTIRERIDALNIDY

SEQ ID NO: 2772 - protein, 336 aa, unidentified
  source 1..336: note = Related to CP023565.1; note = Ligilactobacillus murinus
MLVFQRPSSKRMAFCVGGFIVKVSRSISVKQVSEAFGINENIDEFVDNSSWFYPIEKKNGDIRYIFIANNQLKAIQSWILENILEDVKISDAANAYVSKKSIFTNAQCHVGYKGMIKLDIMNFFDAINRDDISKIFENLGFSKDVAMLFGKLCSNKNILNQGFSTSPMLSNIFFYKYDKLIEKILNEKYGKNTFVYTRYSDDITISTSKTFTFDDLMKLSSEIENLLLPKFKINKMKKKIILGKYPAKVTGINVFKEYMSVSKKIRRRIKREIHYCEKFGVSGHLKYVGEYNRQNFFGYLRGTAHFIGNTDKKLALKLLERIDMLEFRDRVTQKKL

SEQ ID NO: 2773 - protein, 330 aa, unidentified
  source 1..330: note = Related to SVLF01000041.1; note = Oscillospiraceae bacterium
MANSYIKRLEAAMTEQGAENEAISRAVDYAFNLLNQNLPVLFDDIHVAEVLLLSRLSLYSYHTFPVSQIDKTRIITAPSLNLKQRQKWILSEILNKIPSSEHAHGFESGHSIKTNALIHANNDYVFCMDIKDFFPSISRQSVCEIFRNVGYSPKASDMLSKVCCYNNCLPQGAPTSPKLSNIFFAKIDAELANLAKLNNAIYSRYADDMTFSSKHDIPALHKAVEEIIGKYNFTLNHKKTRVFYPGQPKRITGLIVQNGCIRVPKHFKRRLRQEIHYCRQYGVTVHLENTNASHCINYREHLYGKAYFVHMIEPDTGDKLLNMLDEIDWM

SEQ ID NO: 2774 - protein, 335 aa, unidentified
  source 1..335: note = Related to JAFSGO010000067.1; note = Clostridia bacterium
MDYVYITNLMHGLFQKGYDDKFVIRCCKYAEKLMRKNLPVFFDEEHIYEVLRTRGISLEDSYHTFDLIHDNKVRTILAPSKKLKARQRWILDNILNNIKVSKYAHGFELNRSIKTHAQLHANHDFVICMDIKDFFPSISEEKVFTLFKQIGYTTRASQELTRLCCFKGALPQGAPTSPKIANIICKRMDREIQRFAKENGITYSRYADDLTFSSNSEMPQLIPEITAIVNKYDFSINTEKTQSFVCGEPKFITGLVVQNGTVRVPKRYKRELKKEIHYCQKFGVLIHLENSNATHFVNYREHLYGKAYYVHMIEPDIGEKFLDELDKISWPEYMV

SEQ ID NO: 2775 - protein, 351 aa, unidentified
  source 1..351: note = Related to NZ_JHXF01000028.1; note = Ruminococcus flavefaciens
MEQNVKDMYIERLCHTLNDSKLSDMHKNKIISYAQQLLDKNMPVLYDKKHIAMIFDLRNIRLISSNYNKFYIDEKHKKRLIEAPSKKLKSIQKWILNNILEQLDTSEYAYGFRKGRSILQNALCHLGKKNVLCLDIKDFFGSIDEKTVFWLFRNIGFTSEASKTLKKLCCYKKALPQGAPTSPCIANIVCINMDKKLAQLAKKYNAVYSRYADDITFSSDEDISFLNKEVEKIIRKYNFFLNDKTKYYSGDHPKFITGLVVHKDKIRVPKKIKRELSKEIHFCRKFGVDMHLNNSGAEKRVNYREYLYGKAYYIKMVEHETGEKFLGMLNMIDWPDWALGSSNTSDNESVL

SEQ ID NO: 2776 - protein, 334 aa, unidentified
  source 1..334: note = Related to NZ_CP094682.1; note = Anaerotruncus colihominis
MEPNDYVNRLRHAMEISENPRFSPEYIAQCCTYAENLLKQGLPVLFDQTHIRKVLGMAAPRLCDYHRFTIPKHNGSRIITAPSRKLKLRQQWIYQNILIRKEASPYTHGFVPERSIVTNAILHIGYAYTYCVDITDFFPSITKKQVLPIFRNMGYSGSAANTLCDLCCCDGVLPQGAPTSPYLSNMICRDLDDELGAMARRFRGIFTRYADDIAISANQQQPQLLDALGLILGKHGFSMNLDKCRIYNPGQPKRITGLTVHNRVSVPKAFKRKLRQEIHYCQKFGVTAHLENTKAARSIHYREHLYGKAYYVKMVEPELGAHFLDELSKVDWPE

SEQ ID NO: 2777 - protein, 424 aa, unidentified
  source 1..424: note = Related to CABHNM010000079.1; note = Dorea longicatena
MGKYKYIDRLRQAMGGKYSEEYINYCAEYAAKLLDKNLPVIYDARHVDEILRLHGIKPDCYHIFVIAGKNKERKITAPSREIKQRQQWILEEILEKQDVSDNCHGFVKKRSILTNAKMHMGHKNILNLDIRNFFPSITETMVIFQFQQMGYSKSAAEALAGVCCYEGKLPQGAPTSPYMSNLILKKMDQDLENFCQKKGITYTRYADDMSFSSNEEIEGFFKDIKFIIGKYSFEINEKKTCYYQDPYRKIVTGLLVKENEVCIPKKFKRKFRQEIYYCRHLGVQRHLENTGNQERTGFREYMYGKAYFIAMVEPEAGKKYLEANTFDTFKVEPSLMTVFEQSHTWDELICHFVDSYVVETDKKAVSAFYDRGYIAEKLKGLETELALECRITLNGEERWIRNVIIRGEIEDSEYAMIFLRDEKT

SEQ ID NO: 2778 - protein, 331 aa, unidentified
  source 1..331: note = Related to JAFVDW010000052.1; note = Lachnospiraceae bacterium
MDKKAYIVRLENAMKGTYSKEYIDVCTKYASSLLDKDLPVIFDETHLYEILQLYAIKPDVYRKFHILGKRGKLRTICAPSRSLKLRQRWILDNILEKIPVSECCEGFRKDHSIYTNAKKHIGYEQMLNIDIKDFFPSIAEKTVIEIFHEIGYSRAAADELGAICCHDGCLPQGAPTSPYLANLACREMDRELLEFAQNHKLIYTRYADDMTFSGNVEMDKLIKGIVQIVYAHGFMVNTRKTRISTGNQRRLVTGIIVKKDGLAVPRNYKRKLRQEIHYCKQFGVANHLENTSSERKANFREYLYGKAYYIKMIEPKTGEQFLRELDEIQWQ

SEQ ID NO: 2779 - protein, 353 aa, unidentified
  source 1..353: note = Related to VIRA01000076.1; note = Lachnospiraceae bacterium MD335
MDEYIVNLKKELIKKEKSIEYIDRCCKYAKKLLDNGKPIIFDATHVKIILKMEGIKRNGYHYFNAGNIYKQRLIEAPSVNLKARQRWIAKNILENEPLGDWIHGYVKGKSIITNALVHAGKKRILHMDIKNFFQSITDEMVENEFAKMGYSESAAKELTSICTFSAEMVYWQEVEKLEDISSSQKYLPHGAPSSPWLSNLVFQNIDLQILDILKNKNIQYTRYADDLMFSSNSDKLVWLKDEIEKLVSKNGFAINVGKTKLFEEKDQKLIMGLNLTNGIKIQNSYKRKLRQEIYYCKKYGIENHLQKVGASNRSNFVAYIYGKVYFVKMVEPELGKELLENLDQIFQEEPLFY

SEQ ID NO: 2780 - protein, 351 aa, unidentified
  source 1..351: note = Related to DNJW01000315.1; note = Lachnospiraceae bacterium
MNEYIIRLEEELRKNNKEEAFITACCTYARKLLEKNKPVLFDADHVDKVLRMEGIKRDGYHTFNAGTRKKARIIEAPSVSIKKRQRWIVKNILEGEELGGWIHGYVKGRSIVSNAKVHAGKKRILRLDIKNFFPSITKGMVEKIFSAMGYSPSAAGELAAICTFSSDMLYQVKGRTEEEEASEEYRYLPHGAPSSPYLANLIFQNTDLEILESLQGREIRYSRYADDMFFSSDTEELQQLDEEIEGILSKHGFRLNKNKTKLMAEKDQKLVMGLNITNGIRVQNSYKRKLRQEIYYCNKYGIQDHLERTGNKGKSNFMGYLYGKAYFVNMVEPAEGKRLLEELDRLFADEQ

SEQ ID NO: 2781 - protein, 331 aa, unidentified
  source 1..331: note = Related to NC_015275.1; note = Cellulosilyticum lentocellum
MYNYEYTIRLCETLKSLSADDVYISKCCNYAEGLLDKELPVIFDPTHLKQILRLDDISLDEYHIFYIDKKNGGSREINAPSEELKKRQRWILKNILEKISISHNVHGFIKGKSIVSNARKHLNKEYVLNIDIKDFFPSVTKYSVEKIFRRMGYCNSVAQLLARVCCYRGGLPQGAPTSPYLANLAFDEVDQEIINVVRNRDITYTRYADDMTFSANYDLSTFKKEVYKSLGKYRFSPNIMKTHQMSGEKRKLVTGLIVDDKVKVCKKYKRKLRQEIYYCKKFGVTNHLRNCHSEKSINYKEYLYGKAYFIKMVEEIVGEKFLADLDSIDWY

SEQ ID NO: 2782 - protein, 328 aa, unidentified
  source 1..328: note = Related to QULM01000001.1; note = Coprococcus sp.
MENNYIYRLKINMFEQGFSTSYIDKCCSYATLLISQSLPVIFDKNHLDQILMLDTLKLDCYHEFEIYTKGKSRIILAPSKPLKSRQRWILDEILNKLPTNQCCHGFVQQHSIKTNAEMHVNKAQVLCMDIHNFFPSINIDQVFEVFHRVGYTSDVAQALAQLCTHNGILPQGAPSSPDLANIIFNPIDQQILNSISTKDITYTRYADDLIFSSSHEIDFLIPLISEIISTNGFKINNDKTHLMKNPYRKMITGLIVTDTVKVPKYYKRKFNQELFYCEKYGVASHLKNCRTHKKVNFKEYMYGKAYYIKMIEPDLGEEYLRRLDAIRW

SEQ ID NO: 2783 - protein, 393 aa, unidentified
  source 1..393: note = Related to AP018794.1; note = Lachnospiraceae bacterium KM106-2
MLKANELIILSYINKFQRIDLYEIQKTINEPLVQLMDSIYRLYENKYIVNDGIDKFSVTEKAKEENIGSWNIWTLKYKEKNINNNVFKYNKKYTGEFCDNGVPKISSVHQINDILELNHIDIESYHGFVLSYGGKNRMILAPGLNLKERQKWILHNILEKIPVEDCAHGFVKGRSIKTNAEVHVNKKEIVCLDIKDFFPSIKRVQVENVFLELNYSEEVAKKISSLVTYNDELPQGAPTSPYLSNLVFRNVDMGLKKLAKENDLEYTRYADDITFSANHSIDNIIKEAEEIIERAGFIVNEDKTHIMKDNYRKMVTGLVVNHKVRIPSAYKKKFRQEIYYCKKYGVSQHLRAIGRENAVNFQEYMYGKAYYIKMIEKELGEKLLLQLDSIFGV

SEQ ID NO: 2784 - protein, 374 aa, unidentified
  source 1..374: note = Related to CP016086.1; note = Clostridium saccharobutylicum
MRKEVQKALEDYISYFGIQKAKEQLKSYKKHSEKYNKKGYVFFDENHFDKIVESNTQIGVYQVDYYYDVYKIPKKRGGYREIASPSLELKSIQEFINENILLYGDVSDYCHGFVKERSIVTNALNHCNKELVICMDIKDFFKSIKIEDIISVFSNMGYNKEISNALGMWCSFKGALVAGSPSSPALSNLVFSKLDEIINDISIKYKFIYSRYADDMVFSTNKKNANYNQLIEEVEKCVNNFNFSINAEKTKIYPKCGKQEVTGLIVNNTVKVKSKIKKEVLTHIYYCEKFGFENHLSRYDKEYILKNSIEQIKIKRHFINYIRGKINFIKMVEPLNGGNVEKRYLEVFAEEEAKLKLEEKPIEIGFEELDDIYI

SEQ ID NO: 2785 - protein, 332 aa, unidentified
  source 1..332: note = Related to NZ_CP067364.1; note = Carnobacterium sp.
MSNNLSKHNEKNDYEKKIKSYSQKIHENGVPLIFDSEHLRRIIGVNKKSFLEIINSIDIQYHTIYVPKKREGFREINKPSINLMIIQRWILENILYKKKVHNNSFGFEPKKSVISNAKEHLNKKTVLSVDIEDFFHSIKEDYIKKIFLDMGYTKKLSELLAKICCFNGMLPQGSPSSPYLSNIYCIELDKDIYKLCQNYDLKYSRYADDITISSNNHINSEEVITNLIKIFNKYGFEMNSSKTRVSLKGNRQIVTGILVNDKLNVSKKYRNDLRQEIYYLNKYGLENHLDKRDDIMRRSNYKEYIYGKVNYLKLFDIEKANNYYEVLNRIDW

SEQ ID NO: 2786 - protein, 329 aa, Vibrio sp.
  source 1..329: note = Related to JAJSDZ010000009.1
MEISAHPQALSKLKNLGLPAVSNLNELSSQMRLSSGLLQQLIYKSDDHYHVYYLDKKSGGKREIAQPSRAMKAVQSWILRKILYRLSSSGNSKGFEIGESILSNAKPHVGAHVLLNIDLEDFFHSVPASNVYSIFHSIGYNKNISYILTSLCTFNGRLPQGAPTSPKLSNLACQRLDSRIQGYSGPKGIMYTRYADDITLSARNEAKIRKAQPMIEEIIQDEGFIINHKKTKICGTRKRKEVTGLVISPNSVGIGRSEYRRIRAEVYSMLTSDNSKLPTINGRIAHIKSVDKNNYEKITKYILSLKKKHPENDLFNLIVCIKGHISQGV

SEQ ID NO: 2787 - protein, 327 aa, Vibrio parahaemolyticus
  source 1..327: note = Related to MIQX01000067.1
MTTLQDSKNLSRLKNLGLPPVTNLDELSSQMRLSTGLVQQLVYKSDDHYKVYHLDKKTGGKREIAQPSRAMKAAQSWILRNVLSRLNSSQNSKGFEIGESILSNAAPHVGAHVLLNIDLEDFFHSVPASHVYSIFHSIGYNKSISHIFTCLCTFNGRLPQGAPTSPKLSNLACQRLDSRIQGYSGPKGIMYTRYADDITLSAFNEAKIRKAQPMIEEILQDEGFILNPRKTKICGTRKRKEVTGLVISTDSVGIGRKKYRQMRAEIYTMLKSDTSKLAQVNGWLAYIKSVDESNFNRLIKYIIALKNTFPNNDIFDSIPFIKATSPK

SEQ ID NO: 2788 - protein, 332 aa, unidentified
  source 1..332: note = Related to CP076406.1; note = Providencia rettgeri
MTQYSNINNLSRLKNLGLPPIGDLNELSNQMRLSSGLIQKLAYLSDEHYKVYYLKKKSGGQREIAQPSRAMKAVQSWILRKILYRLSSSQNAKGFEIGESILSNATPHIGAHVLLNIDLEDFFNTIPASHVYSIFHSIGYNKTISNIFTRLCTFKGYLPQGAPTSPKLSNLACQRLDSRIQGYSGPKGIMYTRYADDITLSAFNETKIRKAKPIIEEILKDEGFFINDSKTKICGTRKRKEVTGLVISIDGVGIGRRKYRQIRAMIYTMLKSDGSKIEQVNGWLAYIKSVDEKNYFRLVKYILTLEKNFPENKIFESISSIREKRVDKGNYL

SEQ ID NO: 2789 - protein, 324 aa, unidentified
  source 1..324: note = Related to NZ_WTLA01000004.1; note = Pseudoalteromonas sp.
MPNHQIVTSLSRLKNLGLPPVTNLKELASQMRLSSGLLQQLVYKSDEHYKVYYLDKKSGGKREIAQPSRSMKAVQAWILRKILYRLFSSQNSKGFETGESILNNATPHIGAHVLLNIDLEDFFHSIPASHIYSIYLSIGYNKKISNILTSLCTFKGRLPQGAPTSPKLSNLVCHRLDARIQGYSGPKGIIYTRYADDITLSAFNESKIRKAHPIIRSILVDEGFTVNQSKTKICGTRKRKEVTGLIISKDSVGIGRKKYREMRSEIYTMLQTDPSKLPKINGWLSYIKSVDTTNYNRLIKYITKLKTTFPDNLLFEKILFIQKK

SEQ ID NO: 2790 - protein, 323 aa, unidentified
  source 1..323: note = Related to CP034073.1; note = Shewanella psychromarinicola
MGSQYTNNLSQLKNLGLPAITNLAELASQMRLSVGLVQTLVFKSNEHYRVYFLDKKSGGEREIAQPSRAMKAAQSWILRKILYRLNSSQNSKGFEIGESILSNAAPHIGAHILLNIDLEDFFHSVPASHVYSIFHSIGYNKLISQKLTSLCIFKGRLPQGAPTSPKLSNLACQRLDSRIQGYAGSKGIMYTRYADDITLSAFNESKIRKAKPMIEKIVLDEGFSINHKKTKLCGTRKRKEVTGLIVSANGVGIGREEYRKMRAEIYTMLQSDPSKLAHINGWLAYIKSVDTTNYARLIKYIRTLKKIFPDSEVFNLIPAIKKN

SEQ ID NO: 2791 - protein, 324 aa, unidentified
  source 1..324: note = Related to JAESPX010000111.1; note = Colwellia sp.
MTIPSSPTDLSRLKNLGLPPITNLKELSSEIRLSKGFLQKLNYKSDEHYLVYTLDKKSGGKREIAQPSRAMKAVQSWILRKILVRLKSSKNSKGFEIGESILSNASPHIGAHVLLNIDLEDFFHSVPASHVYSIFHSIGYNKLISHIFTNLCTFNGRLPQGAPTSPKLSNLACQHLDSRIQGYAGIKGIIYTRYADDITLSALNESKIRKAKSMIEEIVVDEGFIINKKKTKICGTRKRKEVTGLVISKDSVGIGRKKYRKMRTEIYTMLKSEPAKLPQVNGWLAFIKSVDIKNYNRLKKYILTLKKVFPENDIFELIPSIQKK

SEQ ID NO: 2792 - protein, 328 aa, Vibrio sp.
  source 1..328: note = Related to JAKEUX010000001.1; note = Vibrio brasiliensis
MSDTNTSNNLSQLRNLGLPPVATLADLASHMRLSVGLLQLLSYKSDEHYKVYYLKKKSGGRRQIAQPSRAMKAVQSWILRKILSRLSSSANSKGFEQGESILSNALPHAGAHVILNIDLENFFNTVPASHVHSVFRSIGYNKTISQILTNLTTYNGRLPQGAPTSPKLSNLTCQQLDARIQGYAGPRGIIYTRYADDITLSAFNESKIRKAQPMIEEIVNSEGFTINDKKTKISGTRKRKEVTGLVISIDGVGIGRQEYRRMRAEIYNMLTEDSDKLSQINGWLSYIKSVDKTNYHRLIRYILKLRGHIKNEAVFSEIACLNKYTNQS

SEQ ID NO: 2793 - protein, 323 aa, Enterobacter sp.
  source 1..323: note = Related to FKGF01000007.1; note = Enterobacter kobei
MTTLSKNYPLRNFGLPVISSLEDFASSTRLSVSFIKYYLFQTDSHYKVFSIPKKKGGERIIAQPSRNLKAIQSWILRNILDRLSSSENSKGFEKGDSILNNALPHSGASYILSIDIEDFFPSISANKVHSVFRSLGYNSDVCKILTTFCTYKGRLPQGAPTSPKLANLVSQQLDARIQGYAGPKGIIYTRYADDLTLSSNTVKKLEKARDIIGLISKSEGLKINSLKTKLTGSRSRKSVTGLIVTKEGVGIGRAKYRELRSHIYNLFKDNNGDINKLTGHLSYVYSVDKRNFKRLKTYINNISKKYPNPIYFLHLSKIANVKK

SEQ ID NO: 2794 - protein, 320 aa, Acinetobacter sp.
  source 1..320: note = Related to DADBIP010000003.1; note = Acinetobacter baumannii
MTGIYRLKNIGLPVIKNIDDLAHFTRLSSTKLNYLSNSSKFLYKVYALPKKGSGIRIIAQPSRELKAVQAWILRNILDRLSSSDCSKGFEIGSSILDNAKPHIGSNYILNIDLKNFFPSISANKVYSVFSSLGYEKKVCILLTNFCVYNGFLPQGAPTSPKLANLICSKLDSRIQGYTGPRGLTYTRYADDITISANTIKKIINARDFLETIINSENLSVNKNKTQISGVRKAKKVTGLIVNQANVGIGRGRYREIRAEIHYVYLNKKTNLHRINGHLAFVYSVDKKMYNKLVAYLNKLIEKNPHCLLKDLNIFKNLIKK

SEQ ID NO: 2795 - protein, 339 aa, unidentified
  source 1..339: note = Related to CU207211.1; note = Herminiimonas arsenicoxydans
MQLDNRKFQLKIFNLPVIETIDDLAECTRLSPPLIKYLTYRADHLYKVFHIPKKIGEFREIAHPCRELKAIQGWILRHILDKLSPSENSKGFELGSSTLENASPHIGSNFLLNIDLKDFFPTIVASKVYGVFHSIGYNKKIAGALTSLCVFKGRLPQGAPTSPKLANLVCLKLDARIQGYAGPRGIVFTRYADDISLSAQTLKKIQNAKNLIHTIVASEGLEINNRKTSISGTRKRKKITGLVITENSVGIGRDLTRQIRAKIHHLFIEKSTNFSHVNGLLAYTYSVDKKSYRKLDSFIEKLKLKYPLCPATTELYKIKNSTITQFTKVCYRTSRIKKL

SEQ ID NO: 2796 - protein, 320 aa, unidentified
  source 1..320: note = Related to SNWT01000002.1; note = Idiomarina sp.
MPQDSHIYRLRNLGLPVMKSSEDFANYTKLSASRIRLLHLRADKFYKVYRLPKKSGGTRLIAQPSRELKALQGWILRNILDKLRASDQSKGFEIGSSILDNAAPHTGANFILNIDLEDFFPSIKANRIFSIFRSIGYNKELCVLLTNLCTYSGRLPQGAPTSPKLANLTCAQLDARIQGYAGPKGIIYTRYADDITLSAQTATKIYKARYFLDYLIADEGFTINRQKTRVYGTMSRKCVTGLVVSESAVGIGREKYREIRAQIHHLFSGKADSYRYLNGLLAFCFSVDTKSYRRAYKYMRKLQEKYPNSNAMNSIIPEKE

SEQ ID NO: 2797 - protein, 323 aa, Aeromonas sp.
  source 1..323: note = Related to NZ_CP047155.1; note = Aeromonas veronii
MMTTQNIYRLRNLGLPAMKSLEDFASFSRLSPSKIRHLSRSSEFLYKTYKVPKTNGSYRLIAQPSRDLKAVQAWILRNILDELSCSSYSKGFESGMSILDNAKPHIGSQYVLSVDLQDFFPSVSANKVYGVFSSVGYNKEMCVLLTNLCVFKGGLPQGAPTSPKLANLVCSKLDSRIQGYAGPKGITYTRYADDITLSSNSALKIQKAKSFLGTIISDEGFKINKPKTTLSGVKKQKKITGLVLSDNNVGIGSLKYREIRAEIHYLFAGKSNNYRRVNGLLSFVYSVDKKMYTRLHAYISSLKKKFPQSPAASSLNKEIVISR

SEQ ID NO: 2798 - protein, 324 aa, unidentified
  source 1..324: note = Related to JAHKPR010000010.1; note = Colwellia sp.
MTINNIYRLKNIGLPVMQSIEDLAKHARLSIEKIRYLSVRAEFIYLTYELPKTNGKTREIAQPSRELKAIQSWILRNILDKLSPSIYSKGFEKGTSILDNAFPHIGSTFVLTIDLENFFPTVKASKVFTLFKSVGYNKEMCVLLTNLCVYKGGLPQGAPTSPKLSNLICDKLDSRINGYAGPKGIVYTRYADDITLSANNIQKLQKAKDFIGTIISDENFKINKSKTKLCGTKRQKMITGLVLSESSAGIGRVKLREIRAKIHHAFVGKHNEFDHINGLLSFTYSVDKSSYKKLYRFIDKMNKDYPDSLAVLELHKNLLKKQLQ

SEQ ID NO: 2799 - protein, 319 aa, Vibrio parahaemolyticus
  source 1..319: note = Related to CP006004.1
MTSNSIYHLKNLGLPALTSLDEFAHAMKLGSNTVRSLSISSNSLYKTYKEPKKSGGFREIAQPCRELKAVQSWILRNILDKLNCSPYSKGFEKGKSILDNAQPHAGASYLLSMDLENFFPSIGSYKVYGVFSSIGYNKEMCKLLTNLCTYYDSLPQGAPSSPKLANLTCSRLDARIHGYAGPKGITYTRYADDITLSANTAVKIEKAKAFIGTIVHDEGLKVNKTKTKICGTKRQKKVTGLVLSGNSVGIGQKKYRELRSALHRIFVGRSTEYSFVNGWLSFTYSVDKKAYNQLYLVIDSLSKKYPQSDALEHLYAKKG

SEQ ID NO: 2800 - protein, 319 aa, Vibrio sp.
  source 1..319: note = Related to NZ_AP018689.1; note = Vibrio aphrogenes
MTSKNIYSLKNIGLPAMASIDDFANEARLSPGKIRYLSATAESHYRIYPIPKVGGKSRLISQPSRELKAVQAWILRNILDKLSSSPCSKGFEIGTSILDNARPHIGSNYVLTIDLEDFFPNVSASKVFGVFSSIGYNKELSILLTNLCTYSGGLPQGAPTSPKLANLVCAKLDARIQGYTGPRGIVYTRYADDMTFSAHTASKIRKVKHFIGTIISDEGFKINHKKTAICGTKRQKKVTGLILSESSVGIGRVKHREIRAKLHHLFTGKSAEFSHVNGLLSYTYSVDRRSYNKLYSYIAGLSKKYPNSNAIIEISPKIV

SEQ ID NO: 2801 - protein, 319 aa, Proteus sp.
  source 1..319: note = Related to NZ_CP034105.1
MTSKNIYSLKNLGLPAMVSVDDFANESRLSSAKIRYLSATADLHYKVFSIPKVTGKSRLISQPSRDLKAIQAWILRNILDKLSSSSCAKGFERGSSILDNARPHIGSNYILTIDLENFFPSIAASKIYGVFSSIGYNKQLSVLLTNLCTYKGGLPQGAPTSPKLANLVCAKLDSRIQGYAGPKGIVYTRYADDMTFSANTALKITKTKQFIGTIISDEDFKINSQKTVISGTKKQKKVTGLILSENSLGIGRVKYREVRVKLHYLFTDKLSNFSYMNGMLAYIYSVDKKSYNKLLSYIAKLKNKYPNSIAVNFINSKNK

SEQ ID NO: 2802 - protein, 322 aa, unidentified
  source 1..322: note = Related to NZ_BAEK01000003.1; note = Paraglaciecola agarilytica
MSSNNIYSLKNLGLPALKKIEDFAFVTRLSQGRITYLAYRTEHLYKTYDVPKKSGKKREIAQPNRELKAVQAWILRNILDKLSSSPHSKGFDLGTSILENAVPHQGANYILTLDLEDFFPSISANKVYSIFSSIGYNKEVSSLLTNLCVFKGGLPQGAPTSPKLANLVSAKLDARIHGYAGPKGIVYTRYADDLTLSAQSVQKLEKAKNFIDKIITDEDLVINRSKTKLCGTKRQKKITGLVLSQNNVGIGREKLREIRAKIHYLFIGKNIDYSHVNGFLAFTYGVDKKSYTKLYRFIEKMKAKYPSSEAVTELHNKAIKRI

SEQ ID NO: 2803 - protein, 324 aa, Nitrosomonas sp.
  source 1..324: note = Related to FOFX01000033.1
MPNKAHLYRLKNLGLPAIESIEGFADKTRISLEKIKYISYRSGHLYKVYEIPKINGKKRRIAQPNRELKAVQSWILRNILDKLSTSEHCKGFETGTSILDNAVPHVDSNYVLTVDLEDFFQSVKASSVYRIFNSIGYNKQVSSILTNICTSDGGLPQGAPTSPKLANLACAKLDSRVHGYAGQKGIVYTRYADDITLSAQTPKKIYNAKQFIGTIISDEGFAINKAKTRISGTRSQKKITGLILSENRAGIGRNKYREIRCKIHYLFVGKNKDYSHVNGLLSFTYSVDKKAYKKLYSYIKMLKNTYSDSKAGDLLVAEITKIPA

SEQ ID NO: 2804 - protein, 323 aa, unidentified
  source 1..323: note = Related to BMLH01000001.1; note = Rheinheimera tangshanensis
MSNKSYIYRLKNLGLPAIESIDDLADACRLSLGKVKYLSYRTEYLYKVFCIPKKTGKTRTISQPNRELKALQAWVLRNILDKLSSSEHSKGFDKGASILDNASPHVGANYILTIDLEDFFSNVKASHVYKIFHSIGYNDKISAILTNICTFKGALPQGAPTSPKLANLVCAKLDSRLHGYAGPKGIVYTRYADDLTLSGQTPQKIYKASQFIGTVISDEGFSVNKAKTNICGTQKQKKVTGLVVSEHHAGIGRQKYREIRSKIHYLFEGKSNDFHQVNGLLAFTYSVDRKSYKRIYSYVNKLKLRYSGSEASKKIAAEIGIKA

SEQ ID NO: 2805 - protein, 322 aa, unidentified
  source 1..322: note = Related to NZ_VBVC01000001.1; note = Halomonas sp.
MNEKQKKYGLKNLGLPAIETISDLANEIRLSDNKIRYLAYRAQHLYKVYSIPKKSGGSRLIAQPSRELKAVQGWILRNILDKLSASEHSKGFEKESSILDNAMPHVGANYVLTVDLQDFFPSIKANKVYSIFYSVGYNKLISSVLTSICTYDGRLLQGAPTSPKLANLICAKLDSRLSGYSGPLGIVYTRYADDITLSGQAARKIYKARDFINVIISSEGFKVNEKKTKICGTQRQKRITGLVVNENHAGIGRKRYREIRVKLHRLFVGKSDDYNHVNGFLSFVYDVDYKSYKKLFLYINNLKEKYPSSSAGLNIFPEINKS

SEQ ID NO: 2806 - protein, 324 aa, Escherichia coli
  source 1..324: note = Related to UGCT01000004.1
MTSATPSQVFRLRNLGLPVMSSLEDMSREMRLSVDILRLYIYRADKYYKVYSLPKRDGKRSRIISQPSRELKALQAWVLRNILDKLHSSPFSKGFEKGQSILNNASPHVGANYVLNIDLEDCFNTILIEKIYTVFHSLGYNSTISNALARLCSFNGSLPQGAPSSPKIANLVLTKLDYRIHGYAGSKGIVFTRYADDLTLSAQSLKKILKAKSFVCSIIPSESLKVNYNKVAIHGPKARKEVTGLVLSIDNVGVGRIRYREIRSKIHYLAVKRNSDFEHVKGLIAFVKSVDKKNYRKLMTFSNKMSETYGVDLSVLFPKNKKAI

SEQ ID NO: 2807 - protein, 321 aa, unidentified
  source 1..321: note = Related to NZ_SOZF01000025.1; note = Serratia oryzae
MTSIIQSQVFRLRNLGLPVMSTLDDMSREMRLSVEILRMLIYNADKYYTVYSVPKKDGRRVRVISQPSRKLKSLQSWILRNILDKLYSSPFSKGFEKGQSILNNASPHIGANYILNIDLEDFFDNIPSRKIYTLFHSLGYNSLVSNALTRVCSHKGSLPQGAPSSPKIANLILTKLDYRIQGYAGGKGIVFTRYADDLTLSTQSLKKIVKAKKFLCTIIPTEDLKVNYRKVVINGPRAKKSVTGLILSIDNVGIGREKYREIKSKIHHLAVGRTSDYEHIQGLVSFVKSVDKTNYRRLLAFSKKMSSIYKLNINQLFPSKK

SEQ ID NO: 2808 - protein, 321 aa, unidentified
  source 1..321: note = Related to NWTM01000001.1; note = Pectobacterium sp.
MNNFSSTDVFRLRNFGLPVMSSLTDMSREMRLSVELLTLLITRADDFYKVYSVPKTGTEKGERVICQPSRRLKALQAWVLRNILDKLNSSPFSTGFERGQSIKDNANPHVGSNFVLNIDLEDFFPSISSNKIYTVFNSLGYNKYISSVLTKICCFKNKLPQGSPASPKLANLVCMRLDHRIHGYAGIRGIIFTRYADDITLSAQSLKKIEKAKDFLFSIIPTEQLIVNYNKVIISGPRKQKKITGLVLSIDDVGIGRQKFREIKSKIHYLSVGRSENYAHVGGLLAFTKSVDEKNYRRLIVFAQKLNKKFNLDLDKLFKHG

SEQ ID NO: 2809 - protein, 319 aa, unidentified
  source 1..319: note = Related to NZ_CP033893.1; note = Serratia liquefaciens
MKSTEHLNTFRLRHLGLPVMNDLHDMSKATRISVETLRLLIYRADFRYKIYSIKKKNSHSIRTIYQPSRELKALQGWVLRNILDKLSSSPFSIGFEKNQSILNNATPHIGANFILNIDLEDFFPSLSAKKVFGVFHSLGYNRTISSSLTKICCYKNLLPQGAPSSPKLANLICSKLDYRIQGYAGSRGLIYTRYADDLTLSAQSMKKVLKAKDFLFSIIPTENLVVNTKKTCISGPRSQKKVTGLVISQEKAGIGRLKHKELRAKIHHLFSGRSKNIEHVRGWLSFVLSVDSKSYRRLFVYIGKLEKKYGWNPLSKTKT

SEQ ID NO: 2810 - protein, 320 aa, unidentified
  source 1..320: note = Related to NZ_CAAGXM010000002.1; note = Klebsiella quasipneumoniae
MENEHYMNTFRLRNLGLPVMSDLSDMSKETRVSVEALRLLIYRADYRYHIYTLDKKGPGNKKRTIYQPSRELKALQGWVLRNILDKLSSSPFSMGFEKKQSILNNATPHVGANFILNIDLEDFFPSLTAHKVFGVFHSLGYNRAIASSLTRLCCYKNLLPQGAPSSPKLANLICSRLDYRIQGYAGRRGLIYTRYADDLTISAQSMKKVVKAKDFLFSIIPSEGLAINKEKTCISGPRGQKKVTGLVVSQDKVGVGKRKSKEIRAKIHHIFVRRSNEVEQVKGWLAYILSVDVRNHKRLVAYINKLEKKYNWNPFKKEDH

SEQ ID NO: 2811 - protein, 319 aa, unidentified
  source 1..319: note = Related to JADTXC010000013.1; note = Serratia ureilytica
MPSATNSHVYQLRNQGLPVMSSIVDMAREVRLSVEMLRFLTYRTDYLYKTFEIEKKGTTSKRVICQPSRKLKAIQGWILRRILDNLRSSEFSKGFEKGQSILDNAVPHVGANFILNIDLKDFFPSVDASKVYGVFSSLGYNKEISSILTNLCTYKGKLPQGAPTSPKLANLTCARLDARIQGYAGSKGIIYTRYADDLTFSAQTLKKIIKTRFFIQTIIPTEKLSVNNHKTLLCGPRKQKKVTGLVISHDKTGIGRQKLREIRSKIHKIYTGEKTNTNHVYGLLSYVYSVDKRNYRKLIIYIEKLNKKYNKSEFLKIKK

SEQ ID NO: 2812 - protein, 319 aa, unidentified
  source 1..319: note = Related to NZ_CGCI01000022.1; note = Yersinia frederiksenii
MTLVTATHSHVYQLRNQGLPVMSTISDMAREVRLSVEMLKFLTYRTDYLYKTYEIDKKGKGSPKRIISQPSRKLKAIQGWILRHILDHLSSSEFSKGFEKGQSILDNAVPHIGANFLLNIDLKDFFPSISASKVYRIFRSLGYNKEISSVLTNLCTYKGKLPQGSPTSPKLANLICSRLDARIQGYAGRRGIIYTRYADDLTLSAQTLKKIEKAKFFIKTIIPTEDLKVNNSKTLLCGPRRQKKVTGLIISHDKAGIGREKLREIRSKIHKIFTEESLEYNHVRGLLAYVSSVDKKSHRKLVMYIDKLTKKYSGVEFII

SEQ ID NO: 2813 - protein, 327 aa, unidentified
  source 1..327: note = Related to NZ_JAENGP010000011.1; note = Advenella mandrilli
MKTESTANIYRLKNLGLPPLATIEDIANATRLSPEYIKYLAFRTNFLYKTFTIPKRSGGNRKIANPSRALKGIQGWILRNILDKLSSSEFSMGFEKGTSILDNALPHTGSTFILTIDLEDFFPSITGEKIFGVFNSIGYSRSISHILANLCLFEGRLPQGAPTSPKLANLVCSRLDSRINGYTGPKGIVYTRYADDITLSSQSLNKLYKAYNFIPFILQDEGFSLNPNKTIFSGTRKKKSVTSLIISGDTVGIGREKYREIRSKFHKEFTGITTNKEHLHGWISFINSVDRKSSIKLKNYIACLIEKYPDSEASKNFLKITEKNKTQ

SEQ ID NO: 2814 - protein, 330 aa, Aeromonas hydrophila
  source 1..330: note = Related to NZ_CP065651.1
MQKNTIYTLKNLGLPAITTLDDLSFLTRISRERIILLSTQHKRFYNTFLMPKKSGGHRQISQPSRDLKALQSWILRNILDKLSASKFSKGFEKGSSTLDNATPHIGANYILSLDLEDFFPSIKSGYVFSIFRSIGYNVPVSHTLTNLCVYNGGLPQGAPTSPKLANLVCSRLDARISGYAGKKGITYTRYADDITFSAQTAKKITKVYSMAKFIIHDEKFVINKNKTYFSGTKKNKRITGLVVTERSVGIGRVMLRSIKAKIHHLLVGRNDDLPHIIGLLSYIYGVDKKNYKHLIRYIQKLSLKYSGVPQELKDMVAKHNNLAASTLSEV

SEQ ID NO: 2815 - protein, 326 aa, unidentified
  source 1..326: note = Related to NZ_BBUL01000097.1; note = Cellvibrio sp.
MTKKIIFKLKTPPKINDIHDLARETRLSEKLISYIAYRSNFLYRTYYVPKKSGGKRLIAQPARELKAIQSWILRNILELRPSSNQSMGLERDQSILTNALPHIGNGYLLNIDLENFFPSIKSKRVFHLFKKMGFNNNISTIFTRICTFNDGLPQGAPSSPKIANLICSKLDARIQGYVGKRGINYTRYADDLTFSAPSYEKINKLEIFIKKLISDEDLFINSNKTTFSGPRKQKKVTGLVLTNDSVGIGRGKYKAIRARIYYYFLGIEKDIASINGYLSFIYSVDQKRYSMLQHYISSLFERFPVIPSANFGQFTNIHFLPQSALG

SEQ ID NO: 2816 - protein, 328 aa, unidentified
  source 1..328: note = Related to JAESQK010000141.1; note = Crocinitomicaceae bacterium
MKDSKTAKKYRLKSLGLPIIESADDFTRLLKISSSIIQQISKQTTKDRFYKEYRIPKKSKGFRQIAQPVRKLKALQIWILRNILDKLTTSDSSKGFEKGTNIKDNVRPHVGARVIMSLDLESFFPSISSNKVFGIFYSLGYNTEASWLFTNICTYKNKLPQGSPSSPKLSNLICWKLDFRIEGYTNKRDIVFSRYADDLTFSSKSIKKIIKAKNMVKHIIEDEGFVINEDKTRIMGPSRQKKVTGLIVSGHKVGIGRKKYREMRVKIINLFTHESDDFSHVMGWMSYINSVDKSVYKRLILYIEKLSIQFSNSIAVEEFKALIKNGNL

SEQ ID NO: 2817 - protein, 319 aa, Flavobacterium sp.
  source 1..319: note = Related to SMGE01000001.1
MSNNGIIKLNMFGLPVIQTLDDFSFISHISKYTIYQLSKNSDYYYKIYFIKKKSGKHRKICQPSRKLKGLQSWILVNILEKIKVSNSCKGFEKNSSTLDNAIPHAGANTILTLDLKDFFPSITSNQIFNIFKTLGYNDLISTVFTNICTFDGCLPQGSPCSPKLANLTAWKLDSRIQGYVGKRGISYTRYADDLSFSGLNPVKVVNIIPMIKEIIEDENFLINNSKTRISSSGRAKIVTGLVITDEKIGIGKKKFNNVRSKIHHLSMPRENGNIKLLNEVQGWLSYLNSVDRERLIKTQKYIDHLNQKYPNSMIKFLVK

SEQ ID NO: 2818 - protein, 321 aa, Flavobacterium sp.
  source 1..321: note = Related to NZ_JAGFBU010000005.1
MSNNGIIKLNMLGLPVIQTLDDFSLITHVSKYTIYQLSEKSDFYYSIYSIPKKSGKPRIICQPSKKLKGFQSWILVNVLDKIKVSSSCKGFEKKSSTLDNAIPHKGANTILTLDLKDFFPNITSKQVFNIFKTLGYNDLISTIFTNVCTYKEFLPQGSPCSPKLANLTAWKLDLRIQGYVGKRGINYTRYADDLSFSGLNPANVVRILPMISNIIESENFIINHSKTRIASSARAKIVTGLVISDDNIGIGQKKYKNVRAKIHHLTKPIEKGNVKLLNEVAGWLSYLNSVDKNRLAKANKYINELYKKHTKSMIQYLIKLD

SEQ ID NO: 2819 - protein, 319 aa, Flavobacterium sp.
  source 1..319: note = Related to NZ_FOJT01000006.1; note = Flavobacterium swingsii
MSKSEIIKLNMLGLPVIQTIDDFSLITHISNYTIFQLSKNSDNYYKTYDIPKKSGRPRQICQPSRKLKGFQSWILVNILDKTKVSSSCKGFEKKTSTLDNALPHKGANTILTIDLKDFFPTITSKQVFNVFKTLGYNNLISTIFTNICTYKGFLPQGSPCSPKLANLSAWMLDLRIQGYVGKRGINYTRYADDLSFSGLNPSNVVNIYPMIKTIVESEKFKINNSKTRVASSARAKIVTGLVISDEKIGIGKQKYKNVRAKIHHLTLPSEMGNVKLLNEVGGWLSYLNSVDKERLSKARKYINELHKKNPKSMIQYLVK

SEQ ID NO: 2820 - protein, 319 aa, unidentified
  source 1..319: note = Related to JABHCC010000144.1; note = Bacteroidetes bacterium
MSQTNSIKLNMLGLPVIQSIEDLSMLTHISKYTIYQLSIHADKYYKTYEIPKKSGRNRTISQPNKKLKGFQSWVLRNILDKVKVSDSCKGFEKGSSTVENALPHRGANTVLSMDLKDFFPTITIQRVFSIFKVFGYSDLISTILANITTYAGALPQGSPCSPKLANLSAWKLDLRIQGYVGKRGMNYTRYADDLTFSSLNPSNVVKIIPMIKEIIESESFFVNHSKTRIAGSSRAKIVTGLVISGENIGVGKQKYKRIRAKIHHLTLPAEQENSRLLYEVSGWLSYLNSVDKNRLLKAKEYIKELSEKHPDTLIANLNN

SEQ ID NO: 2821 - protein, 319 aa, Flavobacterium sp.
  source 1..319: note = Related to NZ_VOGZ02000014.1
MAKTEIIKLNMLGLPVIQSIDDFSVVTHISKYTIYQLSHHSDKYYKTFEIPKKSGGKRTICQPSKKLKGLQSWILVNILNKIQVSPSCKGFRKGSSTLDNALPHIGANTILNLDLKDFFPTVSSKQVYNVFKTIGYNKLIATVFTNICTYNDMLPQGSPCSPMLANLTAWNLDLRIQGYVGKRGISYTRYADDLSFSGLNPTKVVKIIPMIKTIINDENFEVNHKKTRIASSARAKIVTGLIVNEDSVGIGKQKYKDLRAKIHHLILPTEQKNEKLLYHVGGWLSYLNSVDKLRLQKAKKYISELTKKYPTTLIARLDK

SEQ ID NO: 2822 - protein, 334 aa, unidentified
  source 1..334: note = Related to NZ_CP042433.1; note = Flavisolibacter ginsenosidimutans
MSKSDKFKLSMAGLPVMENLNDFSRLTHISNYTLFQLSKYSDKYYKHYYIPKKSGKPRLISQPCRKLKGIQSWILNNILDKLCVSNSCKGFSKGTSIIDNVDPHKHSSVVLTIDIKDFFPSIRRDKVYNIFKAIGYNKFMSTIFTNLCTCNGALPQGGPCSPKLANLSAWTLDVRIQGYVGRRGITYTRYADDLTFSTTNPQKLIKRISTITSIIEDEKLHINPSKTRIAGSARARKVTGLIITNESFGIGRQVYLKVRAKIHHLTLNREQKNFDLINEVQGWLAYLKNVDKLRYKKAADYIRSLKEKYPATLISQIILPPLILEVATVITAVE

SEQ ID NO: 2823 - protein, 319 aa, unidentified
  source 1..319: note = Related to JACRII010000139.1; note = Planctomycetes bacterium
MSKTDNIKLHMLGLPVIQMVDNFSQVTHISKYTIYQLSKHSDKYYKTYTIPKKSGKLREISQPSKKLKGLQSWILANILNKLKVSNSCKGFEKGSSIADNAEPHKDANTILTLDLEDFFPTVKRNQVYSIFKTIGYNKAISTILTNICTFQGILPQGSPCSPKLANLSASKLDARIQGYVGKRGINYTRYADDLSFSGLSPAKVVKIIPMIKSIIENENFVVNPEKTRIAGAARAKKVTGLIISNNTFGIGKQKYKDLRAKIHHLTLPSEQTNTKLLNEVIGWLSYLNSVDKKRLSKANKYITKLTDKHPTTLVAKLKR

SEQ ID NO: 2824 - protein, 329 aa, unidentified
  source 1..329: note = Related to SEFI01000651.1; note = Sphingobacteriaceae bacterium
MVESTSGLIKKGSKDNFRLNMLGLPLIQTMGDLSSLTHVSEYTLYNLSKNADFHYRIYDIPKKNKTPREISQPSKRLKGLQSWILVNILNKLRVSNHCKGFEKGSSIADNAEAHIGANTILTIDLKDFFSSIDSIRIYNIFKSIGYNSLIATALTNICTFRGVLPQGSPCSPKLANLSAWMMDVRIQGYVGQRGISYTRYADDISLSGLHPSKVVKLLPMIESIINDEKFVVNSDKTRIAGSARAKKVTGLVLSDNSYGIGAKKLKNIRAKIYHLVLPEEQKNIKLLNELKGWLSYINSVDKRRLEKLHLYIKKLLNKNPETLLAQLSI

SEQ ID NO: 2825 - protein, 322 aa, unidentified
  source 1..322: note = Related to NZ_JHXV01000023.1; note = Crocinitomix catalasitica
MVKNENIRLNMLGLPIIQSIDDFSHITHLSKYTLYQLSEKSNFHYKKFPLKKKTGGTRTICQPSKNLKGLQSWILVNILNKLKVSDSCKGFEKGSSIGDNARPHINANCILTIDLSDFFGTVTDIQVYNVFKSIGYNKLISTMLTNICTCDGSLPQGSPCSPKLANLVTWKLDKRIQGFVGKRGITYTRYADDLSFSGLHPANTVQILPVVKSIVEDEGFIINPKKTRVAGASRAKIVTGLVISNNKFGIGKTKYRILRSKIYHLTKPKEQKNTDLLNEVNGWIAYLKSVDKSRFNKVFKYVTKLKKEHPKTLVNQITISNN

SEQ ID NO: 2826 - protein, 323 aa, unidentified
  source 1..323: note = Related to NZ_CP040710.1; note = Proposed Aggregatimonas sangjinii
MIKNENIRLNMLGLPIIQSINDFSHITHLSKYTLYQLSEKSDFHYKKFPLKKKAGGTRTICQPSKNLKGLQSWILVNILNKLKVSDSCKGFEKGSSIGDNARPHINANCILTLDLSDFFGTVSDIQVYNVFKSIGYNNLISTMMTNICTSDGSLPQGSPSSPKLANLVSWKLDKRIQGFVGKRGITYTRYADDLSFSGLHPANTVQVLPVVKSIIQDEGFRINPRKTRVSGASRAKIITGLVISNNRFGIGQTKYRILRAKIFHLTKPKEQNNIDLLNEVNGWIAYLKSVDKLRFNKVFKYVSKLKKEHPKTLINQMTIANIV

SEQ ID NO: 2827 - protein, 320 aa, unidentified
  source 1..320: note = Related to JAJMPA010000005.1; note = Pedobacter sp.
MNKSNIIRLKMLGLPVMEKVDDFAELTRLSRSIIYQMSSFANEYYITYQRPKKTGGKRTISQPSRKLKALQAWILVNILNKLSVSPSCMGFEKGTSTYQNAKAHIGATAILTVDIQDFFPSISQRHVFNIFRAVGYNNLISIILSKICTFENKLPQGGPCSPKLANLVAWRLDNRLQGYVGKKGISYTRYADDLSFSGPMPSKVVRSLPFIKSIITSERFEVNDKKTRIAGPSRAKIVTGLVVGNDGVGIGREKYKLFRAKIHRLTKQTEQTNLKLLSEVHGWLAYLHSVDVKRLNKAKKYIANLKNKYPESLVSKINWK

SEQ ID NO: 2828 - protein, 326 aa, unidentified
  source 1..326: note = Related to WPIF01000004.1; note = Nitrospirae bacterium
MARKTLKKTDNVRLNMLGLPVIGTLDDFSALTHLSKYSIFQLSKNSGKYYKVYEIPKKSGKKREIAQPSRKLKALQSWILVHILNKLKVSPSCKGFEKGQSILENANPHVGSNAILNIDLKDFFPSVKSNYVFNIFKSLGYDHTISTILTNICTFQGKLPQGSPCSPKLANLACWQLDNRIQGYVGKRGITYTRYADDLTFSGLSPNKVIKIAKTVDKIIQNEGLLINTDKTHFAGTAKAKKVTGLVINDKSAGIGKKKYHELRAKFCNLAKPENQEKKDKLYHAIGWLSFLKSVDIVRYKRILHYIAALKTKYPNTQLDMIKTDQ

SEQ ID NO: 2829 - protein, 321 aa, unidentified
  source 1..321: note = Related to NZ_FSRK01000003.1; note = Epilithonimonas zeae
MTSTIRLKILGLPNITDLEDFAYLINLSKNSIYQLSKNSEYYYKTYQIAKKNGKLRDISQPNKQLKGIQLWILNNILNKLKVSEYSKGFEKGQSISDNVRPHIFSNCLLNIDIKDFYPSINSIKVYNLFKSIGYNNLISTLLTNICTYKNSLPQGSPCSPKISNLICWKMDSRLQGYVGKKGIIFTRYADDITFSSIMPDKLIGVLPFVEKIIIDEGFTLNKYKTRFTGKLRRREITGLVIYDNNFGIGRKKLRIIRSKVYNFTKTTDNVNHKALHHLYGWMNYIKSVDEVRYKSLLEYIKLLYQKNPKTDIKTLYNYYNS

SEQ ID NO: 2830 - protein, 333 aa, unidentified
  source 1..333: note = Related to JAIBBL010000001.1; note = Ignavibacteria bacterium
MKRKNNFKLNLFGIPIINTLDDLSLLTHITKSTLFRLSKKSYLYYKEYTVPKKNKGVRKISQPSAKLKGIQSWILQNILEKLKVSPSCKGFEKGTSTADNTKPHVGANAILVVDIKDFYPSIKGNFVFSLFKLIGYNNLISTILTNLCVLNDSLPQGSPCSPKIANLVAWKLDIRIQSYVGKRGIIYTRYADDLTFSSINPANLIKILPIVKDIIESENFEINKNKTRFIGISRCRKITGLVLSDNNFGVGKRKYKNIRSKVFKLKDIEKIEDDKEKRKIKEMKEVYGLIAYLKSVDKERYLRILDYIRTLSVKYPNSILTNISFNTKTTIAK

SEQ ID NO: 2831 - protein, 321 aa, unidentified
  source 1..321: note = Related to JABHDM010000238.1; note = Nitrospina sp.
MASPSQTSKLRMLGLPIFDDLESFAQVTRLSKKFLYLHSSFSDQHYKKYFIPKKSGGQREISQPSKAHKAIQGWILRNILDLLQVSQASKGFAKKQTTADNAIPHIGANAILSLDLEDFFPSITANKVYSIFHSLGYSKPISIMLTSICTCGGKLPQGSPCSPKLANLVCIRLDNRVQGYVGARGVTYTRYADDLTFSAAHPGKLMHIFNFIRRIITEEGFSLNESKTRLAGTRLRKKVTGLVVTEGAVGVGRIKYRELRSKVFNLTKTQDIFYDQKEINEIYGWLGYLKSIDSKRYEKLVSQIETLKKNHKETSLDYLLV

SEQ ID NO: 2832 - protein, 337 aa, unidentified
  source 1..337: note = Related to JACDNW010000012.1; note = Candidatus Marinimicrobia bacterium
MNTKMRLHLLGLPSISSIDELSDTTHLSKSLIFRLIKYNDKFYRVYKLPKRNGGYREIAQPSKELKALQAWINRNILDRLEVSPACKGFERDTSILDNATPHVGSNAVLILDIEDFFPSITANKVCSLFKRIGYPSQAAAILAKLCTFKGRLPQGSPASPKIANLVCLRLDLRILGYVGKRGIVYTRYADDLTFSGPSTSSLLKLLYVVKTIINDEGFEINNYKTRIIGPSRQHKITGLIVNNSFAGIGHRQMRVIRSKVHRLCKYDAYSVPQKELNHVMGWLAFVKGVDTKRSLILYRYIQGLKEKYPDSGIQKLKIDFLLNKPSKRSIASGEPDL

SEQ ID NO: 2833 - protein, 317 aa, unidentified
  source 1..317: note = Related to JAHJJL010000216.1; note = Candidatus Eisenbacteria bacterium
MSSDRIRLGLIGLPKLVSISDLSDAIRLSKGLLFRCAKYPNKQYYTYTIPKKTGGTRVISQPSAELKAVQGWILRTILDRLSVSPACKGFVPGASTRDNATPHIGAKAIMCLDIQDFFPNVKASHVYSLYRTIGYSTQVASILTSLCTFHGGLPQGAPTSPALANLTCVRFDARILGYVGKRGIVYTRYADDLTFSAYSYSSLPRALPMITKIIESEGFLVNRQKTRIRGPARRHTVTGLVVTQNNVGVGRKTYRELRAKLHRLATMPIKAVKRKEIAKVKGSMAYLNSVDKVRRDRLDDYLIHLKMNYPKSILTKM

SEQ ID NO: 2834 - protein, 323 aa, unidentified
  source 1..323: note = Related to QQUH01000007.1; note = Chloroflexi bacterium
MSSDKYRLSLFDLPKIDSLEDLSYLSRLSKGQLYRFAKYSDWFYKSYRIPKKSGGERIIYQPSFKLKAIQAWILRNILERLSISSASKGFSIGSSIKDNVKPHVGANAILAIDIENFYPSIPANRVWFVYRTAGYSPQIAAVLTSLTTYNSFLPQGAPSSPRLSNLVCWSLDKRMLAFVGKREITYTRYGDDLSFSASSYQVLSKSFHTIKSIVRNEGFSLNESKTRFMGPAKQRRVTGLILYENQFGIGRKQYRILRSKIHKMCFIPSDEIDSFLLNHIAGWLSYVKDVDTNRYNKLAKYILDLKKKFNSSAVSLLNVEISA

SEQ ID NO: 2835 - protein, 334 aa, Bacillus sp.
  source 1..334: note = Related to WBOQ01000050.1
MDNNNNIASYFLGIPTINNQKDLANHLNLSEYTLHKVIKCTDKYYKEIRIPKKNGGTRRLACPSKKLKAVQAWILRNILDHLSVNPSATAFKKRTNITSNIERHTDNQFFLCLDIDNFFESIPQKNINNFFKALGYNKHVSFILAKICTYKGFLPQGGVTSPALSNLINIKLDKRISGYCSKRNIVYSRYADDFTFSSNNPNKLIQSIKILKKIINEENYQLNNNKTRIIRPGNAKKITGLLITDEGKISIGRKQRKTLRATIYNSLNNDNLTIQEKIDIENHINGWLSFLKGIDYNSYQQLLKWKEEFEKKAQTNKIAKQLEKEEFEEMLRSF

SEQ ID NO: 2836 - protein, 329 aa, Bacillus sp.
  source 1..329: note = Related to JAIUXW010000030.1; note = Bacillus toyonensis
MDNNNNIASYFLGIPTINNQKDLANHLNLSEYTLYKIINYSDKYYKEINIPKKNEGIRKLACPSKNLKAIQAWILRNILDPLSTNPSATAFKKETNITSNVERHLDNQFFLCLDINNFFGSIPQKNINNFFKTLGYNKHVSLMLTKICTYKGFLPQGGVTSPALSNLINIKLDKRISGYCSKRNIVYSRYADDFTFSSNNPNKLIQSIKTIQKIINDENYELNNKKTRIIRPGNSKKITGLIITDNKKISIGRKQKRILRATMYTLYNNDALTQKEKIEMENHINGWIAYLKGIDYNSHKQLLKWKKKFSHERDQKVMKELLKQFQMEL

SEQ ID NO: 2837 - protein, 351 aa, Bacillus sp.
  source 1..351: note = Related to NTXH01000057.1; note = Bacillus cereus
MVSMFIDPLKNHKKRLNMDNNNNIASYFLGIPTINNQKDLANHLNLSEYSLYKVINFTDWYYKKVQIPKKDGTFRNLACPSQTLKAIQAWILRNILDPLSVSASATAFKKETTIKFNVERHSDNQFFLCLDISNFFESIPQKKVISFFKALGYNKHIALILSTLCTYEGSLPQGGVTSPALSNLINTKLDKRISGYCSKKNIVYSRYADDFTFSSNNPNKLIQARNIIKEIINDEGYQINKKKTRFIRPGNSKKITGLVISDDNKIGIGRKQKKILRAKIHQYFLKDQLTPQDKEELKNHIEGWISYLKGIDYNSFKQVQKWQREFSLKAKKEKRKKAAEKKEFQELLRSF

SEQ ID NO: 2838 - protein, 319 aa, unidentified
  source 1..319: note = Related to NZ_NPBP01000019.1; note = Terribacillus saccharophilus
MNIAAYTLGIPKIDSLLDLSNAINLSEYTLQRILNSVDDQYYLIKIPKKDNSFREVYSPSPALKAIQKWILENILQPIAVDPSATAFQKGVTIRNNVELHIDNQFLLCMDIKDFFPSIKKNRVYQLFRSVGYDEHISLVFSRFCTYKEFLPQGAVTSPSISNIISIKLDRRLNGYCSLRNIVYSRYADDFTFSSNNTDKLRKSINILKAIIEDEGYTLNTSKTRLLIPGNKRKVTGLIISDSKSISIGRKQRRILRAKIHHSIFKMEKNTDSWRLFNKHINGWLSFLKGIDYESYISLLKYRENLKQKKKEQEDIISVF

SEQ ID NO: 2839 - protein, 323 aa, unidentified
  source 1..323: note = Related to JIBW01000002.1; note = Bacillaceae bacterium JMAK1
MNIAAYSLGIPKIENLKDFSNEINLSEYTLQRVLSSVNKQYNVGKIPKKDQSFRTIFIPSNALRAIQTWILRNILDLISIHPSAMAFRKNTTIKNNVEVHIDNQFYLCMDVQDYFPSVGKNKVYQLFHSIGFNKQMALIFSNFCTYENFLPQGAVTSPSISNLVNIKLDRRINGFCSIRNIVYTRYADDFVFSSNNSDKLKKSISTLKTIIEDEGYKLNDSKTRLLSPGNKRKITGLIVSDKNKISIGREKRRKLRARIHHSIFKLEEDKNLASWYEMHINGWLSFLKDVDQISYQHLVDYKMKLEDKKKKQDELMDELTSVF

SEQ ID NO: 2840 - protein, 312 aa, Bacillus sp.
  source 1..312: note = Related to NVKL01000039.1; note = Bacillus cereus
MNITAYSLGLPRVDNIEELSYKINLSEHTLHKVLKTVDLQYKTIHIPKKSGFTRTVHSPSMVLKAIQAWILRNILDPILVDPAATAFVKNTNIKDNVKRHNGNRFFLCMDIEDFFHSIGQNKVYQFFKGLGYNSHMSLVFSKFCTYDDYLPQGAVTSPSLSNLINIKLDRRIFGYCSSKNIVYSRYADDFTFSCNNPHKLIKAKYMLEKIIEDEGYELNENKTRILRPGNARKITGLIVAEDGKIGIGRKKKRLIRANIYNLYNKDLPDDEYKKLENHIQGWFNYLYSVDQVAYHQLKNYQSEVKLNSIFAF

SEQ ID NO: 2841 - protein, 324 aa, Bacillus sp.
  source 1..324: note = Related to PYWO01000004.1; note = Bacillus subtilis
MNIATYSLGIPKIENIEELSHKINLSEYTLHKILKSTDQHYKIIKIPKKNGEFRELSCPSFILKGIQKWILKNILTPNSIDPSATAFIKTKGIKNNVNRHQGNQFFLCLDIDDFFPSIQQNKVYNLFKSIGYNPHISLVLSSLCTYRGVLPQGGVTSPTISNLVNIKLDRRISGYCSSRNIVYSRYADDFTFSSNNPHKLTKSIATIKSIIQDEGYKLNNKKTRFLKPGNKRKITGLVLSDETGEFGIGRKQKRILRAKIHTLVFKLNENDKSWKALNEHINGWLSYLKGIDFEAYSQLSTYKEDLKDKKATLSAKQRELFDLF

SEQ ID NO: 2842 - protein, 333 aa, Bacillus sp.
  source 1..333: note = Related to NZ_MJEH01000025.1; note = Bacillus solimangrovi
MSNIASRFLNLPTINNLKDLSLLMNLSEHFLNQLSRNVDYQYKEVKIKKKDGSKRLLACPTQRLKAVQAWILRNILEKLSCDSSATAYIKGYNLKNNAQMHTGSSFFLCLDIKDFFGTIPQKHVYQLFRALGYNEHVSIILSNFCCYKGVLPQGGVTSPILSNLINIRLDRRIQGYVSKRNITYTRYADDITLSANNPDKLIKVKGFVEKIIKNEGYILNENKARFLRPGNLVKITGLVISTDGSISIGRKKKRLLRAKIHKLYFDTNLSKLEKDKLSLHINGWFSFLRSIDPDGLNQLKLYTKKLKQKKIKQKKYKISQKMNKQKEHQLSIF

SEQ ID NO: 2843 - protein, 317 aa, unidentified
  source 1..317: note = Related to NZ_JAGXBY010000001.1; note = Ornithinibacillus sp.
MSNLFGIPNIEGINDFSNKTNISSYTLFKMSSKPDLNYKKVLIPKNLGRGTRVLACPSYKLKAIQAWILRNILDNIQSHRNATAYNGKSLDVNLKGHVGNKFLICIDIVNFFPSTKRERVYDLFKSLGYNEQSAIMLTKFCTFEGGLPQGGVTSPALSNLINKDLDDEISKYCNAKSIAYTRYADDITISSNNKNKLDEALKYIEKVIQGHGYQINRDKTRHLHPGKQRKITGLVYSNDQKVGIGRRKRRILRSKIYNYENKEKFSSESTMIYNQIIGWLSFLKSVDSESYKYLKTYWKTLRNNDLETEVAATKQDK

SEQ ID NO: 2844 - protein, 370 aa, unidentified
  source 1..370: note = Related to VGFC01000313.1; note = Armatimonadetes bacterium
MAVRRPGRKQTLTAVSRRQVAPRAALASLLVFVMCFWARAGPPPKPGGARVASDSYRLRVFGLPVIESVAELAAATHLSPALLYHLCQFPDRFYRRFSIPKKSGAGARQIRCPARPLKALQAWLLRAILDSVKVHPAATAFRKGHGLRSNVTPHRENRYFLCLDIEDFFPSIGYAKVWTVFRTLGYNAHMSHVFASICTCDGVLPQGGVTSPALSNIVCFRMDARLAGYCGKHNVAYTRYADDMTLSATSPRVLVAARRMCTRITRDEGFALNERKTRVMGPRQCRHVTGLVVSDRGTVGVGRRRERVLRAAIARGATRDTGLTDAEGRRLRHRIRGWLDYLQDVDRPRADRLKRYRTALLERWQVSDQA

SEQ ID NO: 2845 - protein, 316 aa, unidentified
  source 1..316: note = Related to QBUM01000164.1; note = ANME-1 cluster archaeon GoMg2
MSGNRYRLRMAGLPLMEDLKDLADYVHLSAGLLYRLSKYNDKFYKSFQLPKKSGGFRIISCPSKDMKAVQAWILRNILDQIHVADSATGFRTGKNILDNAKYHEGNRYFLCLDIENFFPSIQYAKVYTVFKTIGYNTHISHIFASLCTCRGKLPQGGVTSPALSNIICIRLDHRISGYVGKRNVAYTRYADDMTFSSLSPGRLVGIKRVALKIIRDEGFELNERKTRFLGPCRQRKVTGLIISDDSLGVGKKRKRILRATIHRLVTADLSEIERQKLRNHIDGWFAYMNSVDPKGFEQLKTYEERLSLACSGEDTI

SEQ ID NO: 2846 - protein, 336 aa, unidentified
  source 1..336: note = Related to MGVG01000053.1; note = Elusimicrobia bacterium RIFOXYA2_FULL_53_38
MTDKSKKSYLLQLFSLPILNNLEDLSVCTHFSKKILYRLSKFNSKHYARFSIPKKSGGNREILCPSLEMKAIQVWILRSILEKIQVSKAATAFRPKTSIAQNVDQHLGNQYVYCLDLENFFPSISYSKVYTIFNTIGYIPHVAHILASLCTCDGKLPQGAVTSPALSNIICLRLDNRLNAYVGAKNISYTRYADDICFSALSDSRLWGIRNTVKRIIESEKFVINKQKTRMQGPTGCRKITGLVFNKDSYGVGRKKKRVLRAKIFNYISTFTSMSPDVQLKTAQHIHGWISFLNSVDSQGCQQLTKFSKIVFNQAVVAKKIDPAKIPAPFLKVLSR

SEQ ID NO: 2847 - protein, 318 aa, unidentified
  source 1..318: note = Related to MZGT01000125.1; note = Clostridium chromiireducens
MLDTTDILRIPRIKDLKDLAFQTKLSIGLLYKMVNIPDKFYIQIEIDKKNGRKRKIECPSKKMKAIQAWILRNVLDKIDVNPSAKAFRRRMNLSSNVKPHDNNNYFLCLDFKDFFCSINFGSIYNIFSVLGYDDSMCFILTRLCSYNGRLPQGGVTSPTLSNIACIKLDERLSNYLGIRDIVYTRYADDITLSAKQPDKLLKALPTVKQIIEEEGYTLNNDKTRILGPKLQRKITGLIYDGSKFGIGREKKRTLRSAIYNYVYGRDEEDERERKFQWINGWMNYLKSVDKNSYNILKNYWIQLSCKAEVAVTNENTFD

SEQ ID NO: 2848 - protein, 318 aa, unidentified
  source 1..318: note = Related to JAIPIQ010000092.1; note = Candidatus Marinimicrobia bacterium
MSEVKHRLRLLDLPFFETIEDLAALIRVDAGRLRLLSSHPEKFYRTYRISKRSGGWRKICSPSKELKAIQAWILRNVLDKLSPSQYATAYVSGKRLLDNVSPHANNRYFISMDIRNFFPSVTSFRVRAIFEALGYSMLAGSTLARLCCYFHGLPQGGVTSPALSNLVCLRLDRRLAGLAARRNIVFTRYADDITFSSNNRNALCRMLPITYKILISERFQPNEDKLRVMGPRVRCSITGLVKDASVGRFGIGRHKKCAMRAVMHNLLARHEASPDYTDEASIVGWLSFLQSVDGESYRQMTRYWKQQKDKWLCSVRPV

SEQ ID NO: 2849 - protein, 313 aa, unidentified
  source 1..313: note = Related to RPRI01000079.1; note = Desulfobacteraceae bacterium
MNNIVHRMQLIGLPFFDTVEELAALIRIEPGRLKLLSIHPERFYRTYHIRKKSGGWRKISSPSKELKAIQAWILRNILDKLSPSPFATAYLKGKKLIDNVSPHASNRYFLSVDIKDFFPTVMKDRVCLLFEALGYSNRAALALTRLCSYFSGLPQGGVTSPALSNLVCLRLDRRLAGLSSRRNIVFTRYADDMTFSTNNRNALCRLLPLVCEILRSEWFEPNENKHRFLGPRVQCRITGLVKNASEARFGIGKAKKIRMRAIIHNLLAENRPHPDYPTELSIIGWLSYLKSVDPDSHRQMMQYWEKQKSKYKH

SEQ ID NO: 2850 - protein, 316 aa, unidentified
  source 1..316: note = Related to JACQVI010000042.1; note = Ignavibacteriae bacterium
MLENIQRLRLLGLPVFDNIENLAALIRVDSKRLTILVLQSERFYRTYRIPKRSSGWRKISSPSKEIKAIQAWILRNILDKLSPSAYATGYILRKRLVDNVNPHASNRFFLSVDIRDFFPMIGSWRIRRLFEVLGYSEMAAVTLTRLCTYFGGLPQGGVTSPALSNLVCLKVDRRLGGLASHRNMVFTRYADDITFSTNNRNALCRVLTLVFEIIRNEGFEPNLEKVRLLGPRTQCRITGLVKNSSEARFGIGKKKKIRMRAVMHNLLVKGRHDSTYPDGASIEGWLSFLKGVDPGSHEQMTRYWNTLKAKYGSKTR

SEQ ID NO: 2851 - protein, 314 aa, unidentified
  source 1..314: note = Related to JAGGWH010000150.1; note = Bacteroidales bacterium
MKSNSELLRLLNLPVFSDEEELASLMHITPERIKMLSKFPHRYYKKYKIPKSNGKLREIRQPRKDLKAIQAWILRNILDKLSPTTFATAYIKNRNISDNVTPHSNNRHFVLLDLEDFFSSISIRRAAKVFLLIGYSKKAASILARLCTCDGSLPQGAVTSPSLSNLIAAKLDRRIAGYTSRRNIIYTRYADDITLSSNNPATLSLSLPRIIKIIKSEHLKPNMDKLRVLGPRKRCSITGLVKNNSEPEFGIGKKKKKQMRAVIHHFLFNLSKDDKYTNKASIIGWLNYLKSVDKESFEQMNNYWNQLIKKSNSV

SEQ ID NO: 2852 - protein, 324 aa, unidentified
  source 1..324: note = Related to JAHJUE010000035.1; note = Bacteroidetes bacterium
MSSPRVWTSLPNIIMSTTELLRLRDLPVFDNIEEFASLCHISKIDISAIQYNAYPFYRRYPMLKKNGKIRIVYQPNPTVKAIQCWILRHILDKVNPSEYSTAFRKNKSTLDNVSPHKHNRFFFRTDIVDFFPTINRSRVFFLFKNIGYDTKQAILLARLCTCSNLLPQGAVTSPSISNLVVNKMDRRLAGYANKKNIVYTRYADDLTFSSNNRSVLNNSIRLIKRIIEEEEFIVNLEKTNFIGPSKSCKITGLIKNTSEPSFGIGKKKKNRMRCVMYYHIVKKITIDPNYSSDNSIIGWLSFLNSVDKASFKYMNNYWLSLKAL

SEQ ID NO: 2853 - protein, 325 aa, unidentified
  source 1..325: note = Related to JAGROQ010000226.1; note = Proposed Cephaloticoccus sp.
MRSNRTVLRLFDLPPFSSLNEFCALAHFNTARVRVIATESKRFYKRYNIPKRSGGEREILQPTAEVKAIQAWILRNILDKLKASNSATAFTRGVSLMLNVQPHASNRYYLCMDIENFFPSVSSFQVQQVFSAIGYSPNVSYWMTKICTVGGRLPQGGVTSPSLSNLVCLKLDRRLSGYAASKGLVFTRYADDMTFSSNNPKLLRNSVATVRRIVQAEGFIINTKKTHLAGPNLRCVVTGLVKNASMPAFGIGRKRYRMVRAEIHNFVMRGGAKRYNSKESISGMISFIEGINRAQGESLRKYWYGLEQCSRAQVIIDPETDRPTQ

SEQ ID NO: 2854 - protein, 310 aa, unidentified
  source 1..310: note = Related to JH603153.1; note = Klebsiella michiganensis
MAKYSQSLYTQRLLSLPILQSIEDLSVKTRLPSPLLSQYLNDNSRYYCHISVPKKNGGYRPIDSPNRQLKAIQRWILRHILEKLQPSVYATGFVPGIALKRNAIPHTGNQYILKLDLKDFFPSIKASYVYSVFRAAGYSKQIAYSLTSICTLNGYLPQGAPTSPCLSNLVCLRLDQRIGKYCDRHALTFTRYADDISISGNKLSIVKKAWVVIKLILSEEGYVINKKKEMLSGPRSKREITGLVVTPKLGIGQRKYNMYRNKIFHLCHKNDNESILIIQGILAYIKGVDHDRYSKLKRYYDALKTKEVTE

SEQ ID NO: 2855 - protein, 303 aa, Enterobacter sp.
  source 1..303: note = Related to CP017087.1
MAKHSQSLYTQRLLSLPILQSIEDLSVKTRLPHALLSQYLTDNSRYYCHIKVPKKTSGYRSIDSPNRQLKALQRWILRNILEKLQSSPYATGFISGISLKQNVQPHSGNQYILKLDIKDFFPSIKASYVYSIFRAAGYSKKIAFHLTSICTLNGYLPQGAPSSPCLSNLVSLRMDQRIGKYCDRHALTYTRYADDISISGNKLSVIKKAWTVVKLIICEEGYSINKKKEMLSGPRSRREITGIIATPKLGIGQNSYNSYRNKIFHLSKKGDPNSKEIILGILAFIKSVDLERHDKLLRYYKKL

SEQ ID NO: 2856 - protein, 305 aa, unidentified
  source 1..305: note = Related to NZ_CP066552.1; note = Pectobacterium carotovorum
MVNHSQSLYTQRLLSLPILQSLEDLSVTMRLPVSLISQYVNNNTRYYYNIPLAKKNGGLRSIDSPNRQLKAIQRWILRNILENLSPSGYAKGFVPKLSLLDNALPHGGNQYVLKIDLKDFFPSIKATHVYSVFRAVGYSKNISYYLTSFCTLNGYLPQGSPCSPYLSNLVCLRLDQRVGKYSDKNALIYTRYADDITISGNKLSTIKRAWKVIRMIIEDEGFVINKNKEMLSGPRSKREVTGLITHPVVGLGTKKYNFYRNKIFHLTKKNSCESHEVINGILAFVASVDSKKYEKLKLYYDGLNI

SEQ ID NO: 2857 - protein, 312 aa, unidentified
  source 1..312: note = Related to JADTQF010000001.1; note = Serratia marcescens
MANRYQGLFTQRLLSLPILQSIDDLAIRTRLPVSLISKYLRNNTRYYRHLVLKKKTGGLRPIDNPNVELKALQRWILKNLLINLSPSIYAKGFIKGISITENAAPHSGNQYILSIDLKDFFSTVKASHVFTVFKSVGYSKKISYALTSICTLNGVLPQGAPTSPALSNLVCLRLDQRIGKYCDNKALTYTRYADDITISGNKLAVIRKAWRIVRLIIESEGYFINKNKEILSGPQSQRKVTGLIVTPKVGIGREEYNHYRKEIFILVKKDDEYSTYKIQGILSFIKSVDIERYKKIKEYYESIVKKPTKKSE

SEQ ID NO: 2858 - protein, 306 aa, unidentified
  source 1..306: note = Related to NZ_PEHC01000003.1; note = Serratia marcescens
MASRYQGLFTQRLLSLPILQSVNDLAIRTRLPVNLVSKYLRDNHRYYTRLPLKKKTGGFRPIDSPNTELKALQRWVLRNLLANLSPSIYAKGFIKKSSITDNAAPHAGNQYILSIDLKDFFTTVKASYVFTVFKSVGYSKKISYALTSLCTVNGALPQGAPTSPTLSNLVCLRLDQRIGKYCENKALTYTRYADDITISGNKLTVIRKAWGIIKLIIKDEGYTINKKKELLSGPQSQRKVTGLIVTPRIGIGRDKYNYYRGEIFKLVKKGDTYSIDRLNGILSFIKNVDKDKYNKLNEYYKKITTS

SEQ ID NO: 2859 - protein, 308 aa, unidentified
  source 1..308: note = Related to JACHAQ010000011.1; note = Pectobacterium brasiliense
MPNQYQGLYTQRLLSLPILQTLDDLATKTRLPKTLLVKYIHDNERYYNSSYIKKKSKDLRTISNPNRELKAIQRWILRNVLSSLSPSPYANGFIPKKSIIDNARPHRGNQYILSIDLKNFFTTVKASYVFTVFKSVGYASKMAYYLTSICTLNGVLPQGAPTSPMLSNLVCLRMDERIGKYCENKALTYSRYADDITISGNKLAVIKKAWIIIRKIISEENFTVNKKKEMLSGPQSQRKVTGVIVTPEIGIGREKYNYFRKRIFILVKKNGDNMSNVVNGILAHVKSIDLGKYKKLNDYYEQLINKTI

SEQ ID NO: 2860 - protein, 310 aa, unidentified
  source 1..310: note = Related to CTIP01000008.1; note = Yersinia enterocolitica
MMKNQGIYTQRLLSLPSLNDLNDLSIHTRLSHDLISKYVSNNKRYYHHFNMTKRSGGVRPIENPDEELKAIQRWILRNILDKLFPSIYAKGFVKKMSILNNAKPHLDHQYILNIDLKDFFSHVKASHVFTVFNALGYSKMMSYYLTSICTLNGYLPQGAPTSPSLSNFVCLRLDHRIGKYCENKALSYTRYADDICISGNKLTVIKDAWHMLRVIIESEGFIINSKKEKLSGPKSRREVTGLIVNPSLGIGRSKYNYYRKKIFILLMANDPKREQIISGILSYVKSVDAKRHIYLCKYYDSIKLKASTSI

SEQ ID NO: 2861 - protein, 315 aa, Vibrio sp.
  source 1..315: note = Related to CP053744.1; note = Vibrio cholerae
MTYISNKQKTNNSGLYTQRMLALPELQSLNDFAAKIRVTPELLTKYTGNNKHHYAVHQEEKKTPGQYREISSPTSELKALQRWILRNILDKLSPSPYAKGFIKKKCLFDNAKPHEGKQYVLNLDLKDFFSSVSSKNVCTLFKSLGYPPLLSYQMTNICTLNGCLPQGAPTSPALSNLVTIRMDYRIGKYCEKYALTYTRYADDMTISGNKLSIVKKARIMINKIIREEGFYIHPKKNKLSGPSVRREVTGLVVNESLGIGREKYNFYRTKMFKLHKEQHPNFESVSSGIIAFVRSVDIVRAQKLHAYFEKLRIKN

SEQ ID NO: 2862 - protein, 309 aa, unidentified
  source 1..309: note = Related to NZ_ML762925.1; note = Dickeya oryzae
MNTHQGKYTQQLLSLPILENVDDLSQSLRLPKEVISKFSLNNDKYYHRIEMKKKTGGIRHIESPLRELKAIQRWILRYILDKLAPSIYAKGFVRKKSIIDNAKPHEGNQYVLNLDLQDFFTNVPASHVYTLFRNIGYNNNIAFILTSFCTKSGYLPQGAPTSPALSNLVCLRLDHRVSTYCKKRALTYTRYADDLCISGNKILILQKASYLIKMIIADEGFTVNTKKEKFLGPKVRREVTGLTVTPRITISKKNYCVYRKRIYDLVRNEVQNKNEIIRGILSFVQSIDKEKGKKLSTFYQKQISLITDI

SEQ ID NO: 2863 - protein, 307 aa, Escherichia coli
  source 1..307: note = Related to JNMO01000114.1
MNTHQGKYTQQLLSLPILENMDDLAQFIRLPKEVISKFSFNNHRYYHRIEMEKKSGGIRYIESPVKELKAIQRWVLRYILDKLSPSVYAKGFVRKKSILDNAKPHEGNQYILNLDFKDFFNNVQASHVYTLFKNIGYNNNISYILTSFCTKEGYLPQGAPTSPALSNLVCLRLDHRLSTYCNKRALIYTRYADDLCISGNKILILQKSSYLIKEIIRDEGFTINTKKEKFLGPKVRREVTGLTVTPKITISKKDYCVYRKRIYDLVRNEVPNKHEIIKGILSFVRSIDKDKEKKLTAFYNKQTSIIR

SEQ ID NO: 2864 - protein, 312 aa, unidentified
  source 1..312: note = Related to nan
MNNHQGKYTQQLLSLPIIENMDDISLSSRLPVEVIAKFSFKNDRYYHRIEMKKKAGGVRLIESPIRELKAIQRWILRNILDKLSPSIYAKGFIKNRSILDNAKPHEGNQYILNLDLKDFFTNVKASHVYTLFKNIGYNNTVAFALTSFCTKGGYLPQGAPTSPAISNLVCLRLDHRISTYCKKRALTYTRYADDLCISGNKLLTIEKASYLIKEILGDEGFSINEKKEKLLGPKVRREVTGLTVTPKITISKKIYCLYRKRIYDLVRNKIPNKHEIILGIISFVQSIDKGKGKKLTAFYEKQKSLILPSLIV

SEQ ID NO: 2865 - protein, 313 aa, unidentified
  source 1..313: note = Related to WLUC01000011.1; note = Providencia alcalifaciens
MNAYQGKYTQQLLSLPIIESVEDLSYLMRLPKETIIKFSTKNDKYYHKIEMVKKNGGIRLIESPIKELKAIQRWILRNILDKLSPSVYAKGFIKNKSILDNAKPHEGNQYILNLDLKDFFNNIKASYVYTTFKSIGYQSNIAFILTSFCTKGGYLPQGAPTSPALSNFVCLRLDYRISTYCKKRALSYTRYADDLCISGNKIHTLQKSSYLIKEILLDEGFIINIKKEKFLGPKVRREVTGLTVTPKITINKKNYNIYRKRIYDLVRNTVPNNVDIINGIISFVKSIDNDKANKLNNFYKKQLDEIKNSTIKV

SEQ ID NO: 2866 - protein, 315 aa, unidentified
  source 1..315: note = Related to JAJAXF010000024.1; note = Laribacter hongkongensis
MVYSSKNSTSSTYRARMTGLPEIRSVKELSHLLRIPESTLHSFSKKNHTIGYVEFCIPKKPNGFRVIHAPVRTLKYIQAWILQNILYHFKSHKSATGFEKGCSILENAKPHAGQSYAINVDIKDFFNSISSDKVFNLFSTIGYEREIAWILTNLVTFKGHLPQGSPCSPKIANLICHRLDARIYGFCKTKNMQYSRYADDITISTSHRKNISQTLRFINNVIEYENFSLRNEKTNVFGRGNAKIITGLVVSNEIRVGREKYREIRAKMYKAIKEDDKYEKEYLDGYLNFLKGVDAKTHQLLITYQEKITKKLKSI

SEQ ID NO: 2867 - protein, 378 aa, Bacillus sp.
  source 1..378: note = Related to CP035974.1; note = Bacillus mycoides
MKELGLFCSIKSYNCSFLGTIEIVPFLFRRIFTNMNSDALYNLSQQMDTKYPIITDVLRNKKHHYNQLDAKKRNGKIRKLYSPSKILKYYQKWIATEILSKTMIHECCTAYQKGISLNENLIPHQKHMYFLCVDIEDFFQSINFKRILHLFKKLTNDTQMAYSLSELCTLHKTLPQGAVTSPVLSNAVNYRLDKRIHGYAKKHGLVYTRYADDITISGNDMGAIKSAYYTVKCIIESEGYKFNKEKTRILKPGVKRKVTGLLINEEQEIRIGREKYRELRSMIYTYKNSRAITGVEKEHLFLRIKGWISYLKHVDFKTCKMLLEYINKIYVNDEKNPFSFLDKRSDEMGYIIPQLQQLESNMNFLTSENTHVNLVIKN

SEQ ID NO: 2868 - protein, 344 aa, Bacillus sp.
  source 1..344: note = Related to CP036026.1; note = Bacillus mycoides
MNSDALYNLSQQMDTKYPIITDVLRNKKHHYNQLDAKKRNGKIRKLYSPSKILKYYQKWIATEILSKTMIHECCTAYQKGISLNENLIPHQKHMYFLCVDIEDFFQSINFKRILHLFKKLTNDTQMAYSLSELCTLHKTLPQGAVTSPVLSNAVNYRLDKRIHGYAKKHGLVYTRYADDITISGNDMGAIKSAYYTVKCIIESEGYKFNKEKTRILKPGVKRKVTGLLINEEQEIRIGREKYRELRSMIYTYKNSRAITGVEKEHLFLRIKGWISYLKHVDFKTCKMLLEYINKIYVNDEKNPFSFLDKRSDEMGYIIPQLQQLESNMNFLTSENTHVNLVIKN

SEQ ID NO: 2869 - protein, 313 aa, unidentified
  source 1..313: note = Related to NZ_JABWTK010000005.1; note = Planococcus chinensis
MGELVFTKVTKDLKTKYPILKDVINFKEKHYQTISIRMKNGKLRTIHNPSKALRYYQRAIVEKFLNEVPIHICCTSYQKGKSLKANVLPHANNMYFLHVDIANFFDHIKFSQVHKLFTDLIEDKYEAKFYAELCTLKGTLPQGAITSPSISNAVNFRMDSRIFGYSKKHNIVYTRYADDITLSSNDFASIQRSLYVVKQILQDEGYQLNTRKVRITKPGIQRKVTGLLINEDQEVRVGRKKYRELRSMIYNYKNNTSVTRKENRALFRKIVGWLSYLNVVDEKTYSLMVMYIKKLYGNTKNPFETMLISKEKI

SEQ ID NO: 2870 - protein, 685 aa, unidentified
  source 1..685: note = Related to JAGGZR010000020.1; note = Candidatus Bathyarchaeota archaeon
MGKHNKGKVIKKYYNPLTPLEVFFNELNSFLRVYGLKFSYEDYCNFIKNKNEYYTTFTIKKKNGGLRRIDSPNRLLKHIHRYILFKHLYNFKAHPSATGFIRGRSIFDNANYHVNKNHVYKLDLVDFFPSITKDMVFNVFISKGYNSEISTVMSELCTLNNVLPQGAPTSPAISNLVCYRLDTRLSSLAKKCKLSYTRYADDITFSGWYIKKGVTKLIEKIITDEGFKVSKEKTKLIKNKKNFRQVVTGVVVNKKLSMGEKRYLMLRAMIHNCKVKGIYQVQMETKEKHGKGYFARRDLYSAKVDMFNYLLGIVELFRQMKDYKRYLTMLRDLYYLDWVRYYVEAGELNANELGIMRKKIIERRIKKFVRSELKDIKSRSDSLNNKLKRYNSRLERLKEYIRQNTYSEKERLIDEFLRLQERIDTLTQETNNMSRFLSFVSDFISKNWGRSLMKLLNSVTEEVEETMSTKYTVQNNFIKLGNEFLEKNINVNLSVNYNNINVEGSLSKHISPDKPFSNISYFWGLIRSNRGYIKWLDKYFNKSGFRLLTDEIGDDPKYKSISILMSIYPFVGGENKESAIRKVERFIDIFKRFKEEMRNKGISVELRILDKDSSAEIHDRVIIFEENAYTVPSIDTLMRGQHSYIFPINPIDFPFDEYWNRSFDILSDRNKINELIDKYVNNKKK

SEQ ID NO: 2871 - protein, 592 aa, unidentified
  source 1..592: note = Related to JACJVW010000001.1; note = Candidatus Woesearchaeota archaeon
MVKKFINRNSESKFLDDLRRHIDFELTQEDLDIFFQDKYNKKNKLHYSSYSISKHSGKKRRINAPSRELKKVQEYILYKHLYYFPVHKNTYGFIKNKSYVDNAKQHIRKPHVFKTDVEDFFPNIRHERIFSFLVNGFSSKDYDSVFDSNPQLEIRKQRRGYSEKIATLITELVTLDGSLPQGAPTSPALSNLICFPLDYRLSRFAKKGRLTYTRYADDITFSGKYIRKDFISKIKTIIVDECFKINEDKSKFISRKRARIEVTGLVVNTKLSYGRERYRKIKAMLDQCKKNGISSLNKDNNDETGIKNHIDFYQHIIGKIDIFNQIKHYKKHMVLLKILFQINWADYYTKQEDLLESYNKHNHSSFTSTELGEIRKKSIEKLTHKAVLKQEREDKKRDTRRAAYYAKKNKSILEDIKTKLSQQDQLISVYSETLSKEYEDKYNLIEKIQADRLKIQELEKNLEDANKKAKQAEKFNTDLTKILDRVDKNSKTLERLEKQGQKTQDIVTSIDKKIDSIADRLGKNMVSLFDAIKESKEAITKEIKANHISLEKGIEEIHKATQMLVEIQKDKDPDLWERCREKVQKRLSWWKV

SEQ ID NO: 2872 - protein, 541 aa, unidentified
  source 1..541: note = Related to NZ_CP009524.1; note = Methanosarcina sp.
MEQLSPICGRVKVLNEADYNNEFQYFKQLKSKKLPYIYDIDHFCKLIHLSSNQVKFFLSHKEKAYVTFRVPKKNGDFREINAPSKKMKYIQRWILDEILYKLNPGEYAHGFIPGKTVYTNAESHVNKDLVLGIDIKDFFPSIKFVSVYNVFKSAGYTEKVARQLADLCTYHWKLPQGAPTSPMLANLVALDLDKKISQYCKRANFGYSRYADDITISGSYDLAIHKETIVRIINGAGFEVNNQKVRMVSKGSRQKVTGLVVNHKVSIGRTKKKTIRAIVHNILMNGPVLENRCNDPFFRERIFGHLGCASAIDPEFALPLIDSLKKIDWSEYCEHIKEVKESEINKNRIKRINKVLIVKFDELGFFRKIGEVPRDAFTEEFKIKLGTLQEMCSKEIHGVVACSNCLNVKNEIYKSCMKYILGQYTGTTGGHHHGHEIYDMKAVTDYNGENIVVAFLMKSGTNSPTKENSVFTQAFDCAGYNENIDLISLVSNHNLSNKLCERLEIMIRDKNRGKEKEQLYCLIMKSEMERILYDFNKNKDC

SEQ ID NO: 2873 - protein, 560 aa, unidentified
  source 1..560: note = Related to NZ_CP009515.1; note = Methanosarcina lacustris
MTEKLTKNERLKVLFDDRIEEGVVPKLSEEDYNKEFKYFTQLKSKKLPYIYDIDHFCKLTNSSSKQVKFFLSNKEKAYATFKVPKKSGDFREINAPSKKMKIIQRWILDKILYKLNPGNYAHGFIPGKTIYTNAKAHVNKDLVLGIDIKDFFPSIKFVAVYDVFKFAGYTARVARQLAELCTYHWKLPQGAPTSPMLANLVALNLDKKISQYCIRENFEYSRYADDITISGSYNLAMHKEIIIKIINENGFEVNYKKVRMVSKGSRQKVTGLVVNDKVGMGRTKKKTLRAIVHNILMNGPVFENRDNDPFFRERIFGYLGCANAIDPEFTSPLIDSLKKIDWSEYEECIKEIKESEINVNHIKRINKVLLVKFDELGFFRKIAELPEGAFSEEFKTKLESLQEKCDVKIHGVEACSDCLDVKKVIYNKCMKYVLGHYTGTTGGHHHGHEIYDMKALTDYNGENITVAFLMKSANKPAKENNSNKENSLVVQTLDCTDYNDSINLISIVSNNNLSNKSCERLEKIIKGMSKGKEKEQLYCFIMKKEMKRILYDFYKNYQSS

SEQ ID NO: 2874 - protein, 564 aa, unidentified
  source 1..564: note = Related to DUKH01000154.1; note = Methanosarcinaceae archaeon
MTKRLTKNERLSILFDDCIEEGIVPVLNEAEYKEQFKYFKKLKSKKLPYIYDIEHFCKLSNSSSDQVRFFLSNKEKAYTTFKVPKKSGGFREINAPSKKMKNIQRWILDNILYKLNYGDYAHGFVPGKTIYTNAEVHVNKDLVLGIDIKDFFPSIKFGAVYNIFKSAGYSVRVARQLADLCTYHWKLPQGAPTSPMLANLVALNLDQKISQYCIRRNFGYSRYADDITISGSYKLPMHKEKIIKIINENGFEVNNKKVRMLSKGSRQKVTGLVVNDKVSIGRTKKKTLRAIVHNILMNGPVVENRNEDPFFRERIFGHLGYAKAIDPGFSTPLIESLKEIDWSEYNEHIKEIKENGINTNQLKRVYKTILVKFDELGFFTKIAELPEGAFTEEFKIQLNSLKEKCDAKTHGVEACSDCLDIKDEIYNKCMKYIIGHYTGTTGGHHHGHEIYDMKATTELYDDTIAVAFVMKSGDISNKKERRKGTDSENSAFRQFFKCTCYEDLDLISIVTNFNLNNELCEELKIMMRNNNKAKERDQFYCLIMRNEMKRILYDFNTKKAENLT

SEQ ID NO: 2875 - protein, 550 aa, unidentified
  source 1..550: note = Related to CAJPFJ010000036.1; note = Methanosarcinales archaeon
MEISNNEKLKILFDSYIETAIIPSLNEDEYRKEFKSFKRLKSKKLPYVYDIDHLSNLTNSSSKQVRFFLSNKDIGYTTFRIPKKMGGFREINASSKKLKIIQKWILNNILYKLDSSDYVYGFIPGKTIYSNAQIHVNHDLVLGIDIKDFFPSIKFGSIYHIFKSAGYSNKIAWTFADLCTYHWKLPQGAPTSPMLSNLAGKRLDMRIAKYCNRRHFTYSRYADDITISGSYKLPMHKEKIIKIIEGNGFTVNKKKTRLFSKGSRQKVTGLVVNDKVSIGRKKKKWIRAIVHNILMNGFVAENKENDPFFRERIFGHLGYTNMVDSEFARPLIESLKKIDLSEYNEAIIETRESEIKVNYLKRKSKSILIKFDDLGFFQKIAEFPEGAFNDDFKNQINNLLEKCEKHGVEACSDCLDIKNEIYKKCMKYIIGHYTGTTGGHHHGHEIYDMEAETRLFGKTIAVAFIMKSGTSDSTKENSIFRQVAKSFRFDGIDLIGIVTTSNLKSELLEDLKSLIMNHNNGKKKEQLYCLIMRPEMKRILYDFNKVVTNS

SEQ ID NO: 2876 - protein, 563 aa, unidentified
  source 1..563: note = Related to AE010299.1; note = Methanosarcina acetivorans
MVSVENKLTEDEKLQILFKNYTEEGIIPNLTEEEYEEQFKSFKRLKSKNLPYIYDINHFCKLTNSSLKQVNLFLSNKKKGYITFKLPKKNGDFREINAPSKKMKYIQRWILDNILYKLNSGDYAHGFIPGKTIFTNAKVHVNQDLVLGVDIKDFFPSINFRSVYYVFKSAGYTKKIAWTLADLCTYHWKLPQGAPTSPMLANLVALKLDKKIAKYCARRNFRYSRYADDVTISGSYKLPMHKEKIIGIIEDDGFVVNHEKTRMFSKGSRQKVTGLVVNDKVSIGRNKKKNLKAIVNNIQTNGPVAENRSNDPFFRERIFGHLGCANAVDPEFATPLIESLKKIDWSEYNEHIKEIKESEINTNQLKRVSKTILVKFDELGFFTKIVELPEGAFTEEFKKQLNNLKEKCSTKIHGVEACSDCLDVKNEIYKKCMKYIIGHYTGTTGGHHHGHEIYDMKATTEFYGDTIAVAFVMKSSDISDKNERRKNTDSENSTFRQFFKCTCYEDLDLISIVTNFNLNNELCEELKIMMRNNNKAKEKDQFYCLIMRDEMKRILYDFNKNCG

SEQ ID NO: 2877 - protein, 502 aa, unidentified
  source 1..502: note = Related to JJOZ01000022.1; note = Methanosarcina sp.
MSNKEKAYSTFKIPKKNGGLREINAPSKKMKNIQRWILNNILYKLNAGNLAHGFIPDRSILTNASIHVGQDLVLGIDIKDYFPSISFRSVYYIFKSAGYTKKIAWSLSDLCTYHWKLPQGAPTSPMLANLSTVDLDYEIDNYCTRRNFRYSRYADDITISGSYKLPMHKQKIIEIIERNGFVINEEKTRVLSRGSQQKVTGLVVNDKVSIGRRKKKILRAIVHNIQKNGAETENREKDPFFKEKICGELAFAKMVDPDFANPLIEKLKGFNWLSYDENLKNSRDSELIVRSLEKKHYFHPVDANNIIESESDFLKAIATTITELKHYIEDRRWTEPFWDEAREVEMDGKKYKIPAVPKKESKIQPTIHIFFCRNLLPFGIHVLRETDEGIGKLDFKFLVTIKGNIPVNVCAEFKLAHNEELEHGLTKQLPLYLKASPSKSGLFLVMWFKDEKEEYFKRPTNQNKTQMLKYLEETIKKINECGKFKIESVLIDASKRPSASHS

SEQ ID NO: 2878 - protein, 572 aa, unidentified
  source 1..572: note = Related to NZ_CP009524.1; note = Methanosarcina sp.
MANRLTKNERMKVLFDNYFEEGIISPLRDVEYNDNFKSFKKLKSQKLPYVYDVNHFCFLSNSSSKQVNYLLLKKEKAYVTFNLPKKAGGFREINAPSKSMKHIQRWILDHILYKMSLGDYVHGFVPKRSILTNASIHVSQNLVLGIDIKDFFPSIDFNSVFRIFTSVGYTQKAAHFLAALCTYKSKLPQGAPTSPMLANLAIASLDIIIDKYCRRRNFKYSRYADDITISGSHNLPMHKQKIIEIIEGNGFTVNEEKTRLHSRGSRQKVTGLVVNDKVSIGRSRKKTLRAIVHNILKNGYEIENREKDPFFKEKIFGELAFARMVEPDFANPLIEKLKCANWASYDEQTIDSRESELLMRSLEKKSYHKPVDATQIIESESDFLKAISSTIAELKHYIEDRRWIEPFWDDARVIEINGEKHKIPASPKKETKIQPTLHVFFNRNLLPLGVQVLRETDEGVGKLDFKFLVTLKGNIPLNVCAEFKLAHNEELEHGLTKQLPLYLKASPSKSGIFLVMWFKDDKGKYFSKPISQNKSQMLNMIEEAIKEINNKEEFKIESILIDASKKPSASNN

SEQ ID NO: 2879 - protein, 580 aa, unidentified
  source 1..580: note = Related to NZ_CP009517.1; note = Methanosarcina barkeri
MTRKVAENIKLKILFNDYFEDGIIPTLKGKEYSDNFNSFKVLKSQTLPYIYDVHHFCFLSNFSAKQILFFLKNKEKFYVTFSIPKKSGGFREIDAPSKQMKLIQQWILNKILYKISIGDYVHGFVPKRSILTNASNHINQNLVLGIDIKDFFPSIDIKRVTEIFLCMGYTQKTASFLAELCTYEGKLPQGAPTSPMLANLAVKELDIAIDDYCKKRNFKYSRYADDITISGSQKLAMYKQKIIGIVESNGFAVNEKKTRLHSKSSRQKVTGLVVNDKLSIGRENKKKLRAIVHNILMKGPIAENRNNDPFFRERIFGYLGYANTIAPEFATPLIESIKNIDWSEYYESIKEIKENEMNINHIKKMNKTILIKFNDLGFFRMVVEFPEGVFSEAFRNQLDNLQEKCGEHGIVACSDCLDIKKEIYSKCMKYVIGQYTGTTGGHHHGHEIYDMKSKTDLYGDSITVAFLMKSSAPKKESKTKNKANKTSNRRITAVDDSLFRQFYECTRYENIDVIAIVTNSNLNNELSERLEQLIKKINKADNKEQLYCLIMRNEMKRILYDFNKKTTNETGQYDNAFNNM

SEQ ID NO: 2880 - protein, 560 aa, unidentified
  source 1..560: note = Related to JABKBV010000155.1; note = Methanococcoides sp.
MTNKITENEKFKILFDDYFEEGVVPSLSKEEYNTNFKSFKKLKKMKLPYIYDLEHFCNLSNSSSKQIGFYLSHKDKAYSTFNLRKKTGGLREINAPAKNLKHVQRWILDHILHKIDVGTSAHGFVPGRSIVTNASIHVNQDLVLGIDIKDFFPSISANSVYYVFKRVGYAREVSRLLAEVCTHNWRLPQGAPTSPTLANLVALSLDSDIEKYCSKRNFKYSRYADDITISGSSNLPMHKQKILEIIEKNLFIVNEDKTRMFSQGSKQKVTGLVVNDKVSIGRNRKKKIRAIVHNILKNGPVRENRENHPFFKEKIFGELAFVKMVDPEFANPLIVKLKQLDWEDYNKKIEDSKEAKLRVNSLMRKSYAEPMYVNQKIESEDDFFKAITDIFEKLRWYVEDQRWTEAFWNDCNPPTPKKETKIQPTLKMFFKQELNPIGIHVERETHEGIGTLDFKFLITIKGSPLVVCAEFKLAHHKKLEHGLTTQLPLYLKASLSKSGIFLVMWFKDEKEEHFKEPTNKNKSEMLTYLEGKVKEINENEDFKIESILIDASKKPSASQS

SEQ ID NO: 2881 - protein, 659 aa, unidentified
  source 1..659: note = Related to NZ_JABKBV010000010.1; note = Methanococcoides sp.
MDKLPNDDKLKIMFNHYFEKGIIPKLSKNEHINNFNSFKKLNANNLPYIYDRDHFCSLSNSSSKQIGYYLFKKEIAYSTFNLPKKNGSLREISAPAKPMKYVQRWILNHILYKLDVGDFSHGFVPGKSIVTNASIHVNQDLVLGIDLKDFFPNIQFNSVRYIFKSAGYSPKVASLLAEICTYHHTLPQGAPTSPTLSNLVALKLDKKIATYCAKRNFKYSRYADDITISGSSNLPKHKQIIIEIIEKNGFIVNEDKTRMFSQGSKQKVTGLVVNDKVSIDRKRKKNIRATVHNILKNGPEMENRENNPFFKEKIFGELAFVKMVDPDFANPLIDKLKQLDWINYNKKLSNPREMELMVRSLQKKSCIDPETYNQPIESEGDFLQVICDVIAEMKRGIEKPRAYKAFWNEGSTEILDGNEHKISPTPKIEKNIQNIIVLFIEDRLLHQGIQTIEESDEEIGYFGFKFLFTTQKRKALNISTGFKLAHDSQLEHGLIKQLPSYLEASSSKSGIFLVMWFKDENGTFFNKPINRSKSEMLAYLRETVKEINENEDLKIESILIDVCEKSSASKTEYKNDHDDEGGKGKNISYYLSIIKCKIQKLWKIIIGLLVLIGLLADAINGWPVIKEFMTSISTSFINYSSYIFSLNIQLSSIFAVFFK

SEQ ID NO: 2882 - protein, 568 aa, unidentified
  source 1..568: note = Related to JAIOTP010000268.1; note = Desulfobacula sp.
MPESMILTVSQFEEFMESIKPPLSSEDIEFQRKHFEKLTYNKLPYFFNVDHLANSIGFSSPQLHLFISNKRVAYSTFKLPKKNRGFRLIDAPSKDMKIVQRWILDNILYKLNVGEYAHGFVPGKSIATNASIHVAQDLVLGIDLKDFFPSITLGRVIGLFRGIGYNEEIAHALGELCTFNWKLPQGAPTSPMISNLIAWNIDIKLSGFCKKRNLNYSRYADDITISGGKRLPKYKTLIFRKIEEEGFSINWEKVRLHDRGSSQRVTGLVVNDKVTLGRKKKKTLRAIVHNIVKNGPETENRENEPFFKEKIFGQLAFAKMIEPDFADSLLDSLKHVDWNSYDKKLTGLIEGELSVRSLEKKKYCIPVVEDQDIKSETDLLKVICDVITELRYYVEDRRWIDAFWDDSREVEVDGNKIKLPAFPKKETKIQPTLYVFFDRRLYPLGIHVSRETDEGIGKLDFKFMVTTKSHIPLLICAEFKLAHSTKLEHGITVQLPAYLKANRSTSGLFLVMWFKDEEEKFFDKPNDQNKLQMIEFIEDKINVIKYEEEIDIKSILIDASKKPSASNL

SEQ ID NO: 2883 - protein, 332 aa, unidentified
  source 1..332: note = Related to MT630658.1; note = Methanosarcinales archaeon ANME-2c ERB4
MRMTKDQILTEDQFKVFISSIKPPLSEEEHESQCSSFKKLKRNELPYILNIEHLAELTGSSPAQLHLFISDKRKAYSSFKLPKKRGGFRKIDAPSKKMKTVQRWILDNMLYKLDAGNYAHGFVPNRSIATNASVHVGQELVLGIDIKDFFPSITLKRVVGLFQSIGYNEEVSHGMGELCTFNWRLPQGAPTSPMISNLIAWHIDIKLSKFCNKRNLCYSRYADDITISGGTELPRYKTLIFRKIKEEGFSINDEKTRVHGRGSSQRVTGLVVNDTITLGREKKKRLRAIVHNIAKNGPIAENRDNDPFFRERVFGHIGFAKMVEPDFAKSLQ

SEQ ID NO: 2884 - protein, 548 aa, unidentified
  source 1..548: note = Related to JAIORO010000110.1; note = Methanococcoides sp.
MILIDSQFKKFMDSIKPQLSREEYDLQLTSFEKLKKNELPYILNIDHLAHLSGISPQQLHLFIKNKRIAYSSFKLPKKNGGFRSIDAPSKNMKLVQRWILDNILYKLNAGEYAHGFVPKKSIATNALVHVGQELVLGIDIRDFFPTITLNRVEGLFKSIGYNEEISYALGELCTFNWRLPQGAPTSPMISNLIAWRMDIKLSKFCEKRGLIYSRYADDITISGNKNLPRYKTLIFRIIEEEGFSINEKKVRLLGRGSSQKVTGVIVNDKISLGRKSRKRLEAIIHNILKNGPIAENLNNDPYFKEKLFGHLGFASMIEPDFALPLLQSLKKIDWEPYDCALETSKESELNYKSLSRDSHSNLIKFDNLGFFKDVETLPLKWKDELITQLDELKEKCEEQSIDACKNCMHVRKELYEKCIKYILGHYVGCTCGPHHGHEVFDVGGETDLYGDSVFVAFLAKAGKLDRKSKDSLFHQFFECTIQEGLDVISVVTPEILDNRLKMDLRILFRDCGKEKLFCLIMRDEMSRILYSFQRIISNNMCEDEKKAP

SEQ ID NO: 2885 - protein, 560 aa, unidentified
  source 1..560: note = Related to CP009514.1; note = Methanosarcina mazei
MNCSAICDEKQFEEFMDSLQPSISKEEYDTQYESFLMLSEKNLPYIYDLNHLSLLIGESTKQLDFFVRNKRKIYVSYRMKKKRGGYRTIDVPSKKLKFVQRWILQNILYNIKVSKHSHGFIPGRSIATNAKIHVGQELVMGIDLKDFFPSIKFNRVRGFFKSVGYNNHISTILADLCTFNWQLPQGAPTSPMISNLIASRLDRRLAGFCKKKELLYSRYADDITISGGKVLPRYKTLIFRIITEEGFEINCEKVRIQGRGSCQLVTGLVVNDKVSIGRRKKRIIKSLVHKISENGSIEANETENPFFKEMVYGLLSFTNVVDPEFAQPLIEKLNLIDWKEFTEAYSQYQKSEIIERSFKKCPTIRRILFNDLEFFKGIKLIPQNELTKEFLKELSLLKEKCSEHKKENCQDCLLTEEISDKTCMKYILGHYIGSTGGAHHGHEVYDIGEITEYKSQEVFVAFLMKSKDDTNSKNSLFTQFFDCTENGGIDIISVVSTEDLDHKTILRLQRVMKQFAKEHLYCLILRKEMASILYSFKKEFSKNNREKSLFHNGDQSSLLI

SEQ ID NO: 2886 - protein, 533 aa, unidentified
  source 1..533: note = Related to JABXKB010000305.1; note = Candidatus Lokiarchaeota archaeon
MDLERQKINFDIPYQSFNQYRRDFRFANKHLGTQCIKFCINYAKALKKKNLPIIYNLEHLSHHVKLSKKSLYFIIKQKEKFYQLFEIPKKKEGVRNITAPSKILKNVQRWILDCILYNIDIHKNATGFYLDKSIIKNANFHLNQKMVLNIDLKDFFPSIKNKRTYHIFSSCGYNHSVCKILSELCTFNNELPQGSPASPMISNIVCKSLDSRLFGFCKKNNLNYSRYADDITISGERNLTKYILFIFKIIENEGFKISTKKIRLTGRGNAQIVTGITVNDKISFDRKKLRKIRAIIHNCKKIGPEKANKNKHPFFREYLYGYVAFLKPIKPELSKKWKKELDSIDWGAYKKKYDVDIIINDSEKELSNPTAFISYSWDSKKHREWVIRFAANLIKNGINVLIDEWDLKDYNDDLNYFIECGIRDSNHVIIICTPKYAKKANKRLGGAGIETAIITGEIYEKTNAGKFIPIALNYQKSMKECLPTYLKNKFTFDFNEEERYEEKIELLLRKIYKKPKYKKPKLGTIPDFKSKDI

SEQ ID NO: 2887 - protein, 390 aa, unidentified
  source 1..390: note = Related to NZ_MWJI01000004.1; note = Paraclostridium bifermentans
MILESLNLPKIYNLESFSTEIGLSTTILYLLSQRQDKFYHQVIIPKRKSGNRTLSIPSMSMKIVQKWIKLKILDKIPVSNCAMAFRKGNSYGIKTNAELHKYNTYILRLDLKDFFNNIKKEKVFFLFREIGYNNYISNILSNICTFNESLPQGGITSPSISNLICKKLDIRLESLASKRDITYTRYADDLIFSCNDEVLLIKTKNAILDILKSEGMEVNKLKTKFIRPGSRKKITGLHIDKNRVIVPRDTKRKVRAMIHYSIATGDYSKLDEIKGYISFISSIEENYISKIKSYINKIANNEQYRLFEDIVESYNKNKIFKDLDTMNFIDEYIEEIDGIEYDLSSTYFYNRIDFLKKNELQEVIDNITNGEDNNVDDIATTYLDNETCPF

SEQ ID NO: 2888 - protein, 379 aa, unidentified
  source 1..379: note = Related to CP037830.1; note = Clostridioides difficile
MHLKYSNLMTLESLNLPKIYNLESFSTEIGLSTTILYLLSQKQDKFYHQVIIPKTKSGNRTLSIPSISMKIVQKWIKVKILDNIPVSNCAMAFRKGTNYGIKMNAELHKYNTYILKLDLKDFFNNIEREKVFYLFREIGYNNYISNILSNICTFNEVLPQGGVTSPSISNLICKRLDRRLENLASKRDITYTRYADDLIFSCNDEVLLIKIKNVILDILKSEGMEINKLKTKFIRPGSRKKITGLHIDKNKVVVPRDTKRRVRAMIHYAITKEDYSKLDEIKGYISFISSIEGNYISKIKSYINKIVNNGQCRLFGPIVESYNKNKIFKNLELVSCIEEMDWVITKGAFYNREKYELKEVIEKSTEYGEDNINGETSPF

SEQ ID NO: 2889 - protein, 378 aa, unidentified
  source 1..378: note = Related to NZ_CABIXZ010000002.1; note = Intestinibacter bartlettii
MFIIKDDIRKYGNLMILEALDLPKIYDLNSFGREIGLSNTILYLLSQKTERFYKQTKIPKKKSGTRQISIPSISMKIVQKWILINILEKIPISNYAMAFRKGSKYGIKTNAELHKYNECIIRIDLKDFFNSIEKEKVFYLFKSIGYNNLISNILTNICTLDGCLPQGALTSPILSNLICRNLDRRLEGLCSKRDMIYTRYADDIILSCNNEVLLIKTKKIVSAILCDEGFKINQSKVKFMGVSSAKRVTGLHIEENKVVVPRMLKRKVRTMIHHTIVVGDYSEIDKIKGYIAFISSIEPNYRKKVIEYINKITSKQQYRIFKEIVDGYNSNKILKECKDMEYFNEECNEDIENDFYSERENFINMLLKEKNDTGSYGE

SEQ ID NO: 2890 - protein, 402 aa, unidentified
  source 1..402: note = Related to NZ_BHYK01000003.1; note = Clostridium tagluense
MFTIKRVKYRNIIILEALNLPKIFDIKSFSISIGLTPTILYLLSKETERYYTSIKIPKKKVGTRQLRIPSFSLKLVQKWIKINILDKIPISDSAMAFRIGKDYGIKQNAELHKYDSYIFKIDLKDFFHYIHREKVFYFFYNLGYNNLISNILSNICTFNDVLPQGAVTSPSLSNLLCKKLDSRLEGVASKRGISYTRYADDLIFSCNDKVLLIKTQKMIYEIVEDEGFQVNSEKVKFMGPATRKSITGLLIVENKVIVPRSLKRKVRRMIHYMIATSDYSRLDVVKGYISYISSIEKKYIEKIKRYINNMVNNDQYKVFDDIVNLYNENIFLECNEMEHVSFESCIDIVDGTVLDFGEHYVDERITFFKKHNICGRLSSLGIEYEEIAATVNVTSENDGGGK

SEQ ID NO: 2891 - protein, 396 aa, unidentified
  source 1..396: note = Related to JACBEK010000003.1; note = Clostridium botulinum
MKVKYENTVVLGILNLPKIYDLYSFSEEIGLSTTIIYLLSKKTDRYYNTIHIPKKKKGRTRQIDIPSFSMRIVQEWIKNKILDSIPISDSAMAFRKGKKYGIKKNAELHKNNQYILKLDFENFFSNINKEKVFYIFKSIGYNNTISDILTNICTYNESLPQGAITSPSISNIVCKMLDSRLEGLSNKRNITYSRYADDLIFSSNDEVLLKRTTKVIFDIINDEGFYINKEKIRFIYPQMRKSITGLLIAENRVVVPKEMKRKVRAMIHNMIASADYTDIDKVKGYIAYISGIESEYIEKVREYVNKMIEKEQYKVFDDVVTEYNKNKLLKGTEDMELLPIGSCIEEDELGFYSQDFAEDYYEERIEFLQEKYPEKVKKLSITYKEANSENNEELLI

SEQ ID NO: 2892 - protein, 408 aa, unidentified
  source 1..408: note = Related to NZ_JZJQ01000041.1; note = Clostridium sporogenes
MLTINNLKYSNSIIIDTLGLPKIYDINSFSTEIGLSPTILYLLSQKQDLFYKDTYIPKRDGSNRQISIPSISMKLVQKWIKVKILDKLYISDMSMAFRRGNSYGIKKNAELHRYDLYILKIDLTDFFHSIDRMRIFYLFKGIGYNNLISNILTNLCTYKERLPQGAVTSPVLSNLVCEKMDKRLSGVASKRGISYTRYADDMYFSCDDEILLRKTQSMIYEIIKDEEFKINNKKVKFMGPSSRKCITGLVINDSKVVVPREMKRKVRVMIHHGIATGDYSKVDSIKGYISFISSIEKDYENRIKKYCQSLIDKDQYKVFDDLIEKYNQNKFIDTNEMKQVDEDELLYEFEGIELNHIDSYIYERIEFYKKNNLENKMKDFYIENKEIACVLNEEIIMNSDDNNEDFGF

SEQ ID NO: 2893 - protein, 353 aa, unidentified
  source 1..353: note = Related to NZ_FQXP01000010.1; note = Clostridium collagenovorans
MLTIKNLKYSNSMILETLGLPKIYDIESFSTEIGLSPKILYLLSQKQYLFYQNKQIPKKDGSSRQISIPSTSLKLVQKWIKIKMLDKLPLSDFSMAFRKGKSYGIKKNAELHKYDSYILKIDLKDFFHSINKTKVFYLFKGVGYNNLIANILTNICTYEDRVPQGAITSPVISNLICKKLDYRLSGVASKRGISYTRYADDMYFSCDDEILLRKAQNIIYKIIKEDDFIINNKKIKFMSPHSKKFVTGLIINDTKVLVPKEMKRKVRSMLHHAIATGDYNNIDSIKGYISFISSIEKDYRIKIEKYCEELIDKKQYRVSNDLVDKYNNNNFLKTKSMEYIQDTEFNEYEELIF

SEQ ID NO: 2894 - protein, 404 aa, unidentified
  source 1..404: note = Related to JAGZKV010000024.1; note = Clostridiales bacterium
MSQNIPTLLMNSLKLPYFETIEELSELTRLSTQLLYCLSTKTSKYYIIKKIPKKNGGLRELSIPSYTLRIVQRWILTEILNKILPSDRAMAFRKGKDFGHKQNAYYHANTLYGLSIDIKDFFPSITVNKVYTIFSTLGYNSFAATILTNLCTLEGKLPQGSPCSPAISNIICSSLDRRFVGLCEKRGIRYSRYADDMYFSCDDKILLLKNFPIITRIVESEGFILNTRKVHFHTPSNKKQITGITVSPTNIEDYVELKAPRTLKQKIRAEIFTCLISGQYQNKDHILGEIAYVDFIEKENKSKYLERIKNYIGKQLVKIQLFPELVMEYNNNKFYEDLPLAISIDINIVTEEDFDDIECLFRERKKFLQKNGIKDICKYSKWPDIIINSSYNIAENIADIECPF

SEQ ID NO: 2895 - protein, 344 aa, unidentified
  source 1..344: note = Related to PYLO01000002.1; note = Clostridium fessum
MSQKISPLLINSLKLPVFETLEELSEITRLSTRLLYCLSKKTDRYYNVIEIPKRNGKMREISIPSYTLHIVQRWILMEILNKLVPSSSAMAFRKGDNFGHKQNAIYHADTLYGLAIDLKDFFPSITANKVYTLFSNLGYNHFAAAILTNLCTLDGRLPQGSACSPAISNIICMNMDKRLIGLCEKRGIRFSRYADDMYFSCDDKLLLLKNYPIIKKIIEDEGFLLNERKTHFHTPSNKKQITGITISPGKAENAVELKAPRKLKQKIRAEIFTCLMTGDYKNREHILGEIAYVEFIERENKYPYKDRIRHYIEEKSTKIQYFPELVQAYNENRFFKDMPLLEGK

SEQ ID NO: 2896 - protein, 401 aa, unidentified
  source 1..401: note = Related to JAFQFZ010000002.1; note = Clostridia bacterium
MRKISQSLLINSLGLPRFSTIEQFSEITGLSTRLLFCLSNLTEKYYRNKKIPKRNGDMREIFIPSYTLRIVQKWILKNILNKIVPSNQSMAFRRGSSFGNKQNAAYHAYTLYGLSIDLKDFFPSISANKVYNIFSSLGYNEFAATILTKLCTLDSKLPQGSPCSPAISNLVCITLDNRLAGLCQKRGIIYTRYADDMYFSCDDKTLLLRYYYAFKQIIENEGFVINDRKTHFNTPSNRKRITGVTIVQHHLDEKFELKAPKEMKRKIRAEIFMCLMSGDYKNKGKILGEIGYVSFIEKDNNFNYISSIKQYITTTAEKIIYFPELVDAYNNNLFFDDLEEIESALIDPKDEEELYYYGDMYNSRKIYLNKRNLSDVCTYKDWPQVITSQNNSSTDNTDLPF

SEQ ID NO: 2897 - protein, 382 aa, unidentified
  source 1..382: note = Related to NZ_WIQR01000001.1; note = Pectinatus frisingensis
MKVNNLLIKSLNLPEFKNIKELSILIGVSSRLLYCLSQNTEKYYTHKIIPKKNGTNRCLSMPSYTLKIVQRWILKRIIEKIIPSKSAMAFRVGKNFGYKQNASFHSDTLYMLSIDLKDFFDNIKSFKVYCFFISIGYCEFAAMILTKICTLDNKLPQGGVCSPALSNLLLSSLDKRLIGLSEKRGIRFTRYADDMCFSCDNKVELLKIFPTIKKIISEQGFIINDHKTYFSTPSNRKKITGITISKKNNIIELKAPRKLKKQIRVEIFQCIVSGDYSKKNHIIGEIAHVNFIEKENKIKYINNMKKYIETTGKKISCSPELVTAYNENLFFNDINKLEIMPLINIACRRNAVDFFKNRKEYLGKRHIVDICKYNGLMIYCDI

SEQ ID NO: 2898 - protein, 408 aa, unidentified
  source 1..408: note = Related to PGZR01000048.1; note = Firmicutes bacterium HGW-Firmicutes-4
MSNLKRLNYIYINTLKIPAFQNIYELSRLTGISSRMLYCLSKNNVEYYKTFTILKKSGDPRTINAPLYSMAIIQKWILRNILEKITPSNRAMAFRKGSEFGCKMNAKYHVGTLYGLSIDLADFFTSIKSNKVYCLFRNLGYAETAATILTNICTLDGALPQGGVCSPTISNLICITLDNRLIGMCEKRGIRYTRYADDMYFSCDNKDLLKKTFPKIKTAIEDQNFTINNNKTRYHTPSNRNQITGVVIVKTNQYEEYELKAKRKLKQSLRAEIHNAIMTGDYKNKGHILGIISYINFVEKENSDNYLERIKEYIVKCANKIIFFEELIKAYNENLFFNNMEKIAYDKDQIVDFFKEEDSYLKLLDKRIEREAYLQKYHRDDICMYLDWPRGLDPNNNNDIGLMDDCPF

SEQ ID NO: 2899 - protein, 412 aa, unidentified
  source 1..412: note = Related to BK019570.1; note = Siphoviridae sp.
MQKNNLLLINSLGIPYFECLEEFSRIIGLSTKLIYLLTNKTEIYYSFKEIPKKNGKKRIIAIPSYTLKITQRWILKNILNKIRPSDYVMAFRKSSNNNKFDIKKNAYYHSDSLYGLSIDLSDFFPSINAAKVYRIFKGIGYNNTASAILTNLCTLENKLPQGAVCSPALSNLICMRLDRRLFGLCSKRGVLYTRYADDMYFSCDNKGLLLKMFPIIEKIIKSEGFIINQDKLHYHTPKNKHLITGVVISHSNDTSELKVSKEFKRKIRAEIFRCIMTGNYENAAHIKGEISYVCFIQSENRQDYKQSIIQYINRTSKKIEYFCELVDAYNENFFFDEQEPLEFLDINKLEIDCPEKDTDNYDQYLFETIEAIFQYRKEYIKNNNLTDICKYQNWPKNTTENEFDASSEETPF

SEQ ID NO: 2900 - protein, 393 aa, Bacillus sp.
  source 1..393: note = Related to NULM01000015.1; note = Bacillus thuringiensis
MNKNFTNSFILNALNLPIIRDLDTFSNSIGVSKRLLYLLSQSSEEYYRSFFICKKNGDQREIHTPTYSLKLVQRWILEEILEKIDVSEESMAFKKGPGNGIKKNAEIHLYSLYLLQLDLKDFFTSIKREKVFYLFKDLGYNIVVSNILASLCTYNGYLPQGGVTSPYISNLVCYKLDKRLKGLCAKRDILYTRYADDLTFSCDNRETLKKVQKVIEDIIEDEGFNVNSLKTRLLSPSSHKKVTGITVNEKTVKASKKLKREVRTMIHHAFVTTDYSSNDRIRGYIAFISSIEEGYKDTIYKYINKLVNNENYRMFRDIVEAYNNNKIFKNMEDMKDMKFEKSGYLVEEYLNDLAQERASFLRNRDIQTDLFTNSSADEIASTSMERKDFKDLF

SEQ ID NO: 2901 - protein, 395 aa, Bacillus sp.
  source 1..395: note = Related to NZ_CP035996.1; note = Bacillus mycoides
MKKSYTNSFILNALNLPIIRDLDTFSNSIGVSKRLIYLLSESTEDYYKNFLIPKKNGEQREINTPTYSLKLVQRWILEEILEKIGVSEESMAFKKGPGNGIKKNAEIHLYSLYLLQLDIKDFFINIKRKRVFYLFRDLGYNVAISNILANLCTYKDYLPQGGITSPYLSNLICYKLDKRLKGLCAKRDILYTRYADDLTFSCDNRESLKKVQKVIEEIIEDEGFKTNPLKTRLLSPSSHKKVTGITVNERYIKANKKLKKKVRAMIHHAFISADYSSNDCIRGYIAFISSIEEGYKDTICKYINKLVNNKNYRIFEDIVEGYNNNKIFKDMEEMRFKETVFLDPDYPLNSHLSDIVQVRTDFLQNRDIKIDVFPDSSEDEIASANMEEIEIDDLF

SEQ ID NO: 2902 - protein, 398 aa, Bacillus sp.
  source 1..398: note = Related to NVKK01000033.1; note = Bacillus thuringiensis
MKKHYTNSFILNALNLPNIRDLETFSNSIGVSQRLIQLLANSAHVYYNNFSIPKKNGTQREINTPTYSLKLVQRWILKEILEKIDVSEESMAFKKGLGNSIKKNAEIHKYSVYLLQLDIKDFFISIKKEKVFYLFRDLGYNIVVSNLLANICTYNGFLPQGGVCSPYISNLICYKLDKRLKGLCAKRDILYTRYADDLTFSCDNKETLKKVRNIIEDIIKNEGFEINPLKTRFLSPSSHKKVTGITVNDNRIKASKKLKKKVRSMIHHSFVSADYSSNDQIRGYVSFIDSIEEGYKDKICEYIDRLANDKDYKYFEDIVVAFNNNKIFKELADMPFEDLSFNDPDDPDDLVTYFISNSVEERYSFLKDRRIKIDAFPDEYEDEVAAANQNEIEVEDIF

SEQ ID NO: 2903 - protein, 369 aa, Bacillus sp.
  source 1..369: note = Related to NVCK01000005.1; note = Bacillus thuringiensis
MKNDFTNSFILYSLDLPIIKDFESLSNSVGISKTMLYLLSKKTDMFYNSFDICKKNGTKREINSPTYSLKLVQRWILAEILEKIKVSNESMAFRKGIGNGCRKNAEHHRYSLYLLQLDIKDFFTSINRERVFYLFKSLGYNSLVSNILANLCTYKGYLPQGGVCSPYISNLICYKLDKRLKGLCSTRDVLYTRYADDLTFSCDNKVILRKVKNVIEDIVIDEGFAINPSKTRLLSPSSHKKVTGITVNDNKIKASKQMKRTVRAMIHYALVNRDYSEKNVIRGYVSYIDSIEEGYIDKIKNYINKLTEKDYSSSSEIVESFNKNKLFNDLNDMVYNEASIIDEAFDWDIFELDTYKHISATKQEDDFNF

SEQ ID NO: 2904 - protein, 350 aa, unidentified
  source 1..350: note = Related to NZ_BHYK01000016.1; note = Clostridium tagluense
MTTDFTNSFILNSLKLPIITNIDSLANTLGLSKTIIFLLSQKTSYYYKPFKILKKDGNSRQIFSPSYSLKLVQRWILNEILEKIDVSHESMAYKKGNDNGIKKNAEMHKYNLYLLEFDLKDFFTSIKRERVFFMFKNLGYNNMVSNILTNICTYNDYLPQGGVCSPYISNLVCYRLDKRLSALCGKRGIVYTRYADDLTFSCDNKQSLKKVKDIIKDIIESEQFKINDSKTRLLSPTSHKRVTGITVNDNKLKANKNMKKLVRAMIIKSLFSMDYINNNIIKGYIAFINSIEDGYKCKIIEYINKTINKSLPYSNEMVIAYNENKFFKETNDMCYHGYDNIDDKYEDYEG

SEQ ID NO: 2905 - protein, 392 aa, unidentified
  source 1..392: note = Related to NC_016627.1; note = Acetivibrio clariflavus
MIQKDYTDSFILNALNLPTISDLDSLSDAFAISKRLIFLLTKKTENYYKRFYIKKRDGTSREILSPTYSLKLIQRWILKEILEKVSLSEQAMAYKKGKNNGIKKNAMHHRYSLYILEMDIKDFFHSIKRERVFYLFKNLGYNNMVSNILTNLCTYNGYLPQGGVCSPYISNLICYRLDNRLSGLCGKRDILYTRYADDLTFSSDNKQTLTKAINIIINIIEDEGFKVNKNKTRLLSPGSHKKVTGITVNDSKIKASKQLKRTVRAMIHQAIVTADYSQIDRIRGIVSYINSIEVGYREKVITYINSLSNKDYAFFEEIVERFNDNKIFKEIQDMNYKGYDYDDQVSLELEKIVSARQEYLGKIGKVDFLSAHIQSQQDEFKTNAAATKETYE

SEQ ID NO: 2906 - protein, 393 aa, unidentified
  source 1..393: note = Related to VOHC01000030.1; note = Planomicrobium sp.
MKSDFTNSFILNALNLPVMKDLNDISYLTGLSNQLLFLLSQNSESYYKKFYLDKKNGEVREINSPSYSMKLVQRWILSEILEKVKVSNESMAFKKDFGNGSIKNARYHQYSLYILQLDLESFFDSIDKERIFLVFKSLGYNTYISHVLTNICTLNGTLPQGGVCSPYLSNLICYKLDRRLTGLCSKRDVLYTRYADDLTFSCDNKLTLKKIKNIIEDIIIDENLKINHFKTRLLSPGSHKKVNGITVNNGNLKASKELKKKVRAMIHHSIVSEDYSKNNIIRGYVSYINSIEKGYLEKIKEYIINIFKKDYNHFSSTVNAFNENKLYRDIESAEYVEFVGAGYSDDYEWLYYEERRFEFLVEKGYLKGLRDYFKKAENLLVENKDDEDPTSIF

SEQ ID NO: 2907 - protein, 406 aa, Bacillus sp.
  source 1..406: note = Related to NFEK01000132.1; note = Bacillus thuringiensis
MNNKNNVTNSFILNALNLPIIKDLESLSNHIGISEKLIYLLSVRNSEFYESFTIPKKDGTERKIESPSYSLKLVQRWILKEILEKIPVSVHSFAFNPGRNGIKDNAELHKFSLYLLQMDIKDFFTSIEYKRVFYLFKNLGYNSFISKILTEICTHEERLPQGGVCSPYISNLICYRLDNRLQGLCSSRDIIYSRYADDLTFSCDNKEALRKIKKVIEEIIFDEGFKVNHKKTRYTSPSSHKVVTGITINDQKIKVQKDLKRKVRALIHHAIVCGDFSEINTIKGYVSYINSIEVGYREKVITYINKLLMEKDYKYYNDIVESVNGNLMMKEQISMVYDEYVDDEYVDDEYIPADIVFAETILRKRIDFFKKRGKELEIEDKYKEYFEDEVASTVVVDADDDDELPF

SEQ ID NO: 2908 - protein, 428 aa, unidentified
  source 1..428: note = Related to NZ_AWTC01000001.1; note = Sporolactobacillus laevolacticus
MNNTHSNTILLNNLQLPIIHDIFDLSDNTRISDGKLYLLFQFHNYYYNTFFINKKNGKKREISSPQRPLKLLQKWILEEILLNIKVSAESQAFIRKKNGILENALLHKDNLFLLQMDIENFFPSIDDKRIFYFFRQIGYNSFVSDILKNVCTFKGKLPQGGVCSPYLSNLICYSLDRRIAGLCARRDIIYSRYADDLSFSCDNKDNLRKIRPLVELILSKEGFKVNKSKTRFSFSHKTITGLNIAKDNNNMNVVKVPRKLKRKVRSIIHYSFVSGDFSNQNVVLGYIAFIYSIEPEYISKIIKYIQSLQNKDYKFFSDIVNAFNKSDLAKISNFCWNFDDTYESKIDVEKVLRKYKISDRKDLDLFAEYLPDEYWGFQEKFEKRFFYLKRHKVLTDHLVSIYQNKLYDLNFLNREDSTNSFHQDLFEF

SEQ ID NO: 2909 - protein, 414 aa, unidentified
  source 1..414: note = Related to BMCJ01000003.1; note = Thalassobacillus devorans
MSKDPTNIFILNSLKLPIIEDLYTLSNSTGISLKMIYLLSKNPGNFYTNHKIPKSDGTFRDIYSPNLSLKIIQRWILEEILCNIENSSEATAFKKGLNGPYENAAYHKDSLYFLQMDIKDFFPSITRKQVYYLFKNLGYNKFISNILANLSTLNNKLPQGGVCSPYLSNLICYKMDRRLKGLCSKRDILYTRYADDLTFSCNNKVALRKVKQVVEKIVINEGYLINHKKTRYSSPISPKKITGVTITSQKKLKADRQIKKKVRAMIHKAIVTGDYQHTNKILGYIAYINSIEKDYKEKIISYIEKLIDKQYKHFDKVVKAYNSNKFFRSLPDMTQVDINTQLADEKLKWELGIDVYDYYIFEEYKNMLEQRIDFMDKKGIFDQELKNEFERINDEVASSLEDEITPPKDDDIQF

SEQ ID NO: 2910 - protein, 372 aa, unidentified
  source 1..372: note = Related to NZ_ATVM01000016.1; note = Marinococcus halotolerans
MIKQQDQFYSSFQLLKKNGSYRNISKPKFSLKLTQRWILEEILYKIETSNEALAFKKNVNGPKDNAEHHKYSLYLLQIDLENFFPSITKKQVFYIFKNIGYDNKVSNTLSNLCTYKDVLPQGAVTSPYLSNLICYKLDRRLKGLCGKRGILYTRYADDLTFSCNNKNDLKKIFKVVQKIINSEGYQINSDKTRFLSPVSHKKITGITVDSKNKLKADKSLKKKVRAMIHKAIVSGDYSQSNKIKGYISYIDSIENGYYKKIIEYIHKLINKEYKSFHQVVDCYNSNRNKLLKDLEKMEYEDFIEEPPENLDESDIEDYIGEQFKDYVDILKERKKFLNKHNFSVKEIKHELSLLTIGEKPLPKNTGKPEDLF

SEQ ID NO: 2911 - protein, 408 aa, unidentified
  source 1..408: note = Related to NZ_JALIRM010000001.1; note = Lederbergia wuyishanensis
MKRDFTNTFILNSLELPVIDSLDTLSNQVGISKRMLYLLSQQTNKYYKQFQIPKKNNTFREISSPSYSLKLVQRWILEEVFYKINVTDEALAFKKGVNGIKQNATYHLYSLYILGIDIKDFFPSISREKVFYLFKNLGYNNFISNVLSNLCTLDNSLPQGAVTSPYISNIICYNLDRRIKGLCEKRDIVYSRYADDLTFSCDNKDTLKKMYKVLEGIIVDEGFEVNRSKTRFLSPISHKKLTGITIDHQKTKADKELKKKVRAMIHKSIVTGDYSNNNIILGYVSFINSIENGYKKKVINYINILIMKDYKHYPDLVDAYNKNKLFQELNNMVQIDFHTSFAFDIKTYYRQYFKHGFDLDEMEYYEYLNMLESRRVYLEKYHLKDTELEKELGTLQSAADIEEDTDLF

SEQ ID NO: 2912 - protein, 383 aa, unidentified
  source 1..383: note = Related to JAFVTV010000006.1; note = Clostridia bacterium
MIKEYINKTFIESLDLPMMKSFDDLVQNLRLSAKLMHWLTSSSSGKYKTFYLIKKDGSKRRIDAPARSLKIVQRWILDNILAKIKVSPYSFGFKSGEKGSPLVKCAEKHKNNLYILKVDLKNFYPSINKERVYYTFLDLGYNSSVANLLTDICVRDGYLPQGAVTSAYLANLICRDLDYRVAGYCNKRDIIYTRYADDLTFSCDNRETLHKSLFTIRRIIEGEKFQLNTNKIHFMTPKCKKSILGITLNDTSIKAPREMKRMVRSVIHYQVATGDYTDNDKIRGYISYINSIEETYKDQVLSYIQKLAESQLCLFEELVDAFNKNKLYQELPDMILRDAGDFVNAYEEDEFMTAVYYEHREFLIKYGLLEEETDTSNLEEIPF

SEQ ID NO: 2913 - protein, 370 aa, unidentified
  source 1..370: note = Related to FRCT01000015.1; note = Ruminococcus flavefaciens
MIDNKNKIILDSLGLPCLVSFEDLVKAIRLDSKLIYWLSSETENKYKTFEIPKKNGGVRIIHAPVYSLKQVQKWILCNIIYKIKTSPYSLGFKRSSNLGSPLYISAQNHKYNLYVLKLDLKDFYPSITKKTVYNLFLSIGYNSQIAFLLTNICTHHGALPQGAVTSAHLANLICRKMDYRLAGYCQKHDIVFTRYADDMAFSSDNRDTLKKAYKTICKIIKDEGFIVNDLKTRFMTPKCRKQILGITINDNQIKVSKDLKRKVRAMIHRSIATGEYNNNDVIKGYISYINSIEPGYLEKTKKYISELITNSPLELYPEIINRFNSNKIYSDLPNMELKEPSYFVESPYDTDYMNNEYELHQDYLEGIKCK

SEQ ID NO: 2914 - protein, 367 aa, unidentified
  source 1..367: note = Related to NZ_AUFC01000039.1; note = Anaerovorax odorimutans
MKKYINKTVLDSLNLPILTSFQDLVEQLRLTDKKVYWASSNHIIDKYNTFYIKKSNGNKRRIDEPKYSLKIIQRWVLENILYKIKVSPYSYGFKYTEGSPLVACSNKHRLNLFVLKMDLKDFYPSISKEKVYFQFLNIGYNTKVSNLLTNICTYNNSLPQGAVTSAYLANIVCRKMDYRIAGYCNKREIAYTRYADDLIFSSDNRELLHNTYGMIEKIITDEGFTLNKDKTTFMSPKNHKKVLGITINDNQVKAPKKLKREVRAKIHYQIATCDYSEQMKTKGYISYINSIEPNYKEKVTKYITGLSKSPLCLFPNVVKAYNDNKYFSELPNMILKSYGDFVQPSLIEEFEEHINSEYLKYLSEHSK

SEQ ID NO: 2915 - protein, 385 aa, unidentified
  source 1..385: note = Related to JAJEQN010000018.1; note = Lachnospiraceae bacterium CLA-AA-H224
MNKYSNKIVIESLGLPMLTCFDDLVKEVSLSEKLVYWLTKRDAEGRYNPFFIKKKDGNKRKINSPSLALKIVQRWTLENILYKIKTSQYSYGFKRDIRKGSPLVYCAEKHKNNLYILKLDLKNFYPSIKRESVYYIFKNVGYNADISNLLTNICVVNDELPQGAVTSPYLANLVCRKLDFRIAGYCNKRNIVYTRYADDLTFSCDDRELLRKIYGMIKKIVEDEGFCLNQRKTVFMTPKNHKEVLGVTINDGLLKAPKEVKKDIRAMLHYEVATGDYAMNDEIRGYVAYVDSIEKNYKNKCISYLKRLSESTLCLFPDVVKAYNSNKIYKELPDMKEKQVADFCEEDEDEFANMIYQEHEQYLILKGILNKTNEEDITDLQNPFW

SEQ ID NO: 2916 - protein, 383 aa, unidentified
  source 1..383: note = Related to NZ_JADPGV010000001.1; note = Blautia luti
MKKYSNKTVIESLGLPMLTCFDDLVKELSLSGKLVYWLTKQDAEGRYKTFFIEKKDGDKRKINAPSLSLKIVQRWVLENILYKIKASQYSYGFTKGDRKGSPLVYCAEKHKNNLYVFKLDLKDFYPSIKREKVYYAFANIGYNADVSNLLTNICVVDDELPQGAVTSPYLANLICRKLDLRIAGYCNKRNIVYTRYADDLTFSCDDRELLRKIYGMVKKIVEDEGFCLNQKKTVFMTPKSHKVVLGVTINDSLLKAPKEIKKSIRAMIHYEVATGDYTMNDKIRGYVAYVDSIEKNYKNKCISYLQKLSESTLCLFPDVVKEYNSNKIYKELPDMVEKRATDFVELKDADDFYDMIYYEHEEYLISNGLLNEKEDITDLEEPF

SEQ ID NO: 2917 - protein, 371 aa, unidentified
  source 1..371: note = Related to RAYQ01000024.1; note = bacterium 0.1xD8-82
MKQYSNKVIIDSLHLPMLTCFEDIVREVRLSGKLVYWVTKKDAEGKYKTFYIDKKDGTKREINAPSLSVKIFQKWILENILYRISASQYSYGFERGRRKGSPLVHCAEMHKNSLYVLKMDLKNFYPSIKQERVFFEFRNKGYNDEVSSLLTNACVRDDKLPQGAVTSAYLANLICRKLDARIAGYCNKRNIVYTRYADDLTFSCDDRDLLKRIFGTIKKIVENEGFLLNENKTIFMTPKGHKKVLGVTINDNLIKAPKELKRIIRAVLHYEVSTGDYSMNDKVRGYIAYIDSIENNYKNKCISYLIKLSQSTLSLFPDIVEAYNNNKIFKELPDMEEKNPIDFVDLEDVNDFSDMIYWEHEEYLISHGINK

SEQ ID NO: 2918 - protein, 370 aa, unidentified
  source 1..370: note = Related to JACOPD010000001.1; note = Lachnospira sp.
MKKYNNKMVIESLGLPMFEDIETLAEETRLTEKLVFFITKEDAKGRYKKFYIPKKDGTSREINSPCMSLKVIQRWVLENILYKVRVSQYSIGFVKNGKGSPLVQCAERHKNNLYILKMDLKNFFPSVERGRVYNQFLQLGYNTYASNLLTNICTLNGSLPQGAVTSPYLANLVCYKMDIRIAGYCNKRDITYTRYADDLIFSSDNRDLLRKIYGMIKKIVEDEGFVVNEEKTRFLSPKVHKEVIGVTVNDGVIKAPKEMKRMVRAMIHYEIVTGDYSDNEKIRGYIAYIDSLERNYRNKIIKYIEKYLDDTITLFPELVEKFNQNKLYNQIPDMKQHDISRFVNFEDEADYYSMVVNEREDYLSRHGIAI

SEQ ID NO: 2919 - protein, 354 aa, unidentified
  source 1..354: note = Related to JAFQRZ010000003.1; note = Agathobacter sp.
MFEDIETLAEETRLTEKLIYFLCKEDAEGRYVSFKIPKKDGRYRDINAPCMALKTLQKWVLQNILYKVRVSPYSIGFKKDGKGSPLLQSAERHKNNLYILKMDLKDFFPSVKREQVFNQFLQLGYNTYASNMLTNICTLNGCLPQGAVTSPYLANLVCYKMDVRIAGYCNKRDIIYTRYADDLIFSCDNRDGLRNIYGMIKKIVENEGFCLNEKKTRFLTPKSHKKIVGVTVNDGLVKAPKEMKKMVRAMLHYSIVSGDYSNNDRIRGYVSYIDSIEKNYRKKIVKYITNYINDSITLFPDAVKKFNDNKLFNEIPDMVPKKISDFVDYEEEDDYFQMITYEREEFLTKHGIEV

SEQ ID NO: 2920 - protein, 308 aa, unidentified
  source 1..308: note = Related to JADJOK010000004.1; note = Veillonella sp.
MQNILYKVRVSQYSIGFIKNGKGSPLVLCAERHKNNLYILKMDLKDFYPSICRAKVYNQFLQLGYNTYAANLITNICILDGKFSQGAVTSPYLASLVCYKMDTNWQDIVIKRDIVYTRYADDLTFSCDNRDELHKIYGMIKKIVEDEGFTLNQKKTQFLTPKGHKKVVGVTINDGMLKASKDLKRSVRAMIHYQIITGDYTKNEQIRGYIAYIDSIEKNYKKKIIKYVTGYCQDTITLFSDAVKAFNANKLFKEIPDMVQKDISSFAKWEEDQSDYMEMVMYERESYLAKHGLIESDIEDESNLEMFE

SEQ ID NO: 2921 - protein, 369 aa, unidentified
  source 1..369: note = Related to JAFUIR010000009.1; note = Lachnospiraceae bacterium
MKKYTNQNLITSLNLPFVTDIHSLSMQLRLSEKLVYFLTNERTYKKYRIFRIPKKDGTFRTISAPIASLKIVQRWVLENILYKIKVSDYSYGFSRNRKGSPLAACAEKHRNNLFMLKMDLKNFYPSIQRDQVFFQFLNIGYNTYAANLLTNICYNQDGLPQGAVTSPYLANMICYKMDVRIASYCNKRDITYTRYADDLAFSSDNRDSLRNIYGMIKKIVEDEGFSVNDEKTCFMTPKNHKVLLGVTINDANIKAPRQMKKMVRSMIHRAVITGDYSLKNVICGYVSYIDSIEKGYKDKIKKYIHKYYEDPITLFKDAVDAYNKNKFYEDMPDMKNRNIDFFLDGDEWDEDEVLTAFYEEREAFLITHK

SEQ ID NO: 2922 - protein, 337 aa, unidentified
  source 1..337: note = Related to FRDH01000006.1; note = Butyrivibrio hungatei
MIDKTNKLILDSIGIPYFWDINSFAQKVRYTNKLLFFLSNYKAVERYNIFYLTKKNGKMRKIMAPSFSLLMLQRWILHNTLYKIRVSEYSYGFVKSNSDSESPLVEVAGAHKNHKYILKIDIKDFYPSISRARVFFLFKNLGYNFCCANMLANICTNNNELPQGAATSARLANILCTRLDARISGYCNKRDITYTRYADDLIFSCDNRNVLHHIYKMINTIIQDEGFEINQSKTRFLSPKNHKVVLGVTINDGYCKADRKLKRKVRAMIHSSIVNGNYSERAIIQGYIAYFSSIEKDYTEKIKRYINKFYGTLPKDKAIAYNNNKFLNKMPDMSTQS

SEQ ID NO: 2923 - protein, 375 aa, unidentified
  source 1..375: note = Related to QUES01000001.1; note = Eisenbergiella sp.
MFMINQTNISLLKLRSLPIFNDLSSMSRVTGFSEQLLYYYAISDDAKKYTIFEIPKKDSCNTRKIYAPNYALKILQRWILENILYKIECSEYAFAFKRDMGSPLKKNALVHKEHVFLLEMDLENFFHSIKRQRIVYLFSNLGYNVPISNWLANICTYEDILPQGSVTAPYLSNLVCLQLDKRIAKYCSKRDIVYSRYADDITFSCSNKAVIKSIYGTIKKIIESEHFTINQKKTRFIGKSSRKSVTGVIIDNDCIKAPKEYKRLVRCLIHRAIISGDYSNINRIRGYIAYISSIEDDYMQKVVKYINTFKTKRDVIFLDSTVEMFNANIFLPGVDQISQIRMTMEEEDNFGDYVTERLEFLKKRHMKVPPELGKL

SEQ ID NO: 2924 - protein, 342 aa, unidentified
  source 1..342: note = Related to NZ_UFVT01000001.1; note = Blautia coccoides
MNIGNNVVLNTLGVPVINSFEHLCEQLSITEQLLYYLTYRKEHCYYETEIPKKNGKTRILHVPNLSLKVVQKWILTEILEKIFVSEQTMAFVPHKNGLRENAERHKKNIFLLEMDITNFFGTITEEQVYSLFCNIGYGSKVAGILANLCTYDNYLPQGAVTSPYIANLVCYHMDSRINGYCSRKDIVYTRYADDLTFSSNNRMLLNKVERFIKYIVVDEGFTINEKKTRYFSNDVKKTVTGITINDDDIHVDKNFKRNLRAQIYNSIKTRSYDNNSQILGKIAYVNSIEDGFRDKMEKYISSIIIRSEFVQDLDIVNAFNANKLFAKLPDMVFMNEDKNPFI

SEQ ID NO: 2925 - protein, 342 aa, unidentified
  source 1..342: note = Related to JACOPE010000001.1; note = Ruminococcus sp.
MNIGNSVVLNTLGVPVINSFEHLCEQLSVTEQLLYFLTYKKKYCYFEKKIPKKDKTERTLNVPSLSLKVVQRWILKEILEKIYVSEQAMAFIPHKNGLRENAERHKKNIFLLEMDITNFFGTITEQQVYRLFCNIGYNSKVAGVLANLCTYDGYLPQGAVTSPYIANLVCYHMDARINGYCSRKDIVYTRYADDLTFSSNNRTLLNKVEKFIKYIVADEGFKINDKKTRYLSNDVKKTVTGITVNDDSIHVDKKFKKDLRAQIYRSIKLKDYQNNSQILGKIAYVNSIEEGYRDKIFKYITDVITKPEFTGHIDIVNAFNDNKFFPDLPDMMFKEVWESPFD

SEQ ID NO: 2926 - protein, 342 aa, unidentified
  source 1..342: note = Related to JAJBQL010000016.1; note = Mediterraneibacter faecis
MNIGNSVVLNTLGVPVINSFEHLCEQLSVTEQLLYFLTYKKKYCYFEKKIPKKDKTERTLNVPSLSLKVVQRWILKEILEKIYVSKQAMAFIPHKNGLRENAERHKKNIFLLEMDITNFFGTITEQQVYRLFCNIGYNSKVAGILANLCTYDGYLPQGAVTSPYIANLICYHMDARINGYCSRKDIVYTRYADDLTFSSSNRTLLNKVEKFIKYIVTDEGFTINDKKTRYLSNDVKKTVTGITINDDSIHVDKKFKRDLRAQIYRSIKLKDYQNNSQILGKIAYVNSIEEGYRDKIFKYITDVITKPEFTGHIDIVNAFNDNKFFPNLPDMMFKEVWESPFD

SEQ ID NO: 2927 - protein, 339 aa, unidentified
  source 1..339: note = Related to MCGH01000001.1; note = Eisenbergiella tayi
MNLSNNVILNTLNVPIINGFTHLAEQLSLTQGLLYFLTYKKDYCYTLKEIPKKDGTFRKICVPNLSLKVVQKWILVEILEKIDVSPQAMAFVPKNNGLKSNAEYHKKNIFLLEMDIKNFFGTIKEGQVFKLFCNIGYNTKVSTILTSLCTFDGELPQGAVTSPYLANLILYHLDIRLNGLCSRKDIVYTRYADDLSFSSNDRAKLNGIENFVKNIVSDEGFEINEKKTRYLSNDVKKSITGITINNEEIHVDKKLKRDIRALIFSSIASKNYALNDKIRGSIAYVNSIEPGYQEKMINYIERIINKDELKNDLGVVKTFNENKLYKVLPDMKYEESPFI

SEQ ID NO: 2928 - protein, 339 aa, unidentified
  source 1..339: note = Related to FMFO01000004.1; note = Roseburia sp.
MNMSNNVILNTLNVPIINDFKHLAEQLSLTQELLHFLTYKKQYCYTQKEIPKKDGTSRTLYVPHLALKVVQRWILKEILEKINVSYQAMAFVPKRNGLRVNAEYHKKNIFILEMDIKKFFGSIQKKQVFQLFCKIGYNTDVSAVLANLCIYEDVLPQGAVTSPYIANLVTYHLDVRLNGLCSRKDIVYTRYADDLSFSSNNRTKLNSIEKIVKYIVKEEGFEINEKKTRYLSNDVKKTITGITINNEEVHVDKALKKKIRAMIFNSIVNKDYTRNDKIKGSIAYVDSIEMGYKEKILNYIIQITEKGQFKNNIDIVNAYNKNKFFKSLPYMQYEESPFY

SEQ ID NO: 2929 - protein, 334 aa, unidentified
  source 1..334: note = Related to QXXC01000007.1; note = Clostridiaceae bacterium
MNTNSNLILNTLGVPIIYDLESLSERLSITKTFLYMLSRKQHLFYETAEIPKKDGSTRKIHAPVLSLKVVQKWILVEILEKVRVSPYAMAFVPGKNGLKENAMLHKDRLFILEMDIHDFFGSITQKDVFQLFTKIGYNYTISAILANLCTYEEVLPQGAVTSPYIANLICYNLDMRLSALCNKRDIVYTRYADDLSFSSDNRTRLNRIERLLREIVQDEGFEINDRKTRYFSNDRKKTVTGITINDREIHADRKLKQRIRSKIFHAVSEADYSEAAQIRGLIAFVDSIEDGYRDQMACYLEGLALKESLRRSAKVVKAYNNNKLFQDLEDMMPL

SEQ ID NO: 2930 - protein, 304 aa, unidentified
  source 1..304: note = Related to FR902276.1; note = Clostridium sp.
MKNIKDFAKELSLDVKTIEKLTRDNFNYYHFTIPKGNGEKRLITAPKGKLKVIQKWILVNCLEKFAVAECATAFIKGKHGIRVNAESHQYNKYILEFDLKDFFPNISFWDVQNLFLRMNLSQKLSILFAKLCTYDGYLPQGAITSPYISNLICYDLDLKLLELCDYYDITYTRYADDLTFSSDELYLLLSLMQEISSIIHYYGFKVNYNKTKVLLPSNKQTITGITVNNGEIKVDKKLKRMVRAKLYYGIKNNDIKDFDILLGFISYICSIEIDYKSKMISYVQYLLNKFGRHDNWGLLKILNK

SEQ ID NO: 2931 - protein, 304 aa, unidentified
  source 1..304: note = Related to HF987425.1; note = Clostridium sp.
MKNIKDFAKELSLDVKTIEKLTRDNFNYYHFTIPKRNGEKRLITAPKGKLKVIQKWILVNYLERYAIAECATAFIKGEHGIRVNAEAHLNNKYILEFDLKDFFPNIKFWAVRDLFLRMNLTRKISLLFAKLCTYNKRLPQGAITSPYISNLICYDLDLELLELCNNYDITYTRYADDLTFSSNSLYLLFSLMKEISDIIRSHGFKINYEKTKILYPSAKQTITGITINNGTIKADKKLKRMIRTKLYYGVKNNNITELTKLIGYIAYVNSIESDYKLRLYDYFSSLLQKFSKEDSWGLLKILNK

SEQ ID NO: 2932 - protein, 333 aa, Acinetobacter sp.
  source 1..333: note = Related to MNTZ01000028.1
MVNFFYNSDKLQEYLQLPQIYTLDDLAYFLLFTKEQLHDFSYRKNEHYVTFLIPKKNSTEKRVINAPKKRLKMAQKLILKEILEKVPCSSASAAFIKKENGLLKNALTHKENLFLLKMDFKNFFQNINEAKIIQIFENLGYSPYIALQLAKLCTFSKKLPQGGICSPYLSNLACYEFDKDISSYCDEKNIAYTRYADDLLFSANDIDLLKNLKNDIYSYTKKHSVAGLNIQINHKKTKLIKNTSHKKVTGITINDQKIKASKKLKNTIRQNIRYNLIHNQFDNKLIGKIAFVISIEDKEYKNRIFKYCKRIENKFKLNKKENQLLKVLYKMTK

SEQ ID NO: 2933 - protein, 326 aa, unidentified
  source 1..326: note = Related to DMXX01000019.1; note = Cyanobacteria bacterium UBA10660
MNKIELLKLPKIENLKDLNHLLLFTEKQLNDFVRLKSEQYVSFKIPKKNSIEKRIINAPKKYLKLAQKIILNEILEKVPCSNAATAFIKNKNGLFENANMHKDNLYLLKFDFCNFFQSIKFERIRLLFIELGYNPKISKILAELCTYCKELPQGGICSPCLSNLICLELDNDLLEYCEGNDIKYTRYADDLFFSSNNKEVLLKLKEDIETLILKHRTEFFDIKINRQKTKFITEPWHKKVTGITINNNKIKTSKTLKRDIRRELYFTIIKNKTDYNKLIGQIAFVISIEKDYAEKIKKYALSICEKNNIHEHKIIQILDKMVKSQV

SEQ ID NO: 2934 - protein, 337 aa, unidentified
  source 1..337: note = Related to BMDT01000015.1; note = Enterococcus alcedinis
MNNVNSRPFLLGINGLPVMTNISDISRQIGISSRRIYEYTNYTSSFYHTFEIPKTDKSIRIINAPFSGLKMVQRWILETILYKIKVDTPSYGFLKGKKSPTKQNAEIHSNNLYLFQTDIINFFTNVDFKRVYSIFLKIGYNKEVSLTLARLCCLDGYLPQGGVTSPYLSHLVCFRMDRRIMGLCQKREIVYSRYADDITLSSDNKNDLKKARVYLEQIISDEGFEINPRKTRYSFQKKLVTGLTIHNNKVLVPRILKRELRSKIYNTIVFNDYSSCEVILGYVSYINSIENGYINKVKDYIETLLNNKSIEPERLSIIRLNYKKSPLGSWMENVHTQ

SEQ ID NO: 2935 - protein, 301 aa, unidentified
  source 1..301: note = Related to JAEHOK010000008.1; note = Salegentibacter maritimus
MNRLDKLILEIGLSRNVIENYITFADKHYKSHYLPKKGGGKRTIDCPGKNLKTIQRWILKEFLNKLEVNKRANGFVKNRGIKRNALYHLKKKHILTVDIKDFFYSISQRQVFETLNANYNDRDFALKIAKICTYQRYLPQGAPTSPALSNLVFKPIDDEIMKYCNSELIHYSRYADDLTFSSDNKQSLQYAYRFINDLLYKNGFNLNSKKTRYLSGKGNMSVTGVNINTGKPKADPKLKKQVRAELHHYIIKEKEINLNKLAGKISFIRSIEEDYSQNLDFYIKRLYKKKAFIQKMASKTH

SEQ ID NO: 2936 - protein, 300 aa, unidentified
  source 1..300: note = Related to NZ_LGTQ01000015.1; note = Jiulongibacter sediminis
MKKFENFILEIGLTKSAIENYVTFSDASYNTFYIPKKKKGEKRVIDCPNANLKAIQRFFLKKYLNKVEVNKRVNGFVPKRGIKRNALFHMKNKYLLTIDIKDFFPSISQKKVFEVLYEIYYDKDFALKMAKLCTYKRSLPQGAPTSPALSNLVFKGIDDEIMKYCNSEMVNYSRYADDLTFSSDNKNSLQYVYKFVSHLLYTNGFNINKKKTRYLSGKGKMSITGVYINSGKPKVSSELKKQLRAELHQYIINGKEINLNQVSGYISFISSIEDDYLKKVESYIEKLKKKKTLMLTLKAE

SEQ ID NO: 2937 - protein, 345 aa, unidentified
  source 1..345: note = Related to NZ_CABVRK010000001.1; note = Aliarcobacter butzleri
MNSFRDTYLYNYKDTLDEIISKIKDFLLTETYKKIFKDEDKLQYINHFTFLDILSNTKKFYTKRIIYTNKKERIVFEPSVELYLIQKFILYNYLIQRDSSLSENLTSYRKNYSVKNNAIKHINKRTIIKIDIKNFFPTINRYRIYKCLLNLNIEEKKAYLFSRLLSYQDKLILGTPSSPFLSNLVSRKLDLRIEGYIKAYQKSKVHISYTRYSDDMTFSFNQRINTQKFISFIYQIILDEGFVPNYEKTQIISSNHKQKVTGIIVNRDTISVSKKERDDVEFIIKLWLNYSKDIALQKYNKIFKKNYTNERDFHQILKSKILYIKFINDEQGKKLIRKFEEIKIG

SEQ ID NO: 2938 - protein, 322 aa, unidentified
  source 1..322: note = Related to SAAG01000082.1; note = Candidatus Gracilibacteria bacterium
MHRLKYNYGSENNSLDLLNLFGFTNNELRFFSMSKKRRYKKIIIPKRDGSNRILHAPVYKLKNAQRIILKNILYKKHNDLLIDNITGFIPNKNIKNNANFHVGKKYILKVDIKDFFPSITQDRVYGLLRKEYNLDHSTSMYLSSLCTYNNQLPQGAPTSPMLANLIARFLDYRIIGLLKSYNLNEGLELSYSRYADDLTFSFNKRIDINLFINYVISILIEEGFYPNYKKIHMISSGKQQKVTGLVVNDKVSVGRRYYKKFKSIFYNISKNGFDDELKKWNNINSKKIESVEKFKQVIGGYISFIKDISPDYYEKLKQFNVL

SEQ ID NO: 2939 - protein, 321 aa, unidentified
  source 1..321: note = Related to NZ_CP047218.1; note = Sphingobium yanoikuyae
MAQRKKIPQIPAEQSHLYGIKSPHALANRLGWELDKLRDLAKSGGYRIYNHRKTGREIQEPGAALQSLHKQIHKYLARIQAPDYLHSAVKGKSYLSNAQAHVGDIPLIKIDIAKFYQSVPQHKVMHFFRDVMNCATDVAGLLANLICFRGALPTGSSVSPIISFYTYKFLFDDLADLAAGHGLTMTCYVDDITMSGPMASREVLHEARTMIFRAGLRAHKDRSFSPDGPKIVTGVAVSKHGIGLPFGRWQKIRNQIRELERCDDDNQKLAIYQQLISRLYEATQIDPRCRISAEYHHARFRELKRVLAQAASEPVPLKLAA

SEQ ID NO: 2940 - protein, 321 aa, unidentified
  source 1..321: note = Related to SDYH01000014.1; note = Alphaproteobacteria bacterium
MTQRKRNQPIPIEQSHLYGIKSPHALANRLGWELDKLRDLTKSGDYRVYNHKKTGREIQEPGAALQSLHRQIHKYLSRIETPDYLHSTVKGKSYISNAQAHIGEVSLIKIDIAKFYQSVSQHKVMHFFRDVMNCAPDVAGFLANLICFRGALPTGSSVSPIISFYTYKLLFDDLAVLADSHGLTMTCYIDDITMSGKLASRKILHEARRTIFRAGLRAHKDRSFSPNGPKIVTGVAVTTYGIALPFGRWQKIRNQIRELERCSDDNKKLVIYQQLISRLYEATQIDPRCRGSAEYYHAQFKELKRVLALVGHGPIALSMTA

SEQ ID NO: 2941 - protein, 316 aa, unidentified
  source 1..316: note = Related to NZ_JACIJI010000005.1; note = Stakelama sediminis
MSTKSPKEKALVRIPIERCHLYKIGSPHALAKRLGWDLNKLDDLAAYGGYKVYKHKYTGRTIEEPGAALQSLHRQLHRYLSRIEVPPYLHSAVKGRSYLSNARAHVGDGRIIKIDIAKFYQSVPQHRVMHFFRDRMKCAPDVSGLLAALICYDGHLATGSAISPLISFYAFESLFDDLANIACKYDLEITCYVDDITMSGKRASFKVLHEVRRTIFRAGLRAHKDHAFAYNSPGIVTGVVVTGQGISLPFERWKKIKNQIRLLEACEIRDDKLEIFPSLVSRLYEAAQIDPACRSKAEYYHAAWRKLKYEKMARAA

SEQ ID NO: 2942 - protein, 325 aa, unidentified
  source 1..325: note = Related to JACYUG010000012.1; note = Sphingomonas sp.
MPKAKRKSSQPIPIERCHLYGIRSPHALANRLGWDLNKLDQLAAYGGYKVYPHKQTGRMIQEPGEALQSLHRQIHHYLARVEAPAYLHSAVKGRSYVSNAQAHVGAGGLVKLDIAKFYQSVPQHKVMHFFRDVMHCAPDVAGLLANLICFHGKLATGSAASPIISYYTYKSLFDELKALADCRGLTMTCYVDDITMSGPGAGRAVLHEARILIHRAGLRAHKDCAFQPGAPRLVTGVIVGDMGIDLPFSRWRKISEAVREVERCVDPVQRLEKYPKLVSRLYEAAQINSRCMTRARYHHERWRALKRSLQAAPLNAGGGQPVIAA

SEQ ID NO: 2943 - protein, 323 aa, unidentified
  source 1..323: note = Related to NZ_CP050137.1; note = Sphingomonas sp.
MSQGKQAKQPRIPIDRCHLYGIRSPHALAKRLGWELNKLDSLAAYGGYRVYNHKDTGREIQEPGAALQSLHRQLHRYLARIEVPVYLHSAVKGRSYLSNARAHVGDGKLLKIDIAKFYQSVPQHKVMHFFRDVLSCAPDVAGLLANLICYRGVLATGSSISPIISYYAYKSLFDGLAGLAAQHGLVMTCYVDDITMSGPGASRAVLHEARSAIFKAGLRAHKDRSFTGDTVKIVTGVVVGPDGIALPFSRWQKISHAAREIAACSDDAEKLRLYPKLVSRLYEAAQIDSRCRSRAEFHHCQWRDLKRRIAAGALIAAAVDKAA

SEQ ID NO: 2944 - protein, 323 aa, unidentified
  source 1..323: note = Related to FNWK01000001.1; note = Sphingopyxis sp.
MSTNRRRTDQRIPIDRCHLYGIRSPHALAKRLGWDLNKLDGLAAYGSYRVFQHKETGRLIQEPGPALQSLHRQLHRYLSRVQMPEYLHSAAKGRSYLTNARSHVGAGALIKVDIAKFYQSVPQHKVMHFFRDEMRCAEDVAGLLANLICFEGKLATGSAISPIISYYSYKNLFDSLANLANKHGLVMTCYVDDITMSGPNASNLVLHEARTMIFRAGLRAHKDRRFPSSAPKVVTGVVVTDQGVELPFSRWQKIRAQIREIEGLGNAADKLRLYPRLVSRLYEAAQIDSQCRARAEYYHAQWRQAKRQVAIGSMADGTEAVAA

SEQ ID NO: 2945 - protein, 320 aa, unidentified
  source 1..320: note = Related to JAERLA010000016.1; note = Acetobacter thailandicus
MSKARKKKLPQIPLNQCHLFRILSIHALAKRIGWELDTLNKIAKDGSYRIFKHRETGRQIQEPGPLLQNLHRQLHRYLSRVQTPEYLHSAVKGRSYLTNARAHIGCDNLIKIDIAKFYQSVSQHKVMHFFRDTMQCAPDVAGLLANLICFNGMLATGSSISPIISYFSYKKLFDDIHNIALRENLVMTCYVDDITLSGKNASGKTLHKVRTTIFQYGLRAHKDSQFSEGNPKLVTGVIVGKEDIALPFSRWKKIHLQIREIEGCSDIEQKLRLYPKLLSRLHEAMQIDPKCTALAKKHLTDFRLLKRRGVVKTLPLPRAA

SEQ ID NO: 2946 - protein, 313 aa, unidentified
  source 1..313: note = Related to QRDP01000004.1; note = Parasphingopyxis lamellibrachiae
MKTAKKHRPLIPLDRCHLYRIGSPKVLAKRIGWKLDTLEDLSMNAKYRVFRLKRSGRQVEEPPPPLQSLHRQIHGYLSRIETPNYLHSNRKGRSYISNAKPHVGALAMIKIDVKKFFPSVEQHKVMHFFRDDLKCAADVAGLLAALLCKDGKLPTGSSSSPIISYYAYKAMFDDIQSFAAKNHLVMTCYVDDITLSGANATLRQLHEVRKIIMRHGLRAHKAKWFMGLGAKPVTGVMVTKNGIELPHSRWKAIKADLKAIKQCANREEKLEIYPKLVSRLYEASQIDPGCRKLADIHHRLWKEALAGDVQLAA

SEQ ID NO: 2947 - protein, 313 aa, unidentified
  source 1..313: note = Related to NZ_LMAF01000001.1; note = Erythrobacter sp.
MSKTKNKTIVPIPLERSHLFRVRSIHLLAKKLGFTVDGLERLANDAKYRIFNLKESGRLVEEPPPVLQALHRRIHRYLAKIEVPEYLHSAVKGRSYITNAKAHVGVGPMVKIDVKKFFPSVPQHRVMQFFRDTMLCAADVAGLLANLLCRNGRLPTGSSASPIISYYSFKAMFDEIEGLCVANQLTMTCYVDDITISGAGANRALLHDVRQIITRNGLASHKAKFFDQSRPKEVTGVIVKGNGIDLPHSRWKAIKESIREVKKAGSDEERLALYPALISRLHEASQIDPSCRPIALHHNQKWRELRRAVVAHS

SEQ ID NO: 2948 - protein, 320 aa, unidentified
  source 1..320: note = Related to JACIHD010000001.1; note = Bradyrhizobium sp.
MTRKKARRDLEPEQCWLYAISSPADLAHRLSTPRHKLKASDLSPLARDTGNYRLFQIEDGNGKSRAIQWPKRRLQTLHARVHTLLSRVAVPAYLYSAVRGKSYVDNASAHNPLVPTIKIDVKKFFPSVSRAVIFDFFFQRMRCRRDVAGLLADILTFDAHLPTGGAASPIIAYYSFKPMFDEIHKFALSQGLIMTCYVDDLTLSGVRASKNTLHEIGKIISRSGLKSHKARAFAASQPKVITGVCNTKSGRRVPNKLHLKIKKGFDDLTAAKTPLEINRIAQPLLGRLRAAGQIDPKFRARADTVSANIAASSVQTKTSP

SEQ ID NO: 2949 - protein, 330 aa, unidentified
  source 1..330: note = Related to LT629750.1; note = Bradyrhizobium canariense
MTSCELVDPMRKKPRTDLPLSDCWLSAIDSPSTLARRLSTPGHKLCVDDLSSFARDTGNYRLFPIFNEKGKARPIQWPKRRLQGVHARIHKLLSRVAVPKYLHSAVRGKSYISNAAAHDPKMPTIKIDVKKFFPSVSRVVIFNFFAGPLKCRRDVAGLLADILTFDAHLPTGSAASPIIAYYSFKPMFDEIAQFAESLGLTMTCYVDDMALSGPRANKGVLYAIRGIIARHGLKSHKAHTFSGLQPKVVTGVCNTAAGPRVPNKLHLKIKNGFDALAKAQNAVEEGKILRPLLGRMEAAAQIDPAFKARAKTVRAKYSRPKDVGGLEKIE

SEQ ID NO: 2950 - protein, 321 aa, unidentified
  source 1..321: note = Related to nan
MLEISDCWLSAIPSPAILAARLSTDANKLTVATLQELTKDDGNFRVFPLVGNNGKVRIIQEPKRQLQRIHSRVHTLLSRVMAPDYLYSAVKGRSYVGNAQAHDPNHPTVKVDIKNFFPSIPRVAVYNFFHRQLKCRVDVAGILADLLTYDGHLATGSAASPILAYYSYEALFDEVHEFAKARGLKMTCYVDDMALSGPGADKSTLYEVKKIIARHGLRSHKAHAFSSAQPKVITGVCNTVSGPRVPNRLHLKIKNGFDALASASTQSEKLKALNPLIGRLEAAAQIEPIYKARVATLRADYADVLLTARRPVCAEPACVVG

SEQ ID NO: 2951 - protein, 309 aa, unidentified
  source 1..309: note = Related to JAHLJF010000013.1; note = Methylosinus sp.
MNKRRTNLKLSDCWLYALASPTDLARRLQTAKHPIKVAELSMLAKDAGNFRLFSQTNAAGKSRQIQEPKRRLQWVHGRIHALLSRVEVPGYLHSAVRGRSYISNAAAHDPSMPTFKVDVKKFFASVPRSAIFNFFVGPMKCRRDVARLLADILTFDAHLPTGSAASPILAFYAFKPMFDEIEQFALAHGLTMTCYVDDMALSGPRANKSTLFEVRKIIARHGLKSHKAHVFGANQPKVLTGVCNTPTGPRVPNKLHMKIKAGFDKLLAATTPDTRSEALRPLLGRLEAAGQIDPGFRARALTVRAAYSK

SEQ ID NO: 2952 - protein, 322 aa, unidentified
  source 1..322: note = Related to NZ_LCZM01000200.1; note = Rhodopseudomonas palustris
MTIAGPVKLRRRKRARLDLKLSECGLYALASPAHLAGILSTPGCKFSVEELQGLSRDEGNFRLFDLVSDGGKARRIEWPKRRLQQVQRRIHVLLSRVEVPDYLHSAVRGKSYLTNAAVHSAEMPTVKLDVKKFFVSVPRVAVFNFFATTMKCRPDVAGLLSDLLTFDAHLPTGGAASPIMAYYAFKSLFDEIYAFASSQNVTMTCYVDDMTFSGGAVGKRFLYEVRRIVARHGLKSHKSRMFDARQPKVVTGVCNTTDGARVPNKLHAKIKDGFDKLSKADGSAQKAKILPPLLGRLEAAGQIDPRFKARAVTLRAAHQSGR

SEQ ID NO: 2953 - protein, 322 aa, unidentified
  source 1..322: note = Related to NZ_JAHBGD010000028.1; note = Ancylobacter defluvii
MAPKNKASLRIEDCWLFAVASKEDLARRLSTDRQKISVSDLERLSADAGNYRLFSIRQGTKERPVQEPKRELQQIHARIHRLLSRVVVPEYLHSAVKGKSYLTNAREHGHGISIIKIDVKKFFPSVPRFRVFTFFKIVMKCRKDVSGLLADLITFDQRLPTGSSASPIIAYYAFKPMFDEISRFAESAGLKMSCYVDDMTFSGSNANRFNLYEIHKIISKYGLKSHKMKYFVDQEPKIITGVCNTPSGERVPNKLHLKISIGFEELRAAKSHTSAVKLLRPLLGRLDAAGQIDPRFRARALTLRSTFKTKSRISNGAIKGRV

SEQ ID NO: 2954 - protein, 310 aa, unidentified
  source 1..310: note = Related to NZ_JACHIJ010000007.1; note = Afipia massiliensis
MRKRRNDLRLDECFLFAIESPRDLARRLSTKSMQFSEADLLGLSAGIIGNYKLFKIDGRPIQEPKRRLQAVHLRVHRLLSKVAVPEYLHSAVRGRSYISNAAAHARDEPVIKIDIKKFFASVPHAAILRFLRTSLRCRSDVAKLLANLLTFEGKIPTGSSASPILAYYAFKPMFDEISALATSLGLTFTCYVDDMTFSGRAATNSTLMQIRTIVARYGLKSHKVRKFSANDPKVITGVCVASEGDRIPNKLHRKIAADFKSLEVGDEGMQREKTLSSLLGRLQAAGRINPVFKARASTLRASASRRRQSI

SEQ ID NO: 2955 - protein, 310 aa, unidentified
  source 1..310: note = Related to NZ_LVYV01000034.1; note = Tardiphaga robiniae
MKKIRRDLRLNECFLYAIDSPADLAWRLSSKAMKLDAKDIDFLVRGSANYKFFKIKDRPIQEPKARLQAVHLRVHRLLSRVAVPAYLHSAVKGKSYLSNALAHDASQPLIKVDIKKFFASVPEDAVVRFLRSDCKCRSDVARLFASMLVCNGKIATGSSASPILAYYAFKSMFDQIATLAGEHGLTFTCYVDDMTLSGPTATNAMVIKVRAIIAKFGLKSHKVRRFNASSPKVVTGVCIMPDGIRVPQKLHLAISRNFQERSTETDTKKREKITASLQGRLDAAGRIDAKFKSRADTFRASTKKAQPSVP

SEQ ID NO: 2956 - protein, 319 aa, unidentified
  source 1..319: note = Related to JADFZH010000009.1; note = Magnetococcales bacterium
MKRYALDQSPFFKLKSRQKLSKILDADLNELEVFARNDPVDNYKLFETSGGKPRPVQCPKHRLQVIHRRVCDLLARIDTPDYLHSAIKGHSYLSNAKAHAANVPMVKVDIKKFFPSVTINAVKRFFLKTMECSPDVAALLSKVLTVYGHLATGSSVSPILSYYAHRDMFEEIAHLSAGRGAVMTCYVDDMCFSGETVTRKFLSDVRVIIRSHGLKSHKIHYFSSNMPRIVTGVVVTNSGIKLPNIRHKKIVDGYAQLQAALSDEEKLKLLPSLIGRINEAAQIDPRWTPKAKQLTLEMKRISSIAASSMNPSSRPSSWA

SEQ ID NO: 2957 - protein, 312 aa, unidentified
  source 1..312: note = Related to JADGBZ010000028.1; note = Magnetococcales bacterium
MNRHPLNQSPFFKLRSRKKLANILGLGLKDLEVFAQNEADENYRLFEIRRGGKARPIQWPIPCLQRIHKRVCDLLARIETPNYLHSAIKGRSYLSNAKAHSGDTALVKVDIRKFFPSVTVQSVKSFFLKTMGCSPDVAAVLSKVLTVYGHLPTGSSVSPILSFYAHLDMFGEIEQLARKRGAVMTCYVDDMCFSGRSVTRKFLYEVRLIIHRHGLKTHKIHCFAPGVPRIVTGVVVTGDGMKLPNKRHQAIAEDFAKFQSSLDEKQKLKIFQSLLGRVNEASQIEPRWKNKATSLCQEVNKMLYCGRQNDGC

SEQ ID NO: 2958 - protein, 301 aa, unidentified
  source 1..301: note = Related to NZ_VEWK01000024.1; note = Brucella pecoris
MALHALNQSQLYKVMSPADLARRLGILAEDLEELANRTDNYKRFKVGAQKKRHVQEPKDRLKQAHNKVTRWLSRIETPDYLHSAVRGRSYITNAAVHSADSNLVKVDIRSFFQNVTTHAVYLFFAKTMKCRGDVAMLLAKLLTVDGHLPTGSSVSPILSYFAHKPMFDEIAKLASHVDLRFTVYVDDVCLSGEKASRSVLFQVRGIIAKHGLKSHKCHFFPTGVPRVVTGNALTLGGVRLPHVRHLKIKKAFDELDKMAEGPAREKALKALKSRLYEAAQLEPVWGARARSLFGRKAQVTS

SEQ ID NO: 2959 - protein, 316 aa, unidentified
  source 1..316: note = Related to NC_011420.2; note = Rhodospirillum centenum
MKNYPIDQSPLYKLHSKRKLENILCTNLDIEKMANYEGKNFKFFYITQGNKKRKVESPIPEIQELHRKIARLLCRIDPPDYLYSATKKRSYLSNAQRHIGRHALIKVDISKFFPSVSRLKVYNFFRFKMKCSPDVSAIIAKLLTVDGHLATGSSASPILSYYANIDMFEELYLLAKNRSATMTCYIDDVCFSGEHVSKKLLYEVQKIIRRHGYVNHKQKARYYSPGEVKLITGVAVTSLGVRLPLRRHRAIRDGYTHIFTAKTDSDRLTQLEKQVGRLFEASQIDPSFKDKAKRASQARANLKRRLLSKAFHPSSP

SEQ ID NO: 2960 - protein, 306 aa, unidentified
  source 1..306: note = Related to NZ_WTYG01000004.1; note = Qipengyuania citrea
MNTHKRVPLKGSALFRLTSPRRLAEMLLVPRATLERLVEAGDDNYLVRPDRKSGRIIEEPKPQLKLIHQRFARLLAQIETPDYLHSGVKGRSYITNANAHGADDACVKLDIKKFFPSSSSHHVQRFFEDVLEYPPDVASRAKQLLTHDGHLPTGGNASPILSFWAYKPMFDEIDTLARENDCEFTLYVDDMSITGVFANRKFQQAARKIIARYGLRAHKAKTFSPNQPRVLTGIAKTRRGREVPHRRAKGIAQLEQQEAEAETTADKLRVMPSLIGKLSEAAIVDPSWTARKNAAVQRRRKMKASG

SEQ ID NO: 2961 - protein, 312 aa, unidentified
  source 1..312: note = Related to QFPK01000008.1; note = Sphingomonas sp.
MSMSKHKRIALKGSALFRLTSPRRLAEVLLLSRSALERLIVAGDTNYIVRFDQKSGRIIEEPKPQLKLIQKRFARLLSQIETPNYLHSGVKGRSYITNADAHEANQSCVKLDIKKFFPSSNSHHVQRFFEDVLEYPPDVAARAKQLLTYGGHLPTGGNASTILSFWVYKPMFDEIEALSRQHNCKFTLYVDDISITGLFANRRCQQAVRKIVSRYGLRTHKTKAFSAGQPRVLTGVAKTRRGRELPHRRAKGIAELEQLETATDSTAKKMKLLSTLIGKLSEATIIDPLWAGRKEAAVKRRRKLKQEDRIKR

SEQ ID NO: 2962 - protein, 313 aa, unidentified
  source 1..313: note = Related to CP031357.1; note = Erythrobacter sp.
MSTHKRVPLKASALFRLTSPRRLANILMVTPTALERLVRWGDENYLVRPLAQVEGKAPRMIEEPKPQLKLIHQRFARLLAQIETPDYLHSGVKGRSYITNANAHTADKACIKLDIKKFFPSSSSHYVQRFFEDVLEYPPDVAARAKQLLTYDGHLPTGGNASTIMSFWAYKPMFDEIAALAVELGCEFTVYVDDMSITGVFANRKCQQAARKIIARYGLKAHKANSFSPGQPRVLTGIAKTRRGREVPHRRAKGIAELEQVEAAASTVEDKMKVLPSLIGKLSEAAIVDPSWTGRKDAAVHRRRRLKVGAGAE

SEQ ID NO: 2963 - protein, 308 aa, unidentified
  source 1..308: note = Related to NZ_CP009122.1; note = Sphingopyxis fribergensis
MSTHKRVPLRGSAVFKLTSPRRLAEMLLIPRSTLERLLDFGDSNYLVRHDRKSNRTIEEPKPQLKLVQQRFARLLAQIETPDYLHSGVKGRSYITNANQHGAEQACIKLDVQKFFPSSSSHYVQRFFEETLEYPADVASRARRLLTYDGHLPTGGNASTILSFWAYKPMFDEIDAAAKRLGCEFTLYVDDMSITGKFANRELQREAAKIVALYGLRTHKLKNFSPGQPRVLTGVAKTKRGREVPHRRAKGIADLEQEEASATTAVEKLRLLPSLIGKLSEAAVVDSSWSGRKNAMVLHRRRLKAGISR

SEQ ID NO: 2964 - protein, 321 aa, unidentified
  source 1..321: note = Related to NZ_CP082839.1; note = Sphingomonas sp.
MARRCAKRVSLRGSALFKLTSPARLAHILCISPGQLAYLVRNAEANYLVRTDRKTGRLIEEPKALLKQVHARVAKLLQQIETPDYLHSGVRQRSYVTNASQHGAKDSAVKLDIKKFFPSVRAAAVYSFFHELMEYPADVASRMTRLLTIGGHLPTGGNASCILSFWAYKPMFDEIAELAVAKSCAFTLYVDDMTISGRFASRSMQQAARQIVGRHRLRAHKNKVFVPNQPRVVTGVAVTVRGLELPNRRAKAIDDATQVVTHTADGSAKLALLPVLIGRVSEAAEIDPAWNGRKTAAVNLRRTLTGRIATASRPGGGEPPA

SEQ ID NO: 2965 - protein, 312 aa, unidentified
  source 1..312: note = Related to NZ_LARW01000108.1; note = Sphingomonas sp.
MKGKPHKRVSLRGSALFKLTSPVRLAQILCIPPAQLDRLLRRGNTNYCVRTDRKTERLIEEPKALLKQVHARVAHLLAQVETPAYLHSGIKKHSYITNAAEHRVEGGAVKLDVQKFFPSVRAAAVCHFFADVMEYPMDVASRMTKLLTINGHLPTGGNASCILSFWAYKNMFDEIAALAAAKGCTFTLYVDDMTITGQFATRAMQKEARAIIGRYRLKAHKTKIFSHRQPRIVTGVAITARGPELPNRRARKIAITMAGVEAAATDSQRLALMPSLIGRVSEAVEVDPLWAGRKAAAVGMRRTIRSRVEKSR

SEQ ID NO: 2966 - protein, 303 aa, unidentified
  source 1..303: note = Related to NZ_VMDU01000019.1; note = Rhodobacter flagellatus
MSHDRNQSILYKVTSPQMLADRLLISRGELHALLANADPYKRWIDKKSGRAIQEPRPKLAKVHRRIATLLTRIDTPAYLHSAKKGRSYISNAAAHSVDDGCVKIDVRRFYPSARAQAVYHLFLDRMACDGDVAGMLAKLLTVDGHLPTGSSASPILSYFAYEDLFHELAVLAEASGCKMTVYVDDIVFTGAGATRRLLFEARKAIGKRHLHGHKTKLFRPGQPRIVTGVAVTNNGLRLPNRRQVRIAEDQKLFDDLPLGREKLIVARRLTGRLFEASQIDAGWRVRAEAMAALRDDIQRKIGR

SEQ ID NO: 2967 - protein, 302 aa, unidentified
  source 1..302: note = Related to NZ_FOJU01000001.1; note = Poseidonocella pacifica
MSYPRNQSIFYKITSPQMLADRLRVTLDELNELCAASDNYKRWTDKKTGRPIQEPKPKLDKIHKRVAALLAKMETPDYLHSAIKGKSYITNASGHSVGTGCVKIDVRKFYPSVRSQAVHHFFLDRMLCTGDVAGILTKLLTVDGHLPTGSSSSPILSYFAYEDMFEALAALAKANGCIMTVYVDDVVFTGTGATRGLLYAARKVFASYRLYGHKTKLFRPGQPRIITGVAVTKEGMKLPNKRQRGIADDLATFDSLPNGREKLVVARRLTGRLFEASQIDPAWRSKAEAMAAERDSLQRIIS

SEQ ID NO: 2968 - protein, 308 aa, unidentified
  source 1..308: note = Related to RFJA01000102.1; note = Alphaproteobacteria bacterium
MPERRSYPRDQSRLYKVKSPAQLADIFFLQPHELDLLLDANENYIRWTDKKTGREIQRPKPLLEKVHRRAGMLLSRIETPDFLHSAIKGRSYISNAQRHMPDEPTAKIDVRKFYPSARAQAVFHFFRDRMLCDGDVAGMLARLLTVDGHLATGSSVSPILSFFAYEDMFTDIEALAIERGCEMTCYVDDMVFTGPGATRRLIYDIIQIVRQYRLWGHKTKLFKPGQPKVITGVAVIRVGQRLPNRRQKTIADEMDVLKSTRDDAERLAIIRRLLGRLYEAAQVDSSWYVTADAMADEKRGLERRSARA

SEQ ID NO: 2969 - protein, 342 aa, unidentified
  source 1..342: note = Related to AP014946.1; note = Variibacter gotjawalensis
MNMPKAKSSKKLKLEECFLHSVASPVDLARRLLIDLPDLERLANADHRFKQWTTKKGRKIQEPVRELQVVHGRVMRLLSAVEPPLYLYSAVAGRSYITNARQHVGAYPTVKLDLQKFFPSVKRAAIRNFFVREMKCAGDVASILAKILTCNGALPTGSRASSIMSFYAFKSMFDELGDLAIANNCTMTVYVDDIAISGEGARPRLLVKARRIIARYGLKSHKTKFFQALQARIITGVVVDPAGIALPHSRRVQIERGLAVLAAECDPKWKLEILTRLVSRVYEAAQIAPAEFLALATELSKARAELLKKASELAVASVAPDRRSHLRLVHSDASTSDRVASP

SEQ ID NO: 2970 - protein, 338 aa, Alcaligenes faecalis
  source 1..338: note = Related to MTBI01000002.1
MTHYRKSYAISNSPFFKLSSKKKLSELLGVSLHTITDIRQSGLHRQYRIFKDKKTRRLITEPVGELLRVHKKILKLFKRIQPPAYLHSAIKKRSYKTNAEAHLQNRRTLKIDLKKFFPSIRFHHVYGFFLKNMQCSSDIATILANLCTADTKSHGTHLPTGSCISPLLSYWINQNLFDQLHDITSQEGCHMTLYVDDITISGEKATPEFLNKIAIAINSHGYKYHKVACYGNGVATITGLIVNEGKLELPHVRAQKIRRLEKELMEAENDIDRKRILNSLMGRLTEAEQIVPAYTAKKNEIMKLFKNIWGDIVQQRAQRAQLKRRIKKQPVLADIAGG

SEQ ID NO: 2971 - protein, 337 aa, unidentified
  source 1..337: note = Related to JAERVK010000007.1; note = Methylomicrobium sp.
MMTSRRSKTPHRYEIEFSPLYRLSNKKKLAALLNVDVSIISSPDKSKLCSQYRIFVDKKTKRFITEPIGDLLAIHQRLLKFFSRIAPPEYIHSAIKKRSYLTNAEAHRKSSNILKIDIKKFFPSIKFQCIYGFFLNTLKCSSDIATILAKICTVQTNNYGTHLPTGSCISPILSFLANQQLFDSIKIICEKEKCKLTLYVDDITISGENASPALLTLIAMEIFKHGYGYHKIKIYKDQPAIITGLVVYNKKVCLPHERAKKIRELIDALKISVGPLRQKMLASLVGRLSEAEHIESQYKAKRVSIISQYRKEWDEVVANRNSKCKVSRNKKLAKNNT

SEQ ID NO: 2972 - protein, 333 aa, unidentified
  source 1..333: note = Related to QAJP01000003.1; note = Herminiimonas sp.
MTKNPTRGSKKYDLESSPLYRLSNKRKLADLLGVEPSKILGLKKSAICSQYKIFKDKQTSRFITEPHSDLLLVHRRLLDLLTRIQCPPYLHSARKKHSYKTNAEAHQHSSAVLKIDIRKFFPSVKFHYVYDFFKNEMSCAPDISTILAKLCTVTTLKFGIHLPTGSCISPLLSFLVNKVMFDEIDALCRAHDCKFTLYVDDMTISGDKASRALLTSIAMIIHRFGYGYHKIKTYHQVPTVITGLVVYKGMLRLPHRRAKLVRVASQALAQAVSGSMRKKLLGSLIGRLSEAEQINPLYKVRKEVLLTRYKSEWQTIMDERVEKSLKVRGTKSK

SEQ ID NO: 2973 - protein, 341 aa, Thiobacillus sp.
  source 1..341: note = Related to JAIBFA010000065.1
MKITKAKEPQRYEIERSPLYKLSSKRKLSELLEVELTTLSSLEKSGLTSQYRIFKDRKTRRVITEPIEQLAVIHKQLLKLFSRIAPPSYVHSAIKKRSYKTNAEQHKDPANVLKIDVKKFFPSIKFSHIHDFFLNGLCCSKDIAVILSKLCTVQTVKHGVHLPTGSCISPILSFLANRRMFDAVKKICDREGCVFTVYVDDITVSGVNATRALLSEITTVIHKHGYQYHKIKTYHGQPALVTGLVVADGRLRLPHERAKKIRELSKALKALRASKSTPLRSKMLASLVGRLSEAEHINKAYKPLRQKILSSYSAEWSGVIAYRLRKSRTKRLMRNCVITAS

SEQ ID NO: 2974 - protein, 353 aa, unidentified
  source 1..353: note = Related to NZ_CP041335.1; note = Proposed Chitinolyticbacter meiyuanensis
MTQKKKTGTPQQHRYTIDRSPLFGLSSKKRLSELLGVELRLIRDVEKAGLTRQYKIFVDRKSRRFICQPVDELEKIHRRLLKYLIRIAPPSYVHSAIKSRSYRSNANAHLLNGPVLKIDIKKFFPSIKYDRIHSFFFDTFKCAPDIATILAKLCVVCSKNHGVHIPTGSCLSPAISYLANIKMFDRIAEICAKAGCRFTLYVDDITISGAKANHQLLGEVASVIFQRGYKYHKTNVQQSGHALITGLVVTPQGLRLPFKRVKKIRDLSETLFAASVLNLAQARKREILASLVGCLSEAEQIESRYKLIRARIVEEHCDTWNEIVKNRTKRAALKRQQATRAVIPPAMKNCTSK

SEQ ID NO: 2975 - protein, 330 aa, unidentified
  source 1..330: note = Related to JACEZS010000033.1; note = Duganella sp.
MTSSLRKPKQYELEKSPFFQLKSKKKLAELLNVSLPSLSRTQIEKLASCYRIFVDRESRRFITEPVGELQVIHQRLLQYFSRIAPPDYLHSARKKRSYKSNAEQHIGNTNVLKIDIKKFFPSVQFSYIHDFFSNQLQCAPDIAAILARLCTVKTSRHGVHLPTGSCISPVLSFLANKPMFDRVAALCASQRCTFSLYVDDITISGAGATHALLTSIAVEINNAGYGFHKIKSYFSEPAVVTGLIVTHDRLCLPHERQKKIREVAEALRISIDTGIRERLLASLVGRLSEAEQIDTKYGNYRKIVLARYSADWKRVVAHRLARMKKSAKRP

SEQ ID NO: 2976 - protein, 355 aa, unidentified
  source 1..355: note = Related to PGES01000001.1; note = Janthinobacterium sp.
MKPSPRKPKQYELEQSPLYKLSSKRKLAELLQVDLVTLGVTELAKLTSNYRIFVHCETGRFITEPVGTLIPVHKRLLSLFSRVVPRDYIHSATKKRSYKTNAEKHIGNQNILKIDIKKFFPSVRFCYVHNFFANTLKCSPDLATILAKLCTVRTKKHGVHLPTGSCISPILSFLANRDLFDRIEKLCIEADCTFTLYVDDVTISGPNATRALLTRIAMEIHKNGYGYHKIKTYHAVPAMVTGLIVTEGRLILPHARCQKIRQYAEALECSVGGQIREKLLASLVGRLSEAEQIDAKYRTARQDVLKRYAVDWGRVMALRIASAKHRARKTASVNKPSTTLLDQQGDTVRSITASS

SEQ ID NO: 2977 - protein, 344 aa, unidentified
  source 1..344: note = Related to NZ_CAJNAZ010000001.1; note = Paraburkholderia domus
MANNPTHKRKQYIIAKSPFFRLHSRQALAELLGITLPQMEALASSPSDALYRMYDDEASGRYITAPLPELQRIHKRIARLFSRVIPPAYLQSATKKRSYKTNAAMHRKNLRIAKVDIRQYYPSITFGAVFNFFKKKMECSVDVSTVLTKICTVSARGRTHLPTGSSLSPILSYWVHSDLFNRIKLICDSAACVMSLYVDDITVSGTNATASLISKIEAEIAKAGLTSHKIKVFDRVPATVTGVIVHKGRLALPHERAKDIRLLRGIMAKLPLAEAEADATLSRLVGKLNEAEQFVTGYGAIKKNVLSEHASAWNRITAARVAKSKAAARRKRLKAAATRISKSS

SEQ ID NO: 2978 - protein, 341 aa, unidentified
  source 1..341: note = Related to KN150957.1; note = Burkholderia pseudomallei
MATILTKRNQYAITKSPFFRLHSRQTLAKLLGITLLEMETLASRPSNALYRMYDDSASKRHITAPLPELQRIHKRIARLFSRIIPPAYLQSATKKRSYKTNAAMHRDGQKIAKVDIRQYYPSITFGAIFSFFKNRMQCSPDVSTVLTKLCTVSTKGRTHLPTGSSLSPILSYWVHSELFDRIKSICDDLGCKMSLYVDDITISGKNADAALVTKIEREIEKTGLTAHKIKIFDGIPATVTGVVVHKGRLALPHDRAKDIRMLREALNKLPEKDADSTLSKLIGKLNEAEQFVAGYGAIKKNILSDHAPVWTRITTVRVEKSKAAARRKRLKAIGTSGSKTS

SEQ ID NO: 2979 - protein, 339 aa, unidentified
  source 1..339: note = Related to NC_015265.1; note = Burkholderia phage KS5
MAKSQTTRKQYTKNRSPFFRLESRRKLATLLATTLKSLEELAGLPSNQRYKMFFEQESGRYITEPIGELRRVHKRIAKLLCRVSPPDFLQSATKGRSYKTNAEAHIGGQNIIKLDIKEYYPSVTFGAIYHFFLNNLKCSQDVATLLTKICTVSACGRTHLPTGSSLSPILSYWAYSHLFDEINSLCAAKGCTMTLYIDDITVSGPNADKLLLAEIRNRIDATGLVAHKFKASQGMPIKVTGVIVLRDGITLPHDRARDIRKLQAELATTSPEEVDPTLSKLVGKLNEAQQFVATYGEIKRAVLRQHSNAWNRIVTERATQSRRAMLRRRRKTAVKKASG

SEQ ID NO: 2980 - protein, 309 aa, unidentified
  source 1..309: note = Related to NZ_LT592171.1; note = Thiomonas delicata
MSEQPKRYPIDQSPLYSLCGKGKFETVIGVSWDAVPELCSSSNYRVWTNENGREIQAPFKGLAATHRKIGLLLSRIDVPGYVYSQKGRSYADNARQHLGHHPVIKTDIQGFYPSISRARVYGMFRQDFHCAADVAARLADICSYQGLHLPTGSPLSGRVAFLAARHLFDDIAKLASASDCTFTVYVDDITLSGANATKRLLAEVRRLIEKHGLRSKRGKSKSFSPSSPKSVTGVILVGEDVRLPNSRHQKIWETRRALLTATGEERLKLERQLKGREQEANQVLCSPRNIEPPRVSWRLVGLSHAGMAC

SEQ ID NO: 2981 - protein, 300 aa, unidentified
  source 1..300: note = Related to JAGQDF010000002.1; note = Ideonella sp.
MSGFRNAMPSSAPRKAYALNQSPLFRLRGKGRFEDVIGVKWESVTDLLAAESFRVWKGPKDREIQAPIHWMAAVHKVIADLLARIEVPDYVFSQKGRSYADNARQHLGNHPVIKTDINKFYPSVTRAMVFRMFVRDFECAADVADRLADICCYRQLHLPTGSPLSGRVAFFAARGLFEDIAKLAVASGCKLTIYVDDIALSGPNATKRLLGEVRMLIARHGLKSKGKKSATFAAGAPKSVTGAVIVGEELRLPNERHRKLHETRSAYVAADGDERAKLGRQLRGRQQEAAQILRPVARAT

SEQ ID NO: 2982 - protein, 311 aa, unidentified
  source 1..311: note = Related to NZ_CADEWJ010000013.1; note = Burkholderia gladioli
MKSKGTPERYPLHQSPLYRLKGKGQFEKILGVEWSAVNRLLAAGNYRVWKNDKGREIQQPLGWLAHVHGRIGKLLSRIELPDYLYSQKGRSYADNAREHVGGVPLIKTDIHKFYPSTTRQMVYRMFVVDFMCAEDIAHCLADICCYRQRHLPTGSALSGRIAFFAAKHMFDDIADLANDEQCRMTAYVDDVTISGPAATKKLLGEVRKVVSKYGYKTKQRKSKTYAATSVKVVTGAVVVGRELRLPNERHRKIWQTKQELLRCEREEKAPLMRALRGRLQEASQILNNLSGDLHNSDLMLGRSLSNRDGSS

SEQ ID NO: 2983 - protein, 306 aa, unidentified
  source 1..306: note = Related to NC_014207.1; note = Methylotenera versatilis
MSESLSRLMPKQYAINQSPLYKLVGLRQLELCLGIDLERLDKLLKDGSYRTWVNDNDRAIQHPLGWLAQVHSKIAHYLAKIETPDYVYHKKGRSHVKNASEHTGYHLVAKTDISNYYPSITRAMLKSMFVKKFKCALDVAGILADICTYQRTHLATGSGVSGYLAFWASKDLFDAVYELSRARGCVFTLYVDDLTISGNAASKKLLTEVRAIVKRNGLKTKETKSKTFAAHATKMVTGVVLKGNESLLSNKRHKEIADNRIAIANTGNANIKATLQKSLKGRLMAAKQIIDSNEIKTVTSSDLIYS

SEQ ID NO: 2984 - protein, 304 aa, unidentified
  source 1..304: note = Related to FOLP01000049.1; note = Variovorax sp.
MQSKKTPDRPYPLASSPLYGIRGKGQFERAIGLTWDQTDRLLHRRYYRVWTTKKDREIQQPLYELEKLHARIANLLARIEMPSYVFSRRGRSYVENADRHKGLSPLIKTDLTKFYPSTSWPMVFRLLVSRFNCAKDVAHRLADLCCYQQKHLPTGSALSGYLAFFAAQPMFDRIADILGRHGCEMTLFVDDLTASGAGATKHALEEVRAEIRHHGFATSEAKSKVYRAAAPKLVTGAIVTPTRLMLPNKQHLKIWAARRSLPVLPKIMRAAALRALRGRIQQAHQVLNYSGPTFELAAPVEPSG

SEQ ID NO: 2985 - protein, 305 aa, unidentified
  source 1..305: note = Related to CABPST010000009.1; note = Pandoraea bronchicola
MSARPTYPLDQSPLFRLPSKRRAAEVLGIDLHQIEQLVGERNYRVFVNAKGRTIQHPVGELAGVHKRIASLLGRLDVPSYVRSVKGESYVSNAGSHVGNGPLIKTDIAQFYPGTNFSAVYGFFRRDMGCAPDVAHLLARLCCFRQRHLPTGSYLSGPLAFFAHRAMFDQIYCLAQDRGCVMTCYVDDIVISGPGASKELLYRVRGLIRAAGRTSKDDKSKTFPAHKPKTVTGVIVTSDALRLPNSRHKQIHEARAAIRAAGGDGEQMSLRASLRGRLQEAGQIANWNVRNPGGGVLVRGVVPDVS

SEQ ID NO: 2986 - protein, 341 aa, unidentified
  source 1..341: note = Related to NZ_CP045306.1; note = Legionella longbeachae
MVKQIDRYPLERSPLYNAKSLKKISCLLSLSSLKVNKNDRSKPMLQKLYKLTPTDLDNFAAQQNYTIKELIDKKGKSRSTEIPAIDLKWLHYRLEHLLKKIEPPPYLFSAIKGRSCKDNARMHATNTQLFKIDIKTFYPNINFGKVYNFYRHILHCEHHIATILTKISTYNGHLPTGSPLSPILSFYACKPMFDEIYQLALEHNCVMTLYVDDICVSGDKATKALLWKIKQIIHRYGLRYHKVKFYFQKQPKTVTGVIVTENSIKLPNRRHQAITERITYIQSPSITAKEKRQANNSLLGQLNEAMQLEPKLAKTKALLIQQGVLKPHMSLPRSNSKRKTK

SEQ ID NO: 2987 - protein, 317 aa, unidentified
  source 1..317: note = Related to NZ_SOBK01000001.1; note = Pseudodesulfovibrio indicus
MTSKYSLSQSPLFKLKSKKKLADLLGQSLGDLQSLAKSNDNYNVYTLSPKSKLDHPYFLRKERQVQEVRPHLKNVHERILNLLKRVQTPDYLHSATKGKSYRSNAEAHLSKDVIYTVDIKSFYESVTFGRIYHFFHSTLKCSPDISHLLTRLCAYKRNLPTGSCISPLLSFWTNVTMFQELDLFSKTNGLTMTLYVDDLTFSGTDLPKKTCFKIDKIIASYGYKPHKQQLYINKKAKIVTGLALCGARLDIPNKRRGKIRVLIEAIARERDAEKKEKLCNSLVGMTYEAAQFNRGYARLIAKQIRKKCPCTRQQINL

SEQ ID NO: 2988 - protein, 317 aa, unidentified
  source 1..317: note = Related to NZ_CP051216.1; note = Pseudodesulfovibrio sp.
MKTKYSLSQSPFYKLSTKKKLAQLLGQPLADLQALAKSNGNYNVYTLLPKSKLSHPYFVKKERQVQEVRPHLKTVHTRILNLLKRIKTPTYLHSATKGKSYKTNAESHLNRNALYKVDIKSFYESISFGRIYHFFHEIMKCNEDVAHLLTRLCAYQRNLPTGSCISPLLSYWTNVTMFDDLYIFSRAHGLTMTLYVDDLTFSGNEISKRTCFEIDKIIAGYGYKPHKQKQYSTKKTKIVTGLALCNDRLDIPNKRRGKIRVLLEAISQEKDAAKKEKLCNSLVGMTYEAAQFNLRYAQIIAKKVRKKCPCARQHITI

SEQ ID NO: 2989 - protein, 321 aa, unidentified
  source 1..321: note = Related to NZ_KI632512.1; note = Cupidesulfovibrio termitidis
MSRDRYAIDQSPLFKLKTKKKLATLLDSSVRELQALSVSSDSYRVFDLPAESLVQHPLFARKSRKIQQLKPELDAIHRTLHKYLSRINVPDYLHSAVKCKSYATNAKTHSGCLYLYRVDIKKFYESVNWRTVYRFFYKTLDCAPDVSALLTNICCYEDKLPTGSCLSPILSFFVNQEMFDELYEYASQRDLTMTAYVDDIVFSGREFHRINAHSIRGIINSYGYECHKERICPPRKSKIVTGLSVTRTGVAIPHKRMAKARVLLQELAKRMRQSHKEKLCASLTGMITEMSQFDRAKAKYLATLGKKYCRTIQNIHFKLCK

SEQ ID NO: 2990 - protein, 301 aa, unidentified
  source 1..301: note = Related to PFXG01000051.1; note = Zetaproteobacteria bacterium CG_4_9_14_3_um_filter_49_83
MQKKRQGNYPLNQSPLYKLCNKRNLAAEFNLTLRELDSLLKRQNNYRAFFLTQGEKKRPVEAPKPIIERVHRRLFQLLTRITPPEYLHSGVRGRSYVSNAEQHRKNPVLYKLDIVKFYPSTKQWHAFEFFRSTMKCSRDVAGLLAKIVTVDGHLPTGSCLSQIMAFYAHFDMFEALYGLATSYNLVMTCYVDDIVFSGNKIPKSFQLEAKKIIQSSGLLSHPRKEKLFFGEKPRIVTGVVISQSQLKIPNRQHLMIKEALFELPTLVADSPEREKLYRQVVGRIVSASQIEPKFFKHKKVK

SEQ ID NO: 2991 - protein, 307 aa, unidentified
  source 1..307: note = Related to JAFLCR010000159.1; note = Alphaproteobacteria bacterium
MKKEEKKRGNYALNQSPLFKLRSQRRLAQLLRTPLNDIYGLLNTGNNYRVFPQGNRTCHDPKPKMKGIHKRLQILLNRIAPPEYLHSATKGRSYVTNAAAHLGNDVLHKLDIRKFFDSTTYKHVHDFFKNTMQCSADVAALLSRITTYDDRLPTGSPISPILAYFAHKSLFDQINQEATATNVMMTCYVDDLSFSGSTVPKAVLRKAKKGIIQRGLEYHKEKRFQKGDTKIVTGVALRDEQMLLPNKRHKKIHEEKQRSLEIDDAKKKREIIHKLISQTGEAARIEPSQFEPLKQALMQVRRNLPKP

SEQ ID NO: 2992 - protein, 355 aa, unidentified
  source 1..355: note = Related to JACVAG010000005.1; note = Pseudoxanthomonas sp.
MAKTLKLHESPLYRLTSKKKLAALFGVKVADIKFLRKLDGNYRVWPLKQKHQDVLAGMPVSDKVRMVQQPKPTLDAFQRRLAKFLGAIEKPDYVYSATKKRSYLENALVHRHSQPALKVDIRSFYPSVKRRAVKSFFEEQLGCAEDVAHVLSELCCHEGKLPTGSALSPVLSYFSCAPMFARIAALADAKGLRFTLYVDDMVFSGTGLDDKFLAQVLNELNREGYSGHKVRFYKARRPKVITGAVVWPSRVDVPHKRRWKMRLYERALKVAKPEDKAILGRALLGQYRESSRINPSFKVAASRLQKFMDDMGGKTKAAKPRKRPRGRSSYSLFLSRISRLRAEVAAVRTVAGSAP

SEQ ID NO: 2993 - protein, 358 aa, unidentified
  source 1..358: note = Related to NZ_CBTJ020000001.1; note = Candidatus Competibacter denitrificans Run_A_D11
MVKNSGYSIDQSPLFRLSSKKKLAGLLGVSVKYLHSILTLDNYRIWEAPQKYQDILAGFPPPSKTRKIQEPKQLLLRLHKKLSIFLSRIKKPDFVYSATKGRSYVDNAREHMNFGRAIKIDIKDFYPSVRRKLVRDFFINDMQCAPDIAYVLSLLCCVKDSLPTGSPLSPVLSYFACSRLFCKIAHMAAVKNLKFTLYVDDMVFSGANATRSFCYQVVKELAYNGFIGHKITRFSSRQVKVITGVAVWPHKIGIPHKRQKRIRFFERAFKLNNNPDEIKILGGTLIGQYREAERLQPGSSMRARPIQERLNLINLQCVSVSPVTKKRRRRRLSSKLSKGIIDTLQTQKNKKKNDISSE

SEQ ID NO: 2994 - protein, 354 aa, unidentified
  source 1..354: note = Related to JADKCY010000002.1; note = Xanthomonadales bacterium
MMHSLCYPLDQSPLYMAGSKVRLCELLGITTKDLRLLLALENYREWTAKQKLADKLANLPAKSRNIEEPKPLLRLLHKRIALLLDKIEKPDFLYSARKGCSYFSNALQHQRSEGAVRVDIKSFYPSVRQRMVKEFFESQMRMPADVAHTLAKLCCHDGKLPTGSPLSPILSYFACSPFFSRVAAIADRLGLQFTLYVDDMVFSGKGANRALADQIKRELAGVALIGHKVSYFPAGGAKVITGAAVFPDRIEVPFKRQRRIRKFEEAFAKTTNVATRGAGTPWAAWGPGAGRPGPGPRARPVEVRLAALEARTPEIHGKANAKRRKKPVGKSIMREIARKAAVLREHRLEADVCS

SEQ ID NO: 2995 - protein, 313 aa, unidentified
  source 1..313: note = Related to NZ_LDIG01000020.1; note = Paenibacillus dendritiformis
MVEPRTYPLQQSPLYRLTSKKRLALLLGISASELKLLCDLQDYNFKRWELGQRERDKLIGLPAKAKKRSIQQPKTALHAVHKRIALLLGRIEKPAFVYSATKRRSYVDNAIQHQRDEPCVKVDVKEFYRHVKFGRVRRFFLENLQCADDVAHVLAILCCVDGALATGSAVSPVLSYFACASMFAEIEDFAQRRRLVFTLYVDDMVFSGAAANRAFADGVRYLLKGKGFVGHKVTCYRAHDVKVVTGVAVRAGFVDLPFSRQGRIRRTEVAFAKSTDPNELRILGRALLGQYREAERIRPGIKAKAAPVEARLR

SEQ ID NO: 2996 - protein, 372 aa, unidentified
  source 1..372: note = Related to SCUI01000013.1; note = Xanthomonadaceae bacterium
MANARAYPLTSSPFYRLASKQKLAAILGVSLRDLRLLLKQPDNYRLWDTRRRRRDELVGIPHKARAIQQPKPLLAIIHKRLAILIGRIEKPDYVYSATKARSYFDNARPHAIGEPTVKIDIKNFYSNVTRRFVRDFFERRLQCSPDVAHVLTELCCITTASSSALPTGSAVSPVLSFFACSEMFRRIAEIAKDHGLIFTLYVDDMVFSGSKANRHFTSKVVHELAKNGFVGHKITHFRGDATKVVTGVAVSAGRVDLPFRRQRKIRQFEEAFWAATNPEDISLLGATLLGQYREAERIKPGTKLRALAVAARLEKLGLSNGLPPSVKKRRGYPGKRLDAKRFDRLRSAVSLNPSTTSGGPETLVNTGVVMAA

SEQ ID NO: 2997 - protein, 368 aa, unidentified
  source 1..368: note = Related to LN647463.1; note = Xanthomonas citri
MKAPKRYPYHQSPLYALTSKRRLADILGVPLKDLVFLASLKDHNYQVWPLKQKRRDQLAGIKPPEKSRFVQQPMPLMRLLHDRIASLLGKIEKPQFVFSATKGRSYLDNALQHRDNIAQPAFKVDIRSFYPAVKSQWVRRFFEVDMKCAPDVARFLARLCCVNGALPTGSPISPTLSYFACAPIFRWMAEFAESNGLVFTLYVDDMFFSGAKASKDLSKLVLGHLAANGFRGHKVAHFRAGQPRVITGAAISQDGVSIPFKRQMRIRLYERAFASTNDPEAIQTLGKALLGQYREGERLQRGSRERAKPIQDRMDAINAVRFEELTQVQPKRKKRGPLSTAAMKNHVQKLRERRSGQLHPVTDTPQWQ

SEQ ID NO: 2998 - protein, 322 aa, unidentified
  source 1..322: note = Related to NZ_LR134378.1; note = Lautropia mirabilis
MISKKQYNKDQSPLYSIKSKRRLARILETDAKTIIRLASDTSKHYKLWETKQKPRDKICNITHTPRKIQEPKEDLLKIHKKIAKFLSRIKKEEFVYSATKGRSYLNNAEFHKDRIHEPSFKVDIEKFYPSVKIKKVHNFFQNEMKCAPDIARLLAKICCIHGALPTGSPISPTLSYFACKDMFSWIGNLARSNNLCFSLYVDDMFFSGEAASQELRNKVITHLKKNDLRGHKISHFSANKTRVITGVAITPKGLRITNKRHKKIRIYSNAFFRSKSPDNIQTLGKTLLGQYREASRVEPHLLQRTGKVQSRMDLFKDKSQNM

SEQ ID NO: 2999 - protein, 376 aa, unidentified
  source 1..376: note = Related to DQEG01000261.1; note = Stenotrophomonas sp.
MRPLGRFLFMLQGEQEMVRKKEEKRYSITSSPLYGLSSKKKFAELLKIDLADLRFLAKFGDSNFKVWSTAQKLVDEVAGLPAKKSRVVQQPKIVLSVVHRRIAEYLSRIERPEFLHSATKGRSYLTNAMVHAWNMPGCKIDIKEFYPSVKRNLVKSFFENRLKCTHDVASFAADLCTYNGALPTGSAVSPILSFFACLEMFERIDLLARQRDLRFSLYVDDMFFSGDKADKGMAKSVVDLLSRHGFVGHKVVCFSANETKLITGVAINGCETSIPNARQNKMRLFSRALRRERNRERAILLAQALVGQFREAERLQPGTKARALPFERRLIKLKGAEKKTVSVVRRRRRRSRPKVLTSTLLRAIALMRAAPKIVNV

SEQ ID NO: 3000 - protein, 317 aa, unidentified
  source 1..317: note = Related to NC_018012.1; note = Thiocystis violascens
MPNGYSINQSRLFKLANKRKLAGILGITIKELSLCANTANNYRLWSTKSKYPSKLQILSHKPRDIQEPIGLLRRIQDRLSDLLVRIETPEYLLSAKKGGSYVKNASLHMGFGQVIRIDIKGFYKNASEVFVFRFFWHDLQCSQDIARILTDLICWNGCLPTGSPVSPIISFFAYRPMFDELHALALAINAVMTVWIDDIVFSGDNVNGTLIPKAKIVIKKSGLQGHKISVFNRGQASVVTGVAITADGQLHIPNKRYRKIRALENEYCAASNQADRAIYGKALIGQYFEGSQLDPGLAKKAKVLQADMKCKNSNHPR

SEQ ID NO: 3001 - protein, 311 aa, unidentified
  source 1..311: note = Related to NZ_CP011129.1; note = Lysobacter antibioticus
MSKVLRKSYPAAQSPLFRLRSKARLAELLDETPRRVRELITDKNYCEWFTKAKYPDSTHPALVHKPRAIQQPLGALDMAQRRLNSLLSRIELPDYLHSARKGRSYRTNAAAHSSAGRAIKVDIRQFYRSINDSYIHAFFRDVMECSPDVTHILTELASFERYLPTGSSLSPIVSFFAYWPMFDKLNSVASSVGAQMTVYVDDVVISGPGVSGSLIPICKRIMKDHGLRGHKVAYYHSGKTRVVTGVAVSPRGLSIPNKRLMKIRALRQEMDAAVDPATKALYKQAVLGQLREGSPLDPSFRTYSQAIERMA

SEQ ID NO: 3002 - protein, 317 aa, unidentified
  source 1..317: note = Related to NZ_CP091716.1; note = Variovorax paradoxus
MSTAKGYQLDQSPLYKLESKRKLAKLLFWDLSRLQALANRTDNYRSKKTMHANKERSLEVPKPALENVQRRIYQLLDRIEKPDYLHSGRKQRSYITNAQVHAGAVWLIKLDIKKFYAAVSSARVYRFFQDVMRCSPDVASLLAKLCTARGHLAIGSRVSQLLAFFSAKPMFDELHARALEYSIKDTYYVDDLTWSGTRATAGFLWEVKKIVHRHGFEYHRARLYAPNNPKLVTGVQIIGDRIAVPPYRDRELWDAIRTLKKPSACTTLKVAETLLSKAAAYAQVEDRFQLQVRQLRALRASMKLTASTDHIDGPQGV

SEQ ID NO: 3003 - protein, 304 aa, unidentified
  source 1..304: note = Related to NZ_RXOE01000007.1; note = Variovorax gossypii
MPASRSYPINESPLYKIRSRRRLAAVLFSNLPKLEALANQTDNYRRFDVVYAGKKRSVELPKPALARLHRRIFQILNCIEKPDYLHSGCKQRSYITNARVHVGLVPLVKLDIKKFYASVSSAHVYRFFNSGLQCSPDVSGLLARLCTANGHLPIGSSASQLLAFFSAKPMFDELHRHSVRHEVRDSYYVDDLTWSGVNATPRFLWAAKQIVHRHGFRYHSDRVYTASQPKIVTGVLIAGDRIAVQPRRELELWNTINTLCMQDPAKRLETINSLIGKAVANAQIDERFLARVRQLRAYKIKMQL

SEQ ID NO: 3004 - protein, 313 aa, unidentified
  source 1..313: note = Related to NZ_KB905036.1; note = Variovorax paradoxus
MKSYALNQCPLFKMASRRKLASLLGFDAGVLQTLANRTTNYLCFDIAQGSKKRRVEVPKRALERVHRRLFALLERIEKPDYLHSGRKKRSYITNAQVHTGLAPLVKLDLKKFYPSVASSRIYRFFNEVLLCSCDVAAILTKLCTVDGHLPTGSCISQLLAFFAAKPMFDELHEYSFKLGNRDSCYVDDLTWSGSNATPAFLWAAKQIVHRHGFKYHKDLVYRADQQKVVTGVLISGGELTVQRSREHELWRSIHALGGQDPAKRLKAIDSLIGKVIANGQIENRFLLRVQGLRARRVMLMGSRAEVVSSLQRG

SEQ ID NO: 3005 - protein, 322 aa, unidentified
  source 1..322: note = Related to JAGPDY010000016.1; note = Rhodoferax sp.
MAIRKKSYAIHQCPLFKIASRKKLAALLGFDLSVLEGLSTATNNFRTFEIKQGIKLRKVEVPKRRLELVHRKVFSLLERIEKPEYLHSGIKGRSYITNAKVHVGPVPLVKLDLKKFYPSIDGARVYRFFQQALQCSPDVSGLLTKLCTIDGHVPTGSCVSQLLAYFSAKPMFDELHMLSSQWGLRDTCYVDDLTWSGERATPAFLWNAKKVVYRHGFKYHKDHVYTADEQKLVTGVMIDGDRIAVLPSRELKLWKDINALGMSEPVERLAAVNSLIGSVVANGQIEPRFLQRLRRLRDTRISLIRQLEVNFSRQPSLLPSDR

SEQ ID NO: 3006 - protein, 310 aa, unidentified
  source 1..310: note = Related to NZ_NIAZ01000004.1; note = Acidovorax sp.
MATRKTYALDQCPLYKIASRKRLAQDVFNVDLPFLERLAANEGNFRVFTIKQGDKDRQVEVPKVVLERIHRRLFNLLERIEKPDYLHSGVRGRSYISNAKVHVGAVPLVKLDLKKFYPSVDGARVSRFFTGTMRCSPDVAALLTRLCTFENHVPTGSCVSQLLAFFAAKPLFDELHALAESAGLRDSCYVDDLTWSGHGATPAFLWAAKQVVHRHGFAHHKDRCFAAGDRKLVTGVMLEGNRIAVLPSKEFDLWKNIQALGGFQPQERIVAVNSLIGSAVAAGQIESRFLRRLLRLRRVRAAAIAEAALT

SEQ ID NO: 3007 - protein, 315 aa, unidentified
  source 1..315: note = Related to JAHJNJ010000041.1; note = Gammaproteobacteria bacterium
MKSRKTYPIDQCPLYRLQSRKKLAKDVFNLELSHLESLAKNTSNYRIFKIPSGDKERQVEVPKPILERIHRRLFALLERIHKPPYLQSGVKGRSYITNAQLHVGLAPLVKLDVKKFYPSIDSARVYRFFNTILLCSPDVSGLLTKLTTCEGHVPTGSCVSQLLAFFAAKPMFDELDYLATKQSLRFSCYVDDMTFSGTLATPSLLWAAKQIVHSHGFGYHKDRCYTAEQDKLVTGVMVTSDRIAILPSREFELWRKTQDLGTGDIEQRIAAVNSLIGTVVAASQIEARLLSRLKRLKGIKAAFEQEASTSSPSQR

SEQ ID NO: 3008 - protein, 308 aa, Pseudomonas sp.
  source 1..308: note = Related to NZ_QJUP01000005.1; note = Pseudomonas kirkiae
MKVRKTYPLHQSPLYRMQSRKRLAAEIFNADIDLLERIAGHGDNFRVFHIIQGEKRRQVETPKPILERLHRRLFVLFERIEKPAYLQSGVKGRSYITNAQEHVGAVPLVKLDIKKFYPSVDAARVYRFFHEVMRCSPDVSGLLTKLCIYDSHVPTGSCVSQLLAYFATRPMFDELSALAESRGVKFTLYVDDMTFSGRSATPAFLWDVKKVVHSHGLQYHKDRIYAADSQKVVTGVLVSAQGIAVLPSKEFGIWLQSRNLGSGDLAERRAAIESLLGSVIAAGQIEKRLLSRVRGLRILHADALRSAG

SEQ ID NO: 3009 - protein, 335 aa, unidentified
  source 1..335: note = Related to NZ_LMDK01000001.1; note = Pelomonas sp.
MKRPYLSNQSPLYCLESRKRLAGEILGLSLPKLEGLAARANNYRECTRVTGGKQRTVHVPMPLLLAVHRRLAVLLNRIAVPHYLQSGQTHRSHLTNARAHETARNIAKLDIRHFYPSITKDRVWHLFVDGMLCSRDVASLLARLFTHQGSAPIGSPVSQVLAFHVVRPMLDELQELASRHRLRFTCYVDDLTFSGDGADHGFLALAGDVARRHGFLPHAEACYGPGEDKLVTGVMLTRDGLRVPAPQLRRIDAARQELLLAEGNESRRVLLSRLIGHLAAAASVDDSFRPELSSRCFAARKLAAALPARPSPSDSKVASVVPRLRPMRLSYGVGT

SEQ ID NO: 3010 - protein, 307 aa, unidentified
  source 1..307: note = Related to NZ_CP049919.1; note = Kinneretia sp.
MSYAFHQSPLYVMRSRRRLADEIFGISLTALEGLVENGNNYIESRRVTGGKERLVRAPKPLLRHIQERLAQLLNRIEAPDYLHSGRKQRSHISNALAHQGATRVLKLDIRKFYPSITRARVWNYFAGQMRCSPDVAALLAKICCFEGSAPIGSPVSQVLALQVVRPMLDEVDVLARAHGLTFTCYVDDLSFSGEKATPAFLWQIKQLIRRHGYRYHGGTAYGPDAERRVTGVLLTAQGPRVPPAHLQGIRAARHAFEAAKEASDREATLSVLIGRLAAAAAIEKRFLAQIGDLRRRRRRFRPPSFGG

SEQ ID NO: 3011 - protein, 317 aa, unidentified
  source 1..317: note = Related to JAFEEP010000236.1; note = Proteobacteria bacterium
MTDHPIHHSPLHGLRSSERLARRDVLGLSLERLSALAGDASSYRAFIRVTSGKKRAVTEPLGDLLAVHDRLYDLLDRIEKPDYLHSGVRGRSHVTNAGAHLGDKATVKLDIRQFYSSIDVPRVSRFFGRQMACSAPVTDLLTRLCTFRGHVPIGSRMSQHLAYFAARPMLEDLRRLSERQGVVFTCYVDDLSFSGTAATPSFLWQVKRLVHHHRFGYHNGCCYRAGESRIITGVVVTGEKLAVLREQAERIRQDVRDMDKLTVDDQRRALQRMIGRTAAAASIDLEYRKVMKQLVARRARLKSAPPSPCMVRPFDEV

SEQ ID NO: 3012 - protein, 337 aa, unidentified
  source 1..337: note = Related to NZ_CP024645.1; note = Rhizobacter gummiphilus
MAQSGNQTELEQSPLFGISDPRELAELVATPLPSLWRIARARDNYTALQMETGGKLRTVNRPCRALGAVQRRIQHLLSFIPLPDYLHSGVPGRSNLTNATVHRDGAWLCQIDLKAFFVQVTDAKVFHFFWQRMQCEPEIATLLTRLNTTNGHVPLGGHCSLQLAFLVAQPLLDDLDRTAREEDIRFSTYVDDLSFSGAKATPSFLWAVKQIIHRHGFRYHHDRCHRPGGRRLVTGVLLHKSCMEVRPQLVQRIWTDWSAMFTAPSDDASLRPLQGRLAVASQIEPRYREAHDSMKVMRKTLRDSPEPALAPASVSALANRKLVRARLSTSGSAHFDT

SEQ ID NO: 3013 - protein, 352 aa, unidentified
  source 1..352: note = Related to CP077683.1; note = Geomonas subterranea
MAQKNYDIKYDITQSPLYKLRSKKKLISLLNLGSLSDLKSIMRTDSPYRKFPIMSKGKLRPVEVPSRVLLPIHNRLFRLLKKIHLPSYLHSGVKGCSYLSNARAHRDRKEAYTLDIKKFYPSVTRAKVVTFFRETMKCEPDISAILANITTCDDHIPTGSSLSQVLAYLSCKEMFDALHDLSQEAGVTFTCYVDDLTFSGDRISKKWIYDRVKPMINKFGMRSHKDKHFRAGQVKEITGVIVDGCIVKVCNRMHQSIHKLTLQIAETEEPLLIDSLYDKLIGKLCAAGQIEERFKLQRVMATKTRRKLLGPKFGSSRIKLNNGNQEIRKKLTPILPSIWRPVDHLDESIPWD

SEQ ID NO: 3014 - protein, 300 aa, unidentified
  source 1..300: note = Related to CP018026.1; note = Alteromonas mediterranea
MVLKSRYALNQSPLFKLHSKKKLASLLRLDSKELLALAANPNNFHKFNVEKNGKLRSVQVPKKDLEAVHLRLFNLLRRLETPPYLHSGIKGCSHVTNALAHDGAVSTAKLDIKKYYPSTGREYVYNFFKISLCCSADVAKVLSDLSCVDGHIPTGSALSQLLAFFATQQMFDEIAVLASDSDICFTLYVDDLTFSGTRVNPNFIWQVKQIISKYGYTYHKVESAPPNKTKIVTGLALTANGAKVRNSHHEKIHELYVQYLDDTIATKDLARLIGMLSSASQVNQRMANKLRNLLESRASK

SEQ ID NO: 3015 - protein, 323 aa, Aeromonas hydrophila
  source 1..323: note = Related to NZ_NKXI01000009.1
MMKRVSKHKSYPLNQSALFKINSPTKLAKILLVSDMSVLFKLQNKGEENYYFGTTGSGRDIEVPLSQLRRIHNRINKLLSHISVPDYLNSGVKERSNIKNAAAHVNAKKLLKIDITKYYQSITEEQVRKCFRKTFQCSPDVSSLLASLCCVRGHLPTGSTISQSLSFAVNRPVFDSINIYSNSKGVKFTCYVDDLTFSGDDIPPSEFCDYIVGYIKKSRGYKCHKIRRYNSETDKPVTGVIISNGHLKVMNRHVKVINSLYKSMNKMTARFSSTDKELIHYFQVLQGHLFSAGQINPRYKRLGWHVVDIRKELSVPALNQNTM

SEQ ID NO: 3016 - protein, 321 aa, Aeromonas sp.
  source 1..321: note = Related to CP043321.1; note = Aeromonas jandaei
MMSRVNNKSYPLNQSPLFKINSPARLAKILLVSDASVLIKLKEKGEKNYYFGSTDKGREIEVPLSQLSRIHSRINKLLSNITPPDYLYSGVKKRSNVKNAAVHAGNKKLLKIDIAKYYQSISEEQVFRCFRKVFQCAPEVASLIASLCCVKGHLPTGSTISQSLSFAVNRPVFDNINIYSHSKGIKFTCYVDDLTFSGDEIPSGFCDYIVGYIKKNRGYKCHKIRRYNAETDKRVTGVIISDGKLKVMNRHVREINYLYKNVNSMLKKHAATDKELIHFFQRLQGHLFSAGQVNLRYRRLGASVVQIRKSSAVPALNQNTM

SEQ ID NO: 3017 - protein, 328 aa, unidentified
  source 1..328: note = Related to DMHG01000210.1; note = Alcanivorax sp.
MRYGWSLLANNNKGVKQYPVHQSPLFKLRSHSKLAAVLGTKPKTLKTVVRRADKNYKFGTTESGRAIEIPKSQILRYHNRINKLLCRISPPDYLMSGVKGRSYVDNAAKHRGERAVAKQDIQKFYQSTTRDIVYRGLRKRLHCSSDIAQTLADLCTVKGHIPTGSPISQSLAFFVNFGVFEHINQYASSRGLRFTLYVDDLTFSGQKIPKNFLRYISGYLEKNRGYKVHKNRTYHATTEKEVTGVILKQGGIDVKNRHRQKIDSMLRRLSYFSDESQESDAKTRDYFQRLIGHLYSAGQVSPGYRTRGKEMVEIRKAIGIEGQNQNNK

SEQ ID NO: 3018 - protein, 319 aa, Vibrio sp.
  source 1..319: note = Related to AAXMMD010000082.1; note = Vibrio cholerae
MKKNKSYKINQSPLYKLSSHKKLAACLGLDNEKTLSNILQHGDNNYYVSTLPSGRVIEVPKPQLNRIHRRLNKLLTRIEVPDYLNSGVKGRSNVKNAQDHIGELAVLKLDIQNFYQSVTQQQIARCFVKSFACPKDVAETLSKLCVIHGHIPTGSSISQSLAFIVNRPVFDHINIYSISKGIRFTCYVDDLTFSGQTIPKGFSSYITSYLKRNRSYKCHKMRVYKTLTPKLITGAVVVGKLLKVKNRHRNQIQKLLHSYDSMVKSYKPDDNKLINYFQTLQGHLYSAAQINPRYRQMGDIIVQRRCHLGVPALNQNTKK

SEQ ID NO: 3019 - protein, 319 aa, unidentified
  source 1..319: note = Related to NZ_CP074587.1; note = Pseudoalteromonas piscicida
MKKNKSYKIHQSPLYKLRSHKKLASCLGLEKEQTLRRLIKQGDKNYYVSKLPDGRVIEVPKPQLNRVHRRINKLLTRIEVPEYLNSGVKGRSNVKNAREHTGELSVLKLDIKKFYPSVTEQQIARCFVKSFGCTKDVAETLSKLCVVDGHLPTGSSISQSLSFTVNRPVFDHLNTYAKARKIKFTCYVDDLTFSGQAIPKEFCKYVTAYLKRSRGFKCHKIRVYKAITPKSITGAVVVGNVLKVKNCHRKRIQKLLHLYNYMVKRYKPDDENLINYFQRLQGHLYSAAQVNPRYRQMGDIIVQRRCNLGVPALNQNTKK

SEQ ID NO: 3020 - protein, 327 aa, unidentified
  source 1..327: note = Related to JAHKQO010000049.1; note = Paraglaciecola arctica
MEKQYHLNQSPLYKLRSFKRLAKILDCPQKSLEKLLLQPNNNYYTSHINQEKIIKGSKQIVQRKIQVPKPQLNRIHKKVQKFLSKIEKPGYLFSGVKRRSNVSNALYHVETDYMRKMDIQKYYEKTSAKYVYKCFVNTFRMAPDLAKVMTKLCTFNSHIPTGSSLSQNLAFFCNLHLFNQIESFCKKRKISFSLYVDDLTFSAKHKLTKDLTNRIVHIFNKNSDYVIHKFQVYNKETPKLVTGVILKNNIMLVPNKLRVKMLNHDKEKSIIIDNLSNDRDGAINFYQRFIGLVSCANQISPNYKLWTKELCEERKKYGIQAVTGKKD

SEQ ID NO: 3021 - protein, 323 aa, unidentified
  source 1..323: note = Related to NC_018632.1; note = Alteromonas macleodii
MELKKYDINQSPLYKLNNYKRLLKILDIKDKSLTKLLVAGDNNFYTSEIGGRKVQVPKPQLSRLHKRLQKLFSRIQTRPFLYSGVKGRSNVDNARVHEKSSHLLKVDIAKYYESTNFKRVLKCYINIFKVSPDLAEILARLSTYSGHVPTGSSISQSLTYFCNIKVFDQVMLYCKKRGVTFTLYVDDLTFSSRVPLGNGFLGGINLIFSKNTDYKLHKIRAYNPTTPKKVTGVILKGTSLDVPNDIRKRLNEFKMKHRRVVLNYVNNSTPSSYENAIAHFQKFIGLVSCASQISPYYKLWTDSLCNERRVNNIPAVNQNNPMP

SEQ ID NO: 3022 - protein, 313 aa, unidentified
  source 1..313: note = Related to NZ_CAJHOA010000005.1; note = Denitrificimonas caeni
MIKSYNLNQSPLYRINSHKKLSSVLGVKSSSVLTKIVSKSDNNYYLSKVDDRDIQVPLNQLRRIHKRIDSLLRRIEQPDYLYSGVKGRSNVLNARVHDNNYNVLKLDIKSYYQSVSKDQVARCFISVFKCSQDVAKTLSEICTYNNHIPTGSPVSLSLSMAVNRPVFDHIHKHSHSRNIRFSCYVDDLSFSGKVIPLSFRDYIVYYLKKSRGYECHKIRSYNPSTPKKITGVVLTKNGLKVMNRHRSTISSLLNDRKRILKNNKKDDELTINFYQKLIGHLFSAGQINGRYKQLGRILVNERKLYSIPACNKK

SEQ ID NO: 3023 - protein, 312 aa, unidentified
  source 1..312: note = Related to VXNK01000080.1; note = Rhodospirillaceae bacterium
MPYEIENSPLFKITSIHRLSEVLQLRVGRLRRLEYLTGQFKEGTTERNGKQRKTETPIRTMCRVHNRVQKLLSRIQMPNYLHSGKRKRSYLSNAVAHSGLIQSFQVDIAKFYPSCTWHHVYLCFIRQFQCSSDIAGIMATILTYRGHIPTGSPTSSLLAFLSHKEMFDALYELAQSHNLTMTVYQDDISFSGSSISESFRSEVRCIIKRCNLVPKRSKQRYCHGGRSPNITGVVLTSRGPKAPRSRHLALRQSIDEFDAAESEIDLRISYHRMMGRLSEIERVQGRLFDLKPKLKSRFRSRLKAMSQCPQVE

SEQ ID NO: 3024 - protein, 351 aa, Pseudomonas sp.
  source 1..351: note = Related to JAKMVT010000021.1; note = Pseudomonas syringae
MKQKRKKSVKRERKSYDICQSALYNTSTKSKLASLFSIGLHELRECIGDYRQFQLIPEPDPFKAGKLPKARQVQKPSARLLVIHEQILKLLRCVRVPEYMQFALKGTSYKINAESHLSKNTVATLDIRNFFGSTSKSKVFNFFKEDLKAPGDVANLYADLITFENCLPTGSPLSPLISFYANKNLYEDINNLAKAHNLKFTCYVDDLTFSGDKISSGFMWQIEEAIAKYGHVVARDKTKIYKNGRPAHITGVIVHDGVIRVPNARHRKMRLIKAAIARGKGTHGFSKKELEYKLGGLLGEAAYLDPSHLPAAIEFNKSVQRYSLVATEYKSNRPETGSEQPLDSPVNLPWD

SEQ ID NO: 3025 - protein, 351 aa, Pseudomonas sp.
  source 1..351: note = Related to NZ_CP056030.1
MRQKREKVVKRERKSYEICQSALYNTSTKSKLASLFSIGIQELKECIGDYRQFQLKSEPDPFKAGKPPKVRQVQKPSPRLLVIHERILKLLRCVRVPEYMQFALKGTSYKINAEAHLGKNSVATLDIRNFFGSTSKSKVFNFFKEALKAPGDVANLYADLITFDNCLPTGSPLSPLISFYANKSLFDDIDNIAKAHNLVFTCYVDDLTFSGDKISDGFMWQIEQTIAAHGHVVASDKTKVFKNGRPAHITGVIVHDGLIRVPNARHRKMRLIKAAITSGKGTHGLSKKELEYKLGGLLGEAAYLDPSLLPAAIEFNKSFQKSNTKTIEHKADHTNKNDKQSPDSPIDVPWE

SEQ ID NO: 3026 - protein, 350 aa, Pseudomonas sp.
  source 1..350: note = Related to FNSP01000003.1; note = Pseudomonas marginalis
MRQKREKAVRRERKSYDISQSALYNTSTKLKLASLFSVEIGALKDCIGDYRQFELIPEPDPFKAGKPPKSRLVQKPAPRLLAIHERILKLLRCVRVPEYMQFALKGTSYKRNAEEHLHKKCVATLDIRNFFGSTSKSKVFNLFNNDLKAPGDVANMYADLVTVDNCLPTGSPLSPLMSFYANKNLFDDLSKLAHAHNLTFTCYVDDLTFSGEKISESFLWQVERAIAAYGHIVASNKTKLFQNGKPAHITGVVVHSGAIRVPNARYRKIRLIKAAIATGKNNYGLTRKELEYKLGGLLGEAAYLDPSNLPAAIEFNKSFKRSSSPLPEHVPDNPAATEKTFDDASDLPWN

SEQ ID NO: 3027 - protein, 371 aa, Pseudomonas sp.
  source 1..371: note = Related to JAEKFB010000009.1
MKLRREKKPKKERKSYDISQSALYNTSSKAKLAAIFSTDIQEVIRCIGDYRRFELIPELDPFKLGKPPKVRQVQKPAPKLLAIHERILRLLRCVQVPKYMQFALKGTSYKNNAEMHLLGRCVATLDIRNFFGSTSKSKVFNFFNGPLKAPGDVASLYADLTTFDDCLPTGSPLSPLLSFYANKALFDDLNIIATEHGLTFTCYVDDLTFSGESISRRYLWQIENTIRQYGHVVASRKTRLFKDGIPKHITGVVVHEGSIRVPNVRYRKMRLIKEAIHGSGKNHGLTRKELEYKLGGLLGEAAYLDPSNLPAAIEFGKTSHKNFLKTITSVQEYLEPPKPNATDEKFHPPWHEQELITMLLPEHANDGNEAD

SEQ ID NO: 3028 - protein, 351 aa, Pseudomonas sp.
  source 1..351: note = Related to NZ_UWFM01000116.1; note = Pseudomonas viridiflava
MTLKRERKTKKERKSYDLSQSALYLTRNKSRMAAILATTTQNLTDCIGDYRRFETVPENDPFKLGNQPKPRQVQKPAAKLMAIHERILKLLRCVKVPEYMQFALKGTSYKKNAEAHISGKYVATLDIRNFFGSTSQSKVFNFFNGPLRSPGDIANIYAQLTTIDNCLPTGSPLSPLLSFYANKKLFDDLNDIAKEHELTFTCYVDDLTFSGECISNRFLWRVEERIRKSGHIIAANKTRIFSETMPKHITGVVIQDGGIRLPYVRQRKIRLIKDAISGKAKNHGFTKKELEYKLGGLLGEAAYLDPRNLPAAIEFSKSVRMNSFKFFKLFDYVELPKPAAPDENFIPPWQE

SEQ ID NO: 3029 - protein, 353 aa, Pseudomonas sp.
  source 1..353: note = Related to JAAQYG010000033.1; note = Pseudomonas lundensis
MRLKRVKKTKQEKKSYELSQSALYKTSSKCKLSAIFSLSAPDILNSIGDYKRFEMSPVLDPFKIGTPPKTRWVQKPKGKLLAIHERILKLLRCVEVPEYMQFALKGTSYKKNAEAHLAGSMVATLDISNFFGSTTKSQVFNFFRDRLKCAGDIAKIYAELVTCDDCIPTGSPLSPLLSYYSNKPLFDELSCLAKNANLHFTCYVDDLTFSGAYIGRGFLWQVEKTIKKYGHITASKKTRLFGLGVPKHITGTVIADGALKVPNVRFRKIRLIKLAIEGRISKFGFSDVQLKYKLGGLLGEAAYLDNDFKSLADEYNRKIRELNLASLEGGETYRSSTKPLELADDNFIPPWEI

SEQ ID NO: 3030 - protein, 359 aa, Pseudomonas sp.
  source 1..359: note = Related to NZ_JACVZE010000010.1; note = Pseudomonas pisciculturae
MKPKRVKKAKQEKKSYEISQSALYKTTSRSKLAAILSLSIHDLLCSIGDYKRFEMTPKPDPFKIGKPSKTRWVQKPKGKLLAIHERILKLLRCVKVPEYMQSALKGTSYKRNAEQHLSGCMVATLDISNFFRSTKKSHVFNFFRDRLECPGDIANFYAELVTCDDCIPTGSPLSPLLSFYSNKPLFDELSVLAKNSNLQFTCYVDDLTFSGSHITHDFLWEVQKIVKKHGHVTATKKTRLFGAEVPKHITGTVVAEGVLRVPNARFRKIRLIKLALEGKRDSFGLTKTQMEYKLSGLLGEAAYLDNDFKSLADRYNTTIREINLASLGDGKYRPSLKATDLIDDKFIPPWETEQSSSKS

SEQ ID NO: 3031 - protein, 359 aa, Pseudomonas sp.
  source 1..359: note = Related to NZ_LUUE01000002.1; note = Pseudomonas protegens
MKQKPVESHIKNYKSYALNQCAMFNTSSRTRLAAILLKPLHLIMESIGSYSKFKKDPKPDPFSHKKPRRPRSVQKPKGELLHIHNRMLRLLKRVVVPDYMQAALAGTSYRKNAAMHVGGPCVATLDIRNFFVATNKSKVFNFFETDLRCTGDIASIYSELVTCNDSLPTGSPLSPLMSFYANKRLFDELDVLARNNGFIFTCYIDDLTFSGNNISGSFLWDVERIVHCYGHEVTAGKTRLFKAGRPKHVTGVVLFDNEVSVPNSRYKKLRNINAALEGRASMHDFSEVELLNMKAGVLGEIAYLDPKKGFLARRAIDELKLRDLKILGDGKLKISTSPPAYLSPGEVPPWQPLPLATPD

SEQ ID NO: 3032 - protein, 333 aa, unidentified
  source 1..333: note = Related to CP008911.1; note = Burkholderia pseudomallei
MPGNASAKLLARRSRSKRYDIDQSHLFRVGSPARLSMVLGVSLDKLLALSRRTDNYKLFQKEDVDPFARHHRRRRDIQEPKAALKKIHERVAKLLKFVRVPTYLHSAIKGVSYRTNALEHAERGVSILTMDIADFYPSTGASRVFNFFRDVLECAPDVSKLMAKLLTWRGVLATGSPASPLLSFHCNRPMFDEMAAVAVKSEFTFTCYVDDVTFSGVNVRRGLVSEIACIARRHGHRIKEHKTRFYSAGQAGIVTGVVVEDGSVSVPHERRLKGRRIETAIDGATDPVERLALTEKLMGLAGEAAYLDKAFRPWVDSIRGKLKVLRRSYASRR

SEQ ID NO: 3033 - protein, 330 aa, unidentified
  source 1..330: note = Related to NZ_LOVC01000028.1; note = Burkholderia ubonensis
MPESTPKKVVRRRDGSDRYEIDQCALYKTGSLRRLAKILLIEKSDLIALSNRRDLYSVYDLEDDDEFSDKRGKVRKIQDPVEELKKIQRRVAKLLHYVRVPRYLHSAVKGVSYRSNVKAHAHAGSNILTMDVASFYSSTRESQVFRFFRETLLCAPDVARMLTRLLTWHGVLPTGGPASPLLSFHCNREMFDEIAREAERAGVVFTCYVDDITFSGTNVKRGFASLIDRIVRRSGYRIAAQKTRFYRPNQAALVTGAVIQDGKVSVPHARRRKARRIEIAARSTKDPARRLALTEKLMGLAGEAAYIDPAYRGWAYAVRGRLVALRKSAA

SEQ ID NO: 3034 - protein, 337 aa, unidentified
  source 1..337: note = Related to NQMK01000010.1; note = Pusillimonas sp.
MAKRGLYDINQCALYKLGSKARLAQILGVPKARLLILVRRSENYRVFTLPQEICEFTGKVRKERLVQEPKPELRRVHERIQRLLSRIRPPEYGHAAVKGRSYRTNAEAHLNGPRIATFDVRRFYPSTSRSAVRNFFSEQLCCAPDVADLLAQLCCWQNVKESNSSSGLPTGSPLSPILSLYANRPMFDVLNDYAGRHQLVFTCYVDDLTFSGEMLPAGISKFVEKIVTAGGHTLATEKTRLFRRNQVKHVTGVVLSNSQVKVPHARFLKARAIASAITAHETADARYRLLLQRKLAGLLGEAAFLDSRFAGWANRAYADLRAVQAEVHMAESLHVES

SEQ ID NO: 3035 - protein, 336 aa, Achromobacter sp.
  source 1..336: note = Related to CADIJU010000003.1; note = Achromobacter marplatensis
MAKRELYDINQCALYRLGSKTRLSILIGVPKSKLLALVNSLENYRVFPLPQEVCQFTGKVRKERLVQEPKPELRRVHERIHKLLSRVRPPEYGHAAVRGRSYRSNAEAHINGRRVATFDVRRFYPSTSLSAVRNFFADQLCCAPDVADILARLCCYRNVKEASSLLGLPTGSPLSPLLSLYANKPLFDALYHYAGRHKLVFTCYVDDLTFSGALLPRGLSQFVTKMVESCGHTLAQEKTRFFRSNQVKHVTGIVISDNEIKVPHARFLKARAIASAIAKHAPADVQQRLLLQRKLAGLLGEAAFLDGRYAGWANRSYVDLRAIQEEARAAELHSPE

SEQ ID NO: 3036 - protein, 347 aa, Achromobacter sp.
  source 1..347: note = Related to CADIKQ010000001.1; note = Achromobacter mucicolens
MATRGFYSIDQCALFKLGSKTRLAELLHVPKSHLTKLAAGSDNYRLFELPREVCEFTGKVTKARWVQEPKNDLRQVHERLQKLLARIRPPEYGHAAVKGRSYRTNAAAHVHAAVAATFDIRRFYPSTPRLAVRDFFLHTLRCASDVAELLTTLCCYQDRTEEGAQCGLPTGSPLSPILSLYANRAMFDRLHRFALQHELTFTCYVDDLTFSGPLLPRSLGRFVRKTVDAYGHSLAVEKTKVFRRGQAKHVTGVVIVNNKIKVPNARFKKARAIAAVIQRTASDDYMRLLALQRKLSGLLGEAAFLDPAFSDWARRSYRDLKKINEEAATSTSGVGAAKEGTGAVAFL

SEQ ID NO: 3037 - protein, 340 aa, Alcaligenes faecalis
  source 1..340: note = Related to MSZO01000007.1
MLFMKKQKSYSIDQCVLYKVGSKKRLADILNIPLSSLLKLAKSKNNYRVFELPFEQCEFTGKTKNARVVQEPKKLLKAVHARLQKLISRIEAPKYGHAAIKGRSYRSNASEHISSVYLATLDVRKFYPSTRQSLVRNFFADQLRCAPDVADILTKLCCFFGASKTGGSVGLPTGSPLSPILSLYANKPMFDKLQGYSNDNSLIFTCYVDDITFSGEALPKDIVRKVGEIVYSYGHTIAVEKTKIFREKDTKHVTGVAIKNNRISVPHSRFKKARAIERIISNTPQEELAKKRTLQRKLAGLLGEAGFLDSRYKPWASRSYVDLKKLEYDFNQQSRQVDFK

SEQ ID NO: 3038 - protein, 334 aa, unidentified
  source 1..334: note = Related to CP062062.1; note = Janthinobacterium sp.
MTNPPLRLVTKTPKKFYPINQSALYKIGSKKRLAKILATSLERILLLSTATDNYKIFCLPEEVCEFTKKTKKSRWVQEPKRPLRSIHERIQKLLKSIIYPDYSHAAVKGRSYRTNAETHKDATRVATFDLRKFYPSTSSSRVRDFWAEQMLCAPDVADLLAKLTCHEGCLPTGSPLSPLLSLYANRPMFDDLNELANSHNLKFTCYIDDLTFSGPIIPIGLPRLVSNIVHRSGHTLSVEKTKIFRSDQRKHVTGVVVYGNSLHVPYSRFFKARAIQNAFDLEKNSIAKLALARKLSGLLGEAAYLDTRYADLAKKSYVELKRINEEIMRDKLPF

SEQ ID NO: 3039 - protein, 319 aa, unidentified
  source 1..319: note = Related to nan
YTIDQCALYRLGSKARLSAVLGITLDWLLQLAESEKNYCLFNLPEEVCPFTRRVKKARAVQAPKNGLRTVHERILHLLRPIILPTYAHAGIKGKSYRSNAAAHKDSPRLAAFDIRKFYPSTTASRVYYFFADKMLCSPDVARLLTALTCYKNGLPTGSPLSPLLSLHANMPMFDSLEALALSNDLVFTCYVDDLTFSGEKLPIGLPRLVKGIVEKYGHKVSEEKTRLYRRRQGKHVTGTVLLDGRILVPNTRFHKARAISAALASERDPALRLELGRKLSGLLGEAAFIDDRYAKWASDSYISLRKLQADFACEEASLD

SEQ ID NO: 3040 - protein, 334 aa, unidentified
  source 1..334: note = Related to JACQDW010000206.1; note = Burkholderiales bacterium
MQKSLPNPPPTKKIKRTYSIDQSALYKIASMKRLASLIGLPRGKLLRIAGGAHKYKTFVLPEEKCPFTGKVRKSRKVEEPINELRYIHERIHALLCKVDHPEYAHGAVKGRSYRSNALAHVESQSLATFDMREFYPSTSESRVYTFWVEQMCCAPDLANVLAKLICYKGRLATGSPVSPLVSLYANKPMFDELSRIALSRNLKFTCYIDDITFSGQNLPRNFEQWIASIVGRYGHALSEKKTRFFRSEQAKHITGAIIKDGLVTAPHSRFQKMRLIGSALRQVKDFNLRKSLLRRQAGLIAEIAYLDKSFSAMAESANQQFRDLRVKAATDIVD

SEQ ID NO: 3041 - protein, 348 aa, unidentified
  source 1..348: note = Related to RDZZ01000077.1; note = Polaromonas sp.
MPRGLYEVTQCALYKINSKARLAGLLHVSVPVMLGMASSRKYQEFTLKEKVCPFGGKSRKARMVQTPTEALRPLHDRIHDLLRRCAPPNYAHAAVKGRSYRTNAEAHKGSCVAATFDLESFYSSTSETTVFRFFVDQMKCAPDIASLLARLICVERDDSYPCLPTGSPLSPLISVYANKPMFDKFAHLAETHALSFTCYVDDLTFSGLAMPKGLERMVTSVAKRYGHTLATHKTMTFGPSSAKHITGVVIFNGKITVPNARFRKARKIQAAINAENDPIKKISLMQKLSGLLGEAAYLDNRYSNLAKKAQHSMSEFRLNSPAITMSAIPVTQEDASKAGFVLTNDVPF

SEQ ID NO: 3042 - protein, 340 aa, unidentified
  source 1..340: note = Related to NZ_JQKD01000066.1; note = Xenophilus azovorans
MAGYALNQCALFKVGSKAKLASVLLLKQRDLVDLSEDGQYRQFRLEASVCEFTGKRTKARDVAEPKKALKRVHQRIGDLLSRVLLVEYAHAAVKGRSYRTNAAAHQHGDEIATFDIENFYPSTTHAHVYHFFFREMKCAADVAHLLARLLCFRATPEALGCLPTGSPASPIMSVYANKPLFDALHRLAQELGLVFTCYVDDLTFSGPQIPPSLGRRVDSIVAAHAQRLHASKSRVFRKGKPKHVTGVVIADGKLAVPDARFFKARRVEQRLVAETDPGERARLSRILCGLLGEAAYLDNKYANWAKDSYRKLAAETRLAVVTAAGTIAFAATRADPPTGA

SEQ ID NO: 3043 - protein, 370 aa, Achromobacter sp.
  source 1..370: note = Related to CADIJW010000048.1; note = Achromobacter dolens
MSENQKPPAPAKPRKTYALNQCALYKVGSKKRLEKILGVNVADLIRLSADEGNFQVFELEAEVCEFTGKTRKARWVQNPVPELKAILARITKLLSRVRVPDYCHGATPGRSYRSNAQAHVGAQSVATFDLKDFFPTTTSKQVFQFFSKDLECAPDVAGLLTDLCTHGHVLPTGAPTSPILAYWANRRLFETIDRRGKVLRLKLSVYVDDITLSGDAIPRSLADQIEGIVKSHGHKLSGHKTKIFGPSRPKHVTGVVITGQSLRVPHARFHKARAIRIALYAEKDSRKRVLLAAKLCGLLGEAAFLDPAYKRMASDSVKLLAAAKAQVAPRLSRSIGGPRRKRGRSNPRTVATMGGVQLREQLDLSDAPTN

SEQ ID NO: 3044 - protein, 327 aa, unidentified
  source 1..327: note = Related to JAECRL010000003.1; note = Burkholderiales bacterium
MAAKRLKSYPLDQCALYKVGSKKRLAKILDVDLPKLVRLSADQGNFQVFEIPEEVCEFTGAKKKARWVQNPVPDLKAILKRIAGLLSRVQVPDYCHGAMKGRSYRSNAAVHVEEESAATFDLKDFFPSTTSAQVFAFFRHTLQCAPDVAGLLTDLCTYGKILPTGAPSSPILAYWANRKLFDVLEGRGRDLSLKLSVYVDDVTFSGDAIPRSLPEQVDGIVSKHGQKLSAHKTRIFGPGKPKHITGVVVAGGRLGVPHARFRKARAIRAALAAAKDDEQRELLASKLCGLLGEAAFLDPRYRRWAEDSARQLAAIKAARLSAKRAVK

SEQ ID NO: 3045 - protein, 333 aa, unidentified
  source 1..333: note = Related to nan
MKNKRPPKSKDKKYEINQCALFKVTTKKRLASILGVDTGTLSRLSIDERNYNVFEIAEEKCEFTGKIVKARLVQNPVPELKDIHRRIHDLLSRVVAPDYCFGGAKGRSYRSNAAAHTDSVAAATFDLKSFFPSTKSAQIFGFFKDKLLCAPDVAGILTDLCTYKGALATGSPASPQLAFWANLPLFEVLETIAHRYNLILSVYVDDITMSGPRVPAQLQHQVNEVVQKYGHKLSPGKTKIFRRGNPKHITGVVVHNGFLRVPNSRMKKARAISEALTRTSATDLTQREHLASKLSGLLGEAAHIDSRYRPWAQRSYRDLRFLQRLANVPPIAF

SEQ ID NO: 3046 - protein, 368 aa, unidentified
  source 1..368: note = Related to NZ_JABBFW010000053.1; note = Azohydromonas caseinilytica
MKEEFKSKKKRKLYSLDQCALFKIGSKKRLAAILRVSQDRLEPLGVDKGNYFVFTLKEQICPFTGKVKGARRVQNPLPELKLVQRRILSLLARVEMPEFCHGAKQGSSYRSNAKAHVDAKNVATFDLKSFFPSTSASRVFSFFRNTLQCAPDVARILTKLCVCHGALATGSPVSPILAYWANCELFRVLNRLAEENHLLMTVYIDDFTISGDVLPRNIVWQVKSIVEKYGHSLSLSKTKIFRENEAKHVTGLVIYEGNLTVPHIRFKKARAIEKAIAVASNDEERLDLMRKMGGLLGEAAYVDKRYKSWAFKIYSKISQAQSVLRRKEASASEKRKFEEACVPDVMPDKASWSDISPKAQDNSSSMKS

SEQ ID NO: 3047 - protein, 329 aa, Pseudomonas sp.
  source 1..329: note = Related to NZ_MLEM01000008.1; note = Pseudomonas syringae
MQPKKNTRKKRKPDNQLPIHQCFLYKIGSPKRLADLLNVSAAELEDTLRSENNYKLFNKLLSPNPFTGKLRKKRAVQEPKSRLRKMHERILALLRRVQYPSYVQGGVKHRSYQTNAATHLGARQTATFDLKNFYGSTRYCLVHDFFHKSLCCPTDIAGRLASLTTWNGVMPTGSPLSPLLSFWAAKGFFDKCETLAAKYRLNFTCYIDDLTFSGDKISGKFQSELEIIASRFGYELAKEKTKVFRFGIPAHITGVISHKAKLSVPHSRLKGARKIQDAIEGRGEAYGFTTAQLKQKLAGTINEAATIDAVKYEKWATHTRKAAEDNEKE

SEQ ID NO: 3048 - protein, 329 aa, Pseudomonas fluorescens
  source 1..329: note = Related to JAEKIK010000020.1
MQPKKNIRKKRKPDNELPIHQCALYKVGSPKRLADLLNISTIELEVILQSESNYKLFNKVLAPNPFTGKSRKNRAVQEPKSRLRKLHERILSILRRVQYPGYVQGGVKHRSYQTNAAIHLGARQTATFDLKNFYGSTRYCLVHDFFHNTMCCPTDIAGRLASLTTWNGVMPTGSPLSPLLSLWAAKGLFDKCEVLAIKYGLNFTCYIDDLTFSGDQISGKFQSELKIIASRFGYELAKEKTKIFRFGVPAHITGVISHKAKLSVPHARLKGARKIQDAIDGKGKAYGFTEAQLKQKLAGTINEAATIDAVKYEKWAIYSRKDAGDELSQ

SEQ ID NO: 3049 - protein, 328 aa, Pseudomonas sp.
  source 1..328: note = Related to NZ_CP018420.1; note = Pseudomonas veronii
MQLKKSTRKKRKPDNELPIHQCGLYKVGSPRRLAELLKISEIELKKFLESQNNYKIFTKVLAPNPFTGKFRKKRAVQEPKYRLRKLHERILCMLRRVQYPDYVQGGVKHRSYQTNAAIHLGARQTATFDLKDFYGSTRYCLVHDFFLDVMCCPTDIAGRLVSLTTWNGVMPTGSPLSPLLSFWAAKGLFDKCEELAVKYGLNFTCYIDDLTFSGDQISGGFQAELKILASRFGYEIAKEKTKIFRFGVPAHITGVISHKATLSVPHSRLKGVRKIQDAIDGRGAAYGFTAVQLKQKLAGAISEAASIDAVKYEKWAFYSRKDIEGDLV

SEQ ID NO: 3050 - protein, 331 aa, Pseudomonas sp.
  source 1..331: note = Related to CP004061.1; note = Pseudomonas aeruginosa
MQPKKSEKPKRKPDNEIAINQCRLYKVGSFRKLSDILKTSPAEIMDLLVSDKNYKKFTVSQSANPFTGKPRKQREVQEPKSKLRRVHNRVLALLRRVGYPDYVQGAVRYRSYQTNAALHIGSRQTATFDISDFYGSTKRHLVHSFFHDVMKCPTDIAGKLARLTTCDGVIPTGSPLSPLLSFWVAKGLFDECAAVAKEYGMKFSCYIDDLTFSGDRIPRELKSRLKIICRRYRYRLKSEKTKVFRFGEPAHITGVIKMDAVLSVPFARLMAVRKLMDAIEGRGDSYGYTVEELKRKLAGTVSEAASIDGQFKKWALHAKQDAKSSSRPSAS

SEQ ID NO: 3051 - protein, 325 aa, Pseudomonas sp.
  source 1..325: note = Related to LN831024.1; note = Pseudomonas aeruginosa
MQPGKSKRVERKPDNSLELDQCRLYKIGSEKRLAEILGLSLQDLRLLLRSESNYKKFTISQSENPFTKKPRKKRAVQVPMNRLRRVHAKIFSFLRRVKYPDYVQGAVKGRSYQTNAAFHARSRQTATFDISKFYESTKYHLVHEFFLGALKCPTDIAGKLARLVTCDGVMPTGSLLSPLLSFWVAKGMFDECAALAETYDLKFTCYIDDLTFSGDRIPRELKSKLKIIVSRYGYKLAIEKTKVFRFGAPAHITGVVKLNGELVVPFARLMAARRISDALDGKSPDYGYTKNELKRKLAGTIAEAATIDGNRFSKWAAFAQKEARD

SEQ ID NO: 3052 - protein, 334 aa, Pseudomonas fluorescens
  source 1..334: note = Related to CP031450.1
MRIEMQPKKNEKTKRKPDNQIPINQCRLYKVTSPKRLAEILNLDMTGLLELLNCSTNYRFFDIPLSINPFTGKSRKKRSVQEPKQKLRRVHKRILLLLRRMSYPNYVQGAVKHRSYQTNAEVHKESRETATFDIRDFYGSTKYHLVHDFFLRVMGCPTDIAGKLANLTTCNGAMPTGSPLSPLLSFWIAKKMFDECHALAESHKLKFTCYVDDLTFSGNHIPRILKSKIKIIASRYGYSIANHKSRHFRFGQPAHITGVISLDKKLHVPFSRLMAVRKVTDAIDGNSDTFGFTKTELKKKLAGMVSEAATIDNRFGKWAIYTQNEVSDSSTPSD

SEQ ID NO: 3053 - protein, 323 aa, Pseudomonas sp.
  source 1..323: note = Related to JAIZEG010000001.1; note = Pseudomonas aeruginosa
MQQKKKEKNECKTAKSYPIDQCSLYKVGSAKRLAAVLGIELDKLKKLLLSDFNYKVFDIAGSVDPFSGKIFKTRHVQEPKDDLRAVHSRILRLLQNVSIPPYVHGAIKGRSYQTNAAAHVKGKQAATFDIHNFYGSTKSNLVHDLFHDVLACPSDVAGKLARLVTYKGMMPTGSPLSPLLSYWVAKPMFDEYACLARQYGLEFTCYIDDLTFSGDRIPRDLRYRVGIIARRYGYRISKKKTRLFVQGKVKHITGVAVAESGLMVPFSRLKAARKIMGAIEGSGESHGLSSEKLRQKLAGLIGEAATIEQRFGKWARKARTACS

SEQ ID NO: 3054 - protein, 333 aa, unidentified
  source 1..333: note = Related to NZ_BDMN01000231.1
MQRKPTKRKRKLFKRYPVNQCALYKVGSIKKICQLIGIKKSNLNSILKNPLQYREFVNKESFDHFSLKTSKTRQIQEPTGNLKKIHERILYLLEPVELPNYSHAAVKKRSYRSNAASHVLSKKIATFDLENFYGSTKNHLVYNFFLDKLKLPHDIAKKLTKITTFNNSMPTGSPLSPLLSLHAAKPMFDELESLAQKYNLIFTCYIDDLTFSGSTIPKSLNRQIVHIINRYGYNLSNHKTRIFNESEVKHVTGIIINKERLRAPYSRFMTARRIKKAIDGKAPMHNFSKIKLLEKRAGLLGETAYLDPTYKRAAKNAQIELKNARNQIKKSTL

SEQ ID NO: 3055 - protein, 326 aa, unidentified
  source 1..326: note = Related to NZ_BLYC01000085.1
MLRKPTKRKLKYLKHYPINQCALYKIGSIKKICDIIGIEKNELNLILKSPPKYRQFVNKESFNHFSLKKSKERQVQEPVGDLRKIHERILDLLKPVEPPDYSHAAVKKRSYRTNAAAHVLSKRIATFDLKNFYGSTKNHLVYNFFLDQLKLPHDIATKLTKLTTFHNSMPTGSPLSPLLSLHAAKPMFDELESLAQGYNLIFTCYIDDLTFSGSTIPKSLSKQIVHIIKRYGYNLSNHKTRIFNESEVKHVTGIIINEERLRAPYSRFMTARRIKLAIDGKASTHNYSKIKLLEKRAGLLGETAYLDPTYKGLAQKAQLDLKTARG

SEQ ID NO: 3056 - protein, 346 aa, unidentified
  source 1..346: note = Related to JADMKV010000009.1; note = Methylobacter sp.
MLKKPTKRKRKCLKRYSIDQCSLYKVRSAKRLSEILGVEKQRLDSILKSSAKYREFTIEETTNPFSSKFIKSRQVQAPSDELRRIHERILYLLEPIELPNYAHAAVKGRSYRSNAATHVNSARMATFDLKNFYGSTQRYLVYSFFLDNLKCSPDIAGKLTELTTFRNALPTGSPLSPLLSLHAAKPMLDELSKLAQLHDLIFTCYIDDLTFSGKKIPRSLERRVSRIVGKYNHQLSIHKTKIFDEDKPKHVTGVVINKGKLAVPHSRFLTARKLELAIAGKFPMHGNSMLKLCEKLAGLLGETACIDPTYKKWAEKAQEDLRKARTKDSSIVGPDSTDFGSCQQID

SEQ ID NO: 3057 - protein, 360 aa, Pseudomonas sp.
  source 1..360: note = Related to QUZU01000011.1; note = Pseudomonas kairouanensis
MWPKGLSQYLNGIKTEMRPQQSSAKKRRSFKLYTINQSALYKITSPKKLSNALNRSELEIDVLLGSDENYREFTLLEELNPFSHKRKKARLVQTPNKDLRSVHERILKLLQRIEYPEYAHAGVKKRSYRSNAQAHQKSKEVATFDLSNYYGSVKAHHVYDFYLKQLQCVRDVSGILTRLSTHRNCIPTGSPLSPLLALHSSRTMFDSLDCLAKRYGLVFTCYVDDLTFSGDAIPPSLEREVVSIVRRNGHSINKKKTRIFRAHQAKHVTGTVIINGNITVPHARLVTVRRLEDAINGKMDSFGFSETKLMEKLAGVLNEASYLDSKFRSKALAARSNLSSPSPSPSPSPSPAPQVADASI

SEQ ID NO: 3058 - protein, 333 aa, Pseudomonas sp.
  source 1..333: note = Related to JAJHPU010000021.1
MNGIKAEMRQPKTSAGSRRTSKLYPINQCALYKLTSPKKLCEALKIEKSLLSDVLESDENYREFTLLEEVDPFSRKIKKKRLVQTPNKKLRNIHERILQLLQRIEYPDYSHAGVKKRSYRSNALVHVNSKTIATFDLKGFYGAVKSYHVNTFFSEQLNCVGDVAGILTKLTTFRNCVPTGSPLSALLALFTSKPMFDDLDALAKKHKLKFTCYVDDLTFSGDSIPSSLERDVSSIVRKHGHSLSINKTKIYRENQPKHVTGTVILNNRIHVPHTRLLAARRLQSAINGEIESFGFTEEKLIQKLAGMLNEASYLDVRFKYKALTAKAMLKSAK

SEQ ID NO: 3059 - protein, 335 aa, unidentified
  source 1..335: note = Related to SCRP01000034.1; note = Paraburkholderia sp.
MCAQKTKVGAVRASHQRYPISQCCLYKIGSRSRLADLLYIEKVDLVTLPGERSYKVFTLPEKRDEFSGKIKKKRIVQDPKRPLRRVHDRILYLLNKIELPEYVHAAVKGRSYRSNAAAHTTAAHEVLTLDIKSFYPSVSYLLVREFFRYKMKCASDVATTLADLCTYKGALPTGSPLSPLLSYFACGDMFDELNRLAVECGLKFTCYVDDLTFSGEKIPGDLESRVKSVLRRYGHRLAVDKTIRYRPHSPKSVTGCILHNGAIHVPHSRFRKARMLAAAIATTDDPALTHKLYERLAGLLGEAAYLDGRFTSWKEDTARLLKLATQKLGAAKEAT

SEQ ID NO: 3060 - protein, 312 aa, Pseudomonas sp.
  source 1..312: note = Related to JACYWI010000012.1; note = Pseudomonas syringae
MKKRKNLQLKKDIPLDQCALYKIRSKRRLCQILNIPISSLKGFMNDDRNYHTVDIEEFFNELTGKRKKARTASVPNYWLKKLHSRVHRLLSSIAAPLYAHGSIKSRSYITNALVHVGSKEVLTMDLRDFFRSVKRHHVYFFFKDKLCCSPDVAGVLSNLLTYQGALPVGSPASAIIAMWACHTMFERLNQLASEYRLKFSVFVDDLTFSGEVVPSGYQSLVERICAQSGLSVREDKTVLYKHGTAASVTGVIIYAGAIKPPHSRYQNLRKLSAILSQQGAHAIVNGKHAKYSFQGGRNETMLLRNISIPHVD

SEQ ID NO: 3061 - protein, 315 aa, Pseudomonas sp.
  source 1..315: note = Related to NZ_BCBP01000051.1
MKKRKSSPPDKSIPLDQCALFKVRSKRRLCEILRVPLSSLKGLMDDDQNYHAVEIEEFVNELTGKRKKARIASVPNFWLKKLHLRVHDLLSAITTPIYAHGSIKKRSYITNALVHVEAKEFLTMDLRDFFRSVKRHHVYFFFKDKMACSSDVAGVLSYLLTYQGALPVGSPVSATLAMWVCHAMFEQLNKLASSYALKFSTFVDDLTFSGDVVPSKFQLLVERICQQSGLSIREDKTFLYKNGMAASVTGVIIHNGSIKPPHSRYQNLRKLSTVLSQQGRHAVINGKYARYSFQGGRNETRLLRRINNVQSNDSI

SEQ ID NO: 3062 - protein, 315 aa, Pseudomonas sp.
  source 1..315: note = Related to CP045551.1; note = Pseudomonas putida
MKKRKNLLPKKSIPLDQCALYKIRSKRRLCQILNIPSSSLKTLMDEDSNYHLVEIEEFVNELTGKRKKARTASVPNFWLKRIHSRVHCLLSAIVVPVYAHGSIKKRSYITNALVHVNGKEVLTMDLRDFFRSVKKHHVYFFFKDKLCCSPDVAGILSKLLTYQGALPVGSPVSALLAMWTCHSMFDGLNKLASEYKLKFSTFVDDLTFSGELVPSGFPLLVDRVCIKFGLSIREDKTVLYKNGVAASVTGVIVHEGNIKPPYSRYQNLRKLSVVLSQHGAHAVVNGKYAKYSFCGGLNEARLLRKFNEEKCSLVS

SEQ ID NO: 3063 - protein, 317 aa, Pseudomonas sp.
  source 1..317: note = Related to WIVT01000008.1; note = Pseudomonas helleri
MSQKRRKLLHKKRYPLNQCALYKLTSKKKLSAILGVSLANIKSLCDNDRNYHLVEIEEEFNELTGKRKKARQANVPNFFLKKVHSRVHNLLSRIQTPGYAHGSIVARSYVTNALAHVESWEFLTMDVQDFFRSVKREFVYYFFKDAMFCSPDVAGILSNLLTYKGALAVGSPVSSLLSMWTCKEMFDRLDSLAIKNNLTFSTFVDDLTFSGLKIPASFHEEIESTCRRYGLSIRKDKTKFYKNGMPALITGVIVVSGGIEATYSRFRSIRKLSTILSEEGAHAVVNGKYAKRSLRGGLLEARRIGHISDSRLQSSGG

SEQ ID NO: 3064 - protein, 350 aa, unidentified
  source 1..350: note = Related to JACXXJ020000005.1; note = Agrobacterium vitis
MRRKLVRSSIERYDLERSPFAQRPTQRDIGDLLGTTRNHLRYLVTHKEHFIVRRQEEIGKKKKLRELKFPVADLRGVHERLKYHLNKIRQPSYLFSPRRHRGQRDNAALHLGQNQYLTLDLKQFYPSTTATMVRRWFQDEMGIYPDVAGLLTHLATIDDHVSFGSPLTPVLCTLIHRPMFDKIADLCGSHGLRYSLWVDDLTISGRFVHGDIVCEIRKIIADAGLRSHKIRFRTGSRPVYITGIGVVGRELVAPNSLNLRIKELWEALHLAETLDERDDCIQALLAQLGTQRHICGASSAIGRKAADQMNALRQKRRKMHLEAAEKAAADRLPRSATIVQAPEDAPFDLG

SEQ ID NO: 3065 - protein, 350 aa, unidentified
  source 1..350: note = Related to CP081837.1; note = Agrobacterium vitis
MRRKLFRPPVERYDLVRSPFAQRPTQRDLGDLLGTTRDHLRYLATHKEHFVVRRQEVIGKKMKLRDLKYPVADLRGVHERLKFHLNKIKQPSYLFSPRRNRGQRDNAALHVGQHQYLTLDLKQFYPSTTADMVRRWFRDEMGMYSDVAGLLTHLCTIDDQVSFGSPLTPVLCTLIHRPMFDKIADLCERHGLRCSLWVDDLTISGQFVHGNVIREVRQIIASAGLRSHKIRIRTGSRPVYITGIGVVGRELVAPNTLNLRISDLWENYHLAETTEERDASIQALLAQLGTQRHICGPSSDLGRKAADQMNSLRQKRSKMYRETAARATAARLSRSLALPHAPEDAPFDVV

SEQ ID NO: 3066 - protein, 350 aa, unidentified
  source 1..350: note = Related to JAAMDS010000038.1; note = Agrobacterium rhizogenes
MRRKTARPPIEKYELPRSPFAQRPTQRDIGKLLGASRDHLRFLATHKEHFIVRRQEKIGKKQKLRDLKYPVSDLRGVHERLKFHLNKIRQPSYLFSPRRNRGQRDNAALHLGQHQYLTLDLKQFYPSTTADMVRRWFRDEMGMYPDVAGLLTHLCTIDDQVSFGSPLTPVLCTLIHRPMFDRIADLCERHGLRYTLWVDDLTISGEFVHGDVVREIRQIIAGAGLRSHKVRFRTGNRPVFITGIGVVGRELVAPNAMNLRIKELWEVYHLAETVDERDACIQALLAHLGTQRYISGPSSDLGRKASDQMNSLRQKRNKMHIEASAKALADSLMRSLTEQHSDQDAPFDLV

SEQ ID NO: 3067 - protein, 349 aa, unidentified
  source 1..349: note = Related to NZ_NNRJ01000027.1; note = Brucella thiophenivorans
MPRKRRPPIEIYELPSSPFSQRPTQRDIGSLVGCTRDHLRFLATHKESFIVRRQEIIGKKQKLRDLKYPVADLRRVHERLKFHLNKIVQPSYLFSPRQKRSQRDNAEIHLNQQQYLTLDLKQFYPSTSAGMVHRWLQEKMGMYEDVAGLLTHLCTVDGFVSFGSPLTPVLCTLVHRKMFDEIADLCANNGLNYSVWVDDLTISGKFVHGDIVSEIRDIISRAGLKSHKIAYRTGNRPVFLTGIGVVGRNLIAPNILHLRIKELWASYHTAESYEEKNACIQSLLAQLGTQRYICGAKSVLGRKASDQMNSLRQKRSKMRREAIEQSISNRALRITKEVGLKEDAPFDLA

SEQ ID NO: 3068 - protein, 302 aa, unidentified
  source 1..302: note = Related to NZ_PVWU01000025.1; note = Rhizobium pusense
MPRKARATFSERYPIERSPFAQRPTQREVAALLGETRDDLRFLATHKEHFIVRRQAILGKQKKARDLRYPVSRLRAIHERLKFHLNKIKQPSYLFSPRKNRGQRDNAALHLGQRQYLTLDIKQFYPSTTAQMVRRWFRDELGMYDDVAGLLTHLSTIDDVVSFGSPLTPVLCTLVHRRMFDEIADLCEQRNLRYSVWVDDLTISGDFVVRDFVRELRDIIRRYGLKSHKIQFRTGNKPVYITGIGVDGDQVIAPNSLNLRIKTLWHELSQAKTIPERDGLIQPLLAQLGTQLHVVGNSSKVG

SEQ ID NO: 3069 - protein, 350 aa, unidentified
  source 1..350: note = Related to JACDJD010000002.1; note = Rhizobium leguminosarum
MPRRPRRPVFEKYDISKSPFAQRPTQRDLGELLGENRNNLRLLVDYKEQFVVRRQEVIGKHQKVRDLKYPVSRLRAVHERLKFHLNKIKQPSYLFSPRKNRGQRDNALRHVNQDQYLTLDLKQFYPSTTATMVRRWFQDELGMYPDVAGLLTHLSTIDDRVSFGSPLTPVLCTLIHRAMFDEIAGVCERRGLRCTLWVDDLTISGKFIPGELVNEIREIIRAAGLRSHKVRYRTGNRPVFITGIGVVGTKLTAPNAVHLKIKSLWDDYHQAETLEEKESCSQLLLSQLGSLKHIVGAASLAGRKASDQMNTIRQQRRRMHVAATAAAAATRLSRALMPKESPEDVPFEIS

SEQ ID NO: 3070 - protein, 343 aa, unidentified
  source 1..343: note = Related to FZNM01000001.1; note = Paracoccus sediminis
MRHSRKPHPYEIYGLERSPFAQRPTQREVADLLGETKADLIRLANYKDQFIVRRRENIGGKDRDLAYPVSRLRGVHERLKFHLNKVQQPSYLFSPRKKRSQRDNAALHLDQDQYLTMDVKQFYPSTTEEMVYRWFVDELGLFEDVAGLLTRLSTIDGKASFGSPLTPVLCTLVHRPLFDRISDICGHRGLRHSLWVDDLTISGKFVPGQVVTSIREVIRQRGLRSHKIRYRTGNRPVMITGIGVVGRDLLAPNSLNLRIKQYWQDLHDAMTAEERASCAQRLLSQLGTVRHIVGTKSNVGQRASDQMNMLKQKRDKWISEASQEASKKSADEAAPMEHEDIPF

SEQ ID NO: 3071 - protein, 343 aa, unidentified
  source 1..343: note = Related to JASG01000004.1; note = Sulfitobacter guttiformis
MRRNSKPPQYERYDLERSPFAQQPTQRDVAALLGETKADLQRLINYKDEFIVRRQEKIGGKVRDLAYPVSRLRGAHERLKFHLNKVRQPNYLFSPRKKRSQRDNAELHLDQDQYLTLDLKQFYPSTTETMVYRWFVDELGMYEDVAGLLTRLSTVDGIVSFGSPLTPVLCTLVHRPMFDNISDICDARGLRHSLWVDDLTVSGKFIPGKVVTSIREAVRERGLRSHKINYRSGNRPVILTGIGVVGRNLLSPNSLNLRIKRYWKDLHEAETNEEKVACAQLLMSQLGTVRHIVGQKSDVGMRAADQMNMLRQKRNKWLQETSVSLPAPEETETASADTENIPF

SEQ ID NO: 3072 - protein, 340 aa, unidentified
  source 1..340: note = Related to NZ_SPUW01000001.1; note = Pseudooceanicola onchidii
MRRNKKPAYERYDLDRSPFAQRPTQRDVADLLGETKADLERLINYKDQFVVRRQERIAGKDRDLAYPTARLRGIHERLKFHLNKVRQPSYLFSPRKKRSQRDNAELHLDQDQYLTLDIKQFYPSTTDAMVFRWFKDELGMYDDVAGMLTHLCTIDGKASFGSPLTPVLCTLVHRPMFDSISDICSARGLRHSLWVDDLTISGRFVPGKVVTSIRTVIQDCGLRSHKIRYRSGNRPVVITGIGVVGRDLVAPNSLNLRIRRYWDDLHEAVTADEKAACAQLLMSQLGTVRHIVGAKSDVGQRAADQMNMLKQKRAKWLREANAVTPARQHDASVDAEDMPF

SEQ ID NO: 3073 - protein, 343 aa, unidentified
  source 1..343: note = Related to NZ_QRBG01000022.1; note = Cereibacter sphaeroides
MPRNRRSPVYERYDLSRSPFAQRPTQRDVAQLLGEAKADLHRLVNYKEQFIVRRREIIGGKVRDLAYPVSRLRGVHERLKFHLNKIRQPSYLFSPRKKRSQRDNAALHLDQEQYLTLDLKQFYPSTTEAMVFRWFKDELGMYEDVAGLLTHLCTIDGKASFGSPLTPVLCSLIHRPMFDEISEICTKRWLRHSVWVDDLTISGRFVPGQVVEEIRSVIRSAGLRSHKIRYRSGNRPVFITGIGVVGGCLLAPNSLNLRIQKYWQDLREAGTVDEKISCAELLLSQLGTVRHIVGARSDVGQRVADQMNMLKQKRGKWLHEALHLTQLKERTEPTFTGVCDIPF

SEQ ID NO: 3074 - protein, 346 aa, unidentified
  source 1..346: note = Related to NZ_APLP01000010.1; note = Agrobacterium tumefaciens
MRPRKARVRFERYEIERSPFSQKPTQREIAKLLGESRDGLRRLIEDKENYIIRREAFVGKKQKKRDLRYPIRRLRAVHERLKFHLNKVKLPSYLFSPRKNRSQRDNAALHLDQDEYLTLDLKQFYPSTTAQMVRGWFRDELGMYDDVAGMLTHLSTIDGAVAFGSPVTPVLCALIHRPMFDRISEICDDHGLRYSLWVDDLTISGKQITGEVVEKIRKVIRDAGLKSHKIRIFRGKKPVFITGVGVVGANLVAHSSLHLRLGAAWAEYDSAETLEERDHCTQTLLSLLGTIRHIVGAQSEAGQKAANQMNTLRQKLAKSRAEAAVANVKRRMLAVQTTEHARDAPW

SEQ ID NO: 3075 - protein, 347 aa, unidentified
  source 1..347: note = Related to NZ_AP023278.1; note = Agrobacterium vitis
MRRKKVRDRFERYELARSPFSQKPTQRDIAKLLGESRDDLRKLINYKEQFVVRRKAIIGKKQKERDLRYPVSRLRAVHERLKFHLNKVKLPSYLFSPRRNRGQRDNAVLHLDQDRYLTLDLKQFYPSTTAQMVWKWFRDDLGMYDDVAGMLTHLSTIDEKVSFGSPLTPVLCALIHRPMFDRIAEICDEHELRYSLWVDDLTISGRHISVEILKKIRAVVQEAGLKTHKIRFHSGRKPIFITGIGVVGAHLVAANSLNLRLKTAWAEYHGAQTINERDHCTQVLLAQLGTLRHIVGAKTDAGQKAANEMNSLRQKLKKHRVQDAKLQAAKRQIAASQTITEAADAPF

SEQ ID NO: 3076 - protein, 351 aa, unidentified
  source 1..351: note = Related to CP033022.1; note = Agrobacterium sp.
MSGKIARKNFERYGIERSPFSLRPTKRDLAALLGESVKDLKTLAIPSFKEQFVVRRQAETGTKKKKIRDLVYPESRLRGIHERLKFHLNKVRQPSYLFSPRKDRSQRDNAAMHLDQEMYLTLDLKQFYPSTTSAMVRKWFQNELGMFPDVARLLTDLSTIDEKVSFGSPLTPVLCTLVHREMFNEIADVCELHELRYTLWVDDLTISGRSIPAIVLERIREIIRKHGLKSHKIRFHKGRDPVFITGIGVVGRKLIAPFSLNLKIKKCWAEYHAATTTSERDQCIQTLLANLGTARFIVGANTLAGQKLSDEMNALRQKKAKMWRQDVKQSLARNMHLSGISDLAPAGDAPF

SEQ ID NO: 3077 - protein, 351 aa, unidentified
  source 1..351: note = Related to CCRK01000005.1; note = Neorhizobium galegae
MSGKVARKNIERYDIKRSPFSLHPTKRDLAVLLGETVNDLKTLSIPSFKEQFVVRRQAETGKKKKKLRDLVYPESRLRGIHERLKFHLNKVKQPSYLFSPRKNRSQRDNAETHLDQDVYLTLDLKQFYPSTTAAMVRKWFQDELGIYPDVARLLTDLSTIDEKVSFGSPLTPVLCTLVHRKMFDEIADVCDAYELRYTLWVDDLTISGRSIPAEILDKIRQIIRNHGLKSHKIRFSTGRRPVFITGIGVVGRKLIAPYTLNLKIQECWADYHAANTVAERDQCIQTLLANLGTARFIVGPKTAAGQKLSSEMNSLRQKKAKMYREDAAESLKRRTEARSLIGSSQIADVPF

SEQ ID NO: 3078 - protein, 345 aa, unidentified
  source 1..345: note = Related to NZ_AP025032.1; note = Aureimonas sp.
MLPRSQQRERYELERSPLAQKPTQRDVAQLLGETRDDLRRLRNYKEHFIVRRTAIIGKKGKIRELAYPEGRLRALHERLKYQLNKVKQPNYLFSPRLRRSQRDNAALHLEQNQYLTLDLKQFYPSTNESMVRSWMRDQLGMYEDVSGLLTDLCTVDGKVSFGSPLTPVLCSLIHKSMFDQIARICDNRGLTYSVWVDDLTISGRFIPGEVLNEIRWVVRDAGLKSHAVKYRNGNRPVFITGIGVVGRKLIAPSSLNLKIRVAWSEYHTALSDDERDEICQRLLSYLGTLRHISGSTSETGRKISDQMNSLRQKRSARRFASEATRNEVTKSPPAPKMADPLGLPW

SEQ ID NO: 3079 - protein, 349 aa, unidentified
  source 1..349: note = Related to MEEU01000016.1; note = Pelagibacterium sp.
MKSQTLRNRTPTHERYDLSRSPFFQKPTQREVAELLGETRDDLRRLINYKEEFVVRRTIVTGKNDKVRDLAYPVSRYRACHERLKFHLNKVRQPSYLFSPRKHRSQRDNAALHLGGLQYLTLDLKQFYPSTTDTMVRRWFRDELGLYEDVAGLLTHLCTIDGKVSFGSPVTPVLCSLIHREMFDEVARLCEVRGLHFSVWVDDLTISGLFVPGELVDQIRAIVRAAGLKSHAIRYRTGNRPVFITGIGIVGSKLVASNALNLKLKQGWADYHDAETDDEKDFLTQRMLSLLGTVRQISGAGSDRGRKAADEMNSLRQKRNERQRRARASKSALRHVSDPAELVPADAPF

SEQ ID NO: 3080 - protein, 352 aa, unidentified
  source 1..352: note = Related to JADCRT010000002.1; note = Methylobacterium mesophilicum
MPRSSQKDKKFERYELSRSPFAQKPTQRDVAKLLGEKRDDLRRLVNYKEQFIVRRQAKTGKKEKLRDLAYPENRLRAVHERLKFHLNKIKQPNYLFSPRRKRGQRDNAAHHLDQDQFLTLDLKQFYPSTTDKMVRRWFRDELGMMDDVAGLLMHLCTIDGRVSFGSPLTPVLCSLIHRPMFDRIAEVCDTYGLQYSVWVDDLTISGRFVPGDVLNKIRQIVHAAGLKMHDIKFRSGNRPVFITGIGVVGANLVAPNSLHIKIRDCWTEYHSAITADEKDAVSQQLLSHLGTLRHITGSSSEAGRKAADQMNSLRQERDARRKAEQKCRQAERNARASVEIFDLSDAPFEMTL

SEQ ID NO: 3081 - protein, 348 aa, unidentified
  source 1..348: note = Related to VFMG01000001.1; note = Bosea sp.
MPRKSTAASHYERYGVDRSPFAQRPTQRDLASLVGETRDDLRRLASYKEQFIVRRQVETGKKAKLRDLAYPEGRLRGVHERLKFHLNKVKQPSYLFSPRKGRGQRDNALHHLDQDQYLTLDLRQFYPSTSSQMVREWFRDHLGMYDDVAGLLTHLSTIDDKVSFGSPLTPVLCSLIHRPMFDRIADICEARGLRYSVWVDDLTISGRFVPGEVLRQIREVVQQFGLQSHKISYKTGNRPVFITGIGVVGSRLVAPNSLNLKVKEAWTGYHNAVTDDEKDAMCQRLLSYLGTLRQIVGGKTEAGRKAADQMNSLRQKRDARRKAAAEAYRIEREQRQAVPSAVAADAPF

SEQ ID NO: 3082 - protein, 354 aa, unidentified
  source 1..354: note = Related to JACEMU010000004.1; note = Paracoccus sp.
MQKRADKRNGERYPLNRSPLAQNPSQSDLAMLVRETKADLNTLATPEFKEQFLVRRTIETNGKTRNLVYPEGRLRAVHERLKFHLSKIVQPSYLMSPRKRRSQRDNAVAHLEATQYLTLDLKQFYPSTTRQMIRNSLVAQFGMQADVAGLIAHLATADDRACFGSPLTPVLASIVHRPMFDLIAGRCNVDGLSYTVWVDDLTISGPQITGQFRSDVRGIIAQNGLRSHKLRSQTGNHPVFITGIGIVGANLIVPKRIELRSKELWAEFKASQTFEELDSSATRLLSHLGGVKAVVGPSTIRGQKLSSEMNSVRQKREKARRFHQAFVAEQRTRSSQACCIQNGDGVGEQAEISF

SEQ ID NO: 3083 - protein, 351 aa, unidentified
  source 1..351: note = Related to NZ_WQCG01000003.1; note = Ruegeria atlantica
MRKRYRLKSGEKYPLERSPFAQKPSQRDIAELVRESKDDLNRLATPRYKEQFLVRRTIETNGKTRDLVYPEGRLRSVHERLKYHLSKIAQPSYLMSPRKGRAQRDNAVAHLEAAQFLTLDLKQFYPSTTRQMIRNSLMEQFKMEADVAGLIAHVATADDRACFGSPLTPVLASLVHRPMFDRIADRCVEDDLSYTVWVDDLTISGLRITGNFRADVRKLVAQSGLKSHKLRTQTGNRPVFVTGIGIVGANLIVPKRLELRSKELWTELKAAQTQEEMEACSVRLLSHLGGIRAVVGASSHRGQKLASEMNSIRQKLSKARRENKARLAEEKAAAQEISRVDPDNEKENIPF

SEQ ID NO: 3084 - protein, 355 aa, unidentified
  source 1..355: note = Related to CP002623.1; note = Roseobacter litoralis
MAVRKRRVRKAYERYEIDRSPLAQRPSQRDIASLISENKSDLNRLATPQFKEQFLVRRSIESGGKTRDLVYPEGRLRAAHERLKFHLNKIVQPSYLMSPRKNRSQRDNAAAHLDAAQYLTLDIKQFYPSTTRGMIRNSLVDLFGMEADVAGLIAHVATADDRACFGSPLTPVLASLVHRPMFDAIADLCASYDLGHTVWVDDLTISGNQIPGRFVSQVRAIVASHGLRSHKLKYRTGNKAVFITGIGVVGSNLVVPRSVERRSKDLWRDFQKADTVDEIDTAGSRLLSHLGGIRHVVGKSSKRGQKISSEMNSVRQKRTKALRIGSEKSASTSNLRYLTAEEQEERRDEIDAIPF

SEQ ID NO: 3085 - protein, 346 aa, unidentified
  source 1..346: note = Related to NZ_CP045393.1; note = Roseovarius sp.
MYERYELERSPFAQKPTQRDIAALVRENKEDLNKLGTDRFKEQFLVRRTIETSGKERRLVYPEARLRAVHERLKYHLNKIIQPSYLFSPRKNRSQRDNAEVHLSAFQYLTLDIKQFYPSTTRRMIRNSLAVQFGMAGDVAGLIAHVATADDRACFGSPLTPVLASLVHRPMFDEISDLCVSYGLSHSIWVDDLTISGPKIPGAFIAEIRRIIASYGLRSHKLKYYTGNKAVFVTGVGIVGSNLVAKKKVELRSKELWRALKNAETLDEIDTATTRLLAHLGGIKQIVGKSSKRGQKLSNEMHSIRQKREKAFRKNTERLINEASGLRRLSPEEQEARREEIDALPF

SEQ ID NO: 3086 - protein, 354 aa, unidentified
  source 1..354: note = Related to CP059262.1; note = Exiguobacterium profundum
MPRIRSSGLRERYPIERSPFSQNPTQRDIAELLHETKASLQTLATPHYKELFLVRRKVKTSGKERLLVYPVSRLRAVHERLKFHFSKITQPSYLMSPRIGKAQRDNAAAHLAAAEYLTLDLRQFYPSTTRAMIRNSLMSQFRMAADVAGMIAHLATADDRACFGSPLTPVLASIVHRPMFDEIADLCACYDLSYTVWVDDLTISGARVPGEFRRKVREIISNHGLRSHKLRFRTGNRVVFITGVGVVGSLLVVPRRMELRSKELWDDLHSSETFNEIDAASSRLLAHLGGIRYIVGHESLRGQKLADEMNSIRQKRKKAYLSDAARRSAESASLRYLTDEEXEARKLEIAAIPF

SEQ ID NO: 3087 - protein, 333 aa, unidentified
  source 1..333: note = Related to JACESO010000004.1; note = Sphingobium sp.
MPRIQRRLNQVERYELARSPLSQRPTQRDLAALVGETRDDLRRLVNYKEQFIVRRQTETGKKKKLRNLAYPSGRLRAVHERLKFHLNKVKQPDYLLSPRKGKSQRDNAAAHVGQDQYLTLDLKQFYPSTTGGMVKRWLHAQLRMEEDVAGLLAHLVTVDGKVSFGSPLTPVLCSLVHRPMFDKIASLCRHRGLNYTVWVDDLTISGRFVPSALLVQVRRIIQDHGLRSHDIRFRSGNRPVFITGIGVLGRNLVAPQALHLSIRSSFEEYHAAITDVERDSVEQKLLSQLGTLRHVVGVSSKAGQNAADQMHSIRQKRDKLRTAEQYSTTLAAG

SEQ ID NO: 3088 - protein, 348 aa, unidentified
  source 1..348: note = Related to FOFL01000001.1; note = Devosia sp.
MPRRAPAKSERYQLHRSPLAQRPTQRDIAKLLGETRDDLRRLVNYKEEFVQRRKIESVKSGKIRELAYPVGRLRGVHERLKFHLNKIKQPSYLFSPRRGFGQRDNAAYHIRQDQFLTLDLKQFYPSTSGAIIKRWLWEDLGMPEDVAGLLMHLVTVDEKASLGSPVTPVLCSLIHRKMFDRIAEICDARGLRYSVWVDDLTISGRFVPGDVLMQVRDIIRTSGLRSHKIKFRTGSRPVFITGIGVVGPHLVAPNTLHLRIQAGWADYHDAVTDDEKDAACQTLLSFLGTLRHISGRKSKAGQKVADQMNALRMEREVRQKFAIQLDKEKAELRVQTNYCAVEDLPFDL

SEQ ID NO: 3089 - protein, 342 aa, unidentified
  source 1..342: note = Related to NZ_FPKU01000001.1; note = Devosia enhydra
MPVTKKVQRAERYPIARSPFSMRPTQREVARLLGESRDNLRRLVNYKEQFVQRRDLEINGKLRHLAYPESRLRSAHERLKFHLNKIQQPAYLFSPRRGKSQRDNAALHLEQVQYLTLDLKQFYPSTTSAMVRRWFINDLGMYQDVAGLMTHLVTIDDKVSFGSPLTPVLCTMVHRRMFDQIADICRARGLNMSLWVDDLTISGQFVTREVLREVRTVVRAFGLKTHKIKYRTGNRPVFITGIGVVGSNLVAPAKMNLKIKAAWEAYHAAQTDAERDACAQHLLTLLGTVRHIARRGSPLARRVADQMNSLRQKRAVLTVTTTTRSAQAGAALIANDAVGDPF

SEQ ID NO: 3090 - protein, 319 aa, unidentified
  source 1..319: note = Related to WRPF01000034.1; note = Caulobacteraceae bacterium
MTKRTHERYALTRSPLAQRLTQKKLANLLRRPLPQLKGLIKYKKSFVVAEVREIDGKARPLCYPRGPLRSVNEALKYQLSKIRLPDYVASPRRGRGQRENAAVHVDAKQILTLDLRKFYPSVSRRYIARFFREEFSMHPDVAGLITELLTFEGRVLYGAPATPVLVMLAHRKMFDQIDNACLAFGTKMSLWVDNLTISGAEVPGALLVQVREIIASHGYKTHDIAFVTTNRDSTVTGVVVRCGELHPANSSNLAIRDLEAALRNSVDPSEYEAKANRLLSRLGGQLHILGTQREWGQKIARRMNVIRQKRDKRVRSNSK

SEQ ID NO: 3091 - protein, 328 aa, unidentified
  source 1..328: note = Related to NZ_LMNU01000047.1; note = Methylobacterium sp.
MTIKRKEPSHRSDRYELEASPLYQKPTQKQFAELVGLSKSKLRGLIDHKKQYIIRRDAEINGKKRRLVYPFGKFRSVHEKLKFHLNKIIQPAYLYSPRKGRNQRSNAVFHLGQTQYLKLDIKQFYPSTSSEHVFRWAKYDMRMSDDVAGLLVHIATIDDVVSFGSPLTPVLATLVHRRMFNAIAEECSARGLRISLWVDDIVISGKFIPGPLVSRIRDLTRSNGLKSHKLEYFTGYRRVTITGVVVKGDEIHSPRKLHTEISNAYGLAIQSNSRIEAEAAVDRLLSTLGRYRVMVGKGSPMGRRASSRMNAIRQKRVRFVSERCSTTD

SEQ ID NO: 3092 - protein, 346 aa, unidentified
  source 1..346: note = Related to nan
MTVKRHKQNKYERYPFENSPWTQDLTQRDLAELLGWKKQQLEALVRDKDRYIKRGPKLIGTKTRELAVPTGKLRTIHERIKIHLNKIKQPEYLFSPRKGRAQRDNAEHHVGQNQILSLDIKQFYPSTTDEHIFRWAYHVAGLRADVAGLFTKLVAVDGKMPFGSPVSPVLTTLVHRQMFDAISDICKEQDLKMSLWVDDLVISGSFVRGKVMEDVRAAIRRFGFQTHKIQFRSTARPVPITGVPVTKTSIGAPLSLHRRIQSGYAELRQRLTDAQRTQATDKLLAALGTYRYHLGASSEQGRLAANRMNALRMRRARLKPRYVTYPVGSTPDETSTEIDDGTPPWE

SEQ ID NO: 3093 - protein, 346 aa, unidentified
  source 1..346: note = Related to CP021181.1; note = Rhizorhabdus wittichii
MTRRKQPPYERYHFDQSPWVQDLTQRDLAALLGWKKQQLEALIRDKERFIKREAKLVGTKMRNLAVPTGKLRTIHERLKFHLNKIKQPGYLFSPRKGRAQRDNAEHHAGQTQFLSLDIKQFYPSTTDEHIFRWAHHMAGLRADVAGLFTKLVAIDGRMPFGSPVSPVLTTQVHRTMFDEIHAICEANRLHMSLWVDDLTISGVFVRGAIAEEIRAVIRRHGFQTHKVAFRNAHRPVVVTGVPIKNKRVVAPRSLHKRVQAGYQALRESRTDIERGIAIDRLLSALGTYRYHLGASTAEGRTTSNRMQMLRVRRARLKMSAITVPTVGPAQATSVLAGAEGLDLPWD

SEQ ID NO: 3094 - protein, 343 aa, unidentified
  source 1..343: note = Related to NZ_LDTE01000007.1; note = Sphingomonas sanguinis
MKQHKQRYERYLFKDSPWVQDLTQRDLAELLGWKKHQLEALIRDKERWVKREPKQIGLKLRNLAVPTGKLRTIHERLKFHLNKIRQPEYLFSPRKGRSQRDNAEHHAQQTQFLSLDIQQFYPSTTDEHIFRWAFHVAGLRSDVAGLFTKLVAIDRKMPFGSPVSPVLITHIHRAMFDEIFAICQANGLRMSLWVDDLTISGTFVRGELVEQIRGIIRQRGFQTHKIEFRSAARRVIVTGVPIERRRVMAPRALHQRIQNGYAALRGDLTDVERGKAIDKLLSALGTYRYHLGPSEPGGRKAADRMEALRVRRAKLDMTMVTLPAVENVITASSTLPGSELPWE

SEQ ID NO: 3095 - protein, 348 aa, unidentified
  source 1..348: note = Related to NZ_AP017898.1; note = Sphingopyxis sp.
MKRRKQQEYERYPFSDSPWTQDLTQRDLAELIGWKKHQLEALVRDKERYTRRKTELIGSKLRDLAVPTGKLRTVHERLKFHLNKIKQPTYLFSPRKGRSQRDNAEHHVEQVQFLSLDIKQFYPSTSDEHIFRWAYYVAGLRSDVAGLLVKLIAIDGKMPFGSPVSPVLTTHVHRSMFDEIYELCRSQGLKMSLWVDDLTVSGQFVRGELVEAIRVIIRRQGFKTHKIKFRSVGRAQGGRPVVVTGVPVRARRVDAPFSLQKRVQDGYAKLRPDLTDVERAQAIDSLLSALGTYRYHLGRSSPEGRKTADRMQALRQRRAKLDLTVITQPSGPIKPWGTTTRDSDVPWE

SEQ ID NO: 3096 - protein, 348 aa, unidentified
  source 1..348: note = Related to CP011344.1; note = Proposed Citromicrobium sp.
MKRRRQQKYERYSFRDSPWTQDLTQRDLAELIGWKKQQLEALVRDKERYTKRKREKIGSKMRDLAVPVGKLRTVHERLKFHFNKIKQPPYLFSPRKGRSQRDNAEHHAKQIQFLSLDIKQFYPSTTDEHIFRWAYYVAGLRSDVAGLLVKLIAIDGRMPFGSPVSPVLTTHVHRHMFDEIYDLCCRRGLKMSLWVDDLTISGQFVRGELVDAVRAVIRRQGFKTHKIKFRSVGRAQGGKPVVVTGVPLRAGRVDAPFSLQKRVRDGYALLRTDLTDVERAKAIDSLLSALGTYRYHLGRGSPEGRKAADRMQALRQRRAKLDAKGYVTGPKAEGSFEDRVTTSDVPWD

SEQ ID NO: 3097 - protein, 317 aa, unidentified
  source 1..317: note = Related to JAGHQS010000004.1; note = Qipengyuania flava
MKTTKGRLEWLIENKERFTKREDRQIGRKTRNLCYPVGKLRGVHELLKFHFNKIRQPPYLFSPRKGRSQRDNAEHHADKVQFLSLDIKQFYPSTTIEHVFRWAYHEAGLKADVAGMLAHLICIDGKLPFGSPVSPIAATHIHRSMFDAVYDICLENDLQMSLWVDDLTISGAFVRGELIEQIRSVLRRHGFQTHKIKFRQSDKPVIVTGVPVKNRRVIAPRSLHQRVEDGYAELRGAESDNATVSAINQLLSALGTMRYHYGAQSVEGRKAADRMHALRRRRDAIQQASSRQIPSDLSIRKQDEAVTGDGHLPWVAD

SEQ ID NO: 3098 - protein, 345 aa, unidentified
  source 1..345: note = Related to JADOUC010000001.1; note = Sphingobium sp.
MRQRKPKRYERYALEDSPWVQNLTQRDLAELLGYTKTQLEALIRDKDNWIGRRTEMIGSKLRNLAVPRGKLRAVHERLKFHLNKIKQPDYLFSPRKGRAQRDNAEHHVSQGQFLSLDIRQFYPSTTSEHIFRWAHHELGLRTDVAGMLVHLVSVDGRMPFGSPISPVLTTLVHRSMFDAIKLICDAHDLRMSLWVDDLTISGRAIPGTLIEDVRAEMRQRSFQTHKIQFRSGNRPVIVTGVPIDGDRVAAPRSVHERVRTGYAALRVPLADPDRAQQIDKLLSALGTLRYHVGRSSPEGRRAANRMDALRRRRSSLSKSVTTLPTLTDREASAELPVSTSSLPWE

SEQ ID NO: 3099 - protein, 345 aa, unidentified
  source 1..345: note = Related to NZ_JACBGA010000006.1; note = Sphingopyxis sp.
MKRRKVSRYERYAFEDSPWVQKLTQKELATLLGYTKDQLEALIRDKDKWIGRRAEVIAGKKRNLAVPYGRLRGLHERLKFHLNKIRQPDYLFSPRKGKAQRDNAAHHVGQTQFLTLDIRQFYPSTTGEHIFRWAHHEAGLRPDVAGMLVHLVAVDGKMPFGSPISPVLTALVHRPMFDAISGLCAERDLHMSLWVDDLTISGREVGGDLIDQVRAIMRKAGFQTHKIRFKMGNRPVVVTGVPIDGSRVTAPRSVNERVRIGYANLRVAANDNERRQAIDALLSALGTYRYHMGRGTAEGRKAANRMDALRRRRSALSNSYRSPAEVELDSASEAAAYDGEAPPWE

SEQ ID NO: 3100 - protein, 326 aa, unidentified
  source 1..326: note = Related to LMKH01000010.1; note = Sphingomonas sp.
MWAQNPGQRDIASLIGMTKGQLGAIVRDKERYIRRDTIDINGKLRNLTVPTGKLRMVHERLKFQLNKIKQPPYLCSPRKGVGQRDNAEMHVAGHQLLKLDIRQFYPKTMQEDIWRWAHYSLGIMDDVAGLFAKLAAIDGRMPFGSPISPVLTSLVHRGMFDKVYAICGSHGLKMSLWVDDLTISGAEVPGGAVTDIRQAIRAGGFQTHKIEYLMTARPTEITGVPIAKGRVLAPHAIHRRIKEGYEALKVAASDTERSNIIDKLLSALGSYRYHLGSSTPEGRLAADRMQSLRQRRAKMTIVAETPQTLSSIQAVTFGAPDTLPWD

SEQ ID NO: 3101 - protein, 341 aa, unidentified
  source 1..341: note = Related to SDYE01000871.1; note = Alphaproteobacteria bacterium
MKRPRDRRYERFGLDASLWAQDPTQQDVARLLGMTKDQLEAIVRDKERYTSRRTLEINGKLRNLAIPTGRLRRIHERLKFQLNKIKQPPYLCSPRKGIGQRDNAERHVDGAQLLKIDIRQFYPRTMQEDIWRWAHHTMGIRDDVAGLMAKLVAIDGRMPFGSPVSPVLTTLVHRPMFDRIYEVCGVRALAMSLWVDDLTLSGTEITANTIVAVRQIIRDGGFQTHKIEHLATARPVDITGVPIAAGRVLAPLALHRRIQEGFTALRAATTDADRASIIDKLLSALGTYRYHLGTSTLEGRRAADRMHALKQRRARMAITAVTVPATTTVHEAKSSAALPWE

SEQ ID NO: 3102 - protein, 383 aa, unidentified
  source 1..383: note = Related to WVTD01000004.1; note = Novosphingobium silvae
DRKRADLRPRRPSRSRSRRAADHHVCGAGLSAVPKNRLRQRAAKRPRYERYELADSPWTKKLTQRDLAVLLGTTKDRLEALVRDHENYVHRRDENIKGKLRKLAIPRGKLRAVHERLKGHLNKIKQPPYLYSPRKGRGQRDNAFLHASSAQVLKVDISQFYPQTTVEDIWRWAHYTVGMREDVAGLFAKLVAIDRKMPFGSPISPVLTSLIHRPMFDRVYQLVREAGFEMSLYVDDLTISGQGITGEFLAAVRSEIRSGGFNTHKIEFLEAARPVVITGVPIAGKRVLAPTALHQRLRRSYADLKSARSDKERAEVIDQILIALGTYRHFVGASSDEGRKAANRMHALKQRRRNLSIELVTMPTVDFVPTATLSPAAPGVPWA

SEQ ID NO: 3103 - protein, 354 aa, unidentified
  source 1..354: note = Related to JAFKJN010000009.1; note = Reyranella sp.
MAKPTDKTISERYAFSESPLVGLSTQRKLAQLLGSSKSRLHKLVAAVESDPSNCYKIEDRQVGEKLRTFSVPVGQMRKIHERMKILLGRISLPEYVMSPRRGKTIATNATAHRHAAELLKVDVKSYYPSTTDELVFRLFHHRFGIPGDIAGLLTKLLTVNGRVPIGSPASPILAFWASKPAFDKIASAVQSRGLKPTLWVDDLSISGRHVPREIADVVSYELGKLGYMGHKVKFQSRRRGFSITGVRIDSRGPGPTNAINLKIRDGLRRLERKSNTDEETSKLLAQLIGLNGHRLGTMAKDHPAAPRARKLQQHLHQRRRRHLMTMQETLSSSGQADSKGLSASAASRAFRSAS

SEQ ID NO: 3104 - protein, 305 aa, unidentified
  source 1..305: note = Related to MEQK01000113.1; note = Bdellovibrionales bacterium RIFOXYD1_FULL_55_31
MAETNTLPLSQSALYKVQSRARLAKTLLISPRHLKFLARGTQYKLTSILDKNVKPRMLQVPQGDLRKVHDRVRYLFAQLKAPEYLHSGVKGRSPVTNAKKHRSGAAGMRVDVRKFFPSCSRLSLAKFFHHDMGMAGDVAHQLSLLCTCDGALPTGSPLSMSLAFWMHRRVFDRIERMARERGYVFTLFVDDANFSADLSIPREFELAVRSELRRVRLRAHPRKTSRVAPGTARQITGVILPNSDEIRVPNAQRLKFLRGLETIKQNSALKAERVNSLRGLLAWMRQIEPTIFPRAGGELTRLNSK

SEQ ID NO: 3105 - protein, 342 aa, unidentified
  source 1..342: note = Related to JAIZSQ010000047.1; note = Burkholderia vietnamiensis
MPMKNPSHRREKAFGRARLRKNKSARYPIERSPFWRLSSIHQLAALLDVPVEDLEATCMAPSYNRFDDQPKPGKEARHIQEPTEATLKIHYRIARHLDSIQRPDFLHSATKCRSHVTNARAHLASGGAVVAMDIRKFFESTTYHHVKAFFYKDLGCSHDVARLLATVCTADGHLPTGSCISPLLSYFTHRQLFAEIEKLCVVTNVIMTLYVDDLTLSGIHATKSMLYRIKALIVRHGLQTKSTKDAVLRPGKSAIITGAIRAGDQLRLRNKHHGAIVEIQDQMSLGRTPPLDQLRGRIASARAVDPQAAARLEARLERIVRRGQLANGEGDLSGIVRKKPGI

SEQ ID NO: 3106 - protein, 333 aa, unidentified
  source 1..333: note = Related to JAGSTU010000036.1; note = Burkholderia vietnamiensis
MKNPLHKREKALGRARLRRNQSARYPIERSPFWRLSSIHQLAMLLDVPVQEIKATCMEPSYNRFDDHPKPGKEARHIQEPTDRTLKIHYRIARYLDSIERPEFLHSATKKRSHVTNARAHLPSGGAVVAMDIRKFFESTTYHHVKAFFHRDLGCSHDVARLLANVCTADGHLPTGSCISPLLSYFTHRLMFAQIERLCVGKGVVMTLYVDDLTLSGMHATKSMLYQIKNLIVRHGLQTKATKDAVVRPGKSAIITGVMRAGEQLRLRNKHHGAIVAIQDQIAAGETESFHQLRGRIAAARAVDPQAATRLEARMKRLAHATSGDVATGEDARS

SEQ ID NO: 3107 - protein, 329 aa, unidentified
  source 1..329: note = Related to NZ_JAFD01000236.1; note = Burkholderia sp.
MKNPSDRRDKAAGRARLRKNETGRYPVERSPLWRLSSIHRLAVLLGVPVQELEAACMAPSYHRFVDPPKKTGKEARHIQEPTGATLGIHYRILRHLDSIQRPDFLHSATKNRSHVTNARSHLASGGAVLGMDIRRFFESTTYHHVKTFFHKDLGCSHDVARLLATVCTADGHLPTGSCISPLLSYFTHRRLFAEIEGLCVEKRVIMTLYVDDLTLSGVHATKSMLHQIKALIARQGLRTKPSKDAVVRPGKPAIITGVVRDGDQLRLRNSHHDAIVQIQDLIAHGNAPSLHEQLRGRVASARAVEPTAAARLEARLIRLMSGERPADSK

SEQ ID NO: 3108 - protein, 328 aa, unidentified
  source 1..328: note = Related to CP009157.1; note = Burkholderia pseudomallei
MTRDAHKRDKSAGRARLRKNKSARYPIESSPLWSLSSIHQLAVLIGIPVDELEVTCTSPTYHRFDEAAKEGKEPRHIQEPTGATLRAHYRLVRHLDSIQRPDFLHSATKKRSHVTNARAHAESGGAVVAMDIRKFFESTTYQHVKRFFHKDLGCSHDIARLLANICTVDGHLPTGSCVSPLLSYFTHRHLFADIERRCVERGVTMTLYVDDLTLSGPHATKSLLFAIKAMIKRCGLRTKDAKDAVVRPGKAAIITGVVRSDGGVRLRNKHHGAIVAIQDSIATTGDNNDDVLRGRLAAARAVEPNAATRLEERLKRIIGNQQRNASAK

SEQ ID NO: 3109 - protein, 328 aa, unidentified
  source 1..328: note = Related to JACZKT010000108.1; note = Rubrivivax sp.
MKSLQHRVDKAAGRKRLRKNKSARYPIEQSPFWGLASIHTLASLLGVPVKDLEAVCLSPAYNRFDEPPKPGAKPGKEPRHIQEPVDATLRIHYRIVKHLDSIQRPDFLHSATKQRSHVTNARAHVDAGGAVVAMDIRKFYESTTYHHVKAFFHRDLGCALDVARLLATVCTADGHLPTGSCISPLLSYFAHRKMFAAVEALCVEKQVTMTLYVDDLTLSGAHATKTMLYQVKALIKQQGLRTQPTKDAVVRPGKAAIITGAVRDGQQIRLRNKHHNSIVTLQDRIASGDDVSFNQLRGRVAAAQSVEPVAAARLVARLDRILSNDKAA

SEQ ID NO: 3110 - protein, 331 aa, unidentified
  source 1..331: note = Related to SDXY01000242.1; note = Acidovorax sp.
MSNATNNKHRRQRLALKRENRRSPSEKYPLERSPVFELGGPRELATLMQLSIEQIRAIAANPEYHFFDEEPKREGKAARHIQDPRGDTQTLHYRFAKFLNRIERPAFLHSATRGRSHISNAAVHRGTYPVVCADIEKFYENTTRAHVKGFLFRELHWPMDLAALMADALTVNGHLPTGSAVSPILSYFTHRRMFAEIEAMCIATGCTLTLFVDDITVSGARASMSLLRQIKQILLGRGLRAKANKDKSAPTGSAVVITGAVRQGDRLRIRNEHRKGIVELLARYEAGEGAVEEQLVSKIAAARCVDSAGAVPLERRFTQLRSVARSSASGV

SEQ ID NO: 3111 - protein, 325 aa, unidentified
  source 1..325: note = Related to CP001505.1; note = Burkholderia glumae
MNKKRSALKRRLRANQSCRYELSRCALYGVRQLSVLTDLLQTTNKALRQSAQAPEFATWVDRSRPEKPRDIQDPRGTTERLHYRICELLDRVIRPEFLHSATRKRSSITNASQHVSHGPCVTTDMKSFYEATSTKQVEEFFSDSLNMAPNLARKLANLCTTDGHLPTGSPLSPLLSYWAHHQTFDKIHELVVERGVVMTVYVDDMAFSGAHASLALLRQVKHKLRLRGLETHKDKSFGRGQFKHITGAAVNGRGIHVPNRRLKQIVDDQGVLAKGEFDAETVASLRIKLSGRIASASAISRKTAAWLKRRDVYNPKGRRGAITAG

SEQ ID NO: 3112 - protein, 320 aa, unidentified
  source 1..320: note = Related to VCIZ01000019.1; note = Cupriavidus campinensis
MNKRRLALKKRLRANKQARYSLEGCALFGVTEMSVLSRLLQADNKSLRLTCKAPEFAVWVDTTKPLKPRNIQDPRGITERLHYRLCELLDRVVKPDFLHSATRKRSAITNAARHISKAPCVTTDMKSFYEVTTTQQVAAFFREDLHMAPDLALKLAQLCTVNGHLPTGSPLSPLLAYWAHRRTFGQLYEMSWSAGIVMTVYVDDLAFSGEHASLAFLHIVKQILRRRGLHTHKDKSFGAGQFKHITGAAVSSKGLHVPNGRLKRIVDGIDELTVVSDPAQQADLRRRLVGRIASASAISRQIGNALKRRHIQSAESAVTD

SEQ ID NO: 3113 - protein, 312 aa, unidentified
  source 1..312: note = Related to JADMJX010000176.1; note = Rhizobacter sp.
MNTPRDPYALESSPFFRLTSIHELAKLLRLTVGQLRQECLHPAFAPMRVVRKPGPRSKTRNVSPPLKTTLLLHQRLLRFFDRVRRPPYLHSATRRRSHVTNAAAHSGQRHLVKADIRKFYESTTYSHVVAFFHHELQMAGDLARLLARLCTREGRLAMGSPLSPLLSFWVHKKMFDRLDALSRQHRLRFTAYFDDLTISGNRITESFFQTIRRSVAIQGLELKEQRASVVRVRAGVEVTGAWLSRGALFVPQPAYLLARQAIAAVSSAEADELATAIRTAEGHVSASSAIRRGAGKALNRLMARAIHAKKPL

SEQ ID NO: 3114 - protein, 341 aa, unidentified
  source 1..341: note = Related to SOCA01000009.1; note = Prosthecobacter fusiformis
MIGHSQIMILSKTRADEDIKISKLYFVGTKKRLATVLKSNPSVLRRLAKTGDANYQHIFVTSRGKKRAVQNPNPELKEIQVRINQLLQRINYPEYMMAGLKGLSYEKNASAHLGLESTRVCTVDIEKFYPNCQRGAVIRSLEKWFNQKHDVAVQLADLVCLNGHLPTGGPASLLFSFWSNRDVFDEIKLAADAHGLKMTVYVDDMTFSGENAGLKFLHDCVLPVLKRAGLRGHKIKSYHKSCPQEITGIILNKGKLCLPYRRFKDIDKNILALNAARKPVARLKLINSLVSRLYSVSAFFPKCKTKAKAMGKKQKALLSKFPYLKLRHRFGKQAASLKTGR

SEQ ID NO: 3115 - protein, 313 aa, unidentified
  source 1..313: note = Related to NZ_MUAV01000008.1; note = Rhodovulum viride
MPKTQPEEGYQLKDSPFFRLRSRKQLAKLLRVSADTLDEISHRHDLYVRRWKHKKLKDDEKGAWLKHPPTPEQAENYRPIDIPDPQLKAMQGRIGDLLGRVKAPEFLFSPVKGRSYVENAAHHKEAKAFWLLDVADYFPSCSANNVARFFHRELECSRDVTAVLVHVATLGGCLPQGSPCSPILAYYSNSHIWLAVEKLVRAKGCKLSLYADDITISGDVVPKALIWEIKKLIFGNGLRLKTSKEVSLINAPADITGVIVKDGATHLPNRQLKRLAELKQERANTTNPKLQQRIDNQIAGRLSQRKQVENPKT

SEQ ID NO: 3116 - protein, 313 aa, unidentified
  source 1..313: note = Related to CP046620.1; note = Rhodobacteraceae bacterium 9Alg 56
MPKKQSDGGYHLKDSPFFRLRSRKQLAELLRVSANTLDEISHRSDLYVRRWKHKKLKDHERGAWLKQPPPPEKAESYRPIDIPDVQLKAMQKRIGDLLGRVKAPEFLFSPVKGRSYVENAAHHKESKAFWLLDVADYFPSCSANNVAHFFHRVLECSRDVTAVLVHLVTLNECLPQGSPCSPILAYYSNSHVWLAVEELVKARDCKLSLYADDITISGDVVPKALIWDIKKLIFGNGLRLKDSKEVSLINAPADITGVIVKEGGTHLPNRQLKMIAELKQLRARTTNPKLRGRLDEQISGRLSQRKQVENPKT

SEQ ID NO: 3117 - protein, 309 aa, unidentified
  source 1..309: note = Related to NZ_BMXE01000001.1; note = Pseudovibrio japonicus
MRKTQLKDGYQLRDSPFFRLANRKKLSTLLRVSEETLKALSTSQDLYTRRWKHKTKKDKEVDAWKNYIPENADEYRPIDIPIPKLKATQNRISDLLSRVQAPDFLFSPVKGRSYVENASHHVEGTAFWSLDVADYFPNCKANNVARFFRRDLECSRDVTAILVALTTLNKCLPQGSPSSPILAYYGNSHMWLKVADLVASYSCKFSLYADDITISGPIIKKELIWKIKKIIHANGFLLKPSKEISLIHAPADITGVIVKQGKTHLPNRQLKRLAELKKERAHTKNPASQAVLDNQISGRLGQRRQVERV

SEQ ID NO: 3118 - protein, 308 aa, unidentified
  source 1..308: note = Related to FZOV01000003.1; note = Luteovulum sphaeroides
MPLKLGYRLVDSPFYKLKSRSKLARLLRVSTETLDQLSSGRMLYARRWKHKKLEKWLCQPPSEDAADIYRPIDIPDPCLKAVQSRIASLLSRIHPPDFLFSPVKGRSYVENAARHVGSEAFWLLDIADYFPSCAANKVARFFRSDLDCSPDVSAVLVRLTTHNECLPQGSPCSPILAYYCNRPMWLAIEKIVTDAGCKLSLYADDITISGDVVRKSMIWEVKKIVHGNGLRLKASKEVSLIKSAADITGVIVKPDGTHLPNRQFKKLAELKALHSTTVNPKDKARIENQISGRIAQWRQVESFRIAPD

SEQ ID NO: 3119 - protein, 311 aa, unidentified
  source 1..311: note = Related to NZ_LJSC01000031.1; note = Gemmobacter sp.
MQKTPPRQAYQIKDSPFYKLSSRRKLASLLRTSSDTLAELASGKPMYVRRWKHKKLDQWLREAPSTTDADVYRPIDIPDPRLKAVQSRIAALLARIEPPDFLFSPVKGRSYVENAARHVGSKAFWLLDVADYFPSCTANNVARFFHRDLLCSEDVTAVLVKLVTLRECLPQGSPCSPILAYYCNRPMWLAIESCVKASGCKLSLYADDITISGDVVRKEMIWEIKKIVHGSGMRLKASKEVSLISAPADITGVIVKPTGTHLPNRQLKKLAELRKLHTLTTNAKDKARIENQISGRVAQRRQVESFQPSNE

SEQ ID NO: 3120 - protein, 311 aa, unidentified
  source 1..311: note = Related to NZ_SCMU01000003.1; note = Sphingopyxis sp.
MPLRHSATPYTLRDSPFFRLRTRKKLATLLRVSEAALADISARNDLYVRCWKHKKDKDIWLREQPAPDIAAHYRPIDIPDSGLKAVQSRIAGLLSRITPPDWLFSPVKGRSYVDNAASHKGARAYWLLDIADYFPSCSANNVAHFFNRKLECSPDVTAILVHLTTWQQCLPQGSPCSPILAYFSNLDLWQEIEQSVMQAGLKHSVYADDITISGQMIRKELIWEVKQSVHKHGMKIKADKELSLIDSPADITGVIVVGDRTKLPNRQLKRLFELRAERHRARDAIKKRLLDNQISGRVAQKRQVEQAYNAK

SEQ ID NO: 3121 - protein, 307 aa, unidentified
  source 1..307: note = Related to NZ_RWJI01000001.1; note = Sphingorhabdus wooponensis
MPTRHRAVPYTLRDSPFFRLRRRKDLAKLLHVSETTLATIASRNDLYERCWKHKKLKNNWLDDEPSADIAHLYRPIDIPDGGLKAIQSRIANLLGRITPPDWLFSPVKGRSYVGNAACHRGSKAFWLLDIADYFPSCTANNVAHFFQRKLECSPDVTAILVHLTTLQQCLPQGSPCSPVLAYFSNLDMWREIEQSVSKAALKHSIYADDITISGPIVPKKVIWEIKQAIHKHGMKIKADKELSLIDSPAEVTGVIVVGDRTKLPNRQFKRLFELRGERHRERSKTLMRLLDGQIAGRVAQRRQVEQF

SEQ ID NO: 3122 - protein, 300 aa, unidentified
  source 1..300: note = Related to CP060122.1; note = Sphingobium yanoikuyae
MSYELRDSPFFRLKTRKKLAATLKISEMALNTLTVRTDLYVRKWKHKKEKDKWLETPPPPGESHLYRSIDIPDSDLKAVQSRIAKLLSRVTPPDWLFSPVKGRSYVDNAARHRGSIAFWLLDIADYFPSCTANNVAHFFRTRMECSPDVTAILVHVATWHQCLPQGSPCSPILAYFSNLGLWEEIESAVIEAGLKHSIYADDITISGAIVRKKVIWEIKRSIHKHGFKIKAEKELSLIHRPADITGVIVAGDDTKLPNRQLKRLFDLRAERHKAKGKLLISQIDNKISGHLAQKRQVERT

SEQ ID NO: 3123 - protein, 313 aa, unidentified
  source 1..313: note = Related to NZ_JPDP02000039.1; note = Sphingomonas sp.
MLPLPNGSQYALRDTPFFRLRSRKKLAEILLVSDAALQRVLNEENLYERRWKHKKEKDSWLNFEPKPEVSHFYRPIDIPDKGLKSIQSRIAKLFAKVTPPDWLFSPVKGRSYVNNAARHVGARAFWLLDIADYFPSCTDNNVAHLFHTRLECSPDVTAIIVKLITLCGCLPQGSPCSPIMAYYSNHTMWLKISEIVTDSGLTHSVYADDITISGNLIKKEVIWNIKATVHKHGLRIKAEKELSIIDSPADITGVIVKGGRTMLPNRQLKRLFELRGERQRAKGSLAKAALDSQIAGRLAQQRQVEHQYRHPPS

SEQ ID NO: 3124 - protein, 312 aa, unidentified
  source 1..312: note = Related to NZ_CP032125.1; note = Profundibacter amoris
MLKETTINTYSLRDSPFFRLRSRKKLAQLLRVSPKTLSEISQREDLYSRYWKSKKGDVWLKSPPDEVDADKYRPIDIPVHRLKSLQARIAKLLSRITPPEWLFSPVKGRSYVDNAAYHKGAKAYWLLDIENFFPSCSGNNVVHFFSSKLECSPDVTAILVHITTILDTDTDRVGLPQGAPCSPILAYFSNLDMWAEIESIVKRASLKHGVYADDITISGGMVPKAAIWEIKKAIHKHGHKIKAAKEVSLIHAPADITGVIVAEGKTKLPNRQWKKLNELRAARSVAKGSKLKQRLDNQISGRIAQKNQVEQS

SEQ ID NO: 3125 - protein, 310 aa, unidentified
  source 1..310: note = Related to NZ_JAGGJV010000004.1; note = Rhizobium herbae
MPRKAFPFHKLEASALFNVRTRKKLADILMCSPAHLKSVDAIEIRYKKRWKPKDSDTAPWLKQPPPAEKAGNYRPIDIPVDPLKKLQTRIANLLSRIEPPSYLCSPVKGVSYVDNARRHVNSNAFWLLDIADYFPSCTADRVAWFFSTVMKCAPDVTAVLVSLVTDSGRLPQGSPCSPILAYFSNKKMWDDVAEAVASAGCILSVYADDITLSGTTVPGALVWEVKQIIVKNGFKLKREKEVSLVGSPADITGVIVRNGTLKLPNRQLKKLAETKKLHKLATDKVTLIKLEHQVKGRLAQRRQIEEALKP

SEQ ID NO: 3126 - protein, 307 aa, unidentified
  source 1..307: note = Related to JAGIPO010000002.1; note = Agrobacterium tumefaciens
MRRKAFEFHNLEASALFNVRTRKRLAEVLLCSPAHLKAVCEIAIRYKKRWKPKDSDTAPWLKQPPPAEQTANYRPIDIPIDPLKKLQARIANLLSRIEPPEFLCSPVKGVSYVDNAKRHINNNAFWLLDIADYFPSCSSNRVAWFFNTVMKCAPDVTAVLVSLVSENDSLPQGSPSSPILAYFSNKKMWDDVALAVANSGCTLSVYADDVTLSGTTVPGALVWRVKQIIVKNGFKLKREKEVSLIGSPADITGVIVRDGTLKLPNRQLKKIAEIKKLHTNATNSRLAIKLENQLKGRLAQRRQIEEA

SEQ ID NO: 3127 - protein, 309 aa, unidentified
  source 1..309: note = Related to NZ_LMPE01000005.1; note = Rhizobium sp.
MSHRAVKSHDLRDSALFNIGTRKKLASVLLCSPDHLNLVQKLEVKYKKRWKPKDSDTAPWLTQPPAPHEADCFRPIDIPVDPLKKLQGRIADLLSRVKAPPYLCSPVRGVSYVDNARAHIEGSAFWLLDIADYFPSCTANRVAWFFRTVMKCAPDVTAILVAIVTDSGRLPQGSPSSPILAYFSNLKMWGEVAALVHRAGCILSVYADDITISGKTVPGALVWNVKQTIVKNGFRLKREKEVSLVCCPADITGVIVRNGSLKLPNRQLKKIVETKKLLRASTDKMTADKLKTQIAGRLAQRRQIECASC

SEQ ID NO: 3128 - protein, 308 aa, unidentified
  source 1..308: note = Related to JAILYH010000012.1; note = Rhizobium sp.
MPRKSFRFHKIEDSALFNVSTRKKLANVLMCSLPLLKAVEGLDVRYKKRWKRKDSDTAPWLTQPPPPDQATQYRPIDIPVDQLKKLQARIADLLSRIETPPFLCSPVKGVSYVDNAGRHVNNRAFWLLDIADYFPSCSADRVAWFFGTIMKCAPDVTAVLVSLTTDMNRLPQGSPCSPILAYYSNMKMWHDVATLVAGAGCILSVYADDITISGKTVPGSLIWQVKQVIFRNGFKLKHEKELSLMASPADITGVIVRDGKLKLPNRQHKKIVDLSKQQKIATDTKLLAKIESQIRGRLAQRRQIEEAI

SEQ ID NO: 3129 - protein, 308 aa, unidentified
  source 1..308: note = Related to JABDWX010000001.1; note = Rhizobium bangladeshense
MPPKPRQFHKLNDSALYQVSTRKKLAEVLMCSPQDLKDVLALSVRYKNRWKRKDSDTAPWLTHPPAPDEASNYRPIDIPVPPLKKLQGRIADLLSRVEPPEFLCSPVKGVSYVDNARRHINSHAFWLLDIADYFPNCRADRVAWFFRTKMKCAPDVTTILVALTTDKDRLPQGSPCSPILAYFSNMRMWRDISTLVTNAGCVLSVYADDITISGSKVPGGLVWQIKQTIHKNGFKLKRDKELSLIASPADITGVIVQNGQLKLPNRQRKKLVELVSQQKATSDKKLLAKLDNQIQGRIAQRRQIESVD

SEQ ID NO: 3130 - protein, 309 aa, unidentified
  source 1..309: note = Related to VIUA01000006.1; note = Rhizobium sp.
MPPKQQRHFYKLQDSALYNVTTKKRLAEVLLCSPDDLKNVLATKVRYKNRWKPKDSDTAPWLTQPPPPEEAANYRPIDIPIPSLKRLQARIAYLLSRIEPPSFLFSPVKGLSYVDNARRHVGSRAFWLLDVADYFPSCRADRVAWFFRTEMKCAPDVAAILVALTTDKERLPQGSPCSPILAYFCNMVMWNDIATTVENAGCVLSVYADDITISGANVPGQLIWQVKKTIHKNGFRLKREKELSLLDRPADITGVIVRNGQLKLPNRQLKKLVELVEKHKSETKKKELAKLFNQIQGRLAQRKQVENAN

SEQ ID NO: 3131 - protein, 308 aa, unidentified
  source 1..308: note = Related to NZQL01000081.1; note = Hyphomicrobiales bacterium
MRPGHRIVDSALYKVRTRRRLAELLFTEVGFLESLEKNQPKYVVKYKPKYDDKAPWLAMPPPPELADNYRPISLPPTALKRLQARLAKLLGMITVPPYVFSSVKGVSYVDNAAVHVGARAFWLLDIEAFLPSCTAERLTWFFRDKLQCSPDVAAILVEIVTFDGCLPQGSPCSPILSYFCNARMWSDIYQLAGEYGCTLSIYADDITLSGAVVPKKLVWRIKEVLKNNGFRTSRSKEVSLVNAPADITGVIVRDNKLFLPNRQFKKLRVELAKRRDAKTSIEKRKIDNRIAGRKAQARQIEKHSKSGR

SEQ ID NO: 3132 - protein, 305 aa, unidentified
  source 1..305: note = Related to NZ_JAINWL010000001.1; note = Proposed Citromicrobium bathyomarinum
MKVASLRGNALFRISNRRLLAERLLLKPEALAAALNLDLPYVRRWKSKKGDEWRSEEPDADEARAFRPIDIPHPHLKQVQRRIGRLLSSARPPDWLFSPVKGRSYVDNAARHLGSTAFCMLDIADYFPSCTTSAVAGMFLNELHCPPDVASILTSLVTKDGSLPQGSPCSPVVAFYSKVGMWNEIARLVDERGLIHSVYADDLTISGPVIPGEAVWGVKKIVHKHGMRLRRDKEVGLFCRPADITGVIVTNGGLRLPNRQFKRLAELRAQRQASREKEREMIDRKIAGRIAQRRQVEGHDGQSAP

SEQ ID NO: 3133 - protein, 316 aa, unidentified
  source 1..316: note = Related to NZ_QBFD01000015.1; note = Sulfitobacter sp.
MASSSNATENASSLFGCQRKRDFAKILGITRGRLRWLANQKNEYPEGKTANSLYTRLWKPKRGEGKWLRVEPLPEVASNYRPIDELKVLQRHLHDDLSNIEVPAWLFAPALGKSYVDNAAAHSGSSHFHLLDLEAYFPSCRSHRVYDFFRRKLHCSSDVAELLTHVSTLGGSLPQGSPSSPILAYLSNVDVWNNIADLCRSEGVTLSVYADDITLSSHKSISGELVWNIKSALYSKGLGTKKSKEASMVHKAADITGVIVGKQGVRPPNRQVKRLKELEEVASQRPNNEVLVRKIRGRRAQLNQIASASSNPAAKK

SEQ ID NO: 3134 - protein, 324 aa, unidentified
  source 1..324: note = Related to NZ_SJFN01000052.1; note = Siculibacillus lacustris
MNPNMGYTERESPFFRLNSKNKLAKLLFIGLPKLKELAAGADLYYSFQKVKKSGGMRMISAPRDDLKKVQKRISDLLQRIAPPDFLFAPVKGRSYVDNAAVHIGATAVHLLDIEDFFPSCTANKVIWFFKTRFECSPDIAVILKNIATRNGSLPQGSPCSPALAYFCYVDMWKEIEAHVKQRGCKLSVYADDLTISGDVVPGELVFDIKATMLRHGHQYSAKKERSKIMKPVEITGVIVANNQLLIPNRQHRSIVIAQRKLGKEKKLRERLKITNELKGRNAQKNQIKNHPGQPTTDAIPTPTGYYQSTTRSTSSSVTSSDRRS

SEQ ID NO: 3135 - protein, 308 aa, unidentified
  source 1..308: note = Related to RXIY01000013.1; note = Hyphomicrobiales bacterium
MRNPRRRKTTDMAVKGGYQERDSPFFRLKSKTKLATFLFIGSQKLKDLSDGRDLYRSFQKLKGNGKTREINAPRDDLKKVQRRIADLLQRIQPPDYLFAPVNGRSYVDNAAVHVGANAVHLLDIEDFFPSCTANKVIWFFKTRMECSADVSVILKNIVTRKGCLPQGSPCSPILAYLCYADMWNEIEEAVRRHHCQISVYADDLTISGKVVPQQLVWEIKATLRKHGHVISAHKERSRFKRPVEITGVVVTNGRMSVPNRQLKRIVETRDKLANEKKPKAVEKLQNELKGRISQVTQIKNHPRQPAHY

SEQ ID NO: 3136 - protein, 304 aa, unidentified
  source 1..304: note = Related to WBUK01000026.1; note = Ignavibacteriaceae bacterium
MLRKKPVLKSKSKKYHNERDSAFFRLRSKNNLARLLFSSEKKLSDIAREDGLYKDFEKLKKNGKDTRTVSAPRADLKAVQSRISDLLMRIRPPDWLFSPVKGRSYVDNARPHANAASVRLLDIEDFFPSCTGNKVVWFFKERMECSPDVVAILKGIVTKDDALPQGSPCSPILAYLCYIDMWEEIESLVNKAECDLSVYADDLTISGEKVPEKMIWGIKQILKRHGHSYHAGKERKKWHKPAEVTGVIVRGDGLLFVPNRQHQATAKIRKKLASKCSIKERAALQAQLLGRESQMKQITTLNDF

SEQ ID NO: 3137 - protein, 302 aa, unidentified
  source 1..302: note = Related to CP055265.1; note = Agrobacterium vitis
MTDRRKYSLRDSPFFRLRSKAKLASLLYVSREKLQTLSEGEQRYFEFTKPKKSGGVRKISAPNAPLKAVQSRIADLLRRVTPPDYLFAPVPGRSYADNAAFHVGARSVRLLDIEDFFPSCTVKKAIWFFRTRMECSEDVAAILANIVTFKGALPQGSPCSPILAYLCYLDMWGEIAKLVEDGGCKLSVYADDLTISGVSVPEAQIWEIKKTLYRHGHRYARSKERSVRDKSVEVTGVVLLRGSVVAPNRQHAKIAKVRDELTRTASADHRKALESQLRGRLAQVGQIKAADQRRRASEAAKI

SEQ ID NO: 3138 - protein, 303 aa, unidentified
  source 1..303: note = Related to WGNU01000009.1; note = Alphaproteobacteria bacterium
MKKVESQGYALRDCGLYNIQTKAVLAKRLLVSPSRLTRLTNKQDRYRCWTEPKKSGGTREIEAPLDDLKDVQKRISELLGRVRAPSYLMAPVKGRSYVDNAAIHVGSQCFRLLDIEDFFPSCTEKRVFWFFRTVMRCSVDVAAVLARLSTRNGRLPQGSPCSPILAFYAYFDMWETINATVESRKCYLTVYADDITISGESIREFDVWRIKQTLFKFGHRYNRSKERAIINRPADITGVIVRGDILLLPNRQHKALTEVIRKRSSAGTSLERNAIDRQIRGRIAQAGQITRHLEKIGAKIASA

SEQ ID NO: 3139 - protein, 300 aa, unidentified
  source 1..300: note = Related to WTYX01000002.1; note = Pontixanthobacter aquaemixtae
MSKTKKPWRRKAKKFYPLEASPFYKLQSKKRLASLLFTSLTALRGMADKSVPHYEYWEEQKADGSMRPLCRPHEGLDKTQSRIAYLLACVQTPDYVHAPVPAKTYVTNAASHQGARAFSLLDIESFYPSCKEEKVLAFFRHRMKCSIDVSTLLARLCCDNGSLPQGSSSSPILSYWAYAEMWDAIYTITSNAGNNFTLYLDDLTISGDRVLGNTLWRIRQQIHKHGLQIKESKSRRIIDKPADVTGVIVTNQGLRLPNRQHQKLAHAKSDFSKPGGNRKRKGNVLRGRNAQAVQILNHNS

SEQ ID NO: 3140 - protein, 312 aa, unidentified
  source 1..312: note = Related to NC_016587.1; note = Azospirillum lipoferum
MTKKIKSYPLDQSPFYKLTTKRKLAELLRLPLGRLKRIALLSPNMYNEWIQENAKGKKRQIEDPARPLKLAQGRIANILSSISAPNYLHCPVKGRSYISNAAEHIGAKHIRNIDISNYFPSTKSTRVYWFFNTILKCTPDVSGILTALTTYKGHLPCGSPASSILAYFAHYDMWQSIDQIVSENGCKLSVYMDDITVSGEMVTERVIFQVRRCIFRAGLQPKKEKERWYRHGIGIVTGIVVRPSGLSAPNSAHLKRFTLRRQIASSCNESEKSSLRRSLKGIEGQQSQIDRWNRRLHNSKSNAKEHVNLKPN

SEQ ID NO: 3141 - protein, 309 aa, unidentified
  source 1..309: note = Related to NZ_FXAK01000010.1; note = Azospirillum oryzae
MKTKKIKNYPLDQSPLYKLTTKRKLAELLCLPLARLKRIATLSPNMYNEWTQEKKNGDLRTIEDPARPLKMVQSRIAKILSSISAPEYLHCPVKGKSYISNAAQHIGSKHIRNVDISNYFPSTKSRRVYWFFHNILKCSPDVAGLLTTLTTYKGHLPCGSPSSSILAYYAHYDMWQNIYQIVSESGCKLSVYMDDVTVSGGVVTERVMFQVRRCIYRSGLQPKKEKERWYRRGIGIVTGIVVRSGGLSAPNAAHLKRFKLRNKLATSSNDEERITLQKSLRGIDGQQSQIDKWNRRLNTSTKSVRADLQ

SEQ ID NO: 3142 - protein, 303 aa, unidentified
  source 1..303: note = Related to NZ_CP029353.1; note = Azospirillum thermophilum
MTTKTKSYPLNQSPFYKLTTKRKLAELLRLTPAKLRKLSALSQDLYREWPQTNLKGKTRLIEDPAPALKEVQRRIYRLLSCITPPYFLHCPVRGRLYISNAAYHVGSRHFRNIDISDYFPSTKSRRVNWFFRRILKCAPDVSGILTELTTYKGHLPCGSPASSILAYFAHCDMWEQIARIASENGCKLSVYMDDLTVSGDVVPDRVMFQIRQRIYRAGLQPKKEKEKWYRRGVGVVTGVVVRPSGLSAPNSAHLKRFKLRCQLATASSADERATLQNSLRGVEGQQSQIDRWNSHFTSYNAEE

SEQ ID NO: 3143 - protein, 313 aa, unidentified
  source 1..313: note = Related to QDKQ01000014.1; note = Caulobacter sp.
MLSLGRKLMATLPRTHPIKQSPLHKLGHHKRLASLLKIEVAQLRGLAKAGSAAYSEWDEDKPNGGTRRIENPKPRLKRLQSRLATILSLIDPPAFLSCPVKGRSYISNARAHLGSKEFVTLDVKSYFPSTTWNRVYWYFNKRLLMPRDTAWTLASVATIDGRLPTGSPLSPIMAYLAHEDMWLKVAKLAEDVGCRLTVYMDDITISGARVPEATVWKIKQEVHKVGLRLNDKKERRFSDVGVITGVVVTPDGVRLPKRSHLNLSIARKAALVVDGEAKLRAMRRVRGLEAQHRQVLAPTDFTDNLSGSHRGSS

SEQ ID NO: 3144 - protein, 302 aa, Nodularia sphaerocarpa
  source 1..302: note = Related to NZ_CP060140.1
MQKSKYARYELDQSPFYCLKSKAKLAELLHISQSKLKCLTCTEDLYVERDTFNPGRRKSRRIEQPKLPLKLVQKRIEELLKRIKLPNYIHSPGKGRSYISNAKAHVNAKELRILDIEKYFTSTPARRIYWFFHKQMKCSPDIAGILTKLSTFKDHLPTGSPSSPILSYFSHIDMWEEINRIVEPNNCILTVYMDDVTISGEHVPGELIWQVKKQFKRYGLRSNKKKEKHYIGKKSYEVTGVITTQSGELRVPNRQHLQMRNIRRLISLESEPEKLAKLRRSLKGLEAQSEQIRRANSLLTET

SEQ ID NO: 3145 - protein, 302 aa, Nostoc sp.
  source 1..302: note = Related to JABXKF010000035.1
MRKSKYARYELDQSPFYCLKSKAKLAKLLRVSQIKLKLLTNTEHLYVESDIFDPERGKSRRFEKPRQDLKCVQTRIEELLKRIKVPNYIHAPAKGRSYISNAKAHVNSTEVRSLDIEKYFPSTPARRIDWFFRKQMKCSSDVANILAKLSTFKDHLPTGSPSSPILSYFAHIDMWKAINEIVDLANCTLTVYIDDVTISGDRVPGELIWQVKKQFNRYGLRSNKKKEKHYIGKKSYEVTGIIATKEGELKIPNRQHLKMYRCRKLLKLGIRYEKGKDMLKRLRGLKAQMQQIRKVNNSSIET

SEQ ID NO: 3146 - protein, 301 aa, unidentified
  source 1..301: note = Related to JACJOI010000059.1; note = Coleofasciculus sp.
MPRIKQAGYELNQSPFYCLKSKKNLASLLQISQSKLNNLTRSEELYIEENRFDKKRGKIRHIEEPKPDLKRVQKRIKNLLTRIQLPNYVHAPAQGHSHIGNAKAHVGAVVVRSLDIEKYFPSTPAKSIFWFFYKQMKCSSDVAGILTKLSTFKGYLPTGSPLSPILSYFSHIDMWETIGEIVRNASCTLTLYMDDVTISGNSVSGELIWEVKKQFHHCGLRSNKKKEKYYFRKNSYEITGIIVTKEGELKVPNRQHLKTHQIRQELHCETEPKKCKKLRQRLQGLEAQIQQVKRVNYPLPE

SEQ ID NO: 3147 - protein, 306 aa, Nostoc sp.
  source 1..306: note = Related to BA000019.2
MPVLRIKKIGYKLDQSPFYCLQSKAKLATLLGVSRSRLIQLARSESLYIEKEIIHPRRKKSRLVEKPKYELKLIQKRIEGLLKRIEIPKYIHAPTKGRSYVSNAKAHLNSYVISSLDIVKYFPSTKSKRVYWFFHTRMKCSPDVAAILTKLSTYKEHLPTGSPLSPILSYFAHIDMWEEINNIVEDAGCILTVYMDDVTISGDYVSRNLIWQIKKKFHRYGLSSNTKKEKYYIGKNSRKITGVILDFEKGVLKIPNRQHKKMYSIRKQISKETHPDTYAHLMSKLKGLKSQVQQIHKANNTQTNEN

SEQ ID NO: 3148 - protein, 306 aa, Nostoc sp.
  source 1..306: note = Related to JABXKI010000057.1
MQRSRCKQYTLDQSPFYCLKSKEKLAKLLYITQRKLEVLAHTEELYIERDKFNPKKGKTFRVEEPTPPLKRVQKRIDEILKRVKMPNYIHAPGKGRSYISNARAHINVAVVRSLDIKQYFPSSQSWRVYSFFDKRMRCSSDVAGILTKLSTFKKHLPTGSPSSPVLSYFAHIDMWEAINELVEGAGCTLTVYMDDVTISGSSVSDELIRKIKREFDRCGLRDSRDKEKHYVGNKPREITGVIVKDGELKLPNSQHKKMHDCRQAIQLETDPAKLAHLMQSLKGLESQAQQIRKANEIRVDNGCNDL

SEQ ID NO: 3149 - protein, 303 aa, Calothrix sp.
  source 1..303: note = Related to NZ_KB217482.1
MKKDKCKQYPLHQSPFYYLKSKDKLAKLLHISQKTLEILTSTEQLYIEQDRFNLKKKKFFRVEEPKPLLKQVQKRIGELLKRIEVPNYIHAPAKGRSYISNAKAHINGFVVRSLDIEKYFPSTQSQRVYWFFHKQMECSSDVAGILTKLSTFKNHLPTGSPSSPMLSYFAHLDMWKAINELVESAGCVLTVYMDDVTISGSFVSGKLIWLIKKEFYRCGLHDSRKKEKHYVGNKPRETTGIIIDNGQLMLPNSQYKKMHECRQAIRQETDADKRYILMRTLKGLESQAQQIRKANETYIDTEC

SEQ ID NO: 3150 - protein, 307 aa, unidentified
  source 1..307: note = Related to NZ_QAYE01000001.1; note = Sphingomonas faeni
MPTKRLYQLNQSPLFKLGSRSKLAKLLGMTPGALRALAAGDGLYKEFEVEKKSGGKRGVENPCRPLKLAQATLARLLGRIQPPDFLFCPVKRRCYVTNAAAHRHSRMVQCLDIKKFFPSVSQRRVFWFFATVMKCPRDVAGLLAQLACYKGHLPTGSPLSPIMAYFAYYDLWAAIDALCKARGYTFTVYIDDVTISGTHVPKSAIWEVQQMIHGAGLRYHKQKTFVDKPAEITGIILKDGQLLAPFRQHRKLKDTRAALRAADPVDRKALKSRLTGVTAQIGQIERQNLCAPQRKGGSTKIYRLSEV

SEQ ID NO: 3151 - protein, 300 aa, unidentified
  source 1..300: note = Related to JABMLM010000386.1; note = Microvirga sp.
MRTNAKLYKLDQSPLYKLRSRAKLARLLGVSVADLRRLTKNADSLYKEFEIRKKNGEMRPVQNPERYLKVVQGRLAKVLARIAPPDYLYCPVKGRCYVSNAGQHRGNRDVRCLDIRRYFPSTPSRRVYWFFRSVMGCEKDIAATLARLATYKGCLPTGSRLSPIMAYYSHIDTWDAIACICKEKGYRLTVYIDDVTISGQSVDPDDIWRIKQVIHRSGLRYHKEKAYTDRPPEITGVIVDGERLIVPNRQIAKLAKTRKSLSSTTDPEELKKLHDKISGLRGQMAQVAIKALELPQLSTT

SEQ ID NO: 3152 - protein, 334 aa, unidentified
  source 1..334: note = Related to CP026002.1; note = Stenotrophomonas sp.
MTLPRKSANRYDVSSSALYRLPTLKALARFLEWKGSPSALRALCKRPDNFSEFYQAHPRTGKMRLIQAPSKVIKPLQKRLNVLLKQVRVPDYLHSGIPKRSHLSNSEQHMLAAGATVTVDVSDFYPSITRQRVFRLFKNVFQCRGDVADAMADLVCYQGKLATGSPASVLVSFWACRDMFDSMAQRVATQGGTFTLYVDDVAITGDTIGHGDIQWLDRLLRRFGFSSKVEKAKLFRKTRAKVVTGRAFRHGISRAPNRKHKEMHEARAEIESGRATIKAKRGLVGQLENIGNLDQERGTSLKAEAKKLRSTLPRPRRRRRATARPVKTRSEIAT

SEQ ID NO: 3153 - protein, 334 aa, unidentified
  source 1..334: note = Related to JAJGQF010000003.1; note = Xanthomonas campestris
MSLPRKSANRYEVTSSAFFRLPTLKALARLLQWEGSPSALRALCKRPDNFTEFPRIHPRTKKERVIQAPSDVVKPLQKRLNVLLKQVRVPDYLHSGIPKRSHLSNSESHMWAEGATVTVDVSDFYPSITRQRVFRLFRNVFECPGDVADAMADLVCYKGKLATGSPASVLISFWACRDMFDMIADRVATLGGTFTLYVDDVAITGNTVGHGDIQWLDRLLRKFGFSSKLEKAKLFRKDSAKVVTGRAFRHGISRAPNKKHKEMHEARTEAKSIGASVKVRRGLVGQLENIGNLDHERGTSLKAEAKKLRSTLPPPRRRRRAITRPNHISPEAAT

SEQ ID NO: 3154 - protein, 334 aa, unidentified
  source 1..334: note = Related to NZ_AP021867.1; note = Stenotrophomonas maltophilia
MTLPRKSANRYDITSSAFFRLPTLKALARVLQWDGTPSALRALCKRPDNFSEFYQTHRRTGKKRLIQAPNAVVKPLQKRLNVLLKQICVPDYLHSGIPKRSHLTNSECHMLAEGATVTVDVSDFYPSITRQRVFKLFRNVFQCPGDIADAMADLVCYNGKLATGSPASVLLSFWACRDMFDLIAKRVADQGGTFSLYVDDVAITGNTIGHGDVRWLDRVLRRFGFASKVEKAKVFRKASAKVVTGRAFRDGISRAPNRKHKEMHESRNLVKGTSASTKVKRGLVGQLENIGNLDQKRGKALKAEAQKLRSTLPPARRRRRSAALPTAISAAEEA

SEQ ID NO: 3155 - protein, 336 aa, unidentified
  source 1..336: note = Related to CP049368.1; note = Stenotrophomonas maltophilia
MTLPRSSANRYDVPSSALFRLPSLKALAKVLQWGGNPSALRALCKRPDNFEEFYRTHPRTKKKRLIQAPSDQVKPLQRRLNVLLKQLRVPDYLQSGIPKRSHLSNSELHMRAEGATVTVDVSDFYPSIKRKRLFRLFRNVFECRPDVADALADLVCFNGNLATGSPASVLLSFWACRDMFDMVAERALSQGGTFTLYVDDIAITGNAIGHGDIRSLDRLLNKFGFNSKKEKAKLFRKADAKLVTGRAFRDGVSRAPNKKHQELHETRKQLRDTTASIRLKRGAVGQLENIGNLDARRGSSLKAEAKKLRTTLPPPRRRRRSSSALPLEAGILDPKA

SEQ ID NO: 3156 - protein, 322 aa, unidentified
  source 1..322: note = Related to MIGU01000085.1; note = Xanthomonas arboricola
MTLTRKSANRYDVSSSALFRLPSLKALASALLWPGTPSALRALSKRPNNFQEFNRVHRRTGKARKIQAPCEEVKPLQKRLNLLLKQLRVPDYLQSGIPGRSHLSNSGKHMTAEGATVTVDVSDFYPSITRKRVFRLFRNVFQCEPDVADALADLVCFNGHLATGSPASVLLSFWACRDMFDVIAERTSLSGATFTLYVDDIAITGDKIGHSEILFLGRLLKDFGFSSKEQKAKLFRKREAKVVTGRAFRDGVSRAPNKKHKELHESMRQLREHKATVKERRAAVGQLENVGLLDEKRGALLKAEAKKLRSTLPPSRRPKRLP

SEQ ID NO: 3157 - protein, 311 aa, unidentified
  source 1..311: note = Related to RRYK01000010.1; note = Pseudoxanthomonas sp.
MAKKERLPRSLENSGLYRLRTMGALARLLHWKKSPSALRALCSRQDNWDEFDQARPGKKPRRIQAPKPAIKALQRRLNDLLQRIDAPEYLHSGTVGRSYLTNSALHRDAEGATVTVDISDFYPSVTRKRLFVLFRTVFQCSSDVADALAGLLSCGGSLATGSPASALVAFWAAKDMFDGIAERAKRLGGRFSLYVDDITLTARTAGRGDVSFIERHVGRYGFRLARKKSRVYRAGQPREITGRVLRNGQSRAPNKQHRYMHEALSAMGPETPPAEVRSAIGRIQHVGILDDVRSQELMASARRLREKLASS

SEQ ID NO: 3158 - protein, 318 aa, unidentified
  source 1..318: note = Related to NZ_LASZ01000005.1; note = Luteimonas sp.
MIALDQSSRYELELSPLYRLGRTKDLAALLRWRGNPSQLKAFSKRDDHFDEYDQVDPKTLKKRHIEAPKAGLKRLQRRLNALLQRIHAPPYLHSGIRGRSYLTHAGTHTQAEGATLTADISDYYPSVSTERLQQLFRKDFRCSIDVAWILARLLSCRGHLATGSPASAIVAFMANRSIFDELAKRATKRGIAFSLYMDDLAFTGRGVNRSDAAAAGELLIRHGLRIKAKKTRLFHADQPKLVTGVAWRNGIKRAPNAQHKLMREALLVLQRAPREPGHYRTAIGRVQHIAMLDDVRGPQLRKKARELRVGLKALESPR

SEQ ID NO: 3159 - protein, 318 aa, unidentified
  source 1..318: note = Related to CP011800.1; note = Xylella taiwanensis
MNQQTTKPVSTKRRTERYRIASSHLYGIRRHTKLAEILWWAGTAGQLQTFTRQPDNYTRYIDTSKPGKDRLIEAPARRLKGFQRRLLDLLIRIELPDYLHSARPGYSYLSNSAAHCKADGSTVTMDIDSFYQSVTLHRVAQFFEQKLNCAPDVSETLAHLLCCDGHLATGSPASPLLSFWAYHNLFDSINDRVRSRGGVFTLYIDDMAITGNGFGHTDARWVGRLIRRSGLRLKDSKTRVFRADAAKLITGRACRNGVSRAPNKQHRKMREAQAQLEQNPHDLTLRASVAGLKRHLALLDDVKRDQHRADASRISKRH

SEQ ID NO: 3160 - protein, 318 aa, unidentified
  source 1..318: note = Related to NZ_WUSX01000002.1; note = Luteimonas sp.
MSQQTTKPASTKKRTERYGITLSHLYGIRSHTRLAEVIWWAGTAGQLRTFSRRAGNYSRYIDKSKPGKDRLIEAPAASLKGFQARLLCLLSRIELPDYLHSARPGYSYLSNSAAHCNAHGSTVTMDIDSFYQSVKLHRVAKFFESKLNCASDVSETLAHLLCCDGHLATGSPASPLVSFWAYRDLFDSVDERVRSRGGIFTLYIDDMGMTGNGFGHTDARWVGRLMHRSGLRLKDSKTRVFRADAPKLITGRACRNGVSRAPNKQHRKMREAKARLEQNPNDPTLRASVAGLKRHLALLDVKKRDQHRADASRISKGR

SEQ ID NO: 3161 - protein, 320 aa, unidentified
  source 1..320: note = Related to SEHC01000018.1; note = Xanthomonadaceae bacterium
MTLQTKKKAIPLKRRTERYGISSSHLHGIRSHSRLAEILRWGGTAGQLRTYARREENYNRYIEKGKPGKKDRQIEAPEPRLKEFQKRLLDLLNRIELPEYLHSARPGYSYLSNSAAHCNATGCTLTMDIDSFYQSVKVQHVARFFEKALGCSGDVSETMAQLCCCDGHLATGSPLSPLLSFWAFKEVFDAINHRVKSRGGVFTLYIDDIGITGKGFGHTDIIWTTRLLRKSGLTVKESKTRVFHADAPKLITGRACRNNVSRAPNKQHRKMRDAQLKLESNPNDPSLRASVAGLKRHLGLLDDKNRDQHRSEARQILKAR

SEQ ID NO: 3162 - protein, 319 aa, unidentified
  source 1..319: note = Related to CP036255.1; note = Xanthomonas oryzae
MNTPRTKKTTPTQKRTERYAIDSSPLYGMTSHTRLAAILRWAGTTGQLREFCRRPTNFSRYIDRSKPGKERLIEAPAKSAKTFQTRFLELLRRIELPDYLHSARSGRSYLSNSATHCEADGCTITMDIDSFYQSATRERVIHFFEVHLKQPRDVAETLASLLCCDGHLATGSPASPLVSFWAYREVFDAIDERVRSRGGVFTLYIDDMGITGKGFGHTDVGWISRLLRKAGLTVKETKTRVFHADAPKLVTGRACRNGVSRAPNKQHRKMRAAQTQLELNPNDPGLRASVAGQKRHLALLDDANRDRHRAEAERLTKGR

SEQ ID NO: 3163 - protein, 322 aa, unidentified
  source 1..322: note = Related to NZ_KQ061217.1; note = Lysobacter capsici
MSTPNPKKHPRPKRRTECYDVADSHLHGLESHSRLASILYWAGTPSQLKTFSRREDNYSRYTDKSKAGKERLIEAPAERLKVFQARILDLLSRIKLPDYVHSGRIGRSYLSNSAAHCSADGCTITMDIEGFYQSVTLQRVARFFEVWLKCSPDVSLTLAHLLCCDWHLATGSPASPLMSFWAYREVFDAIDSRVRARGGVFTLYIDDMGITGKGFGHTDVQWVSRLLRRYGLKIKEAKTRVFHADRPKLVTGRGMRHGVSRAPNKQHMKMRQAQALLEANPNDPTLRASVAGHRRHLALLDDEKRAHHRAEAARVSRLKLKV

SEQ ID NO: 3164 - protein, 312 aa, unidentified
  source 1..312: note = Related to JACHCO010000001.1; note = Rhodanobacter sp.
MASKQTNSAQRYGVGTSPLYGIQSKRRLAEVLFWAGPTSALASFARDPDNYARYIDRRRSEKPRLIEAPQARLKGFQKRVEDLLKRTVMPDYLHSGIPGRSYLTCSAAHRDAAGCTVTMDISDFYLSISQDRVTRMFIVLFACTRDVAEVLAQLLCCDGHLATGSPASPLLSFLANKETFDQIAAHAGRRSGAFTLYIDDVALTGKGIGTAEVKWITRLLKRSDFTVKRSKTKIFRASRARLITGRVLYGGQSRAPSRQHQKMKAAIEASNALPKDKALKASAIGRVRHVALLDDVRRDGMRATAKRLAPPK

SEQ ID NO: 3165 - protein, 326 aa, unidentified
  source 1..326: note = Related to NZ_LGRQ01000750.1; note = Luteibacter rhizovicinus
MNPKVRTKKERLEKPLKQYAPDQCALYGIKGVGQLMRVLRWRGTRAELEAFDRAPGSYRFWANEQGREIQAAGAEMRKLHARVAVLLRRIMPPEYRQSGVRKRSFLTNAQFHTLDEPSVKLDIKSFYPSTTFAHVRRFFQNDMKCAGDVAFLLAKMCCVNQRHLPTGGVHSEVLAFYCHRNAFEQLYQRAKARGGVMTVYVDDIMMTMPRASLTDLEWARRLFANHGIKIHPGKSKVLAKAKRKTITGVDIHRGKISAPKAQHQLILQRHVELNAAVNPTLAVTAARSLLGHLDHVAQIEPRFRSRAEGTRAWLAAVLAETDAPGE

SEQ ID NO: 3166 - protein, 320 aa, unidentified
  source 1..320: note = Related to NZ_JQNL01000001.1; note = Luteibacter sp.
MKMPVRKKKQRLEKPRKQYRIDQCALYGLKGVGQLMRALRWTGTRAALEGFDQAKGSYKAWANETGREIQAAGADMRKLQARIAVLLRRVMPPDYRQSGVRDRSFLTNAKLHRADEPSIKLDIKSFYPSTTFAHVRRFFHQEMKCAGDVAFLLAKLCCYHRRHLPTGGVHSEVLAFYCHRRAFEQLYRRAKGRGGEMTVYVDDIMMTMPGASLTDLEWARRLFAKQGVKIHPGKSTVLTKDRPKTITGVTIHRGKLQAPKAQHHLIRQKFEDLAKAEDPAAATAAARSLIGHLDHVAQIEPHLRDRANGTRALLRRTLAP

SEQ ID NO: 3167 - protein, 328 aa, unidentified
  source 1..328: note = Related to JACYXL010000002.1; note = Rhodanobacter sp.
MTTVQKRKKPPRLETPKKQYALTDCALSGIRGIGQLLHVLRWEGSRQELEDLPAAQGSYKVWRTDQGRAIQAVNLKEANGSKLRQIQARIAVLLRRVLPPEYRHSGVRGRSFITNAQQHLQDDPSIKLDIKSFYPSTTFQHVRRFFVEAMRCSGDVAFLLAKLCCYQQRHLPTGGVHSEVVAFYCHKRSFDQLWERVKARSGKMSVYVDDIMLTMPNASLTDLEWARRLFAKQRVKIHPGKSKVLSKRSIKVITGVEIRGGKTGAPKEQHRLIKQRFDEIRAAASADELAGAVKSLLGHLDHVAQIDPRFVNRARGTRARLKAVIDHN

SEQ ID NO: 3168 - protein, 323 aa, unidentified
  source 1..323: note = Related to LR990730.1; note = Xanthomonas hydrangeae
MTKTIRKSKRRRQPRLEKPKKQYALHDCGLYGLKGLGQLAKALQITQDELDELANLRGGYTVWNQNGRAVQQARPALRKIHARIATLLRRVASPDYRHSGVRDRSFISNAAQHIAPHASLKLDISKFYPSTSVHHVWKFFFRKMHCARDIAAILAGLCCFERRHLPTGGVHSEVLAFYCHKDMLDSLNERVVSRGGVMTVYVDDIVVTMPGACESDLHWAQRLIARARLAMNLRKSRVINADKEKLITGVLIRRGKISAPAGQHKKVKLLHEAIGSATAGDDVTPQIRSLQGHLDHIAQIDPKFLSRAKGHRAKNRLALLPPI

SEQ ID NO: 3169 - protein, 319 aa, unidentified
  source 1..319: note = Related to JADJBZ010000003.1; note = Proteobacteria bacterium
MARLEQLDRPKYAMTTSPLYGIRSRKRLVEVLDWQGSVKALDGFVEQPDNYNCFLHEEDGKKPRPVQQPTPKLEALHRRVARLLLRILPPDYLHSGLRKRSFVTNAAQHVNGHPAVKLDVHKFYPSTLHSHVCGFFKNQMACAPDVAGLLASLCCVTVNGVRHLPTGSPLSQILAFYSHRQMFDELSAYVAARGGVITVYVDDITASMEFASVGDIRAMGRIITRHGLMWHKERFFPRGHSKAITGAIAKVDHLEAPKKQHLKYATARDRVDHPSLLVADQKQAARSAIGLLQCIAQIDERQIRVARGMAQKLTAVAGL

SEQ ID NO: 3170 - protein, 310 aa, unidentified
  source 1..310: note = Related to NC_013851.1; note = Allochromatium vinosum
MKKIKSPYAINQSPLYKIYSLKKLCEVLKFDRKVIAKLLKSQDNYKKFHQHDGAKSRLIEYPKPRLEAVHKRVFSLLSRITTPEYLHSGVSGRSYITNAQQHSSALAGFKLDIKSFFLSTTTDHIYKLFRFSFGCSFKVSQTLASLLCVSGHLPTGSCASQVLAFFAHKKMFDKLAKTVNQFGGKMTLYVDDLYVSIQYVKRWHIRRLDRIIRGNGLFAHKGRVYQRVKPKLITGVILIDGKMKLPHAKHRKIRDTRNAARICSSRSQKSLLMRSLVGQLTTGSLLDPSLKSRVKPARSYLQRLEKQHQV

SEQ ID NO: 3171 - protein, 316 aa, unidentified
  source 1..316: note = Related to NZ_CP061930.1; note = Klebsiella michiganensis
MKKRKKLKISTKNKSYGVMDSPFYKLKSKKKLAGLLCISVNDLSILKNDEGNYSVFDQLSKKGKSRKIQKPLDKLDIVHTRIASLLSRIALPEYLHSGKKRCSNVTNAKAHLNHEKMMTTDIKAFFPSTTRIMIFSFFFSVMKTSSDVADILSHICTCHDRLPTGSRISMPLAYFANSRMFGEMYELCQKLKVKMTVYVDDLTFSGANVNRLFCAVIRKVISKHGHIMHPTKTKLYAKDKPKLVTGIIVLGDALKVRNEQHRLMARDIEYWKIIKDAENAKETSIAKTLFGRLHSMGVIEQRYKSKVLTLKVNTAS

SEQ ID NO: 3172 - protein, 316 aa, Escherichia coli
  source 1..316: note = Related to CP056584.1
MKKRKKLKVNTKNKSYDIMDSPFYKLKSKRKLANLLCVSLEELYSLRKDEGNYSVFEQLSKKGKARKIQKPLEKLELVHTRIASLLSRIALPEYLHSGKKKCSNVTNAKAHLNNEKMMTTDIKAFFPSTTRGMIFSFFFSVMKMSSDVADVLSHICTCHDRLPTGSRISMPLAYFANSRMFGEIYQLCQKLRVNMTVYVDDLTFSGGNVNRLFCAVIRKIVNKHGHVIHPTKTKLYARDKPKLVTGVIVFGNALKVRNEQHFLMAREIDYWKIIKDAENARETIIAKKLFGRLHSMGVIEQRYKSKVLTLKANTAN

SEQ ID NO: 3173 - protein, 316 aa, Enterobacter sp.
  source 1..316: note = Related to NZ_JAIFPH010000003.1; note = Enterobacter hormaechei
MKKRKKLKIFTNNKSYGVMDSPFYKLKSKKKLACLLCVDTNDLYALKKDEGNYSVFEQLSKKGKPRKIQKPVDKLDVVHTRIASLLSRIALPEYLHSGKKKCSNVTNAKAHLNHEKMMTSDIKAFFPSTTRSMIFSFFFSVMKMSSDVADILSHICTCHERLPTGSRISMPLAYFANSRMFCEIDELCRKLRIKMTVYVDDLTFSGANVNRLFCAVVRKVISKHGHNMHPTKTKLYAKDKPKLVTGVIVFGDCLKVRNEQHRLMARDIEYWKIIKDAENARDTPIAKTLFGRLHSMGVIEQRYKSKVLTLKVNTAI

SEQ ID NO: 3174 - protein, 316 aa, Escherichia coli
  source 1..316: note = Related to UGAA01000001.1
MKKRIKLKVSTKNKSYPITDSPLYKLKSKKKLANLLCVSINDLSALKRDEGNYSIFEQLSKKNKIRKIQKPLEKLDVVHTRIASLLLRIAMPEYLHSGKKSCSNITNAKAHLNHQKLMTTDIKSFFPSTTREMIFSFFFSIMKMSPDVADILSHICTCHERLPTGSRISMPLAYFANSRMFDEMNQLCEKFRVKMTVYVDDLTFSGDNVNRLFCSVIRKIINKHGHVMHPTKTKLYAGDKPKLVTGVIVFGDSLKVRNEQHYLMAREIELWKIIKDVEQAKDTRTAKKLFGRLYSMGVIEKRYRSKVLTLKANTSV

SEQ ID NO: 3175 - protein, 316 aa, Enterobacter sp.
  source 1..316: note = Related to CP074170.1
MQKPKKLKISTKNKSYGMMDSPFYKLKSKRKLAELLCVSLSDLSALKKDEGNYCIFEQLSKKGKLRKIQKPLDKLDIVHTRIASLLSRIALPSYLHSGKKGCSNVTNAKAHLNNDKMMTTDIKSFFPSTTRVMVFSFFYSVMKTSSDVADFLSHICTCHGQLPTGSRISMPLAYFANSRMFDEIYQLCQKLTVKMTVYVDDLTFSGANVNRLFCAVIGKIINKHGHAVHPTKTKMYGKEKPKLVTGVIVLGDSLKVRNEQHRLMARDIECWKMIKDMEKAKETSFAKTLFGRLHSMGVIDQRYKSKVLTLKVNTAN

SEQ ID NO: 3176 - protein, 316 aa, Escherichia coli
  source 1..316: note = Related to CP023960.1
MKRRIKLKISTKNKSYDIIDSPFYKMRSKRKLASLLGVDVGDLSTLKKDEGNYSIFEQLSKNGKPRKIQKPLEKLDVVHTRIASLLSRITLPDYLHSGKKGCSNVTNAKIHLNNERLMTTDIRAFFPSTTREMIFSFFFSVMKMSSDVADVLSYICTCYGRLPTGSRISMPLAYFANSRMFGEIHQLCNKLHVNMSVYVDDLTFSGQNVNRLFCSVIRKIINKHGHVMHADKTKIYSREKPKLVTGVIVLGGSLKVRNKQHLLMSQEIEYWKMIKDAACARETHTAKKLFGRLHSMGVIEQRYRSKVLTLKASTAL

SEQ ID NO: 3177 - protein, 316 aa, unidentified
  source 1..316: note = Related to NZ_WUBS01000011.1; note = Acerihabitans arboris
MKKRKKLKISTKNKSYSLNDSPFFMLKSKKKLATLLGITISDLSLLKKDDENYSIFEQLSKKGKPRKIQKPLDALDIVHTRIASLLSRIALPEYLHSGKKGRSNITNAHAHLNTSKTMTSDIKAFFPSTTRHMIFSFYFSVMKMSSDVADVLSHICTCYGQLPTGSRISMPLAFFANSRMFDELNALCNTLKVKMTVYVDDLTFSGDNVNRLFCSVVRRIIYKHGHIMHPTKTKLYSEYMPKLVTGVIVTAGCMKVRNEQHRLMARDIEYWMLIKDADRARETSVVKTLFGRLHSMGVIEPRYKSKVLTLKMNTAI

SEQ ID NO: 3178 - protein, 316 aa, unidentified
  source 1..316: note = Related to NZ_CP006929.1; note = Dickeya zeae
MRIKPKLKIITRSKEYNLTDSPLYKINSKRKLAKIINVDFNTLKSLKDDKMNYSIFDQVSKKGKVRKIQKPVQRLDIVHTRIASLLCRIATPSYLHSGKKHHSNITNADVHKNEFNLLTTDIKSFFPSTKRSMVFSFFLTVMKTSPDVADILSHLCTCHNHIPTGSRISMPLAFWANVRMFEELKRLCSNLDITMTVYVDDITFSGENVNRLFVSCVKKIIVKHGHQMHPTKTKFYNSTAPKLVTGVIVVSNCLKVRNEQHQLFANEFEQWRIIKEEPHAINANITNKLIGRLYSMGVIEKRFKEKVRTVKNSTAL

SEQ ID NO: 3179 - protein, 316 aa, Escherichia coli
  source 1..316: note = Related to CP010122.1
MKSKPKLKISTRDKSYNLIDSPLYKLKNKKRLAQLLNINLCDFRTLTSDDENYSVFEQLSKKGKVRKIQKPVHKLDVVHTRIASLICRIQTPLYLHSGKKTCSNISNASAHINELNLLTTDIKSFFPSTTRNMVFSFFYSVMKTSSDIADILSHICTCHGHIPTGSRISMPLAFWSNIRMFTELENLSLSLNVTMTVYVDDITFSGEKVNRLFMSCMRKIVAKHGHQVHPTKTKLYGAKLPKLVTGVIVHSNVLKIRNEQHLLLSRELEQWRIIKDEPYAINANITSKLVGRLYSMGVIEQRYKEKVRTIKSNTAF

SEQ ID NO: 3180 - protein, 317 aa, Vibrio sp.
  source 1..317: note = Related to MCYV02000002.1; note = Vibrio splendidus
MNRKSKLRINTKCKSYQLQDSSFYKLTSKKRLASILNLSLQNINSLRCDLGNYTEFEELGKSGKPRKIQKPCHRLDVAHTRIASLLCRIQTPTYLHSGKKSHSNVTNAASHVNFHQLLATDVKSFFPSTSRKMVFSFFLTVLKCSPDIADILADICTCHNHIPTGSRISMPLAYWANCRMFEELERVSDKHHVTMTVYVDDLTFSGEKVNRQFRSLVKKIISKHGHTMHPKKTKLYQGSQPKLVTGVIVSDGVLKVRNEQHLMYSSELAQWDSIKNLPLASETNLVAKLIGRLHSMGVIDTKYKAKVKSIKNATCSD

SEQ ID NO: 3181 - protein, 317 aa, Vibrio sp.
  source 1..317: note = Related to PIFL01000078.1; note = Vibrio splendidus
MNLKSKLKINTKQKCYPLNDSPLYKLKSKKKLASILKVQLPEILALRCDDGNYAEFTELGKSGKPRSIQKPCYKLDVIHTRIASLLCRIENPPFLHSGKKFHSNVTNAATHANSHQLLATDVKSFFPSTSRPMVFSFFLTVLKCSPDVADILADICTCHKHLPTGSRISMPLAYWANCRMFEELQRISLKHGVTMTVYVDDLTFSGQAVNRRFKSLVKKVVSKHGHIIHPTKTKLYKGTQPKLITGVVVVDGVLKVRNEQHLKYSSELAQWDSIKDLPAASETKLVAQLIGRLHSMGVIDMKYKAKVKSIKNATCSD

SEQ ID NO: 3182 - protein, 316 aa, Vibrio sp.
  source 1..316: note = Related to VTLM01000009.1; note = Vibrio cholerae
MTRNSKLKLETKNKSYPLQDSPFHKLTSKKQLRKLLDIDSEKLKKLRQDKGNYSEFEDVSVSGKARKIQKPTRELDVVHTRIASLLCRISTPDYLHSGKKQHSNVTNARQHKNEYALLATDVKSFFPSTTWNMVFSFFYGVMKCSSDVSEILSDLCTCHKHIPTGSRISMPLAFWANIRMFSELDCLSNKHGVTMTVYVDDLTFSGREVNNLFRSSVKKIINKHGHIMHPTKTKLYKPNQPKLVTGVVVNGGHLKVRNEQHFKMHQELQIWCKIKDTPYALSSSITSQLLGRLHAMGTIDDRFKQKARTIKLSTAP

SEQ ID NO: 3183 - protein, 316 aa, Vibrio sp.
  source 1..316: note = Related to LMYA01000001.1; note = Vibrio vulnificus
MTRKSKLKLETKNKSYPLQDSPFHKLTSKKVLRKLLDVDADKLKKLRQDKGNYSEFDDIGESGKARKIQKPARDLDIVHTRIASLLCRISTPQYLHSGKKQHSNITNARQHQNKYPLLATDVKSFFPSTTWDMVFSFFYGVMKCSSDVSEILADLCTCHKHIPTGSRISMPLAFWANIRMFSELEALSTKHNVTMTVYVDDLTFSGMQVNKLFRSSAKKIITKHGHIMHPTKTKLYKSNQAKLVTGVVVEGESIKVRNEQHRKMHEELGVWFEIKDMPYAMSSSITSKLLGRLHAMGTIDDKFKQKAKTVKKSTTS

SEQ ID NO: 3184 - protein, 316 aa, unidentified
  source 1..316: note = Related to NZ_CP035690.1; note = Grimontia hollisae
MSRKSKLKIDTKNKSYSIIDSPFYKLFSKKKLATLLKCDLSELKKLRDDEGNYSEFEDIGKSGKPRKIQKPSRNLDIVHTRIASLLSRISTPTYLHSGKKEHSNVTNAKAHLETSALMTTDIRSFFPSTSHRMIFSFFYGVMQCSSDVAELLADLCTCHKHLPTGSRISMPLAYWANCRMFEELNSLSSKHGVTMTVYVDDLTFSGSKVNKLFTSTVNKIISKHGHTMHPAKTKLYSSHEPKLVTGVVVDKGVLRVRNEQHLKLFEDISLWSFIKDEKYALGSSITSKLIGRLHAMGTIEPRFKSKAKSVRNSTAM

SEQ ID NO: 3185 - protein, 314 aa, unidentified
  source 1..314: note = Related to NZ_CP058958.1; note = Providencia rettgeri
MSQKLTLNNKNKAYQLTDSPFHKLSSKKKLAILLRTPLSQIRSLRADSGNYSEFESIGKSGKIRKIQKPSRNLDVVHTRIASLLIRIITPEYLHSGKKGYSNVTNANIHLNTNALMTSDIKSFYPSTSWNMIFSFFYSVMSCSADIAEILADLCTCHKHLPTGSRISMPLAYWANVRMFNELENICQKHDVIMTVYVDDLTFSGKNVNRLFKSTVKKIISRYGHEMHPTKTKLYPPNGTKLVTGVVIDRNNLLVRNEQHFKLFEELSMWNSIKNNQYAISMSITSKLIGRLHSMGTIEPKYKTKAKSVRKSTAI

SEQ ID NO: 3186 - protein, 316 aa, Vibrio sp.
  source 1..316: note = Related to NZ_CP054700.1; note = Vibrio alginolyticus
MPKTKTKLKIDTRGKFYALKDSPLYKLRTKRRLAEVLNHSLQTLRALRTDQGNYKEFEDNSGGKARKIQQPARSLDMVHTRIASLLCRIDTPDYLHSGKKGVSNVTNAEAHIDSHNVLTTDIRSFFPSTTRRMVFSFFYGVMKCAPDVADLLADLCTIHSHIPTGSRLSMPLAFWANHTMFNELNELSIKHNVKMTVYVDDLTFSGKEVNRLFSSCARRIISKYDHCMHPNKTKLYSATSPKLITGVVVQGSLLKVRNQQHQYLLSEMTQWLSIKDSPRALHLNITNRMLGRLYSMSVIDKRYRAKARMVRNSTAL

SEQ ID NO: 3187 - protein, 317 aa, unidentified
  source 1..317: note = Related to NZ_LASA01000054.1; note = Endozoicomonas arenosclerae
MKQRKSKLKIQTKGKSYSLHDSPLYKLKTKRKLASILQHSLPDLKLLCSDEGNYAVFEETKKGSKPREIQKPNPKLEVVHTRIASLLCRIDTPNYLHSGKKGHSNVSNAYAHVNSDNLLTTDVKSFFPATSRRQVFSYFYSIMQCSPDVADMLADLCTYNAHIPTGSRISMPLAYWANVSMFNELQALSLKHSVKMTIYVDDLTFSGKKVNKLFRLCVKRILENYDHAMHPAKTILYRAAQPKLVTGVIVTEGQMKVRNEQHQQLASELDIWKAIKDHPYAAGMKPTSKLLGRLYSMAVIDSRYKSKAVTVRKSTHT

SEQ ID NO: 3188 - protein, 316 aa, unidentified
  source 1..316: note = Related to NZ_LTYZ01000001.1; note = Aliivibrio fischeri
MTKKSKLKIELKGKSYDIRDSPFFRLRSKKKLSSLFNLTLPQLQELKSDIGNYAEFEDVGKTGKARKIQKPNLELDKVHTKIASYLSRIKTPDFLHSGKKYHSNITNAKAHLDSTNLMVTDIKSFFPSTKKNMIFSFFYSVMECSSDVADLLAQLCSIHGFLPTGSRISMPLAYWANCRMFNELDTLSRSHGITMTVYVDDLTFSGENINRLFKAVVNKVISKHGHTMHPSKTKIYSAKQPKLVTGVIVKDNELKVRNEQHQKLYADLEFWKLIKDSPLTKNAKISSQLLGRLYSMGFIEQKFKQKALTIKSALNS

SEQ ID NO: 3189 - protein, 317 aa, Vibrio sp.
  source 1..317: note = Related to NMSO01000008.1; note = Vibrio metoecus
MTKKSKLKIVTRKKSYELSDSPFYKLKSKKKLAHLLKVNVTKLQQMTKDSNNYNEFEHNKDDGGKVRKIQHPIGELDVVHTRIASLLCRIKTPDFLHSGKKHHSNVTNAKAHCNKHPLMTTDVCSFFPSTSREMVFSFFYTVMNCAPDVADVLSRICTIHGHLPTGSRISMPLAYWANCRMFKELEELTKKHQVKMTLYVDDLTFSGKSVNTLFKSITCQIIERHGHKMHPRKTKLYEAKSPKLVTGVVIKDNQIEVRNEQRKKLVSDIACWKSIKDFPNAISMQVTNTLLGRLHALGSIDSKFKDRARTIKAATQK

SEQ ID NO: 3190 - protein, 301 aa, unidentified
  source 1..301: note = Related to NZ_FPBJ01000003.1; note = Xenorhabdus koppenhoeferi
MLYRILLSINLSQKKKLASLLKVDMQTLFRMMNDTENYNEFEKKGKKGKVRKIQHPVGELDVVHTRIASLICRIATPNFLHSGKKQHSNVSNAHVHCNNFPLMTTDVCSFFPSTKKSMVFSFFYTVMECSSDVADILSCICTIHSHLPTGSRISMPLAYWANCRMFSELEQLAIKHDVTMTLYVDDLTFSGAQVNSLFKSIIRQVIERHGHQMHSTKTKLYSGNKPKLVTGIVIKGEMVSVRNEQRMKLVSDITCWKSIKDMPNAINMPVTHTLLGRLYALSSIDPMFKDRAKTIKANTQK

SEQ ID NO: 3191 - protein, 316 aa, Vibrio sp.
  source 1..316: note = Related to VTYH01000022.1; note = Vibrio europaeus
MRKKSKLKLQTKGKSYPLCDSPFYKLRTKKKLAELIGFPLIELQKLRSHIGHYIEFEEEGKKGKKRKIQQPINEMDRVHTRIASLICRIDVPNYLHSGRKGFSNVSNAKAHLDSSKLMATDVKSFFPSTTRRMIFSFFYSVMQCSPDVSDILADICTIHGHLPTGSRISMPIAFWASCRLFEELDSLSKHHDVKMTLYVDDLTFSGANVNRLFKTTVRKIIERHGHTMHPTKTKLYDEHQPKLITGVVVDNGVLRVRNQQRKQLITDFACWDLVKDVENASLLPCTNSLIGRLQSMGMIDGAFKERAKTVRGQTHK

SEQ ID NO: 3192 - protein, 323 aa, Vibrio sp.
  source 1..323: note = Related to PIFP01000042.1; note = Vibrio splendidus
MKKSKLKIKTKGKEYGIKDSPLYNLRTKRHLANLLNCSNSDLKKYAKDDGNYHEFEEKGANQKARKIQQPMRGLDKVHTRIASLLCRITTPDYLHSGKKKHSNVSNALAHTAKENSRTPLMTTDVKSFFPSTSRKMIFSFFYSVMKCSADVSDILADICTVHHFLPTGSRISMPLAFWANCRMFSELEQLSKKHDNLMTVYVDDLTFSGVNVNPLFKTTVKKILNRYGHIMHPDKTKVYDCDDAKLVTGVIIKGGTIMVRNEQRKQLVNDLSCWSVIKNQPDAINNTFTQRLIGRLHSMGVVDETFKKRAMTIRNQTNRTPIS

SEQ ID NO: 3193 - protein, 319 aa, Vibrio sp.
  source 1..319: note = Related to CP073273.1; note = Vibrio fluvialis
MKKSKLKIKTNGKEYSLKDSPFYNIKTKKRLSILIGCTLSELKAFSKDQGNYHEFLEKSTGGKSRKIQQPVRGLDRIHTRIASLLCRIETPDYLHSGKKNHSNVSNAKTHAEKHFDNVPTMTTDIKSFFPSTTRKMIFSFFYSVMKCSADVADVLADICTIHKFLPTGSRISMPLAFWANSRMFEELEALSIKHDIVMTVYVDDLTFSGCNVNKLFKTTVKRVIERHHHTMHPDKTKIYRKAEPKLVTGVVVHNGEIRVRNEQHKQLVTDLACWNSIKAIPEAIRMPYTNRLIGRLHSMGVIESVFKDKATAIRNQTAK

SEQ ID NO: 3194 - protein, 319 aa, unidentified
  source 1..319: note = Related to JADZHF010000006.1; note = Shewanella algae
MRKPKFKIKTKGKSYSIKDSPLYNLRTKKHLANLLNCNTQDFSTLSKDDGNYNVFETTGKNGKKRKIHKPQPQLDKIHTRIASLLCRIDAPDYLHSGRKNRSNITNAQAHITNHSSETAILATDIRDFFTSTHRKNVFNFFYTIMKCSTDVADILAKLSTIHEHVPTGSRISMPIAFWANYHMFEELHALSSKYNVCMTVYVDDLTFSGNNVNPLFRTVVEKIVSRYGHKIHPTKTKLYAKAAPKLVTGVIVKNQSLQVRNEQFKQLVTDFTCWKAIRNTPQAIFDPHTYRLLGRLHSMGSIEPVFREKARTVKGATNR

SEQ ID NO: 3195 - protein, 317 aa, unidentified
  source 1..317: note = Related to AXZL01000070.1; note = Shewanella decolorationis
MQKLKIKTKGKSYALKDSPFYNLRTKKRLSILLGCDTKDLPLLAKDDGNYNVFSIIGKAGKPRQIHKPINKLDKIHTRIASLICRINLPSYVHSGRKKHSNLTNAKAHLSADGFDTKVLTTDIKDFFTSTRKKQVFGFFYSDLKCTADVANLLADMCTIHGHVPTGSRLSMVLAYWANYHLFEELSSLSKQHSVTMTVYVDDLTFSGTGVNELFKTVVRKVLSRYGHTMHPTKTKLYGKESPKLVTGIVVKEGQLQIRNQQFKELVTDFACWHAIRQTPHAIFDPHTYRLLGRLNSMSSIDPVFKEKAQTVKGNTCR

SEQ ID NO: 3196 - protein, 318 aa, unidentified
  source 1..318: note = Related to NC_006371.1; note = Photobacterium profundum
MNRKRSKKLKIQTNGKSYTIKDSPLYRLRSKKKLANILKSDLNNLKKLRLDADNYHEFEDKGKGGKPRKIQCPCNGLEKIHSRIASLLCRIKTPDYLQSGKKGHSNVSNANVHLGSSCLLATDIKSFFPSTKRYMLFSFFFHSMECSADVADILSDLCTINGHIPTGSQISMPLAFWANSHMFDELYLLSVKHAVKMTVYVDDLTFSGDAVNKLFMSVTQRIITKHNQVMHPDKTKLYRGYESKLITGVVVKGDNLLVRNEQHKMLFSDVECWKAIKDIPSAINSNIAKKVIGRMHSMSVIDSKFKDKVRTLRISTAT

SEQ ID NO: 3197 - protein, 301 aa, Aeromonas salmonicida
  source 1..301: note = Related to NZ_CP060032.1
MDSPLYKVKTKRKLASLLNSTIPDLNRLKIDDGNYNEFDDLKKPEKPRKIQQPVKSLDVVHSRLASLLCRISVPEYLHSGRKGRSHVTNANAHVGNHSILTTDIKAFFQSTKRDMIFTFFYKKMQCSADVADLLSDLCTCHGHIPTGSRISMPLAYWANSDMFDELYALALKHDNNMSVYVDDLTFSGGNINELFCSIVKKIIIRYGQTPHPNKTRIYGKNSVKIVTGVAVHGDELLVTNYQHYQHYQLYSDVEVWKAIKDTENAMELNTSKRLIGRLNSLAVINRKYRDKARTIKAATSK

SEQ ID NO: 3198 - protein, 315 aa, Aeromonas sp.
  source 1..315: note = Related to JAEHHN010000014.1; note = Aeromonas caviae
MKPKINTLGKSHPIENSAFYKLTSKNVLYKLLGVPKEEVIRLLGDPDRYNEFQDLTNIDKPRAIQKPKKALDVVQSRIASLICRIEVPEYLESGRKGHSHVTNAIAHVSPNNTSVAFLTTDIRSFFPSTTVVMVYDFFRSTLRCSHAVSEILSNLCTCRGFVPTGSRISMPIAFWANYPMFLELEKLCIKHNIRMSVYVDDLTFSGNNINTLFLACVRKIIIRHGHEPHPDKTKLYARNDVKIVTGVAVVDNSITATNKQHLKLYQEIEAWKAIKDIPDALETNTVKRLIGRLNSLTLIDYRFKDKARSIKSATS

SEQ ID NO: 3199 - protein, 309 aa, unidentified
  source 1..309: note = Related to UFGU01000001.1; note = Klebsiella pneumoniae
MKVKKQKIKTKGKSYPLQGCIFYKLSSKKRLEKILFTSIKELQFLSNDINYVLFYEKSDINKKRLIEKPNEKLDIIHTRIASLISRITQPQYMHSGLIDKSYISNAKQHLGKKPTLTTDIKSFFPSTTRQKVFNFFYKKLCCSSDIADLLSLLCTINNHIPTGSRISMPLAYWANANMFNNLYAISCANNIIMTVYVDDITFSGEKVNKQFLSRVKKIITSESHIMHPTKTILYSGTEIKKITGVIISNDKLKVPNSLHNKIYLDIEEWKSLDNNENTAVKNRLLGRVYAAANIDNRFKDKARTIKKYV

SEQ ID NO: 3200 - protein, 308 aa, unidentified
  source 1..308: note = Related to NZ_CP087584.1; note = Providencia rettgeri
MKAKKRKIKTKGKSYSLQECVFYKLTSKKKLEKILFSSIQELKLLSDDRNYILFYEKSDINKKRLIEKPNEKLDIIHTRIASLISRIIQPQYMHSGLKDKSYISNARAHLGKKPVLTTDIKSFFPSTTRLKVFNFFYKKLRCSSDIADLLSHLCTVNNHIPTGSRISMPLAYWANADMFNNLYAISRANGNKMTVYVDDVTFSGEKVNSKFLSSAKRIIASESHIMHPTKTILYGSIQIKKITGVIISSDELKVPNSLHNKIYIDMEAWKRSNNKNYTGIIDRLLGRVHAAANIDNRFKDKARTIKNK

SEQ ID NO: 3201 - protein, 311 aa, unidentified
  source 1..311: note = Related to LXEX01000068.1; note = Obesumbacterium proteus
MRRKKPKINTKNKSYSLQDCALYKCITKKRLVKILKSDLGKLKNLSRDIDNYTTFYEKTDIQKKRLIERPNEELDVIHTRIASLLCRVTQPDFMHSGLKLHSHVSNAKKHIGVHPLLTTDLKSFFSSTSKAIVFDFFFKKLLCSPDVSELLSNLCTYNNHIPTGSRISMPLAYWANSKMFLELNALSKALGICMTVYVDDITFSGRSVNKLFKSKVNKIIESHSHIMHPVKTILYKPYQNKLVTGVIVSGDNLRVRNKQLKDIHVQMKEWENSNLIISRNIVKERLLGRLNSASTIDIRFKDKARTLKKTT

SEQ ID NO: 3202 - protein, 310 aa, unidentified
  source 1..310: note = Related to CP042173.1; note = Yersinia sp.
MAKKKGRINTKGKSYSINDSALFNIQSKNKLAEVLLTNLDNIKSLLSNDNYIVFDNTNEDGKKRTIQTPSDKLNVVHTRIASLLCRITQPEYVHSGIKNKSNVSNARKHVGTHPVLTSDIRSFFPSTSKHQVFNFFNRKLKCAADVSDLMAELCTYANHIPTGSRISMPLAFWANYDMFNEMNTISNKLNITMTVYVDDITFSGNAVNRLFLHKCKRIVEKNGHVLHPKKTALYSAKEPKTITGVIVHENEIKVRNLHYKKIYFDLDAWKKTDDAIEKENLKNKVLGRMHSLSTINEKFKDKARSFRSID

SEQ ID NO: 3203 - protein, 316 aa, Nitrosomonas sp.
  source 1..316: note = Related to JAGRFN010000264.1
MSQKKRRLKIDVRNKKYPIVDSCLFRLQSKRKLSEFLNTELFALKNLTDDRNYNCYIDTSGHKPREIEHPCFELDKIQTRIASLICRIAQPDYIHSGVKGRSHITNAKQHVGRHNVLTSDIQSFFPSTTQRMVFNFFYKRLQCSSDVADLLANLCTCKGHIPTGSRISMPLAFWANEPMFNLLHKVSLSQGITFTVFVDDIVFSGSSIDERFVYNIKKLISNHGHTAHPRKTKLYKAGNTKLVTGVAVDTNGLHVANRHRKNIYQDMSQWKVSKQAGLQFDDLNKRIIGRMNAQSLVDYRFKDKARTLRLSIKKKN

SEQ ID NO: 3204 - protein, 315 aa, unidentified
  source 1..315: note = Related to NZ_CP031727.1; note = Cellvibrio sp.
MKIKHSKLKIIRKGKSYALKDSSLYKITSKKKLLSILSQASVTISDLTKAIGDYSIFIDNKNPLKPRTIEKPNKNLDIYQSRIASLLCRIESPDFIHSGTKRRSHVTNAKIHLANENTFTTDIKSFFPSTPIEKVFSFFYGVMKCEPDVADLLAKLCTCNGHIPTGSRISMPMSFWANEKMFRELQNLSIQHNVTMTLYVDDITFTGSNVNKIFVNTVKKIITRHGHIMHPKKSILYPKGSVKVITGVVIRNGTALAKNEQHKNLYQDIELLKGFSGKLSPPEKLIDRTLGRINSLSVIESRYKDKARSLWSLIK

SEQ ID NO: 3205 - protein, 316 aa, unidentified
  source 1..316: note = Related to NZ_CP047970.1; note = Cobetia pacifica
MNNPLKINTKSKSYSLQDSALYKIKSKRRLLSLLNLSHQELKSLLSDGNYNIYQDNTQEKPRLIEHPQRQLERIHTRIASLLCRIKQPEYIHSGIKGKSHLTNARTHIGPAPTLTTDIKSFYQATHIHSVFDFFKNSLDCSPDVAKLLSELCTCNGHIPTGSRISMPLAYWANAHMFNELYRYSSERDIIMTVFVDDITFSGNKVTRTFKQNVKKIIEKHNHVMHPTKTVLHKENSLKVITGAVVGSKKLQIRNLHHESIYSELSQWMLIRDENSKNSSIFTEQIKNRLLGKINSQGQIDNRFKDKARSIKNYRKV

SEQ ID NO: 3206 - protein, 312 aa, unidentified
  source 1..312: note = Related to JWLZ01000077.1; note = Photobacterium gaetbulicola
MKRKKNNKINTNGKSYPLHDSPFYKLRSKKVLFSLLKTDKEKIAHLKSDQGYNTFTQKSNKKTREIEHPVDALDIAHTKIASLLCRVTTPTYVHSGVKGRTHVTNAKEHLGKKRVLTTDIKSFYPSTTRQHVFKLFFNTFKCSPDVADILADICTFQGHVPTGSRLSMPIALWANINMFDELNVVSRKHDITMTVYVDDITFSGNLLNGRFKSLVKKIISRYDHVMHPKKTVLYKDDEIKVITGVVLDQDGIKIKNSQHKLIYQDIEQWKLFKGLAALPPESLNSRLMGRLHALSVINPRLKDKARSIKNCM

SEQ ID NO: 3207 - protein, 313 aa, unidentified
  source 1..313: note = Related to NZ_JAHNZV010000205.1; note = Psychromonas antarctica
MPRKKYKINTNDKAYSFESSSFYKLSSPNILANLLHIPLADLKKLKNSKDSYKPFVIKKEGKKDRTIECPKRLLEKVHTRIASLLCRIITPDFLHSGIKGRTYITNAKSHLGKHKVLTSDLRSFYPSTSKKMIFKLFRYNFHCSVEVADLIASVATYEEHLPTGSRLSMPLALWANIEMFLEIESLAKKHSINMTIYVDDLVFSGKNLNELFSSTVNKIVLKHGHEIHSGKTVLYKSDEIKLITGVIVHNDEIFIRNCHHQNMHNDLEEWKTYKNGFMVPDDLKSRLLGRINAFAQIDPRLKDKARSILAIEH

SEQ ID NO: 3208 - protein, 330 aa, unidentified
  source 1..330: note = Related to NZ_LS483452.1; note = Shewanella benthica
MSQQRRKYKINTNGKSYQIHDSPFYKLSSKKKLLSVLCITKEQLQSVLSNELNYNVFSQVGKTGKPRKIEHPINSVDKIHTRIASLLCRISQPEFMHSGVKGFSHVTNAKAHLGSHKTLTTDIKSFFPSTKKSMVFHFFYKRMKCSPDVADIMARITTFESHIPTGSRISMPLAFWANMDMFFELEKLAKLHNAIMTVYVDDLTFSGKAVNNLFKSIVKKIISKHGHIMHPKKTILYQHDDVKVITGVVLKNDSIAIKNQQHANIHADMIFWKIVRDDLFVPQGLKNRLLGRLNSLSVIAPSLKDKARSINNYKRKSKKSRVENKKQMVS

SEQ ID NO: 3209 - protein, 318 aa, unidentified
  source 1..318: note = Related to MZ568827.1; note = Shewanella phage vB_SspS_MuM16-1
MTRKKLRLKINTAGKSYRLHDSPFYKLIKQSRLLSILCITSEELSYLRYSPERYNVFIQKGNNEKERVIEHPREKLEKVHTRIASLMCRIEPPPFLHSGMKGLSHITNAQSHSTNSKVLTTDIKSFFPSTTREMIFRFFYKTLKCSSNVADILADICSVNGHLPTGSRISMPLAFWVNAEMFFELEKLSNMHDVCMTVYVDDVTFSGVTINKLFTKTVKSIISRHGHLMHPRKTVLYKGDDTKVITGVVLSGSKIAIKNQQHKKIHEDILLWKVVRDKYVPASLKNRLLGRLNSLSVVEPRLKDKARSIKNYKPNPQV

SEQ ID NO: 3210 - protein, 320 aa, unidentified
  source 1..320: note = Related to NZ_KB905161.1; note = Colwellia piezophila
MKKQKRPKFKIKTLNKAYEISDSPLYKLTTKRKLAALLLLEPVTLNALIKNTDNYNVFEQVNSNGKKRIIEHPNLELDKVHTRIASLLCRIKIPDFVHSGRAKHSHITNARIHIGHHKVLTTDIRSFFPSTSRTHLFNFFNRKMKCSSDVSDILSKICTYNEHLPTGSRISMPLALWANIGMFLELEKIAVKHDIKMSVYVDDITFSGDKLNKLFISTIKRIVERHGHIIHPVKTVLYAKDDAKVITGVILKDGKQFVKNEQHRNVYQDIEQWKILKDTPYMPETLKNRLLGRLNSLSAIEPKFKDKARSIRNHKTPTPY

SEQ ID NO: 3211 - protein, 327 aa, unidentified
  source 1..327: note = Related to NZ_KB889976.1; note = Teredinibacter turnerae
MAEKKLPNNKQRRLRLQTRGKQYSVCDSPFYKLCSKTKLAEMLGCTLPELKNLSSDEDYIVFNEEKSGKRREVQQPKPKLDKIHTRIGSLLARIKTPDYLHSGVKGRTHITNAKCHNSNSRILVTDVKSFYQSTTFKMIYGFFNHRMRCSPDVSWLLTKVSTYNNSIPTGSRLSMPLAFWSSIGMFEKLNQLSISESVVMTLYVDDLTFSGEKINKLFCHKVKKIVSSYGHLCHPKKTKIYNQNQAKVVTGVALLENGPAISNKQHKSIYEDMLQWEIIKNEALFESLNNRLLGKLNSQGQIDFRYKDKARSLMNEIRRRKPYSQVV

SEQ ID NO: 3212 - protein, 319 aa, unidentified
  source 1..319: note = Related to JABEPJ010000003.1; note = Pseudoalteromonas sp.
MRNSRSKLKINSNSKKHSINQSPFFKLKTKKKLIELLGLASSELSIAKKDIGNYVVFEQMGNNGKSRTIQHPKDKQNEIHNRIANLLTRIELPAYLHSGRKKHSHITNATQHLGSKKVLTTDIKSFFQSTTKKMVFNFFNRKLLCSPDVSHILSCICTFNGHIPTGSQLSMPLAFWANIDMFERLENLSSSLNVDMTVYVDDLTFSGEQVNRRFLSLIKKIIISSGQVPHPLKTKLFKKNDLKIITGVALKEDKTLITNKQHMLIYQSFESWKGCRDEPVIANYVMPKLLGRLNALSGIDPKLKDKAKSLINYKPTSLL

SEQ ID NO: 3213 - protein, 320 aa, unidentified
  source 1..320: note = Related to NZ_JACGUS010000120.1; note = Colwellia sp.
MRNRSKLKINSNSKKYSLNQSPFYKLKTKRKLIELLSLSMPELSIAKKDIDNYQVFDQMGNNGKPRTIQHPKNKQNEIHNRIANLLTRIELPDYLHSGRKKHSHITNATQHLGSKKVLTTDIKKFFQSTTREMVFRFFNKTLHCSSDVSDILSYICTFNSHIPTGSQLSMPLAFWSNIDMFEQLDNLSASLDVKMTVYVDDLTFSGEQVNKHFQSIVKKIIISNGQTPHPLKTKLFNKNDLKIITGVVIKDDKTLITNKQHKLIYQSFESWKGCRDEPLLESYIKIKPKLLGRLNALSGIDPKLKDKAKSLMNYKSAAEI

SEQ ID NO: 3214 - protein, 322 aa, unidentified
  source 1..322: note = Related to BDMN01000366.1
MRNKSKHKLKTYEICDSPLYKLRSKKKLLSLLYMSKEEIGIAVQDTDNYVVFETIRKKGKSRTIQHPKDRHKEIHCRLANLLIKIKVPNYLHSGRKEHSYVTNANQHLGEKRVLTTDISAFFQSTARDNVFCFFLNIMKCSSDVADTLSHICTYNGHIPTGSKLSMPLAFWSNLRMFDQLEKLSIKHNVCMSVYVDDITFSGNSINRLFLSTVRKIITSNGHTPHPEKTKIFGKKDIKVITGVVINGDDTLITNKQNKLIFQSFVEWKASRDEPLTERLITQKLLGRLNALSMIDPKLKDKAKSVTSYKKIVIKYVTTQRVF

SEQ ID NO: 3215 - protein, 324 aa, unidentified
  source 1..324: note = Related to NC_018692.1; note = Alteromonas macleodii
MPKKSKLKIDHSRRKHKLFESSLYKLKTKRKLAELLQVTIPELKLASADVGNYVVFEQEGKSGKARTIQHPKDSQKKIHCRIANLLCRIEFPEYLHSGRKEHSHITNAKAHTGNKKVLTTDIKSFFPSTTRKMVFNFFYNTMKCSSDVADLLASICTYNGHIPTGSQLSMPLAFWANIRMFEQLNNLANKHDVKMTVYVDDLTFSGDSINRQFLSVIKKIIVSNGHISHPDKTKLFEKSDVKVITGVAIKCNDVGITNKQHKLIYESLEQWKGCRDEPLISSFVIPKLLGRLHAHSNIEPKLKHKVNSILNYKPVKNPHSKSTD

SEQ ID NO: 3216 - protein, 310 aa, unidentified
  source 1..310: note = Related to NZ_FOHV01000014.1; note = Thorsellia anophelis
MKKTKKLKLISNQKCYHLDQSPFYKLQSKKKLLALLCINEAELKDCITSPLNYNVFLNGTRVIETPIGVLKKVHWRIASLLIRVNVPEYLQSGKKKHSNISNAKVHIGDTNLLSTDIKSFYPSTLRYKVFNFFLNIMKCSVYVADILSKLSTYNDHIPTGSQLSMPLVFWSNFRMFSQLNGLAEKHNAKMTVYVDDITFSGNSVNNLFLSVVKKIIISNNHTPHPNKTKLYASKENKIVTGVVIKGSKILIMNKHHKAIYQDLTVINACKLSGGAPSCYEITKKRLLGRVNALKLIDTRLQHKIEYFSNL

SEQ ID NO: 3217 - protein, 318 aa, unidentified
  source 1..318: note = Related to PNDR01000076.1; note = Pseudoalteromonas sp.
MTRKLKLDIDHRRRKYTLIESPLYKLKTKRKLAELLLVQTNELKNLTQDQGNYRVFQQIGKSGKPRAIQHPKDSLKIVHCRIASLLGRVELPDYLHSGRKEHSHISNAKKHLGQHNVLTTDIKSFFPSTTRKMVFDFYFNLLKCSADVADLLASISTYNCHIPTGSQISMPLAFWSNIRMFEQLYSLAKKHDSEMTVYVDDLTFSGHAVNKRFASVVKKIIHTNGHIAHPDKTRLYAKDEVKVITGVAIKGNETRITNDQHMKIYETLEFWKGCRDEPIIAELIKPKLLGRLNAHLQIDTRIRDKVKSITSYKPKFSI

SEQ ID NO: 3218 - protein, 317 aa, unidentified
  source 1..317: note = Related to NZ_JAGJED010000003.1; note = Pseudoalteromonas luteoviolacea
MNVKKNQKSKLKIQLKNKSYQVKDSPFYKLATKRKLANLLNISVSELLTLTKDAVNYKVFSQSKGYGKQRVIQKPIGRLEYVHTRIASLLCRVSVPSFVHSGRKGHSHVTNAKQHLGNNRVLTTDIKNFFPSTTEEMVFKLFFHTFKMNGDVAKLLANLCCFSGHVPTGSRVSMPISFWSNSKMFDELSSLSTKHDVVMSLYVDDLTFSGDGINRLFLSTVRKIVQKHGHIMHPDKTKVHTKNSRKVITGVVVQGDTLNITNKQNLMIYRELAQWKVIKNLPFIPKSLESRLLGRLYAMGQIDKKYKDKAMSVRNSS

SEQ ID NO: 3219 - protein, 312 aa, unidentified
  source 1..312: note = Related to PPSX01000023.1; note = Pseudoalteromonas phenolica
MRKNHSKLKITTKQKAYSISDSPFYKLSNKKKLAELLFVKASEFKNLTSDENYKVFKQLNSKGKSRQIEQPLLNLDRVHTRIASLLCRIDLPNYLHSGRKGRSHVSNARAHVGNKKVLTTDITNFFPSTTEKQIFSLFYNIFKMTPDVARVFAKICCYKQHVPTGSRLSMVLAFWANYKMFEELNSFSLFRNVRMTVYVDDLTFSGENINREFSSLIRKIIKKHGHLAHKGKTHQKQSHEVKVITGVVVKGNDIKPKLSQFKELHNDIQAWKLVRDTGLPLSSLRDRISGRLYSMGQINKRFKDKAKSVRNY

SEQ ID NO: 3220 - protein, 312 aa, unidentified
  source 1..312: note = Related to NVVS02000010.1; note = Halomonas sp.
MKQKRLKPRIITKNKSYPIEDSVFYKLSSKKRLANLLFSTSQELKSLGESDNYRCFTQTKNGKPRLIQEPLPRLDKIHSRVASLLCRIDTVDGLHSGKKGRSNISNAHAHLGQGKKVITADIKSFFPATTRQNVFDFFYTTMQCAADVADLLSKILTYNDHIPTGSRISMPLAYFANKRMFDEIESAASEFSAKMTIYVDDLTFSGAMLQKSFIGRLEATAKKYGHKIHPSKTRFYEASEVKLITGAAIKGDEITPRNKHLKQLRGELSVWLDNPGNDEKLTNRILGRMTFIGSIDPRYKDKAKTFRKSVFK

SEQ ID NO: 3221 - protein, 312 aa, unidentified
  source 1..312: note = Related to NZ_AMRJ01000028.1; note = Alcanivorax hongdengensis
MKQKRRKPKIITKQKSYPLQDSVFYKLSNKKRLANLLSSTPQELKMLAGNDNYRCFTQTKNGKKRLIQEPLPRLDIIHTRVASLLCRIETIDGLHSGKKGKSNISNARAHVGLGKKVITADIKSFFPTTTRLNVFDFFYNTMRCSPDIADLLSKMLTYDEHVPTGSRISMPLAYFANKKMFDEIESAANDCGATMTIFVDDLTFSGTTLKRSFIGRLETIAKKYGHKIHPSKSRFYGANEVKLITGAAVKGNDISPRNKHLKLLRSELSEWLKCAQKDEKLTNRVLGRMTFIGSIDARYKDKARAFRKTAFK

SEQ ID NO: 3222 - protein, 312 aa, unidentified
  source 1..312: note = Related to JAFMPS010000045.1; note = Alcanivorax sp.
MKRRLPKNRIITKKKSYPLQDSPFYKLSSKTRLASLLGSTPKELKSLVGNDNYHCFTQTKKGKPRLIQEPLPHLDKIHSRVASLLCRIETVDGLHSGKKGRSNISNARAHLGPGRKVITADIKSFFPSTTRLMVFDFFYNTMQCSSDVADLLSRILTYDEHIPTGSRISMPLAYIANKRMFDEIEDAAMRVGAKMTIYVDDLTFSGVMLHKDFVKTLEMIAKKHGHRIHPSKTRFYSENAIKLITGAAIGEDRIFPRNRHLKALKEDLQIWINSPQKDRKLINKILGRLTFIGSIDPRYKDKARTFRNVAIK

SEQ ID NO: 3223 - protein, 308 aa, unidentified
  source 1..308: note = Related to RZGU01000003.1; note = Legionella sp.
MNTQKQKIITKNKYYPAKDSLFYKLSSKGRLAKLVSSTVQELKSLTKNDQYHCFTQSKRGKTRPIQEPLPKLDKIHSRIASLLCRIETADGLHSGRKGRSNISNASAHIGVGKKVITLDIKNFFPSTKRSSVFDFFYNTMCCSPDIADLLSHICTYDDHIPTGSRLSMPLAYFANKRMFDEMEQTANECNAKMTIYVDDLTFSGEELSKNFITRIELIAKKYGHKINSSKTRFYAEDAVKLVTGVAVIDNQLKPRNKHLEALFKKTNDWQVNKSMQSRNCILGYMTYLGSIDSRYKDRARTFRQKAIF

SEQ ID NO: 3224 - protein, 307 aa, unidentified
  source 1..307: note = Related to CP000675.2; note = Legionella pneumophila
MKQKKNKIITKNKCYPIKDSVFYKLSSKGRLANLLSSTVQELKSLTKNDQYHCFTQLKRGKTRLIQEPLPKLDKIHSRIASLLCRIETVDGLHSGCKGRSNISNAKAHVGVGKKVITLDIKSFFPSTKRSSVFYFFNNTMSCSPDIADLLSQLCTYEGYIPTGSRLSMQLAYFSNKRMFDEMEQAASECGAIMTIYVDDLTFSGAELSRNFIKRLEFIAKKYGHKIQSSKTRFYSENEVKLITGVAVIGEQLKPRNKHLAALTQEIEYWRVNKSQQSANRILGYMTYLGSIDSRYKDKAKTFRHQMA

SEQ ID NO: 3225 - protein, 310 aa, unidentified
  source 1..310: note = Related to NZ_KB889904.1; note = Marinobacter sp.
MTQNRRKPRIQTKNKSYPLQDSPLFKLTTKRKLAKIIFSELAELKQLCNDNNYSCFTEITKGKTRFIQAPLRRLDMVHTRIASLLCRIDVPNELHSGTKGRSIFSNAKAHLGVGRRTVTVDIKSFFKSTSRSQVFDFFSDTMKCAPDVADLLSRLLTFNDHIPTGSRVSMPMAYFANQKMFCDMQAVADARGATMTIYVDDLTFSGTKLNHQFVDKISNITEKYKHTLHPDKTRFYGPKAAKCITGTVIVGNELRPRNCQYKAVHEDMQNWLSINKPDDALAARLLGRISFIGNFDARFKDKAVRFRRAL

SEQ ID NO: 3226 - protein, 320 aa, unidentified
  source 1..320: note = Related to NZ_QUNG01000011.1; note = Marinomonas pollencensis
MIKKKKSKLKIRTNGKIYRLQDSPFYKLTSKKRFASLLNLEYDQLKQLLSNSDSKFEKFTQVKEGKKPRAIQKPITSFAPLHCRIASLLCRIGTPEYLHSGKKGRSNLSNAQSHSGKHKLLAVDIESFFESTSHEKVYSFFRGHLKCSSDIADALCKLCLCDSHIPTGSQLSMPLAYWANSNMFNELDMLATKHRVKMSVYVDDVVFSGEQLNKLFLSTVKKICARYGMTVHPDKIRLYNKEQPKVVTGVAIIGGELKVDHKQHKLLENDLKLWNACKEDPIASDLSLPRKISGRLSAMGSVEKEYLDRARSFRKKNSIR

SEQ ID NO: 3227 - protein, 316 aa, Acinetobacter sp.
  source 1..316: note = Related to JZRF01000008.1; note = Acinetobacter indicus
MNQINLKPKLITKNKSYKIQNSALYMIKTKNHLARVLLVDIEEIKNIENICTQYNVFQIEGKSSKLREIQTPINFLEIVHNRIASLLCRIETPNFLHSGKKSHSNITNAKAHLGYNLQVLTIDIENFYPSTTAQKIYKFFLHGMKCSETISKILTKICTYNEHLPTGSRISMPLAYFANMLMFQEIEKLSIKHEIKLTVYVDDITFSGFKVSTLFYKLIRNIIFRHQHLVNIKKTRFYLKNQPKLVTGVILKENSIFIRNKHHKELYELKELYEITKTNNPEQLFSIRNKLVGKLYSCGVINSKYKSEAKIYLNTP

SEQ ID NO: 3228 - protein, 316 aa, Acinetobacter sp.
  source 1..316: note = Related to NZ_RCHC01000004.1; note = Acinetobacter chengduensis
MIQKNSKPKLVTKNKSYSIQDSALYMIKTKKHLARVLLIDVEKLKNIKDICTQYNVFSTNGKSNKLREIQTPINVLETIHNRIASLLCRIKTPDFLHSGKKNHSNISNAKVHLGENLKILTIDIEKFFPSTASKKIYEFFLYGMKCNKTVSKILTQLCTYNECLPTGSRISMPLAYFSNMLMFQEMALLASKHQINMTVYVDDITFSGSNISTLFYKLVKKITIRHQHSINDDKTRFYTEYQPKLITGAILKGNSLLIRNKHHKELYEFKELYSFTKDNNPTQLSEVRNKLIGKLYSCGVINVKYKSEAKVYQNYL

SEQ ID NO: 3229 - protein, 316 aa, Acinetobacter sp.
  source 1..316: note = Related to JAIWSZ010000041.1; note = Acinetobacter baumannii
MNSKLKIVTLKKSYNIQDSALFKVRSLKHLAKVLLIDIEKLNDLSFTKDQYRIFTITGKSGKEREIQNPTGLLAQIHSRIASLLCRIKTPDYLHSGKKGRSNVTNAKYHTGHNLEILTVDLVDFYPSTTSNKILNFFLCTMKCSYKVACILTTLCSYNEKLPTGSQISMPLAYFANCMMFKEIEALSNKHNIKMSIYVDDITFSGEKITRLFYSLIKKIVVRHGHSLKHTKTRYYKKSSAKLITGVVVKDANLLIRNKHHQEIYQTKELLTIAIHSDSKEQIGSLRLKLIGKLHACGSIDPKAKSEAYYYQRQSIN

SEQ ID NO: 3230 - protein, 315 aa, unidentified
  source 1..315: note = Related to JABMOK010000124.1; note = Pseudohongiella sp.
MKLPAKHSPKLHIKSNKKSYLPSDSALYNLTTKKRLEAIIGKTIAEIEAAGIDENYRVFGLKKGGKTREIQAPKYSLDVIHTRIASLLVRVAVPDYLHSGIKGRSNITNAKAHIGNHPLLTMDIQKFYPSISKKSIFNFFHIRMNASRDVAGILAEVCSYKDCLPTGSRISMPLSFWVNYEMYSKLESLCLNKGIIMTVFVDDFTFSGDQVDEKFKKHAKKIIKESGLEVHPRKTRLFGKGFPRVVTGALVDGSGIKVRNKHHKSIYTLFGEIEKCSDDKKLEKMQMQLLGKLSAAGQIDKSFKNKAAQFRKAIC

SEQ ID NO: 3231 - protein, 329 aa, unidentified
  source 1..329: note = Related to NZ_SLYB01000032.1; note = Cricetibacter osteomyelitidis
MKKKKKLITHNKEYTLDKSPLFNIEYIKRLVSVLNADEEIITSLIKYKAENYNCFSQGKKKREIQTPINELYLIHNRIASLLARIKLPKYLYSGVKNRSYIDNAKEHLNSKAILTTDVTAFFPSTTRTMIFWFFKDKMQCSSRMANILADLCSINDHLPTGSQISMPLAYWVNSSMFKELHRLAEDHKLKMTVYVDDLTFSGEKVPKGFKYQVEQIIKKHKHQIKSEKTTLYNNQSVKEVTGLILKEGKLLPPNRQLKKLHQHLNLWEKLIESPRNGIKIEWLYPKVIGVLNNITYFRPEYKNVIFAIQKEYHQYKNTPSNYKNQIDAN

SEQ ID NO: 3232 - protein, 325 aa, unidentified
  source 1..325: note = Related to NZ_MNAL01000052.1; note = Glaesserella parasuis
MKKKKLITHNKSYAIDKSPLYNIQYIKRLSDILQINEKTIFSLIENKTKNYNCFLQGKKKREIQSPINELYLIHNRIASLLARVKLPEYLYSGVKNRSYIDNAKAHLTSKEIITTDITAFFPSTTRTMIFWFFKNKLKCSHKIANILADLCSINEHLPTGSQISMPLAYLVNASMFDELNNLAEKNKLIMTVYVDDVTFSGEKVPKGFKYQVERIIKKHKHNIKAEKTTLYKNQSVKEVTGLILKDNTLLPPNRQFKKLHQHLTLWKTLIAKPRNGIKIEWLYHKIVGILNNISYFKSGYKNVVFAIQKEYHQYKNTPTNYKKAD

SEQ ID NO: 3233 - protein, 322 aa, Pasteurella sp.
  source 1..322: note = Related to NZ_CP076113.1; note = Pasteurella multocida
MKKKLITHDKSYQLENSPLFKIQYTKRLSQVILQSEETISSVFESKAQYYNIFQQGNRLIEVPLRTLYAIHNRIASLLARITPPDYLYSGIKNKSYITNAQQHLDSDVILTTDITAFFPSTTKEKIFWFFKDKMQCSTKIANHLAELCTIDGHLPTGSQISMPLAYWVNANMFDELNRLAKENELKMTVYVDDVTFSGARIPKEFKFLVERTIKKYRHSIKLEKTKLYKSQSAKEVTGLILKDGKLLPSNRQIKKLHQYLNLWGELLSQPRQGRKIEWLYPKLVGVVNNIAYFKPEYRNVVFAIHREYNQYKNTPSNYKKEV

SEQ ID NO: 3234 - protein, 316 aa, unidentified
  source 1..316: note = Related to JAGYHV010000039.1; note = Alcaligenaceae bacterium
MKYPVKYSKPSYPLSKSPFYRLCSISYLKRILEVCVWYEEELLNEIEQFYSCYDSSGHQKRFPYPIDELYGIHNKIASYLARMEMPEYIHSSKKGASYLTNAQVHQGTKETFKTDIRSFFQSTTKAMVFKFFRKKMLCSRAVSEYLAHLCTLDNALPLGSQVSMRLAYFANMDMFEQLFLLAQSHNLRMSVYVDDITFSGDKIPKGFKGQVAQIVHRHGHKIKRNKTKCYSQNKKEITGIMIDGETLKLPDRKLLQIHNEFNKFKALLKTTERDKEKILYKTRYLFGLLNHAAQFDPKYQLIRKELKAKINEKCGL

SEQ ID NO: 3235 - protein, 390 aa, unidentified
  source 1..390: note = Related to NZ_KB893940.1; note = Actinobacillus capsulatus
MAIHKRHTLQTSPLYGLKHLHQLQHLLYHSRYFRNTNIDLDKQYKLSETAHREVFYPDDTLYNFHSELNKFLSKIEKPEFIKSGKKGESYLTHVSSHINKNQYFSLDIRSYYSNINRLDVFKFFRNNLGCSHKIANYLAYFCTYKDQLPLGSPMSMNLAYFINEPMFYCLNEIAVKNNLSMTVYVDDIAFSGRVITSKVKYDIIGVINKHGYSINEDKLRFYKSKKTYRETSGLLIYKGKLLPNKEKLDKLHKMLSEWDALLRLDKPLETKNHFIRLISFISYLCQIDTKYMQLKYKVIKEYNNKKEGDLLAIYQDRITEWNTLLSNHETSFHALNEKHAELNELIKNLSKLNKKHLILYKQIKYEHEKFKKHKRSSIGRFFSAFSKYLA

SEQ ID NO: 3236 - protein, 310 aa, unidentified
  source 1..310: note = Related to PKJP01000009.1; note = Neisseria perflava
MILCTTDEIFSIINNKIFYYNMFEIGGRVCHTPCYELKGLHSRLAQFLVRIKKPRYLYSGVKGLSYVDNARVHSVYYETFKTDISEFYSATTQAIVFKFFRNKMQCSHKVANILAELCTLEGKLPTGSQLSMILAFWANSDMFEQLNQLAQEHHLVMTVYVDDITFSGAKIPAGFCQQVAQIMSEHGHAMNKKKTRLYQANSHKEITGLIINRVGDSPIPPNRFYLKLHNKLAEFNQIYAEIKNGKSKMEEDTLRQLTNHLIGLLNHASQFDKKYKMVKKHIQKQHDDLIQYLQTTHKVGSGKLGKLCIR

SEQ ID NO: 3237 - protein, 328 aa, unidentified
  source 1..328: note = Related to NZ_KB893930.1; note = Actinobacillus capsulatus
MNKIRRKSLKIPIRQTKEYDLNQSPFFKLVSIKKLLSILRVSQEELKDILDNPTSHYSIRIENKRDIQSPKKYRILYRIHNRIAHHLRAIITPDYLFSDKKGCSIYDNAIVHFGCKMLLNVDISKFFPSTNRNKIYSFFKYSMQCSSEISDIMSYLCSINNHIPTGSQISMRLAYLVNKKLFDDLYKFAKDKNLKMSVWVDDVSFSGDKIDSSVIYVVEKIIKKHGFNVSKNKTQIRHSTENKSVTGIFISGDIMEASKELYKKRRIKLREWKNFIKNKEISLEELEKVKDSLLGLLNYLNLFEPSSSKYIALIENDFLSYSNKRISI

SEQ ID NO: 3238 - protein, 326 aa, unidentified
  source 1..326: note = Related to NZ_CP015030.1; note = Mannheimia granulomatis
MNKIRKKSLKIPIKQNKEYELNQSPFFKLVSLKRLLSILRVSEDELKDILDNPASYYSIRVENNREIQSPKKTKSLYRIHNRIAHHLRAIITPCYLFSDKVGCSIYDNASVHIGCKMLLNVDISKFFPSTNRNKIYSFFKKDMECSPQISEILSYVCSINGHIPTGSQLSMRLAYLVNKKLFDHLFHFAESKSLKMSVWVDDISFSGEKINSNFLNSVEKIIERHGFNISKHKTKLKHSTESKSITGIFISGEKMEASNESYQKRRVLLEKWKESIKNKEIPIKELEKLKDSLLGLLNYLNHFENSSKKYIFQIEKDFIEYLKRVS

SEQ ID NO: 3239 - protein, 329 aa, unidentified
  source 1..329: note = Related to NC_015964.1; note = Haemophilus parainfluenzae
MKKKFKKLHITQTKEYELTQSPFFKLYSVDKLLNILKVEREILEDILNFPGNYYTFKTSNGRNIQTPSKDLSLYLIHNCIANHLRAIITPDYLFSDKKNCTVYDNASVHLGCDILLNIDISKFFPSTTYIKVFKFFRYRLLCSTEIADILAHLCTINDHIPTGSQISMRLAFLVNQGLFNDLYNLAISKNIKMSLWVDDISFSGAEVTPTFKYKVYKIIEEYGFKVSEHKTKLSYKGQPKSVTGIFIDGDKSIGANEHYKKRRVLFKKWKDACKKKTFNKKQFQRIKALRIQILGLLNYLNHFEPSSKNYINIIENDFKKIKNKFLYKI

SEQ ID NO: 3240 - protein, 319 aa, unidentified
  source 1..319: note = Related to NZ_LR134510.1; note = Actinobacillus delphinicola
MTKLNTRNKSYNLEESPLYNIQYEQKLLKILNISQNDLIFVRENLKDFYHSFSKKHRIIQTPKNLLKQIHYRIGDLLARIAMPDYLMSGKKGASHIENAKLHLQEDLHVFTADIEKFFPSTKRQAIFKFFKNKLQCSHNIATILSELCTTHEGRLPTGSQLSMHLAFWTNFNMFEKIAKLSNQYDLRFSIFVDDLTFSGKTIPHNFKYQLKKIITSYGYQINTQKILLFKPFKIRRVTGIYIKNGDTHLPNTFLRELHTALQSWKDILKTSPDKLDKKKLETTYNKLLGSINYAALLDKKYKQIRKKVIAEKQKITQYQ

SEQ ID NO: 3241 - protein, 319 aa, unidentified
  source 1..319: note = Related to JADGFW010000011.1; note = Psychrobacter sp.
MSKKKLKIKSSKKYSINQCRLYKVTSLKKLCEILGINNRELKLIIDKSKNREFYNCYINQKGRLIQEPINLMYRVHNRIANLLARVETPSYIHYSKRGYSHISNAKAHLDSKQLITFDIKSYYQSIDYETLRRFFREKLKCEQDVAYILSMICSFEGSLPTGSQISVYLCNLTNLDMFDEMYLQSNRVDQKFTVYADDITISGRTVNNSHYNVMKKIIERYGYIIKEQKTKRYTSNQIPIVTGVALRNTVDVKNEYYKGLRKLCEGVNFNIDNEPYAQLKDRYLSLKGKTQYIKQLNKEVPYFILQTQMLLEKKLEGQL

SEQ ID NO: 3242 - protein, 319 aa, unidentified
  source 1..319: note = Related to VOBE01000007.1; note = Psychrobacter sp.
MSRKKLKVKADKRYSIDQCRLYKITSLKKLCEILSINNEELKLLIDKSRNSKFYNCYTNQKGRLIQEPINLMYRVHNRIANLLARVETPSYINYSKKGCSHISNAKAHLYSKQLITFDIKSYYQSICNEALRRFFRDKLKCEQDVAYVLSIICSFEGSLPTGSQISVYLCNLANIDMFHEMYLQSNRFQQEFTVYADDITISGDIVNDSHYNVMKKIIERYGYIIKEEKTKRYTSNQTPIVTGVALKDTVDVKNVYYKGLRELCESINLNVDNESYAQLKDEYLSLKGKIQYIKQLNREVPCFILQTQSLLEKKLEGQL

SEQ ID NO: 3243 - protein, 319 aa, unidentified
  source 1..319: note = Related to AUSW01000014.1; note = Psychrobacter aquaticus
MSGKKLKVKTDKKYSIDQCRLYRVTSLKKLCEILGINNQDLKVLIDKSKNSEFYHCYVNQKGRLIQEPINLMYRVHNRIANLLSRVETPSYIHYSKKGCSHISNAKAHLHSKQLITFDIKSYYQNIGNETIRKFFRDKLKCEQDVAYILSIICSFEGSLPTGSQISVYLCNLVNLDMFQEMYLQSHKAQQQFTVYADDITISGQIVNDSHYNVMKKIIERYGYTVKEEKTKRYNSNQIPIVTGIALKNTVDVKNVFYKESRKLCENININIDNEPYAQLKDKYLSLKGKAQYIKQLNKEVPYFILQTQMLLEKKLEGQI

SEQ ID NO: 3244 - protein, 319 aa, unidentified
  source 1..319: note = Related to NWFK02000001.1; note = Psychrobacter sp.
MSKKKLKVKANKTYPLNQCLLYKVPSLKKLCVILKITKEELLTLMADSESNGLYNCYENKEGRLIQEPRDLMYVVHNRIANLLSRVKTPDYIHYSKKGHSHISNAEVHLDSNQLMTFDIKSYYPSISSELIRKFFRHKLKCEQDIAYLLSKLCTIDGSLPTGSQISVYLCNLVNLDMFNEMKLQCDRFNHKFTVYADDITISGESVNESHYNVMRKILERYGYEIKESKTKRYTSNQTPIVTGIALTKNLDAKNDFYKQLRQLCDDINFIIDNASYAQLKDEYYSLKGKAQYLKQLQQKVPEFVFTTQARLEKKLEGQI

SEQ ID NO: 3245 - protein, 317 aa, unidentified
  source 1..317: note = Related to NZ_CAJHBG010000001.1; note = Psychrobacter sp.
MSKKKVKANKIYSLNQCRLYKVTSLKKLCSILKITEEELSLLVESYENSDFYNCYINKDGRPIQEPKKLMYRVHNRIANLLSRIETPEYVHYSKKGHSHISNAEVHLHSKQLMTFDIKSYYSNISSESIRVFFRHKLQCEQDIAYLLSKLCTLNGSLPTGSQISVYLCNLVNLDMFDEMKLQCEMFEQKFTVYADDITISGKSVNKSHYNVMSKILERHGYEIKESKTKRFTSNEIPVVTGIALKKTSDVKNSFYMELRQLCEGIDIHIDDASYAQLKDEYYSLKGKAQYVKQLNQKIPKFVFQTQAKLEKKLEGQL

SEQ ID NO: 3246 - protein, 321 aa, unidentified
  source 1..321: note = Related to NZ_JABUZJ010000058.1; note = Psychrobacter namhaensis
MKVKSNKLKVKTDKYYPLNQSALYRVNSKKKLAEVLLISGTELATLIRDDDKIKFYNCYLNEKDRLIQQPQGLMYKLHNRVANLLSRIETPEYIQYSKKGLSHITNASIHANSKQVITFDIKSYYLSIKRESVQNFFREELECEIDIAFILSKLCTLDEALPTGSQISNYLCNLVNLVMFDEMNSLASRFGMSFSVYADDITISGDNLDSSHLNTMRKIIERYGYCIKDEKTKIFKGNETAVVTGIALKESLDIKNEFYSDLRKLCELVNSYIDKESYAQLKGDYFKLKGKIQYIKQLNQTIPRLALNTKALLERKLDGQI

SEQ ID NO: 3247 - protein, 318 aa, unidentified
  source 1..318: note = Related to NZ_CAJHAZ010000027.1; note = Psychrobacter sp.
MKKKRKLKVRHFNKQYPIHQSPLYRLSSLKKLSVLLAMPLKDIRKLNGNNDSRYNVFTNKDDREIQEPFNEIYVIHNKLASLLSRIDTPTYLHSFKKQYSHITNSKTHLGSEQVITFDIKAFYQNITQDKIRMFFKNDLKCSPDIAFLLSKICSYDNHLPTGSQVSIYLNFLVNRTMFDEMHSLAETLKICLTVYADDVTISGEKVDMGMLNTMSKIVERHGHTINKQKTRKYSNNQVPVITGIALCNGKTQPTNEKFKELRQKSNFLLRVSNDLDLDFLKKESMSLDGTLNYFSQLSSEVPKSTLEARDRLAKLLGI

SEQ ID NO: 3248 - protein, 318 aa, unidentified
  source 1..318: note = Related to NZ_CP047226.1; note = Moraxella osloensis
MSNKKRLKIKNHNQYPFHQSPLYKLKSKKRLADIFNVELSELKSWFNTIPSEYNVFLNEKDREIQTPLNNLYIIHNRLANLLSRIETPSWLHSFKKNFSYLTNAKSHIDSRQVLTFDLKSFYQSTTQNAVRKFFKDTMLCSEDVSFFLSKICCYNNHLPTGSQVSIYLCYLVNIKMFDEMRRLAVSRNALLTVYADDITVSGDKIDYSLLNTMRKIIVRHGYKLSEDKTLRFKYNEIPVITGIALVQGELRPTNKFMSELRSKVYFLNRNAEELDIELLKKEKQRINGKINYIESLNRPIPSQAIDINKKLDKLVPIK

SEQ ID NO: 3249 - protein, 319 aa, Citrobacter sp.
  source 1..319: note = Related to VHJG01000001.1; note = Citrobacter freundii
MKSTKRTPSLQRFPKLYPLNQSPFFKLKTRTKLLEIIGLSRSQADKLMLDSAYKEFINDAGRSIQEPIAQLKAVHKRIGILFSRIELPQYLHSGRKKHSTLTNAESHRHATELLKLDIHKFFPSTSAAKVYKAFVEKFEMSPDVAYVMTNLATFAGKVPTGSPISMAIAFWANKDMFDELSNLATLSNLVFTAYVDDVAFSGAKIPKGFASQAKKCIHSHGLTSKDKKERFYPASEGKLLTGIVIQNGKLKVRWAHNDSIGKEFATLAEAKDNAAKISHLEKLAGKLHAAGQIDFRQKDKARFFTQQLKVAKKQSEQDS

SEQ ID NO: 3250 - protein, 325 aa, Enterobacter sp.
  source 1..325: note = Related to CP084692.1; note = Enterobacter mori
MKSTKRTPSLQSPPKIYPLNQSPLFKLKNKRKSLEIIGLSKKQADKLMLDSAYKEFVNDAGRTIQEPIAQLKAVHRKIGVLLSRIELPPYLHSGRKKHSTLTNVESHKLATELLKLDIHKFFPSTRAAKVYKAFVEKFEMSPDVAYIMTNLSTFAGKVPTGSPISMAMAFWANKDMFDELSNLAASNSLVFTAYVDDVAFSGSKIPKGFAAQAKKCIRSHGLTSKDKKERFYPSSEGKLLTGIVIQDGELKVRWAHNDSIGKEFATLAEAKDNATKIIHLEKLAGKLHAAGQVDFRQKDRARFFYTAAQSHKKALRTRYLKQQVD

SEQ ID NO: 3251 - protein, 319 aa, unidentified
  source 1..319: note = Related to NZ_FMBC01000051.1; note = Kosakonia oryziphila
MISTKRSSSLHSSPKLYPLNQSPLFKLKSKKKLLEIIGLSKKQADKLMLDSAYKEFENDAGRAIQEPIAQLKAVHKRIGALLSRIELPPYLHSGRKKHSTLTNAKCHRHATELLKLDIHKFFPSTKAAKVYKAFAEKFEMSPDVAYLMTNLVTFAGKVPTGSPISMAMAFWANRDMFDTLSELASSNNLVFTAYVDDVAFSGSKIPKGFAAQAKKCIKSYGLTSKDKKERFYQSSEGKLLTGIVIQDGELKVRWAHNNSIRKEFADLAKVKDNSAKIIHLEKLAGKLHAAGQVDFRQKDKARFFTQQLKAAKKQSTESS

SEQ ID NO: 3252 - protein, 321 aa, unidentified
  source 1..321: note = Related to JAFJZU010000002.1; note = Pectobacterium brasiliense
MISTKRSSSLHISPKLYPLNQSPLFKLRSKKKLLEIIGLSKKQADKLMLDSSYKEFENNAGRTIQEPIAQLKAVHKRIGALLSRVELPPYLHSGRKKHSTLTNAECHRQATELLKLDIHKFFPSTKAAKVYKAFVEKFEMSPDVAYVMTNLATFAGKVPTGSPISMAMAFWANKDMFDELSELATSHNLIFTAYVDDITFSGLKIPKGFSSQIKRCIHSHGLVSKQKKEKFYSSSQGKLLTGVVIRDGKLKVRWAHNSSIKKEFNELAKAKDDTEKIIHLEKLAGRLHAAGQIDERMKNKARFFSKKLKEAKQSLLIRSTK

SEQ ID NO: 3253 - protein, 305 aa, unidentified
  source 1..305: note = Related to NZ_JAESHX010000078.1; note = Pectobacterium polaris
MNQSPFFKLKTKKKLLEIIGLSKAQSDKLMQKSAYKEFVNDAGRTIQEPIAQLKAAHRRIGVLLGRIELPTYLHSGRKKHSTLTNAESHIQANELLKLDIHKFFPSTTAAKVHKAFVEKFQMSPDVAFLMTNLVTFSGKVPTGSPVSMAMAYWANKDMFDELSDLAISNSLIFTAYVDDVAFSGVKIPKGFSSRVKKCIHSHGLVSKQKKETFYDSTQGKLLTGVVIQDGKLKVRWAHNSSIKKEFDELAKAESDTDKIIHLEKLAGRLHAAGQIDERMKNKARFFSQKLKEAKQHLAAQSSEKS

SEQ ID NO: 3254 - protein, 319 aa, unidentified
  source 1..319: note = Related to JADOXZ010000029.1; note = Pectobacterium brasiliense
MKSTKRTPSLHRAPKLYPLNQSPFFKLKNKNKFFEIIGLSKHQVEKLSFETAYKVFINESGRTIQEPIPQLKAVHKRIGILLGRIELPIYLHSGRKKHSTLTNAESHRYATELLKLDIHKFFPSTSAAKVYRTFIDIFKMSPDVAYLMTNLVTYSGKVPTGSPISMAVAFWANKDMFDELSRLAFSNGLIFTVYVDDVAFSGEKIPKGFAAQAKKCIHAHGLVSKKEKETFYPSSKGKLLTGIVIQNGKLKVRWAHNASIKNELDTLAKAENTPEKITHLEKLAGKLHAAGQIDYRLKDKARFFTRQLKKAKTQSEQEN

SEQ ID NO: 3255 - protein, 325 aa, unidentified
  source 1..325: note = Related to JACYNZ010000001.1; note = Pantoea agglomerans
MKNTKRTPSLHSKPKLYPLHQSPLYKLKVKSKLFQLLGITKSQLAKLSQDKSYNVFTNENGRTIQEPIPQLKLAHKRIGKILSRIEMPSYLHSGRKKHSTLTNARAHIKANELLKLDIHHFFPSTTAARVYNLFHRKFDMSPDVAYLITNFVTYSGRIPTGSPISMALAFWANWEMFDEINKLAISHDLVFTVYVDDLAFSGEKIPKGFASQVKSIISSNGLISKRKKEIFYPSSKGKLLTGVVIQNGELKVRWAHNASIKNEFDNLSLASQDVQLRIKLLERLTGKLHAAGQVDYKLKDKARFFTKQLKIARCTLIQQPHLSHQ

SEQ ID NO: 3256 - protein, 318 aa, unidentified
  source 1..318: note = Related to JACETZ010000001.1; note = Pantoea stewartii
MKNTKRPPSLHCAPKTYPLNQSPFYRLKVKKKLYQLLGLTKAQVERLSQDNSYNVFTNEKGRVIQEPISQLKLAHKRIGKMLARIELPDFLHSGRKTYSTLSNAEAHINADELLKLDIHKFFPSTTAAKVYKVFNEKFEMSPDVAYVITNFVTFSGKIPTGSPISMAIAYWANWELFDEINKVSIANRLVFTVYVDDLAFSGRKIPKGFASQIKSLIASKGLIAKKNKEVFYPKSKGKLLTGVVIQNGTLKVRWAHSASIKDEFKNLAIMSRNKESTVKLLEKLAGKLHAAGRIDYKLRDKARFFTKQLKIAKCVLID

SEQ ID NO: 3257 - protein, 328 aa, unidentified
  source 1..328: note = Related to JACYMO010000013.1; note = Erwinia persicina
MKNATRSSSSFSSLKNYPINQSPLFKLTTKKKLLALLGFSLPQIEKLSKDSSYRVFLTPSDRCVQEPILQLKKIHKKIGSLLNRIEQPDYIHSGRKKRSIITNAKVHQNSYQLLKLDIHKFFPSTSGSKIYRLFVNDFQMQPDVAHLLTNLVTYNYSVPTGSPLSMVLAYWANKSMFDELYQLANENDLDFSVYVDDVAFSGEKIPKGFSHCAKSCISKHGMKSKSKKEMFYQENQAKLLTGVIISDGVLKTRWKHSQMIKKGFETLALQTSDGDRVIALEKLTGRLHAAGQIDPRIKSKAIHFSKILRAAKLDIIAAKNENDKPDVS

SEQ ID NO: 3258 - protein, 316 aa, Vibrio sp.
  source 1..316: note = Related to NZ_MPHM01000037.1; note = Vibrio ostreicida
MSKNRSPSFKYYELNQSPLYKLQSKNKLNALLGINKNQIPSLLSDELFNQFLNKDNRLIQHPIGKLELVHKKIYCLLNKIIKPSYLHSGTKKRSTSTNAEIHKNNKEMLKIDISKFFPSNSERKIRNLFLYQFEMSIDAASYLSKLICINGILPTGSQVSMQIAYFANKVMFDRLNTLAKENNLSMTAYVDDVAFSGEKIPTGFLKKVKTIVNESGLTIKNKKIKIYREKQPKMITGIIIKNNMLTVRNKNLRKIKQTFLEIFTPNAHLSLEEKEVIYTRLKGQLHAAGQINKRFKQKAKHINKNQKKYLKQNQTL

SEQ ID NO: 3259 - protein, 300 aa, Acinetobacter sp.
  source 1..300: note = Related to CP012952.1; note = Acinetobacter baumannii
MESSPPCDYAKYVYELELLSSPLFHITSKKRLAILLHSSVKELNNIVRSKDQMYQYFNETQTDNSGNIIKVRPIQNPHDRLKQIHSRIGKFLGNLKAPEYLHSKRSKSAISNAKAHVGIKGHTLNIDITDFYPSTSRAKVQAFFGYTLQYPTDIAKYLSEICTVKNCLPTGSPLSSALAFWANKSMFDEIYRVAKSRAITMTVYVDDISFTGRAVNQNFLKKIIQIVGKYQHKIKQEKIKFFPEYSVKFVTGVAILNGRLQPAHRHYRDIRVLQKIDNDLQATLRLMGKNNYIKQITNQV

SEQ ID NO: 3260 - protein, 300 aa, Acinetobacter sp.
  source 1..300: note = Related to NZ_VPDH01000112.1
MGNSQPSDHARYVYDLELLNSPLFHITSKKRLAMLLCSSVKELNHISRSKNQMYQCFNKKQTDNNGNVIKVRPIQDPHERLKQIHSRIGKFLGNLKAPDYLHSKRSKSAISNAKAHVGLKGLTLNIDITDFYPSTSKAKIQSFFGYTLQYPTDIAKYISEICTVNNCLPTGSPLSSALAFWANKAMFDEIYRIAKSRSINMTVYVDDISFTGKAINQKFLKKIVQIIEKYQHKIKEEKIKFFPENGVKFVTGVAIVNGHLQPAHRHFRDMRHLQKFDNDIQVALRLAGKNNYIKQITNHS

SEQ ID NO: 3261 - protein, 304 aa, Acinetobacter sp.
  source 1..304: note = Related to DADBFC010000020.1; note = Acinetobacter baumannii
MKKLSYVSFDYVEHIKDLAIFNIQSKRYLAFVLKTQLPLLKDISRNPNNFYRFKVKEIVKNEKLKIRRIEEPNSILKPIHKQIHNLISQLPAPDYLFSKKKSSCVLNAKVHSLAKGKTLNIDIENFFPSTAKWKVQNFFGYYLQYNRDVAAFFADICTVDGHIPTGSPLSLMLAFWANQPMFNELNKLSKSRQITMTIYVDDISFTGEAVSEKFKNKVIEIVNKHHHTVNADKVRFFGKDLKFINGIAIVNNQLEPSNELSGKVRNLKKSKEIQYIKNLNGKIGYIKYIKKVDSLNRDITTECK

SEQ ID NO: 3262 - protein, 303 aa, Acinetobacter sp.
  source 1..303: note = Related to NZ_CP060811.1; note = Acinetobacter variabilis
MSSQLKGNYELNQCVIYKLKSKRKLKKLLNLSENSNLKIYFNDDYFSCFDLMQEDGSARNIQTPINELQQIHIRLANFFKYVKTPDYLHSGKKKHSIVTNAKAHIDSSKPTLTIDIAKFFPSTKREKIFNFFYKKMHQSADVADILSRLVCYNNHVPTGSSISMLIAFWANKEMFDELYKLCEANNIIMTVYVDDISFTGNGVGKLFLKKVTEIIERYGLNIKKEKVKFFKANSPKTITGVIVKNNRIYARNEHYKKLRVMESAYKITKVEDVIEKGIMQKAYNGQLAFLVQIHPQLRNKMVF

SEQ ID NO: 3263 - protein, 300 aa, Acinetobacter sp.
  source 1..300: note = Related to NZ_VPER01000044.1
MTKMTPRCSANYDISQSILYKLHSKKKLSEILGLPLSVLKICKNDSYYSCFDLEQKNKIRSIQQPIDQLFIIHQRIASLLTRIYHPDYLHSGRKKHSIITNASQHLISDKKTLTIDIEKFFPSTTQNKVFHFFRTIFKQSVDVADLLSHLLTFNNHVPTGSPVSMSLAFWANKNLFDELSRFSKNRNTIMTVYVDDLTFTGSGVNSNFLKNASKIIEKHNLKVKKSKVFLYKENQAKFITGTVVLNNKLEAEFKQFKALRVSEFLFLNDPKNEVYRNAYNGRLAFLSQIKPNLKIKMNFK

SEQ ID NO: 3264 - protein, 311 aa, unidentified
  source 1..311: note = Related to DABN01000043.1; note = Candidatus Gastranaerophilales bacterium HUM_16
MNVHNGIKIEDSSLYRINRECLFLLLGIKNNDELKTLLSNNNYKVYTVGPKNRIIEEPDKKLKNIQTKFNKLLQQIETPPYVFAGRKKMNHISNAKAHIDCNDMICADIKKFFPHTKIKYLQEFLETNLKFSPDLALDVANLLTINGHLPTGAPSSPLLTFWSYKIVFDKIYDFATNLGITMTIYIDDMTFSSKSKVSKKLIPFVGAELTRVGLELHPEKLKNFKCSKYKHVTGVCIDRKHRLVVKNEHRDNLLKILNSKDDITQLSTEQIETCIGMIKSMQLIEPKIFEPTLKKLKEIYKLRPKRIVKKR

SEQ ID NO: 3265 - protein, 307 aa, unidentified
  source 1..307: note = Related to nan
MTIKDNFKSFESLDKTLKLLDVSLEEMQQAINKGYRRYKTFKNGKFRWIEEPNDELKIIQQKILLYLQNNLECPTYCTAGFKGQNNIKNAEKHRNKREVLTMDISHYFPNTQEKYVRKIFSEFIGVDDNVLNLLVKITTFNGYLPTGAATSTILSCFVHKEIFDNIFKKMKSLDIDMTVYVDDITLSTHKHISNWVISHINNSLQSHGLFLKKSKIKRYGYKHAVVTGVHIAQSGKMSAPFKIGHSAICALCDKDLKQMSLTELRKIIVKISYIQQFNPLKMIKVKKQAIKQLKKLQKISANKNERI

SEQ ID NO: 3266 - protein, 317 aa, unidentified
  source 1..317: note = Related to CP013653.1; note = Paenibacillus sp.
MNTLMKKRYDITQCSFYKCRSKRRLMNLLMLNEEEFKNIKKKICYHSFTQAKKDGDKRVITAPNEELKRIQKRILKLFSYVKRPEWLISGERGKSYIDNGRYHINSNYFLTMDIRKFYDNCKREYVYRFFNDNLEMSKDTAAILTDLVTYEGKVPTGCPTSQIIAYYAYQKMFHSIHKVAEMHGCKFSLYVDDMTFSSSSPFNPDSLRNDIDKILRKYGHRPKYSKVKYYSKNKFKLITGVTISSDHKLLVSNTLRKKIYDGAMSQIEMDRQKKVTIPKELRRLKGRIQAARVVNPHIFPEVNRFVEEKLYSSGSYK

SEQ ID NO: 3267 - protein, 321 aa, unidentified
  source 1..321: note = Related to NZ_CP040396.1; note = Paenibacillus algicola
MTQIRKKHELDQCALYKCKSKRKLAYYLKIDYEKLKTISNITLYHSFSLQKNDGDPRLITAPKAELKKLQKRILRLLEKVKRPDYLISGEKGKSYLNNALTHQHSDYFLTIDIRKFYDNCKREYVYNFFIKMLQTSKDVACILTDIITFDNKIPTGCPTSQMLAYYAYFDMFTELKEISQRFNSIFTLYVDDMTFSSKTSFNPKALANEVDIVLRKYGHRPKYKKVKYFSKEDFKLVTGVVITKEHALTVPNRLREKIYTGSMAEKERLYTYNPREISKRIKKLRSIKGQVQAAKNIQKTIFPEIDRLIDDKLLDISSHTR

SEQ ID NO: 3268 - protein, 319 aa, unidentified
  source 1..319: note = Related to CP026363.1; note = Brevibacillus agri
MSLKKKRYDLNQCALYKCRGKGRLAYLLHMNKEEFDNLEKLIEYYSFTTDKNDGDKRLITAPRNNLKKIQKRILKLITFVKRPEWLISGERGKNYIDNGKFHQQSHYLLTMDIKKFYENCKREFVYRFFRYTMCMSGDIAEILTNIVTLEQKIPTGCPTSQLIAYYAYQEMFENIKKIANKYNCVFTLYVDDMTFSSKRPFNPDKLRNEIDIELRKYGHRPKYSKVQYYSRNSNKLVTGVVISKDHNLLVANKLQKKIYDNAMKLKKVNGNKKEAKIAYQLESDLRSLKGQLQAARNVKKGIFPEINRLVENSMINLSK

SEQ ID NO: 3269 - protein, 315 aa, unidentified
  source 1..315: note = Related to NZ_JABMCC010000107.1; note = Paenibacillus taichungensis
MARIVKRYRLDQCALYKLKSKKKLAHYLNVDYETFKETGELIHYSAFSLKAEGKKDRSITAPNSKLKSLQKRVHKLLLKIERPEWLISGERGKSYIDNGKMHQKCNYALCMDIRSFYTNTKREYVFRFFIEEMLMSKDTAKIVTDILTFKDSIPTGSPASQLIAYYGYHRMFQEIESISTNKYGCVFSLYVDDMTFSSEKPFQMKGLRNEIDIILRKYGHKPSYKKTKYYSRNKAKPITGTTVSSKHELLIPNSLQLKIIRGAELILEKPQELSRAQLASFRGQVQAARIIQKRAFPELNKLAEEMLSNPLKIPT

SEQ ID NO: 3270 - protein, 308 aa, unidentified
  source 1..308: note = Related to QGTZ01000022.1; note = Paenibacillus pabuli
MARIVQRYKLNQCVFYKLKSKKQLAYFLKVDYETLREINELIHYKSFSLRTEGKKDRDITAPNKKLKDLQKRIHNLLLRIERPDWLISGERGKSYIDNGKMHQNCNYALCMDIKSFYRNTKREYVFRFFTEEMLMSKDTAKVVTDILTFQNSIPTGSPASQLIAYYAYHRMFHEIKSIATNKHSCIFSLYVDDMTFSSDTPFEVNVLRKEIDILLRKYDHKPSYSKTNYYSRNKAKPVTGTTISKNHELLIPNTLQMKIKRDSEMVLQKGRELSTKQRASFNGRVKAARIIEKLAFPELNKLAERMLN

SEQ ID NO: 3271 - protein, 322 aa, unidentified
  source 1..322: note = Related to JAFYLK010000105.1; note = Clostridia bacterium
MKAPIKRYPLHQCALYKCSSKKKLELRLKLNAGDASLLENMIQYHKFSIPKKDSTKLRDITAPADDLKKVQRRILRLLQRIERPQWLISGERGKSYVDNGRAHINSMYLLAADIKSFYDNCRRDYVYRFFTERLKTAPDIAKLLTDIITYKGGIPTGCPTSQIIAYYAYERMFSEIAQVAERHGCIFTLYVDDMTFSSQTPFDPKRLKREIEMILLRYGHRLKDSKVKYYARDDAKPVTGTIITKEHRLATPNQLQKRIVTEFQALKEQMNGQALTPEEKSRYATLQGRIYAARNIEPCIFPEIHRQVTAVKHSPENGKGVE

SEQ ID NO: 3272 - protein, 309 aa, unidentified
  source 1..309: note = Related to NZ_JADCKB010000021.1; note = Ructibacterium gallinarum
MNSAMHKYEINQCALYKCSSKKRLEHLLLLKENELKQIKQYTRYYNFSTPKKDGSPRKITAPCDKLKKIQRRILRLLSPIKRPDWLISGERGKSYIDNGKSHINSKYFLTMDIKNFYPNCQREYVFRFFTDVLLTAPDIAKILTDIITYNNGIPTGCPTSQLIAYYAYENMFKSIYEISLNYGCKFTLYVDDMTFSSNFPFDPKKLEQEIDIQLRRYNHKPKYSKVKYYPANTYKLVTGTTVSPDNKLLVTNNLRQKIVENFKILKNYQKLSNDERKKKIDSLKGQIQAARNVNKTIFPEINRLTNDLK

SEQ ID NO: 3273 - protein, 311 aa, unidentified
  source 1..311: note = Related to QTZF01000005.1; note = Coprococcus sp.
MREKSHKYDITQCALYKIKGSKQLKKVLCITEEEYKDILSIVHYHSFQIDKKDSTEKRNITAPDKRIKEIQTRILKLLQNVERPIWLISGEKGKCYIDNGKSHLNSNYFLTMDIKKFYDNCSREYVFLFFKNRLMMAGDLAGLCTDIVTYDGGIPTGCPTSQIIAYYAYESMFNEIYSVACKYGCEYTVYVDDMTFSAKEPFDINRMKNEVDCILRKYGHKPKYKKVKYYSKGKSVPITGTIVTGQHELKVPNRLQKRVYDDFQELKYLGGKELSDIEIRKLNSLKGRILASRNIEEGKFPEINRLTNFIS

SEQ ID NO: 3274 - protein, 311 aa, unidentified
  source 1..311: note = Related to JAFBIY010000001.1; note = Faecalicatena contorta
MAKQYKRYDITQCALYKCISPYNLKRVLKITDEEYKDIVKIVRYHTFQIDKKDGVEKRNITAPDRRIKEIQTRILQLLQKVERPEWLISGEKGKCYIDNGKKHIHSNYFLTMDIKKFYDNCEREYVFRFFRDRLLMAGDLAGLCTDIVTYEGGIPTGCPTSQLLAFYAYENMFNEISEVAYKYGCIYSVYVDDMTFSSEVAFDVKKMRSEIDQKLRKYGHKPKYRKVKYYSHGQYVPITGTIVTGNHELKVPNRLQKRVYDDFQEIKSFEGRKVTSEEQKKINSLKGRIQASENIEPGKFPEIKRLTKLIG

SEQ ID NO: 3275 - protein, 311 aa, unidentified
  source 1..311: note = Related to NZ_QOHO01000034.1; note = Clostridium indicum
MENKWKKYDITQCAFYKCNSPKNLKRILQIKDEEYNDIFSIVKYHGFSIDKKDGIEKRNITAPDKRIKAIQGRILRLFQKVERPEWLISGEKGKCYIDNGKQHVFSNYFLTIDIKKFYDNCKREYVFRFFKDRMLMTGDLAGLCTDIVTYEGGIPTGCPTSQLIAYYAYENMFKEIYEVATEYSCIFTVYVDDMTFSSEKAFDVNKMVNKVDCTLRKYGHKPKYKKVKYYSQGQYVPITGTIVTGKHEIKVPNQLQKKVYDEFQEIKTLNTENLTDKEQKKINSLKGRIQASRNIEDGKFPEIRRLVNKIG

SEQ ID NO: 3276 - protein, 311 aa, unidentified
  source 1..311: note = Related to FCNR01000043.1; note = Eubacteriaceae bacterium CHKCI004
MSKVIKKYDITQCALYKCRSPRILKKRLVIKDEEYKDITAIVKYHGFQIDKKDSTEKRNITAPNKRIKEIQTRMLQLLQKVMRPEWLISGEKGKCYIDNGLKHIHSNYFLTMDIKKFYDNCKREYVFLFFKNRLCMAGDIAGICTDIVTYKKGIPTGCPTSQLLAFYAYENMFTEIYEVAQSHGCMFTLYVDDMTFSSPKAFNVKEMIREIDCILRKYGHKPKYKKVKYYSHGRFVPITGTIVTANHDIKVPNRLQKKVYDDFQELKDLSGKKLSVEQQKKINSLKGRIQAARNIEKNKFPEINRLTQAIG

SEQ ID NO: 3277 - protein, 310 aa, unidentified
  source 1..310: note = Related to NZ_GL870812.1; note = Clostridium sp.
MRKETKRYNITQSALYKCRSPKKIKTLLRLEDTEYKKITEIVGYHEFQIDKKDGIEKRDITAPNRRIKQIQSRVLELIQKVERPQWLISGEKGKCYIDNGKAHISSNYFLTIDIKKFYDNCKREYVYQFFKNKLQMSGDIAGICTDIVTFNQGIPTGCPTSQLIAYYAYEQMFDEIYRLAVEHGCIFTLYVDDMTFSSIKAFDVNRLVKEIDFKLRKYGHKPKYKKVKYYSHGKPVPITGAIINAKHEIKVPNSLQQKVFEGFQEVKKLQGQELSGNDQKKLDRLKGQIQASRNIETNKFPEIKRLVNQI

SEQ ID NO: 3278 - protein, 314 aa, unidentified
  source 1..314: note = Related to JAGNZR010000001.1; note = Fusobacteriaceae bacterium
MKNPKYRYEINQCALYKCQSKKKICSLLDISDSEFNTLRDSVKYHCFEIYKKDNSDKRKITAPNQRLKIVQKRLLQLIQYVKRPDWLISGEKGKCYIDNGKAHIMSHYVLTMDIKNFYDNCNREYVFRFFKDKMLMAGDIAGFCTDLVCLEGGIPTGCPTSQLIAFYAYEAMFFELYEVACENKCIFTVYVDDLTFSAENPFNVNLLKREADIRLRKYGHRPKYKKVKYYGKDIPAPITGTILMPDNKLKVPNNLQKKIYDNFQDIKNLCDVEAIDKVDLKKIYTLQGQIQAARSIEPEKYKEIGRISSAKVQR

SEQ ID NO: 3279 - protein, 309 aa, unidentified
  source 1..309: note = Related to NZ_SNXO01000023.1; note = Aminicella lysinilytica
MVKKYSIEQSALYKCRSLRRLNTLLFLDTDSKQIADIKKYYSFEINKKDGIAKRKITAPTKKLKTVQKRVLYLLQRIERPNWLISGEKGKSYIDNGKAHIYSNYFLAMDIKSFYDNCNREYVFRFFKDYLQVSGDIAGILTDIVTYDNGIPTGCPTSQLIAYYAYGKMFREISEIAQKYECIFTLYVDDMTFSSQEHFDDNSMKKEIDCTLRKYGHKPKYSKMKYYSHGKDVLITGTVVNRNHELKIPNKLQKKIYDGFQNVKDVDIKEMDCNKKKEIASLRGKLQAAKSIECNKFSDINKIVGNIEKQ

SEQ ID NO: 3280 - protein, 344 aa, unidentified
  source 1..344: note = Related to JAFTWE010000007.1; note = Clostridia bacterium
MRGLMKNKSYPINQCALFKCNSKKRLEHLLTIEQGDLKLVQSIIKYSNFEIDKKNSTEKRKITAPQKTLKQIQRRILYLLQSIEHPEWLISGTKGKSYIDNGKYHCKSSYVLTMDIEKFYDNCTRENVYSFFKNKMCTSSDVAEILTNIVTFNNGIPTGCPTSQIIAFYAYEEMFSNIKKIADKYGCIFSVYVDDLTFSSDKAFDAEKLKRDVDIELRRYKHKPKNKKIKYYSKYEAKPITGTIVTKEHELATPNSLQHKIYTDFQDIKNDCLSSDEELYKKIQVLEGRIQASKNIEIGANKFPEISRLTNRIKENTPIPTQPTVTRKNTNKKAKIRIKNSTQA

SEQ ID NO: 3281 - protein, 336 aa, unidentified
  source 1..336: note = Related to JAFQBX010000034.1; note = Clostridia bacterium
MKAKKYPLNQCALYKCNSKRRLEKTLTIEQGQLKLIDSVIKYSHFEIDKKDSTEKRQITAPKYTLKQIQRRILRLIQFIERPEWVIAGTKEKSYIDNGEFHLKSNYALMVDIKKFYDNCKREYVYRFFRDKMLNSPDVAEILTDIVTYEGGVPTGCPTSQLIAYYAYEDMFANIKRIADNYGCLFSLYVDDMTFSSEKPFNKDVLKREIDIELRRYQHKPKYKKVKYYSKNDPKPITGTIVTKDNTLVAPNKLQEKVYKGFQDIKNLDIDDNSEETIKKIAALQGRIQASRNIEKNKKFPEIERITKQISTEHSGSVPANPPKKSRKRPRKIRIIK

SEQ ID NO: 3282 - protein, 342 aa, unidentified
  source 1..342: note = Related to JAFRQP010000036.1; note = Oscillospiraceae bacterium
MKANKQKYPLDQCALYKCRSRKKLESILAIEQGDLRNIQSAIKYSSFEIDKKDSSEKRTITAPKRTIKAVQARILTLIQRIERPEWLISGEKGKCYIDNGKAHIGSAYVLTMDIKKFYDNCRREYVYRFFLDKMQTAPDVAKILTDIVTYKGGIPTGCPTSQLIAYYAYEDMFKQIQACAESYGCIFTLYVDDMTFSSKDPFPQEKLSREIDIILRRYGHKPKYKKVVFFAKEKPKPITGTIVTSDHELEVPNRLQEKIYNGFQGIKQLSEQNDFKQIDHAAQILLGQVQAAKSIDNKKFPEIERLTKEIRNIQEPQRDFKPKPPHRRKAKGKIHIPKPRTN

SEQ ID NO: 3283 - protein, 344 aa, unidentified
  source 1..344: note = Related to CP095094.1; note = Flavonifractor plautii
MKNKVPIKKYDITQCALYKCRTRKRLEYLLRLDPGGLKIIDGIIGYHKFEIDKKHSDEKREITAPDKTLKAIQRRILYLLQRVIRPEWLISGEKQKCYIDNGKAHLNGKYVLTIDIKKFYDNCTREPVYQFFVQKLETSPDVAEILTNIITYNGGIPTGCPTSQIMAFYAYSDMFSEIFDLAKQHGCKFTLYVDDMTFSSKEPFSPHQLSQMIDRVLRKYGHKPKYPKVKYYGPSDYKPITGTVVTPEHSLAVPNGLQKTIYDAFQTVKPLIGVETCSEEDARQILSLKGQIQAACNIEDGKFPEIRRLTNQIKVPDSQSVSTRKRQHHRRSKKIHIKQQAPIK

SEQ ID NO: 3284 - protein, 336 aa, unidentified
  source 1..336: note = Related to JAFHCI010000085.1; note = Ruthenibacterium lactatiformans
MKNKTPLKKYDITQCALYKCRTKKRLEYLLRLESGSLKMIDSIIEYHKFETDKKHSTEKRKITAPNKALKTVQKRILYLLQQVLRPDWLISGEKRKCYIDNGKAHLDGRYVLTIDIKKFYDHCTREPVYHFFVQKLKTSPDVAEILTNIITYDGSIPTGCPTSQIMAFYAYFDMFSEVYDIAQKCGCKFTLYVDDMTFSSKEPFSPHQLRQMVDRVLRKYGHRPKYPKVKYYGPSDYKPITGTIVTPRQSLAVPNGLQKTIYNAFQSVKPFIDAESHSEEDVKQILSLKGQIQAARNIEEGKFPEIRRLINQIRIPDNQTASKQKSYARLHSKKSE

SEQ ID NO: 3285 - protein, 327 aa, unidentified
  source 1..327: note = Related to JAFWRN010000131.1; note = Clostridia bacterium
MENPSLKKYDITQCAFYKCRTKKRLAFLLCLSLKELEHISGIIEYHSFEIDKKNSEEKRKITAPSKELKTIQRRILALLQRVIRPDWLISGEKGKCYIDNGKAHINGRYILTMDIRKFYDHCVREAVYQFFIQKMKTTPDVAKLLTDISTYNLGIPTGCPTSQLIAFYAYIDMFSEIAAIAREYGCVFTLYVDDMTFSSSKPIQVNNLIRKIDCILRKFKHKPKYSKIKYHHPSDYKPVTGTVISPNQTLLTPNSLQHKIYIGFIKLKPKLFENNEALSNEEGKELQSLNGRIQAARNIEEGKYPELKRIIHNSQAAIRYNGKRKKI

SEQ ID NO: 3286 - protein, 307 aa, unidentified
  source 1..307: note = Related to DVNI01000021.1; note = Candidatus Avacidaminococcus intestinavium
MQDKFRRYDINQCALYKCKSKKKLEKLLNLQIGELKYINVITTYYHFEIAKSSSHEKRAVSAPSSKLKSIQSRILSLIQYINRPGWLISGEKGKSYINNSQCHISANYLLAMDIKNFYNNCKRNPVYLFFLNELKTSPDVANVLTNIVTYENLIPTGAPTSQLIAFHAYTNMFTEINQMALNFGCIFTLYVDDMTFSSSVPFNHMSLSCNIDKILRKHGHRPKYKKLKYYSKNESKPITGAILTPTHTIKVPNKLRYKIHNTFQKIKNNSNFSDEAKSELLTLKGRLQAAKSIEKNIFPEISRIINS

SEQ ID NO: 3287 - protein, 322 aa, unidentified
  source 1..322: note = Related to QSVE01000001.1; note = Megamonas rupellensis
MINKNKLYRYDISQSALYKCRSKNKLSEFLKISIKDVDKIIKYYTFNIPKKDTSKTRQISAPQKKLKTLQKRLLYLIKRIKRPPWLFSGEMGKCYLDNGKYHLNNPYVLTIDIKSFYEHCTRNAVYLFFLEKMQTSPDVAKILTDITTLDKKLPTGTPTSQLIAFHAYEDMFNEINNLAKSYNCIFSLYVDDMTFSSSYPFSPKNLTYKIKTILHKYKHHLSSEKVKYYSKDMAKDITGLILTKDNQIAIPNRLQKKIYDNFSKIKDYEKMTVYDKEIIKSINTLKGQLQAAKNINYNVFPEITRIVYSINCKTNKKPLGNS

SEQ ID NO: 3288 - protein, 303 aa, unidentified
  source 1..303: note = Related to CP010994.1; note = Clostridium perfringens
MMMIKKYDICQSPLYKLKNKRRLEKILGLEKYELNKLKFWNKYKSGKIPKDDGDFREINIPNFKLKKVQKKLQILLSKIQRPEWLISGEKNKCYINNAQYHIKSKYVITADIKKFYDNCSRERVYLSLVNKFKVSSDVAGAITDIVTYNKRIPTGASTSQLIAYYSYEDMFNEINTISHKYGCKFSLYVDDMTFSSINPINVQSLKRQIDIILRKYGHRLKSNKFKYYSKDEDKLITGVTLKSNNSLAVSNRLRYNIIKDFKGIKYRKDSNIKLQSLKGRITAAKMIEKSIFPQINNYVSNLN

SEQ ID NO: 3289 - protein, 312 aa, unidentified
  source 1..312: note = Related to JACEGF010000016.1; note = Macrococcus bohemicus
MRKQPPKFYNINQSALYKCRSKRKLAELLKCDLKTIQQMAKDIKLYYDSFSMSKKDSEKVRKVDAPNEQLKRTQKNILKLLQRIEKPDYVMSGTLGKSHIDNAQYHIKGSYFLKTDIKQFYNNCSRDRVYRFYVDKMKTSPDVANILTDLTTYNNIIPTGSPSSQIIAYFAYEDMFNNMYIKAKENGFLMSLYVDDLVFSRTDYIDYKSFLREIEVEALKFNHSLKKSKTMYYSPNRSALVTGVIIKNKKMKIPNRLRNNTILQYKNIKKDKNKDEKTELSLIGSINSARMIEPNHFNGVFSFYKQIKKTPK

SEQ ID NO: 3290 - protein, 308 aa, Staphylococcus sp.
  source 1..308: note = Related to JALCVX010000013.1; note = Staphylococcus hominis
MKKKKLKFYNINQSLLYKCRSKKKLAQYLHYDLKSLKKIISEIDSHYNFFSKDKKNSDKKREIEAPSDELKKIQKNILKYLKKIQKPNYVMSGTLGKSYIDNAKYHINEKYFLKTDIKQFYKNCSRDRVYRFFLDKMYTSPDVAEILTNLTTYRNTIPTGAPSSQLIAYFAYEDMFNNMYRKAKNNGFKMSLYVDDLVFSRNDYIDFKSFLREIEIEALKYNHSLKKSKTMYYSPKKAALVTGVIINKGELKIPNRLRNNAVHQYRDIKNNFIDDKVLLSFIGNINSARLIEPNHFNGLLSFYKKTPK

SEQ ID NO: 3291 - protein, 310 aa, unidentified
  source 1..310: note = Related to NZ_CACSLH010000030.1; note = Enterococcus sp.
MPRKKTNVNLYELNQCVFYKCYSKKKLAEILKITLRELKNTSWNANTSYYQFSQKKKGTDELRKITAPDKELKKVQSTIYSFLRRIKKPEWVISSTLKKSYLSNALYHKKSNYFYKTDIKKFYDNCHRDRVYRFFKDKMKTSSDVAKILTDLTTNENIPTGCPSSQLIAYFAYEDMFNNIKIIADKYKCIMTLYVDDIVFSNADKFNYRALIREVENEVRHFDHSLKKSKTKYYTGEKGAPITGVIVKNNLLYVPNSNRKSILDSFSLAKGINKISEKEFKSLRGKVNAARLIEKNHFNGINSYLKKNNP

SEQ ID NO: 3292 - protein, 307 aa, Staphylococcus sp.
  source 1..307: note = Related to PZAM01000037.1; note = Staphylococcus chromogenes
MNTLTNWRKNDLKQFKKYPIHQCAFYKCKSKKKLASLLKTDLKNLNRLSKSIEQEYYTFNKKRQITAPKKELKAIQKRVLNLLNKIEKPDWVISSTKEKSYLDNAHYHIGAQYVCTTDIRSFYNNCSRDRVYQFFAKKLMTSPDVAKLLSDITTLKYIPTGSPSSQILAYFAYEEMFINMFNISQKFNCKMTLYVDDLTFSKDSSFNYQNLINHIDIEARKFNHSLKYKKTNYKSVKKGAKITGVILKNYELKIPNSLRISILKDFENIKNNQELKHQVMSLKGKINAARLIEPNHFNGTNSYVKSL

SEQ ID NO: 3293 - protein, 306 aa, Leptospira sp.
  source 1..306: note = Related to AHMP02000001.1; note = Leptospira kmetyi
MKHQKYHSIKNSPFFRLKSIDKLAEYLNTKSKRLIYLENMPLTERYRCFPQGTRDIQQPIGFNRFIHNRLHTLLSRILSPDFVFSGKKGFSHVDNALAHLNSKYAALMDIEGFYRNSKREYVFRFFLKKLEMASDIANILTNIVCFNDFIPTGSPLSQLIAYWAYSDMFEEIETVASSNNFIFSLFVDDLTFSSQDRIRHDFHLEINAILKSYRLNIKRKKLQYRSKNQTKIITGCAITPDNKIKVRNKHRVKYINNLQLLLGSHQNRKDEKLIDSALGLISSLQAIEPQIFMESKRILKQKISFS

SEQ ID NO: 3294 - protein, 304 aa, unidentified
  source 1..304: note = Related to NZ_CP067089.2; note = Breznakiella homolactica
MRKVNKIYDITFSPLYGIKNKRKLRELLDIGTNEELIHLPLTNSYRIFSINGREIQEPIGLLRKIHDRLFRYLSRIDTPTYLYSGKRGLSYVDNAKRHINSSYFLKMDIKGFYKNANREYVFRFYRYRLNQSDDIAHILANISCYGKIIPTGSPISQLIAYWSYKQMFDEIAILNKDKIFTLYVDDLTISSVELSLAKNLHLQVQAIVKKYRLDLKRKKIRYYNKRENKHITGCVITSDHKFRVPNKHRKKLISIMRKYPSLNTIPEGELMKLTGLISSSQQIEPDIFINTKKRLSQIIKKQLA

SEQ ID NO: 3295 - protein, 309 aa, Leptospira sp.
  source 1..309: note = Related to CP030147.1; note = Leptospira mayottensis
MHTVHGNFFYTLSNKKRLAKYLRVSLKELLTLQDDSNYKVWFEEGENGKLREIQEPSYKLKSVHSIIQKSLASIVAPEFLFSGVKGKSNISNASYHKDSNYIVTADIRSFYINCNKEYIFRFFKYTLHTSDDIARILTELCCYKTFLPTGSPVSQILAYHSYARIFNRIDAFSKANGITFSLYVDDITLSSEKSIHPYILKKISKLLESVNLSLKREKTKFYSKNSYKIVTGCAISPDHILLRPNKIMRKINNKLCKHEKDLSKLTSKEIESVLGQVIYLRSITPNSYSQLFKSLSLMKAEEKIKQRPL

SEQ ID NO: 3296 - protein, 308 aa, unidentified
  source 1..308: note = Related to JAFZUQ010000009.1; note = Elusimicrobiaceae bacterium
MKTLKYPINKSSLYNLQNKKKLKQLLYIDNSEFNYFAKQVNIDNEYHPFVNKKGRGIDNPSKRLKKLHSRIQKLLSRITYPKYLYSAAKRSNIKNVLKHKNHKYMFKTDINKFFPSSKKEYIFRAFKYNFQMSEDIAWYLANLVCYNDHLATGSPVSTILSFWGYKGVFDSIYALAKRRGITMSLFVDDMAFSSNKYIPISFKSKIEKYLKNVDLILSLKPSKNIFYKSNEEKKLTGAIITTDKKLKILPETELTIKDLLNNIENLNHQKLKSLLGMLQYQKQVEKNNPNITEHISLVKAKIKNLISK

SEQ ID NO: 3297 - protein, 300 aa, unidentified
  source 1..300: note = Related to PKTM01000012.1; note = Denitrovibrio sp.
MSNKQYNIHQSPLYKLNSKSKLSSILHIDNLANLLRDGHYNRFEMNGRQIESPCKELKRVHKRVLKLLSRINTPDYLISGKKGLSYVDNAKVHTRRCNLVKMDIKKFYPSSKKEYVFRLFHYKFRMAEDVAWILTELLTCDGHIPTGSPVSQILAFMIFADTFEEINNLAITHGCCFTLYVDDITISSTGNIPRKLIYAIRNELKKVNLNLSGKKTRFYSLNKTKCVTGCVITPDGELRIPNKLHQKIHEKSTMLNKEGLSPHDHQVLFGLLNAAQQIQKSTFPSLYREAKRNFKISVAQ

SEQ ID NO: 3298 - protein, 303 aa, unidentified
  source 1..303: note = Related to NVWR01000002.1; note = Rhodobiaceae bacterium
MKNYSLEKSPLFGIPSKAKLADLLNVGRSDLLAMSRNPTYSFFKIRKGEKFRDIEDPNPDLKKLQKRLNRLLSRIQVPEYVKSSRKGISYVDNAKFHLGFNCTAKFDIDKFFRSTKREYVFRCFHYTFGMPGDLAWLLTDLVTLDGHLPTGAPTSPLLAYWAYADVFSRMHSLAESRGAVMSLYVDDVAVSGNQPLKSEFRDKLSSIAGDYELKLKKDKTHYYLEGETRLITGCALNTVGQAIVPNKLRRKISIMIQQRDISDMTEKEIRRLYGLLNSARQIEPDFSPGLFGRAKSRIETLPV

SEQ ID NO: 3299 - protein, 329 aa, unidentified
  source 1..329: note = Related to DVNC01000014.1; note = Candidatus Scatocola faecipullorum
MSQMKIYPLENSPLYQLCNKSKLEELLGLPKGYINNFTYSRENYHCWHQLKKNKIDTRPVEDPCGILKKAQSKLNKLLSRIYTTDYLMSGKKHSNYIKNAKYHQNNPYVFCFDLSAFFQTATRHYVFSAFKNEFLMSEDVAWMLTDLVTIPNIENTDGYIPTGSPSSQNVIYWAYKKAFDTLFRVAESKKLKFSLYVDDMTFSSSRPISNKFPQLIQKLCSKVGLKINSKKTRYFSKNDFKDITGNVISPKKELKVPNRRRKEILDILAFKNIKDMNVKEIRSFYGKLCSMRQIEPNIFPALYNEARSQYYKLGAQYNQSKQFMKGRRK

SEQ ID NO: 3300 - protein, 329 aa, unidentified
  source 1..329: note = Related to BK021518.1; note = Myoviridae sp.
MKQIKTYPINNSPLYRLSNKSKLAELLGVSKKYLEHFNYSRDNYKCWKQKKKNKKGARPVEDPTLILKKAQSKLNKLLSRVITTDYLMSGKKHSCYINNAQYHLNNPYVFCFDLHTFFQTASRKYIFKAFKNEFQMPAHIAWLITDLVTIPKLDNSDGYIPTGSPSSQNVIYWAYKKTFDKLLEIAEAKALTFSLYVDDMTFSSQRPISATFPKLIQKMCARVGLEINETKTQYFSAKDYKDVTGCIISPKNELKVPNRRRNELINIVKNKPIEEMDIPEIRSLYGKLNSMRQVEPNIFPQLYNQARKRYYELGAQYNTKSKQKIRKKK

SEQ ID NO: 3301 - protein, 328 aa, unidentified
  source 1..328: note = Related to JACFNN010000015.1; note = Alphaproteobacteria bacterium
MLTIEQSWFYRLGRKRDLAALLNLSLSELKALTNDKNFEPWEKTFPDGKKRLIEEPQPQLKKALTEVQKILSHIQTPPWLMSGKKKIQPRDNAIAHIKNAYMISVDIAKFYQNSKREFVYTLFRDDFKQTTDIASLLADLVTYNGHIPTGAPSSQLLAFWTYRKTLEKIHAEASRQHITMTVWVDDITFSSRKPLPKNWLTFVKRSLDKTDLHLKKEKIKFHGQKDHKITTGSAISPKGVLKVKNQKRLEILSLIKSKKIEQLTLKEARSLLGKLTAQRQNEPDFFSSTYIRCKKHLRNLEKMKQKESYHKKPKRIKSLKQKPAAQSR

SEQ ID NO: 3302 - protein, 343 aa, unidentified
  source 1..343: note = Related to SVDP01000050.1; note = Enterocloster citroniae
MSKCYPIESSPLYRLRNRRRLAKLLYLPKNYFQEEHTYCYNEFSRPKPNGDGKRHFTVPPDDLKDIQKHICILLKRIITPEWVMSGKKSCSYITNAEIHLKHRFVRTMDISKFYDSAQRSRIYNMFSQTFKMASDIAWIMTELVTYNGMLPTGSPSSQLVVYWTYFNMFQRINELSEKYDCRFSLYVDDMTFSSDFPIKRQLRDEVSVVLRKNGLLAKSKKDHYYQANDFKVITGVGIRQGKKIVPNNKRKQIIELYVQCKKSGNIYDIEKLNGILCSLRQIEPNIFPEIYGYVHCYEKELKKLSRDRFYRTKRKKKPYRTKQMYNVVNNMNLVEQRKEGKQC

SEQ ID NO: 3303 - protein, 336 aa, unidentified
  source 1..336: note = Related to BLMC01000012.1; note = Lachnospiraceae bacterium
MNKCYPIENSPLYRLRNRRRLAEFLNLPKNYFKEEHTYCYNEFSRPKPNGDGERHFTVPPEDLKDIQKHICKLFKRIITPEWVISGKKSCSYITNAEVHLKHRFVKTMDISKFYDSAQRSRIYQMFSQTFNMASDIAWIMTELVTYNGKLPTGSPSSQLIIYWTYCGMFQRINELAEEYNCYFSLYVDDMTFSSDFPIKAILRDGVSDVLRKNGLLAKSKKDHYYQVNDFKVVTGVGIKQGKKLVLNSKRKQIIELYAKCKKSSNIYQIEKLNGTLCSLRQIEPDIFPEIYRYVHSYEQELKKLSRDRFYRSKREKGRYLSKHIHNVGINTEQGFD

SEQ ID NO: 3304 - protein, 337 aa, unidentified
  source 1..337: note = Related to RZYS01000049.1; note = Clostridia bacterium
MMSSKCYLLEQSPLFRLRNRRKLATLLKLDEKYFSNERAYTYRSFSRPKPNGIGIRKFTVPSDELKIIQKQICKLLSRIETPEWVMSGKKSCSYITNAKVHLEYPFVKTMDISEFYDSAQRSKIYNMFFNLFQMEHDIAWLMTELVTYNGGLPTGSPSSQLIVYWAYSDMFNEIQLLSTKYNCTFSLYVDDMTFSSDESISGKLREDVSALLRKNNLNAKVKKDHYYQMKDFKMITGVGIYKGNMVVPNSRRKAAISLYSECRKHGNIKDIEKLNGILCSMRQIEPNIFPEIAMYVKHYEKELKEYSRKRFYMARRKAYQKKRNSCSVAVSNEVKIC

SEQ ID NO: 3305 - protein, 331 aa, unidentified
  source 1..331: note = Related to JAFQOE010000034.1; note = Lachnospiraceae bacterium
MSKMYALEQSPLYRMRNKKKLATLLRISTNYLMQEHGQDYYKFSRPKPNGDGTRNFTVPSDELKYAQKKLCRLLSRIQTPDWVISGKKNHSYITNAEKHIENTFVKTMDISKFYDSAERKYVYRMFKETFKMAEDIAWLMTELVMYENMLPTGSPSSQLIVYWAYCDMFNEINQIANERACIFTLYVDDMTFSSKTPITKELRQEVCNQLKKYGLIAKSKKDHYYQGNTVKVITGVGINDGQKVVLNNKRKRILEQFEKCKTSNKIYDIEKLNGMLCALRQIEPEIFPEIYNYIKHYDSELKLMARNRFFKHRRKRRKIEKQRQYINQNNI

SEQ ID NO: 3306 - protein, 325 aa, unidentified
  source 1..325: note = Related to NZ_MIEH01000001.1; note = Merdimonas faecis
MSKLYPIERSPLYKMCNRRTLANLLCLPTKYFSYEHEYQYNEFSKPKPNGNGRRDFTVPSDELKAIQKRICRLLSRIVTPEWVMSGKKHCSYITNAEHHVDKKFVRTMDVSKFYDSVQRNYIFKMFKNTFQMAEDIAWLMTDIVTYKGVLPTGSPSSQLIVYWTYAEMFDAIKRKADENDCDFTLYVDDMTFSADHPISTEFRNEIAIQLKKNGLLAKAQKDHYYQPGSFKVVTGVGIENGEKKVLNNKRQKILFQYEKCKKTCNLYDIEKLNGMLCSMRQIEPDIFPELGNYIKHYEAELKEMARKRFYANKRKKAKVKEKNYA

SEQ ID NO: 3307 - protein, 328 aa, unidentified
  source 1..328: note = Related to JADCKL010000006.1; note = Sellimonas monacensis
MSKTYSIEFSPLYRMRNRRKLARVLKLDEKYFKQNHTYKYNHFSEPKPNGTGTRNFTVPEKELKSIQKRICKLMSRIETPEWVISGKKKHSYISNARNHCRNYNVKTMDISQFYDSAKRKYVYSMFKEKFLMADDIAWIMTDLVMCGGTLPTGSPTSQLVVYWSYSDMFENIYEIARKYKCEFTLYVDDMTFSSNIGISKQLRKDVEELLNSYCLHAKAKKDHYYQNNAFKKVTGVGIKKGKLLVPNQKRYEIIGMYKTCLKNKDIIEIEKLRGLLISARQIEPDIFPEIYRFVEKYKDDLNLLARNRYYRNMRKRKKVQRREDVAFV

SEQ ID NO: 3308 - protein, 323 aa, unidentified
  source 1..323: note = Related to JAFNXD010000190.1; note = Lachnospiraceae bacterium
MRKSKTYPLEKSPLFRLRNRRKLALLLGLDVDYFKTAHEYSYKEFEKPKASGDGVRKFAEPKGEICEIQKHILKYLKRIETPEWLKSGKKSESYITNCKMHKDALYIRTMDICHFYDAVSYAQIEKSFCQVFKMAPDIARLMAKLVTNRKTIPTGSPSSQLVVYWVYRDMFDEINSIAATFGCKFSLYVDDMTFSSEKQISHQLRDAVVKKLNEYGLHAKRSKDHYYEAQDYKVVTGCGIKDGKTDVPNKLRYKIVQQYRLCQLTDTIAEIEKLNGMMCSARQMDENIFDSVSNYLCKNRERLKGYVRSRKSKRQYEDNDFEF

SEQ ID NO: 3309 - protein, 309 aa, unidentified
  source 1..309: note = Related to CP016090.1; note = Clostridium beijerinckii
MNKDINQYELEDSLLYRLRNRGKLAEMFNLPHNYFRTQYKLDIEYKSKHIQTGRNKKDRLVENPSKKLKNIQREILKYLSRIQTPDWIISGKKGKSYIDNSKFHKDNSYVITSDIMNFYPSCKKDYVYRMFRYTFRMSSDLATILTTLVTYNGGIPTGAPTSQMIAYWAYKDAFIRINEIALKYNAKFSLYVDDMVFSSKSTISKRMILEIKKELQKYNLSLKDNKTRKYGSKDYKLITGVVYDKNGELKIPNRLRKDIIDGYNEIKKKKDNCNETDKKSLLGKIYSARQIEPDAFSQLLHNVKKIECK

SEQ ID NO: 3310 - protein, 307 aa, unidentified
  source 1..307: note = Related to NZ_FOTS01000082.1; note = Pelosinus propionicus
MKKIVERHHKKQSFFYCLANKSLLATQFGLPQNFFRSKYKEQLIYSFFEISKKDGSSREINNPKYDLKVLQRKILNYMNRIYKPDWLMSGRKTISYIDNGRKHLGSNYVITIDIKKIYSNCKRNNVYNMFKDVFKMTPDIASIMADLTTFEGAVPTGAPTSQVIAFWTYQDAFEKINEIAQQYDCIFSLYVDDMTFSSLGEIPTQLLLEVDKELKLVGLSIKWKKVKRFGINHCKLITGVVLDEAKQMRIPNALRLSIIQGVKKLSNKELSQEERLRLIKSLKGKINSARNIEPEIFPEIHRKISSI

SEQ ID NO: 3311 - protein, 308 aa, unidentified
  source 1..308: note = Related to NZ_CAPF01000040.1; note = Enorma timonensis
MRPSIPLNQCMFYKCRSKKALARCLLLDLHQLQRRSEWIQYRVHAEQKASGGLRVIYAPADELKSVQKVIKSRLHRIEVPSWVYSGVKGRCHIDNAKHHAGSRYFVLSDISSFYENCTRDAVYRFFRDDLLCSPDVASLLADLTTVRNAEGKTVNPTGSPCSQLIAYFSYRSMFHEIASIADRYGCKFSLYVDDLTISSESPISNPRNLMKQVAKSLRAYGHRVKWEKTGYFGKNQFKLVTGVAIDQQGELNIPNHLGEAVITGLKETLSGDRSEIAPTLGRINAARQIDGRVFSEARRLVENAQRCF

SEQ ID NO: 3312 - protein, 306 aa, unidentified
  source 1..306: note = Related to JAFVBW010000499.1; note = Atopobiaceae bacterium
MRPEITIDQCQLYKCRSKKRLAEILYIERADFNDIPTWATYRISHLEKGDGGTRTIYSPSKRLKKVQKRIKRLLERIHKPSWVFSGTKGKCHVDNAMHHAGNTYFVLSDIAEFYESCTRDTVYKFFLNEMKTSPDVAELLADITTLETNGKTIIPTGSPSGQLLAFFSYREMFDELEELTTRHGCRLSLYVDDLTISSNTPIANPKSLQKQLARIMASYGHSIKWSKTRYVKPSEFKVVTGVAIGPDGTPHIPNNLGRAIIGGLQDALGGDCLSQASTLGRINAARQIVEGSFPEVERVLCDYRHL

SEQ ID NO: 3313 - protein, 306 aa, unidentified
  source 1..306: note = Related to NZ_QSNG01000001.1; note = Paratractidigestivibacter faecalis
MTHPIDQSRFYKLRSKRKLAEVLCTNPQELKRTLRNASYRISQTPKADGTFRTIYNPNPSLKRVQHRIGNLLSRIEMPPWAFFARKGVCYVDNARYHEGARYLVKSDLSSFYDHCDREHVYRFFKNTMKCSPDIAEALCDLTTYTLQDGSTIIPTGSPSAQIVAFLAYREMFDEIKAVADLYKCKFSLYVDDLTFSSRSGISNPSNLERSISHIARQYGHCIKAEKTVYLDASTSKIITGVALTPSGEPKAPNALREATVSDLTQISSGDLSKIVSCLGRINAAQMIERNLFADSKRQVEQILASA

SEQ ID NO: 3314 - protein, 308 aa, unidentified
  source 1..308: note = Related to NZ_AP022829.1; note = Adlercreutzia hattorii
MKKTVRQYPLQRSPIYRLGRRRDLEELLYMQKGDSRRVKCFSEYNIFDKEKSSGGSRTIEAPCSKMKKWQRRVWDLMARIEKPDWVISATKGKSYKDNASKHRSNGYVMTMDISSFYPSCVREYVYRLFRERLECSPDVAQCLTDICTYQGGIPTGSPASQAVAYFAYAKMFEEIEDLARTYGCTFTLYVDDMTFSSQDNFSWKKLAYEVDGVLHKYGHRAKGSKTKYRLPGDFKIVTGVCLAPDGALVAPNKLRSKIVGNTRSLKASGDLSLLSRIQGQIQAADYVEGRRTFPGIRSELERIAEAAL

SEQ ID NO: 3315 - protein, 307 aa, unidentified
  source 1..307: note = Related to FP929047.1; note = Gordonibacter pamelaeae
MGANRKKYAIEQCALYNLTTKRRLEEKLLLQSGELKGVMRGVTYRDFQIPKKSGSFRQVSEPNKRLKLVQKRVLWLLSAVEKPDWVMSATPGKCHKDNAVFHRSNAYMVTMDIESFYDKCERERVYQFFKRKLRQPGDVAKALTDLSTYRQSIPTGAPTSQIVAYFAYESMFAEINQVAKSHGCIFTLYVDDMTFSSGEPFSPDKLASEVDAVLRKYGHKSKMSKTRYYPKGTCKLTTGAAISRQLLLVAPNDLRKRVLENYDKLRKTGDKSLVAVILGQIGAAEFIEGRDMFPGIKQAVRAFGNAS

SEQ ID NO: 3316 - protein, 300 aa, unidentified
  source 1..300: note = Related to JAGBOE010000222.1; note = Pseudobutyrivibrio sp.
MKRASKKYDLDQCALYKCKSKKKLAELLLIDLRYIKNSKNFIDYHSFELTGKNNKTRLINAPQPILKKIQKRLLALLRPINRPAWVMFGEKGKSYIQNAIVHQYNPYCITMDIKGFYDHCRRDAVYRFCKDKLQVSPDAATIITDFTTWEQRIPTGSPVSQILAYHAYEDMFCKINEYAKSIGAKFTLYVDDITISSKNAIDPKKLASKVRKILHVYGHTISKNKTKYYSKNDFKLITGVIISPNHQLLVPNKLSHKINNELEHLYSIMQESTDVQGAILRLNGLLQAARLIQPNYRSDI

SEQ ID NO: 3317 - protein, 309 aa, unidentified
  source 1..309: note = Related to VDFO01000068.1; note = Companilactobacillus halodurans
MKKKYPLSQSYLFKCHSKKKLADSLGMSLKKLKYISNNPRYYSFTKRTGTKNREIDVPSDAELKKAQKNIYNYLKYTNRPNYLMAGEIGKNILSNATFHKDSDYWLKFDISNFFPNCKREYIYRFFQSSMQCSPDVASILTNITVYRGGLVQGISTSMLLSFFAFTPMFDELSLLATKNNLKFSTYVDDFTFSSSSPINTNFIKLRVNKIVRAYGHTIKNRKVKYYSTNDSKRVSGVIVTKTHHLKVPNKNRKKIISLAKSMRENINTGNYQEAEKIRLSLRGCINSARQIEPEIFPEISKFTKTKFKS

SEQ ID NO: 3318 - protein, 310 aa, unidentified
  source 1..310: note = Related to QUAW01000007.1; note = Apilactobacillus micheneri
MTYPINQCYLYKIHSKKRLSKIFGLDLKKMMDISNTPIYKNFYILKKNKKDYRKIEYASDTLNGIQRKIHKYLANINKPKFLTGGVKSKSILTNGKIHKNNNYWIKFDISNFYVNCNRDYIYKFFLNDLKCSPDISEILTNLTTFEGHLIQGSSSSVDLSYFAYSKMFKQLNDLALLNDLTFSTYIDDFTFSSNIPINIDYISKNVLKILRLYGHKAKRNKVKYYNINSNKLITGIVVNKNNEIRVPNYNREMIINLRRKIEDNDSCDLRDILSLIGMINSARQIENGVFSNSYNYAQNILKRLRKNKSY

SEQ ID NO: 3319 - protein, 310 aa, unidentified
  source 1..310: note = Related to NZ_AP014808.1; note = Lactobacillus acetotolerans
MRKGKYALNQSALYKCGSKKRLAEILGIPLGTLKENAENPQYHIVYKPKKNSTEKRKINAPRKTLKRIQGKIYKKLQYVKRPKWVMAGEKGKNWPDNAEFHKDSCYVLKFDIANFFPNCGREYVYRFFLNRLKCAPDIAEILTNLTTYHGCIVQGSPVSMVLAFYAYEKMFDELANLADENSLLFSTYVDDLTFSSKKQIQKDKLIKIVNKKLHAYDHKSKSKKEMYYGKTKYKKITGVILYPDHVSKVPNRIRLKIKRSLVAAKEAEKEGNVKQANDFKKELVGTIYSARQIEKNIFPEALNYAKQQVS

SEQ ID NO: 3320 - protein, 317 aa, unidentified
  source 1..317: note = Related to NZ_RHOJ01000001.1; note = Lacticaseibacillus jixianensis
MKPSESRKRYNLNQCALYCCRSKSKLFKLLGTNAREIRDLTKNMNEQYSIFDLEKKGGGTRTVHGPSPLLKRIQKTLYKYLRKVERPSWLISGELGKSVIDNVRPHQFAGDMIKLDISGFFDNCKREPVFQFFHTILRQPGDVASICTELCMLNGAIVQGSPTSMVIAFYANRKMLEELQQLASDFGLVFTVYVDDIAFSCAASFNEDALLSRACQIVRAYGFRVKTKKVREYPLEKPKLLTGIVISKKNTLSVPNRVRRTILDSMTSYRKMDDSNEKEKLRQSMLGMIASAQQIEPGIFNSIRGQLLSDRRKQLVS

SEQ ID NO: 3321 - protein, 315 aa, unidentified
  source 1..315: note = Related to CP045180.1; note = Schleiferilactobacillus harbinensis
MTTKVTKRYLLNQSALYHCTSKRKLARVLQIDLKRLVGIVGDIPNQYSTITRPKKDSGERIVHNAHFELKRVQRRLFTLLRRVKRPNWLISGEIGKSITDNVRPHLGGTQLLKIDISGFFDNCSRESVYQFFHVQMAQPSDVAKICTDLCTLENAVVQGASTSMLIAFYANQSMLQELHELAEDNSLIFTVYVDDIAFSSSHSFQASDILDQATRIVSAYGFRVKNKKVRAYNDSRPKLLTGVIITTTSKMAVPNCKRRKILDDMTQYRRSTNPAERRSMRSKILGQISAAQQIEPDFFTGVKNQLKYEMRMDED

SEQ ID NO: 3322 - protein, 311 aa, unidentified
  source 1..311: note = Related to CP017713.1; note = Loigolactobacillus coryniformis
MKKNIRRYPLNQSQLYKCHSRRRLARMLDTDLKTLEEIAKNPRYYSFTRPKKNSNERRIIDAPNQRLKKIQTSVYAYLRKVKRPDWVMAGEVGKNWTENAETHADDSYFVKADISKFFDNCEREYVYQFFLTKLEQSPDVADICTSLVMFEGKIVQGAPTSMVIAFYAYQKMFEELACVAKQFHCIFTIYVDDVTYSSLDPIDSAALEARISQIMAAYGHKVKRQKVRTYGSQRAKRVTGVILSTDHQMLTPNSLRQEIYADFQQYLAQKKADKDDPNLDHQRASLLGKINSARQINPGIFPEMHRILKNG

SEQ ID NO: 3323 - protein, 316 aa, unidentified
  source 1..316: note = Related to JAGZJL010000011.1; note = Coprobacillus cateniformis
MKNITLSNNPLYNLKSKNKLKKLLYVDNFDNIINQYDVFIAKPARLVEKPSNQLKIIHTRIFKFLKKIEIPDYLFSSKKGKCYIDNARLHQNNSFVVTLDLSKFFPKSNASHIYNLFEKKFNMSKDVAYIMTQICSIDTSKITLKDSVKRWYQNANNKLKYPIPISHVPTGSCTSQIIAFLSFIDMFEEMNSIACCNNITFSVFVDDIIISSNQPIKRHIINKFKYIATKYGHEINKSKIKYYGINYNKRITGVIITKDHRLKSPSKNHFQSFKDAQQYKINPSIKSKQRTIGRIQAVRNIEKQKFIQLIKDIKQV

SEQ ID NO: 3324 - protein, 313 aa, unidentified
  source 1..313: note = Related to CP051151.1; note = Tenericutes bacterium zrk29
MENALFNLKSKKKLAKLLFYDKIGYLDKDLSFINNYSVFIVETSNGGTIKSRIVETPRGMLKVIHDRVFKFLNQVDLPDYLISKRGSSYVQNHISHKNNSNVVSIDIQKFYPMCSFGNVYKFFHNTMNMSPDVAYIISEILTINYENIKINDKVDEYLEQQEVKNKVKFPTKHIPTGSSVSNILSFLSYREMFEEIAQLSKRYNIEMTVYVDDITFSSNEQFPKTFIGKVKKILIKNGHKYNKRKSKKLDKNHNKNITGVIVNKYKQTKIPNKLHLKYKYAKRDLLKDPSQLNNQKLNGIKEAMKQIDTVSKK

SEQ ID NO: 3325 - protein, 306 aa, unidentified
  source 1..306: note = Related to JAFSUG010000001.1; note = Oscillospiraceae bacterium
MLKRLLHIEDNKFLKQDYIASMVTPYIDKKGKARLIEPPREELKTIQKRIKMMLGQIVVPSNVFSGIRGRSYAENAVMHSSEKLRNLFKIDLTAFFPSISRETVYRFFYEDLCCSPDVAETLTNLTTIDLEKSQAHCLDEIYSFLNYKGVTCKNHLISGAPTSQIMSYLVNHRMFEEMQKVADDNNAVMTVYVDDVTFSTEDHISRHFKNRVIDIVRKYGYQISKAKVKNYTKLYPKLVTGVIIDSHGKPIIKNSMREKIIKEYELLRDHPESAESKQRLKGLLTAARQVDHRAFPTIYRFAFDKE

SEQ ID NO: 3326 - protein, 306 aa, unidentified
  source 1..306: note = Related to JAFYVE010000007.1; note = Clostridia bacterium
MLKRLLRIEDSKFLKQDYVASMVSPYIDKKGKPRLIEPPREELKIIQKRIKQMLGQIIVPSNVFSGIKGRSYADNAVMHTGESRRNLFKIDLTAFFPSISRETVYHFFYEDLCCSPDIAEILTNFTTIDLDKSQANCLDDIYSFLDSKGVLCKNHLISGAPTSQIMSYLVNHQMFDEMQKVADENGAVMTVYVDDVTFSAENRISKNFRDRIIAIVRKYGYQISKSKVKKYTKLYPKLVTGVVIDSEGKPVIKNSMREKIIKEHDYLREHPDDAKSRQRLRGLLTAARQVNNHAFPTIYKFAHNKT

SEQ ID NO: 3327 - protein, 308 aa, unidentified
  source 1..308: note = Related to nan
MLLLHIKDSRYIKQDYIADMVSPYIDKKGKPRLIEPPCEELKTIQKKIKNMLGQIVVPNNVFSGVKGKSYADNAIMHVDNKRRNLFKIDMTAFFPSISRETVYRFFCKDLCCSPDVAEILTNFTTIDLKKSHARYLDEIYAFLDSKHVKCKNHLISGAPTSQIMSYLVNHRMFDEMQKLSDENNAVMTVYVDDVTFSSENWLSGSFRNKIVDIVGKYGYQISKNKVKKYTKLYPKLVTGVVIALNGKPTIKNSIRMKIVLEHAHLRDHPEDADSRQRLRGLLTAARQVDAHAFPTIYKYAYELDTKNN

SEQ ID NO: 3328 - protein, 312 aa, unidentified
  source 1..312: note = Related to JAFSCK010000132.1; note = Oscillospiraceae bacterium
MLKRLLHIEDSKLTKQDYIASLISPYIDKTGKPRLIEPPREELKTVQKRLKKLLGEIVVPDNVFSGIKGRSYADNAKMHIGSGRRNLFKIDLTAFFPSIDRDTVYHFFSKDLNCSSDVAQILTNLTTVDLEKAHITNRNDVYLFLSSKKVSCRNHLISGAPTSQIMSYLVNHHMFDEMQTIADRNNISMTVYVDDVTFSSEGRISHDFTEQIYAIIKKYRYQVSRSKVRKYTKLYPKLVTGVVIDADGKAVIKNAMRLKIINEYNHLLQNPNDPICRQRLRGLLTAARQVDQHAFPTIYKYAFEGSLKCQQN

SEQ ID NO: 3329 - protein, 309 aa, unidentified
  source 1..309: note = Related to JAFQCV010000001.1; note = Oscillospiraceae bacterium
MLKRLLHIEDSKFTKQDYIAALVSPYIDKTGKPRLIEPPHKDLKTIQKRLKNLLGTIVVPNNVFSGIKGRSYADNAKMHAGSHSRNLFKIDLTAFFPSISRETVYNFFYHDMTCSSDVAEILTNLTTIDLEKARIHERNEVLLFLESKKVSCHNHLISGAPTSQIMSYLVNHHMFDEMQIVADNNHAIMTVYVDDVTFSSEYRLSHKFKEQILSIVRKYGYQISRPKVKYYTKLYPKLVTGVVIDSSGSPIIKNAMREKIINEHRHLREFPDDKSSRQRLCGLLTAARQVDPHTFPTIYKFAFSSPDHE

SEQ ID NO: 3330 - protein, 326 aa, unidentified
  source 1..326: note = Related to FR898238.1; note = Eubacterium sp.
MPLIYTDCPLYGLKSKKLLKRLLRINNNQMMRQTHIASLVSPYIDKSGKPRLIEPPHEELKIIQKRIKNCLGRITVPDNVFSGIKGRSYADNARFHVGNNRRNLYKIDLTAFFPSITRDTVYRFFAEDLLCSPDVAQLLTDLTTIDLETSNTKNIDEIRLFLKEKGVSTYNHLISGAPTSQILSYLVNHQMFDEMQKIADDNNITMTVYVDDVTFSSENRISKDFRDKIIAIIRKYNYQISKKKVKRYTKLYPKLVTGVIIDATGKIVLKNSMRQKIIIAYNELKNDPDNADIRMRLKGLLIAARQVNKDAFPTIYKFAFQTEENK

SEQ ID NO: 3331 - protein, 309 aa, unidentified
  source 1..309: note = Related to PRLC01000002.1; note = Faecalibacterium hattorii
MLKYVLHIKNGDLLKQDYVVSMIGPYIDKTKKPRLIEPPQAELKTVQKRMKTLLGKIQVPDNVFSGIKGRSYSDNACLHLGKSKRNLYKIDLTAFFPSISRETVYCFFFEDLCCSPDVAEILTNLTTVDLKKLNQSSLLEVYDFLANKGVKCYNHLISGAPTSQILSYLVNHKMFDELQSLSDKSNVTMTIYVDDVVFSSEHKISSEFRQSVLSLIKKYNYQVSRKKVKGYSKTYPKLVTGVIINSEGRATIKNALRKKIMVEYEHLRNNPDDIKSRQRLRGLVTAARQVDKSAYPNIRKFAFDNPAKS

SEQ ID NO: 3332 - protein, 308 aa, unidentified
  source 1..308: note = Related to FP929045.1; note = Faecalibacterium prausnitzii
MLKYVLQIKNDDMLKQSNITSKIHPYIDKTKKPRLIEAPQAELKIVQRRIKTLLGKIQTPDNVFSGIKGKSYPENARMHIGGRKRNLYKTDLTAFFPSISREDVYQFFNNELCCSPDVSEVLTNLTTVSLERFPKEELTEVYDFLGQKGVHCYNHLISGAPTSQILSYLVNHKMFDELHTLSAKNDMVMTVYVDDMVFSSEHKISSHFRNSVKSIIKKYRYKLSHNKVKGYSKGYPKLVTGVVIDCNENMIVKNSLQHKIILEFEHLRKNPMDQESRQRLRGLVTSAQQIDKSIFPNIKRFAFENPSK

SEQ ID NO: 3333 - protein, 307 aa, unidentified
  source 1..307: note = Related to JAGBJU010000241.1; note = Oscillospiraceae bacterium
MLCHMLNIRDTNLLKQDYVSKLVEPYIDKTGKPRLIEPPRAELKLIQKRIKNMLGMIEVPENVFSGIKGRSYADNASFHIGDSPRYLFKIDLTAFFPSISRDKVYAFFLSDMHCSPDVAAILTNYTTIDLSRAAIQDRQSIYTFLSEKNVSCYNHLISGAPTSQILSYLVNYHMFDEIQMLADKHSVSMTIYVDDLTFSCEHRIPRHFKENVLSVITKYGYVISAGKTKSYTKRYPKLVTGVIIDSNGQLALKNSLQLKISLEHAHLRDHPEDTKSRQRLRGLITAARQVKKDAFPTIHQFAFQANP

SEQ ID NO: 3334 - protein, 324 aa, unidentified
  source 1..324: note = Related to NZ_JADMUB010000001.1; note = Clostridium jeddahense
MKYDNCPLYELKSKKILKYLLGIKNSNLLNQQYVASLVTPYIDTTRKPRLIEPPHSELKAIQKKIKTLLGKIEVPNNVFSGIKGRSYIDNALIHKGNGLRHLFKIDLTTFFPSISRETVYGFFYKDLRCAPDVAQILANLTTIDLIKSNSRDIETIYQFLEMKKVRCRNHLISGAPTSQILSYLVNHRMFDEMQALADKNRVTMSIYVDDVTFSSDYRIPQRFKNLVFTIVRKYNYQISGIKVKSYSKLYPKLVTGVIIDTTGDLTIKNSLRKKIIDEHRNLRNDPGNRESRQRLRGLITAARQIDKSAYPNIHRFAFEKFTIR

SEQ ID NO: 3335 - protein, 321 aa, unidentified
  source 1..321: note = Related to MWBL01000033.1; note = Firmicutes bacterium ADurb.Bin300
MNYNYCPLYGLKSKKRLKYLLKIKNSKMLSQAHIAKHVEPYIDIQGRPRLIEPPSVELKAIQKRIKNLLSKIIVPDNVFSGIKGRSYVDNARMHSNGLRYLFKVDLTAFFPSITRETVYTFFREDLHCSSDVAEALTNLTTIDIQKSKAKNINEIYCFLDAKQVNVINHLISGAPTSQILSYLVNHKMFDELQLLSDKNKITMSVYVDDITFSSEFRISHMFREKVYQIIKKYNYKISKKKVKGYSKLYPKLITGVIIDANGNLVIKNTLRRKIILEFRKLMEDPADDESRQRLRGLATAARQINKAAYPFIYKFAFDNKQ

SEQ ID NO: 3336 - protein, 323 aa, unidentified
  source 1..323: note = Related to NZ_CP020991.1; note = Monoglobus pectinilyticus
MIYTNCKLYKLNSKKVLKYLLAVSDNNFFEQKYVASQIEPYIDTLKKPRLIEKPSEQLKAIQSKIKGLLYAIQVPDNVFSGIKGRSYSQNAQWHKGTKHVYKIDLTAFFPSITREKVYSFFKDDLETSSDVAEIITNITTVDIDLTNLQNVEQVNEFLISKNVKTRNHLISGAPTSQILSYMANHKMFDEIQSLANHNGIVMTIYVDDITFSSENYISNKFKNKVQSIIKKYGYQISARKVKSYSKCYPKLVTGAIIDKNGCLTVKNSLRYKIMSTLNELKENPNNKTARRKLRGLVIAARQIEPNAYPSVHKLAFDKKYKVN

SEQ ID NO: 3337 - protein, 316 aa, unidentified
  source 1..316: note = Related to JAGFNZ010000002.1; note = Caproiciproducens sp.
MYQLKCKKVLKYLLKISDNSVFNQWYVASLIEPYIDISRGKPRLIEPPSLMLKSMQTRLKNMLGTIDVPINVFSGIKGRSYAQNAQWHKGNKFVYKIDLTAFFPSISRERVYSFFKEKLRTSPDIAEFLTNITTVNLDLSNIKSMEEINIFLESKNITTRNHLISGAPTSQILSYLANQDMFNEIQKLSDHNNITMTIYVDDLTFSSTDHISNNFKQEIFSVIRKYGYHISNKKVKGYSKFYPKLITGVIISKDGNIAVKNSLRLKTINELNTLKQAPQNTTSRKRLRGLVTATRQVEPNAYPSIHQFAFDKKYKV

SEQ ID NO: 3338 - protein, 324 aa, unidentified
  source 1..324: note = Related to JAGZEF010000053.1; note = Clostridium sp.
MINPIHSNLYKLTSKKYLLSLLHIHNRQFLKQSYVSKQISPYIQTDPKPRLIEVPSEELKTIQRHIKNELNKIIVPANIFSGIKGKSYIGNAKLHSGNKYVFKIDLCAFFPCITRNTVYNFFIESLKTSPDIANILTNLLTVDLSKCSIENVESVNAFLISKKIKTPNHLISGSPASQILSYLVNHKMFDSLQNFCDKNNITMSVYVDDVTFSSQHIISHTQKQVIYKIISKNLYRLSRNKVKYYTKKYPKLITGVVISSNGNLKIKNSLSLNVISEWKYFSQNPKNLQSKARLQGLLIAARQSEPAKFQNIYNLIREASIPFS

SEQ ID NO: 3339 - protein, 324 aa, unidentified
  source 1..324: note = Related to JAFQRZ010000015.1; note = Agathobacter sp.
MINPINSNLYKQTSKKYLLNLLHIHDKRFLQQRYVSKHISPYIQTNPKPRLIEVPSEELKIIQRHIKNELNKIIVPENIFSGVKGKSYIENAKLHSGNKYVFKIDLSSFFPCISRNTVYNFFTESLKTSPDIACILTNLLTVDLSKCNIEDADSVNEFLISKKIKTSNHLISGSPASQILSYLVNHKMFDTLQEFCDKNSLIMSVYVDDITFSSQHVISHSQKEVIYKVISKNLYRLSRNKVKYYTKNYPKLITGAIISSNGNLKIRNSLSLNIIKEWKHFKYNQQDAQSKARLQGLIIAAHQSEPNKFQSIYKIVRDASFDVS

SEQ ID NO: 3340 - protein, 323 aa, unidentified
  source 1..323: note = Related to KE159538.1; note = Lachnospiraceae bacterium A4
MIDPVKSNLFKLSSKKYLMTLLNVPTKEYLNQNFTAKQIKPYIQANPKPRLIEVPSDSLKKIQKNIKCELNKIEVPSNVFSGIKGKSYVDNAVIHQNCNFLFKIDLTAFFPCITRETVYKFFKVDLKTSSDIANILTNFVTIDLTLCDIQEPEPIEQFLLSKGIKTTNHLISGSPASQILSYLANHNMFDELQNFCDKNDIIMSIYVDDITFSSQHEISHKHKEIIYNIIFKYLYRLSRSKVKYYTSIYPKSVTGAIISPNGNLSIPNSLSYKVINELRNYKNNPNDEHSQKRLQGLIVVAQQTEPTKFSNIYNHVRNATIKA

SEQ ID NO: 3341 - protein, 320 aa, unidentified
  source 1..320: note = Related to JAJQEB010000010.1; note = Clostridiales bacterium
MINATNSKLYNLQSKKNLIYLLKIHDKDFFNQDYVAAHIHPYIDKRGKPRLIESPSLQLKKIQRNLKNELAKIEVPYNVFSGIKGKSYVENAEMHRKSNYIFKIDLTAFFPCIPRESVYTFFRKQLKTSPDIAQILTNLTTVDLTRCNIKKLESIEKFILDKHIVTTNHLISGSPTSQALSYLVNTKMFDELQYLCDKNKVIMSIYVDDITFSSNHKISHKFKEIVYTIISKYMFKLSHNKIKYYTKDYPKLVTGPVISNGKLIIRNSLRFKIISEFKSLKKNPNKASYDRLKGLIVAAKQIDLNQYPNISKYIKENPIH

SEQ ID NO: 3342 - protein, 302 aa, unidentified
  source 1..302: note = Related to JAGXSA010000175.1; note = Dethiobacter sp.
MLRHFLQVQSNQLFNQTFILDKIHPYIDTVGKSRLIEVPDKALRTIQKKIKNMLGKLVLPDYVFSGVKGKSYVDNATHHSGTKFTYKVDVTAFFPSISREKVYLFFREKLKTSPDVAEALTNLTTVDLHLIENIQEVHEFLKRKNIKTWNHLISGAPTSPILSYLVNSDMFDALYSLSKENEIVMTVYIDDIVFSSSYRISYKIRTKILSIIKQYGLQVNKKKLKLYTRKYPKKITGVIIDKNGNSEVPNSLRKKIITELHTLKSNPNNLSSRQRLQGLVTSARQINKETFQNICSYAYKKD

SEQ ID NO: 3343 - protein, 319 aa, unidentified
  source 1..319: note = Related to NZ_DS560015.1; note = Anaerofustis stercorihominis
MEIQKSPLYKLSNKNYLKYLLKIPDKKFFKQSYITQLITPYIDNKNGKKRLIEVPDLELKKIQSRLKNILSLLQMPNYVFSGVKGRSYYDNAYLHKGNKYVCKIDLESFFPNISREKVYLFFLTYFKCSSDIAYILTNLTTVDLTRTKIKNNKKLEKFLEYKNIFCKNHLISGSPASQLLSYLVNKDMFDEIYNLANKNSINVSIYVDDIIFSSFNKISYDFIKQIKRIINKYNYNISNSKFKRYLNGYPKRITGVIIDKNGQLSIPNSLRLKIIKEFEYLKSHPNDSKSKIRLRGLILSSRQIEPNAFVGIYKYLKKF

SEQ ID NO: 3344 - protein, 317 aa, unidentified
  source 1..317: note = Related to JAFUZY010000121.1; note = Eubacterium sp.
MNKKCPLHGLKSKAQLYSMLGVNDKKLFRNGIQDKVKIYIAKDPKERLIEAPDYITKKAQKQVKNYLMKCDFPPYVFSGIKGKSYFNNAEMHLSSKYMYKTDISKFFPNISRDKVYLFFLNDLNTSPDVANILTNICTINISDSIETNPQVAEFVSKNKIRMFNHLCTGSPASPLLSYLVNRKMFDELNNIAENNGMSFSVYIDDVFFGSKKPIPYGVRQQILKTLTKHGYNISFKKVIYYKDKENKKVTGVIISPNNKLEIPNKLKLKIVSGFSKGNLKDSRAKINGMLIASSIIDKNSFNGIREYMKQLEKDSEE

SEQ ID NO: 3345 - protein, 315 aa, unidentified
  source 1..315: note = Related to JAFVVO010000024.1; note = Clostridia bacterium
MHKHCLLHGLKSKKQLISMLDITDNKVMKGKAQDKIKIYIATEPKKRLIEAPEYKIKKVQNKIKNYLLKCDLPSYVFSGIKGKSYFCNAALHRDCKFLYKTDISAFFPSISRNTAYKFFKNDLETSSDVAKILTDICTVDIRDTLEKDSSVAGFVKDKKIKMYNHLCTGSPASPILSYLVNKAMFDEMYAIAENNNLKFSIYMDDVFFSSSKSISNNVREHILRILTKYGYNVSFKKVIYYTSQQNKKVTGVIITPQNKLSIPNKLRRKIIASFSKGNLKTGEQNLRGMLVASNIIEKNSFSGIKRYLNELSKIQ

SEQ ID NO: 3346 - protein, 317 aa, unidentified
  source 1..317: note = Related to QAKR01000043.1; note = Clostridiales bacterium
MYKSCPLYALQSKKMLMKVLGIQDKKWTKNIYVQQNISPFIDCMVKPRLVEAPKQELKVIQKRIKNGLMKCRFPNYIFSGVKGKSYIDNAKMHAGIKYLYKIDISAFFPNTSREKVYMFFKNELKTSSDVAEIVTNLCTYDISIDLVEKKEIDTFIRMKKIKHINHLCTGASPSPLLSYLVNKSMFDEMYSLCLKYNVNMSVYVDDVVFSCDKPIQPEFRGRILKIVLKNGYNISKNKVKYYGSSDVKKVTGVIIKPDGTLDVPNKLKFKVTKRFKDTQKGSELNKLYGCVIAAKQIKKNIYPSISEYIMNQKKKEK

SEQ ID NO: 3347 - protein, 340 aa, unidentified
  source 1..340: note = Related to DPGI01000004.1; note = Clostridiales bacterium
MQSWDKHNQFKYNEVYPLEYRKCYLYGLKSKKKLLELLHIDRKIYCKSSFLNCKIKPYIEINKNKKKRLIEAPDEDVKNIQSIILRALQLIDVPNYAFSGIKGKCYIDNAKAHSDKKYLFKIDISKFFPNIGRNKIYNFYLNKLKTSPDVANILTNLSTINLDLKNQNNKTMLKINEFINDAHIKERNHLITGSPLSSIMSYFANVDMFEKINEIALKYNITMTVYVDDVVFSSDNKIPYFFRKNVLNIINQNSYDVSVKKCKWYNKPENKKVTGVILDKKGKMQIPNKLMLKTHNYINEINKGDKTNIDKLQGCLVVANSINGKFKEYRGQLKKMKRKF

SEQ ID NO: 3348 - protein, 328 aa, unidentified
  source 1..328: note = Related to JAFQEA010000008.1; note = Clostridia bacterium
MTYKLCRLYGLKSKKTLREWLEIDDSSFFHSKNIAKNYHPYIDNKANKKRLIEVSSPKLKFVQTKILGMLKNLDYPEYLFSSVKGVSFIDNAKQHSGKYYTFKIDISKFFPNTSRNKVYNFFKKDLNTSSDVATILTDCTTVDLRNYNSDKHHNEIVNFLEEYKIKQIAHLSTGAPTSMLLSFLANRPMFEELNSFCEQRGYIFTVYADDVTMSSINPISYSDRSAIIRIAEKYGHFVSKRKVKYYNANQSKKITGVVINKNGEICTPNKLLNKTHNKILKYKSKNIDEHEINSLKGCINVAYQIDKRYPHLRKVLNKNSNYSKEKNG

SEQ ID NO: 3349 - protein, 323 aa, unidentified
  source 1..323: note = Related to DVLO01000021.1; note = Candidatus Limihabitans stercoravium
MTYKLCRLYGLKSKKTLREWLGINDSGFFCSQNIAKNYHPYIGSKDNKIRLIEDSSFKLKHVQKKILKMLKKLDYPKYLFSGVKGLSYIDNAKQHLGKFYTYKIDVSKFFPNTSRNKVYSFFKDFLNTSPDVAKILTDCTTVDLRNYSNSKHYNKIMRFVAIAGIRQIAHLSTGASTSMLLSFCVNQSMFEELNEFCKQRDYIFTVYVDDVTISSTKPITYKDRLKIIRIVEKYGHSISRNKIKYYTLSKTKKITGVVINKNGEARTPNKLLSKTHCKILKFKRGNIGDAEINSLKGCINVAYQIDGKFIHLKKLLNLKDNLK

SEQ ID NO: 3350 - protein, 304 aa, unidentified
  source 1..304: note = Related to JAFWLJ010000001.1; note = Clostridia bacterium
MDLTTCKLYGVQRKRDLSNILKINCKEINKIVNSYKPYIANKSKKRLIEPVSSVELKKVQKRIQNLLKEIKYDSNVFSGISGRSYIDNGRLHLGCEYVVALDISKFFPNTSREKVYKFFKHDMKNSSDIAEILTNLCTIDLSNIADIDEEVIKYISENRIRYKKHIPTGSSISCILSYLVNYKMFDEIVKLGVEYRCKTSIYVDDVVISSTEKINKQLIDRIMGIIKSRGYSIQKTKLKFYDKNEFKRVTGNIISKDGTKLVIPNKIRYKMIKLKKNKEIQKDKKEAKLNGYNQVINQINMEAF

SEQ ID NO: 3351 - protein, 320 aa, unidentified
  source 1..320: note = Related to FR893092.1; note = Clostridium sp.
MNFKNCELYKIKRKRDLFILLHIDENKLNEELYKYKVCIKDKKRLLEKPSEELKKIQRNILYKLYQLDFPQYVFSGIKGRSAFGNAIYHINCKYMLKLDMSKFFPNTHRNNIYEFFKDKLKMSSDVSSICTDIVTVNYEKEDVEIDYEVYDFLKRKKIKNTNHLPSGTPTSQILSYLANIDMFDKIIEYTKKHKLQCSIYVDDITISSSNRYITKKEESEIKRIIKKHKHNLSKEKTIRYSVNEFKKVTGFVIDPNNRLVIPNKIKSKIKNQTKFIRKKELDEQRKNSIIGLTNFANISVEGSYKGLRATLKNISTSNTV

SEQ ID NO: 3352 - protein, 305 aa, unidentified
  source 1..305: note = Related to JAADIZ010000149.1; note = Epsilonproteobacteria bacterium
MNKYKCTLFNCKSIKKLQKYLFIQNKNNFKKISNELKNNPLNFYVSFKNNTGRELFSCNEQIKKIHKRLQKLFNVEKSDYLKSGVKKESHITNVKFHKNSNFFLLLDIKNFYPSITKQKIKKQLITTYNQSSDVAEIISNMVTVPQEKALGKRALVTGSVLSQFFAYMINKKMFDELDKISKEENIRFSLYVDDLTFSSNVPVSYLFYTKVYNIIRKNGYIIHSGKIYRGKIGNKSKITGVHITKYGFRLLDRHKIKIREIIKNKDYLENNKPLLGLLNYALQVNPKYSKYMYLIKKKLISDSNI

SEQ ID NO: 3353 - protein, 325 aa, unidentified
  source 1..325: note = Related to CACVAZ010000125.1; note = Sulfurovum sp.
MNAYQCTLYGVKSLNKLQQFLQIKAKQEFKALSSSVKSTPLKYYSPFKDENKRELFNCSSHITFLHKKVMRLFNLEQSTYLKSGVKKESHITNAKEHQNSNFFLLIDIKGFYPSITKSKIKTQLIQTYKQSKDVAEFLSNLLTVPQEKSLGKRALVTGSPLSQWFAYVINKKMFDELYNVSKEENIIFSVYVDDITFSSKSIISYKFYTKIYNIINKYEYRIHQGKMYRGKLCNKTKVTGIQFTKYGFRLLDKHKEKIRKIVKSKDCSNQIKSLLGLVNFAIQVNPRYSKYKYLIEKSLLLKHSNTKNKNQYHKSPTNSKALKYS

SEQ ID NO: 3354 - protein, 300 aa, unidentified
  source 1..300: note = Related to NZ_PDKB01000003.1; note = Aliarcobacter vitoriensis
MNPYSCTLYNCKSLNKLKSYLNIEDDKYFKSLNANLSANPFKFFRKFEKNERELFRCNKRITQIHQRFIKLFKIEESEYLKSGIKKESHITNALAHKDSNFFLLVDIKGFYPSTTKAKIKKQLIMTYQQSSNVAEFISNAVTVPQEKANNKRALVTGSVLSQYFAYVINKKMFDELYKLSKHNDVIFTVYVDDISFSSKKVLTYKFHQQVYNIIKKYGYTVHNGKVYRGKINNKSKITGVQITKYGFRLLTKHKDKIKELKNKIDIKSKRSLLGMLNYAIQVNPKYRRYKNLFKNYEELN

SEQ ID NO: 3355 - protein, 301 aa, unidentified
  source 1..301: note = Related to NVUO01000016.1; note = Sulfurimonas sp.
MFTCTLYNCKSLNSLQKYLLIKTKEFKSLSIELKEIPHKFFKSFTDDKGRELFRCNGQVTKLHKRLMKLFNVEIPIYLKSGVKKQSHITNVKYHESSNFFLLIDVKRFYPSITKSKIKKQLITTYKQSSNVAEFISNLVTVPQKKSNNKRALVTGSPLSQYFAFIINKKMFDELNKISIEEDVKFSVYVDDMTFSSKQVISYKFHQKVFSILTKYGFVTHLIGNKKTYRGKVGAKSKITGVHITKYGLRLLQKHKDSIQHIIKQNLHEEKGKTLLGLVYYAIQVNPKYDKYKRLLEKYNKL

SEQ ID NO: 3356 - protein, 318 aa, unidentified
  source 1..318: note = Related to CP015910.2; note = Brachyspira hyodysenteriae
MIKYNLDIFKNFTSIEKTCEFLCVNKVLKYNIINNNIKECYITEINDNGREIHKPIFFLKKTQKKLLKCLLPKVLPKYLFAPSIKNTNKNNIENARYHLGKKYFLTMDISSFYNSIKGNTIYDLFFNKFKLNSDIALFITKLTVYDNGKETFLSTGSPSSQILAYLCYSDVFDNIYNLCLKKGIRFSLYVDDMTFSSDIKFTNKLPNKIIDIFEKNNLKIKPEKTKRYNKGYAKITGVILKNNKLYIKNSKRKDIIENLKLLNKSNDIIKKEIENNNIEIIKTISKLNGLLNYTKQIEEDHFLANRNRIRKLYKLIPK

SEQ ID NO: 3357 - protein, 317 aa, unidentified
  source 1..317: note = Related to NZ_CADDIL010000010.1; note = Spiroplasma sp.
MQYNNCILYSLNSKKKLVKILIVNKNINKKKLVKIFSKEEQLKILIEKSKKVQLTDKKTRNKILNSTNITFNENIHRQFTYAQKKSDYKMILKKLSKILSIWVEKNNLNYLYSIIKNVDYVKNAYFHKENNYFLKIDFKNYFNNISSLQIFNFFKYKLNTSIDIARILTVLSVADINNTNLKQGLETSPILSFLVNIEIFEEIYQYCIEKKFKMSLYVDDLVISSKNPINKKEIQFVFNILIKNKLKINRRKIKYQNLYNNIVIITGIQILKNHNLKPINKTCKKLRIEKKISKNQNVINGLISNLKYIQQINDKNK

SEQ ID NO: 3358 - protein, 333 aa, unidentified
  source 1..333: note = Related to JAIPEU010000010.1; note = Vallitaleaceae bacterium
MNYKECSIYKITKKSDVNYLLDNADKATNINKYHQYITTYVVLDPNGKPKRLIECIEEKYRHTNKVLFNLLKSIETPEWHFSKKAVSYLDNAFYHLDNRYMLTLDIKKFFPNTSQDSVYRFFLNKFELTPDIASYLAKLCTVNIDLCKYDSVEMKNNVNTYMEIKKIRQRNHLITGASTSCLLSFLVHQEMFEEIRGLLKKHEKMSVYVDDITISSNCPIDKKLVKQISAILYRYGHRLSKNKTKYYTKDSYKRTTGVILTPSKQARIPNSKRNEIFSLFGIYKETGYTCEKTKDRLRGLLNYARSIEPNAFPRIYEAVVSQSKSYSKQNPTR

SEQ ID NO: 3359 - protein, 416 aa, unidentified
  source 1..416: note = Related to FR881490.1; note = Clostridium sp.
MNLNELIEQQIQKCRLYGLTKPLIIKEILNIPDYVDIKHLDKSIDSFYDTFYIKKNWAKESQTKEERYKEILNIEKNISERFTSIPDGEDKTKYRKIVTINTDWLKKSQKKFNKILMSILLDKKVRGIKQKSIIPYLHSAVKQRSYHTNAQAHVGDKYVFAIDLKDFYPSVTKYKLYLFFKNEFNLSSDIAMFYAVLSTCISDDGTYRLGQGLSQSSTLAYLVNYSLFNYLYELSKVEDIDMSIYVDDVVFSSKNKISQDFIDKLFGIIKSNNMQIKRQKVHYYKKESVKKITGVYVNGNKTRVANHKHYEFHTQYKYLKNHILNVKTIEDYYKIYNLYLKFYGNFQHIKMVESRVHDRYEKFIKDFDEFFPKGINKKQKSINYQKDNIKNVTDREKLNKCYQKLLNKNKIIESVL

SEQ ID NO: 3360 - protein, 416 aa, unidentified
  source 1..416: note = Related to FR890375.1; note = Clostridium sp.
MNLDNLLEEKIRESRLYGVTKPMIIKEMLNIPEDIDIKNLDKNIDSFYDTFYIKKTWVQGSKTKEEKIKEILNIEKTTSERYKSIPDGEEKTKYRKIVTINSDWLKKSQKKFNKILMNILLDKKIRGVKQNSIIPYLHSAVKQRSYHTNAQVHVGDKYVFAIDLKDFYPSVTKYKLFLFFKDKFNLSSDIAMFYSVLSTCLADDGSYRLGQGLSQSSTLAYLVNYSLFNYLYNLAKNDDIEMSIYVDDVIFSSKNEISQVFIDKLFGIIKGNDMRIKRQKVHSYKKESVKKVTGVFINGNKTRVANHKHYEFHMQYKYLKKHIIDIKSIEQYFKIYNLYLKFYGNFQHIKMVEGRVHDRYIKFIKEYDDFFPKGINKKQKNVNYRKGNIKNISDSEKLKSSYKRLLKINKVSKSVL

SEQ ID NO: 3361 - protein, 421 aa, unidentified
  source 1..421: note = Related to DVJF01000026.1; note = Candidatus Caccenecus avistercoris
MDLNKLIEENISKNRITGLTKPKIIKEMLSIPENINLKKLDQIINSCYSTFYIKKNWSKHQETEEEKYIRYLNIHQELSERIQQLPENADKTKYRKILVINEPWLKVSQKKLNKLLTSILLTKKEKAKKRESIVPYLHSSVKQRSYTTNAQAHIGDKYVFAIDLKDFYPSVTKVKIFNFFKKHFKLPSDIAMIYAVLSTYKSDNGEYCLGQGLSQSSTLAFLVNYRLFNYLYLEAQKLGIEMTIYVDDVIFSSSSPIPQKFINRLFGIIKENKMSIKRRKVYYYGKKQTKKITGIYIKKNKTSVAYEKHKEIRIQYNYLKEKIKEIKTFSDYLCIYNLYLKFYGNYHHILNVEKKINNKILNFVDKYDEFFPKGIHKKQKQPYSVQNIKTINDVQRLNKCYQKLKNKNLNEVILDYPNVNL

SEQ ID NO: 3362 - protein, 408 aa, unidentified
  source 1..408: note = Related to NZ_WTSZ01000005.1; note = Erysipelothrix sp.
MKKNFDGLKRLNKKKTIYSLFEFPKAASNKDYDFSNNYEFRYLAKKKDDINRKERKLERLTGYIQLQDSDKDALMRSRPKDYDKNSYRTIVNYSNSSDWLKKAQKKIHKYIVKELGEVEYLHSTIKSKSYATNAFQHRGENYTLAIDLKNFFTYVSREKLQYTLKDFLQIDSDVAFLYSSMLTSPVDEPPHHGGKYNLGQGLPSSPILAYLCHASLFEYIYNNSLKEEITMTVYVDDVVFSSVKPIPQHFIDRLFGLFKRNGLEINKDKIRLYMNGSTKKITGTYVSPQKLSIPNRKHEELHNLYQTLKEKKEKIETMDDYLFLYNIYLKFSGNYQYLIQVECRGEDGKISVNPRYKKFEKLNNELNILFPRGLKKKKKKTPYSKENMYFEEYKQLEEKYKLSVSRLK

SEQ ID NO: 3363 - protein, 325 aa, Staphylococcus sp.
  source 1..325: note = Related to JAHAKK010000031.1
MKILENCKLFKLNKIKTIYKKLNIPIEAQQKNFDFDSLYDFKYLKKDSKDNNKISKEERFEKYVNIEKSIPQLIDERPGDFNKSKYRVIININQEWLKKSQKKFHKIIAKELNNIPYLHSTIKHKSFATNAHKHIGEKFTLTIDLKNFFTCISRETLANKLKTLLEIDSDIAIYYSRLFTSPSDKPPYNNGQYNLGQGLPSSPILAFLCNYTLFEYINDLAKLYNTSMTIYVDDITFSSDLPISQEFIDKLFGLFKQNGMRINPSKIHLSKNNSFKKITGVNIIDGKPKIPSRKHEEIMIQFKTIKTLMTIKSFSDYFDDNQVIF

SEQ ID NO: 3364 - protein, 419 aa, unidentified
  source 1..419: note = Related to JAGBET010000010.1; note = Bacilli bacterium
MDRVKECLKNCRLYKFNNRKGIKQLLKIPDNLNLNDIRGELSSYYNFFYLKKPDKIKSKMSKEEIRNKYLSIEENLEIYDERPADYTKDKYRMLINIREKWLKQTLKRINKLLSQSLIKKNKKNVEYPIPYLHSSLKKRSYNTNVKAHKNHKYILAIDLKAFYPSVSYEKIINFFRHDLKLEKDIAEIYTALCTCPLDDPQQGNIQYGIGQGLATSPVLAFLTNYRMFEYIYSIAQKSGIEMTVYVDDIVFSSSKPIEQTFINSLFGIVKKNNLKINKNKVKLYGPKQVKKITGLCIIKGGSIKVPNSKHFETKIQFEYLVNKILVISNIDDYLSFYNLFLKFKGNVQFIELVEDKIPKKYSDFIKEYKDYFLYGVPKIKKSKIYTQSNVSNDDYKNFVIMYERLKKKIDKVKNNKIIM

SEQ ID NO: 3365 - protein, 413 aa, unidentified
  source 1..413: note = Related to DUUN01000201.1; note = Gallicola sp.
MDNVKECLKKCRLYCFNSRNGIKNLLNIPKDFDLENVRDGLLPYYNFFYLKKPDKSKTKETPEERKMKYLSIEESSDIYDTRPDDYSKDKYRMLININEKWLKKTLKKINKLLSLSLIKKNKKEVNYPIPYLHSSLKKRSYKTNVEAHNSNKYLLAIDIQNFYPSISCEKIFNFFKYDLNLDDDIAGIYTSLCTCPLDDPVVGKFEYGIGQGLATSPVLAFLSNYRMFEYINDFATKNNIEMTVYVDDVVFSSNKPIKQEFINSLFGIIKRNGLRIKKSKVKIYGPNQDKKITGLCITKGGKVRVPRSKHEELKIQYDYLSKEVLNIKNINNYFNFYNLFLKFKGNVQFVLLVEERATTKHFKFIEEYKDFFLYGIRKNKKGNKYTKDNISEEDYKKFILKYENLRKKIDSLK

SEQ ID NO: 3366 - protein, 338 aa, unidentified
  source 1..338: note = Related to FOGY01000005.1; note = Psychrobacillus sp.
MQFNNSKLYGLSNKKLLADILSVDKKSLKNVSLEFLPYKLPQHLSTINGKQRDIYNPNDEHKKALRKLVRLLMQVELPSYVFGGIKEKSHIQNASIHKANNYLMLIDIQNFFPSTLDSYVYDLFKGKFQMADDIAKILTDFVTIPCEKKDGRYLPQGYPTSPILSYLAYVGMYNELATVAVENEMIFSCYYDDLTFSSNKFINKSLKRKCYQIIEKHQLKVHPIKSKLIVKKGVEVTGVFLDDLGEAKAPKKLLKKLQESYEKVKNMDRNPSEFTKMNFVDELNKLQGLISAVKSIEKNRKIDLFLNELKFIRKKYNVPYRKNDVKKYFNTEYASIIR

SEQ ID NO: 3367 - protein, 338 aa, unidentified
  source 1..338: note = Related to NZ_CP070490.1; note = Lysinibacillus fusiformis
MQFNNSKLFGLSNKKLLADTLNVEKKSLKNVAIEFVPYKLPPQLSNINGKQRDLYNPNEEHKKALRKLVKLLMQVELPSYVFGGIKEKSHIQNAFVHKQNKYLMLIDIQNFFPSTMDSYVYDLFKRKFQMEEDLAKILTDFVTIQCERKEGRYLPQGYPTSPILSYLAYVDMYNELEALAVENGMSFSCYYDDLTFSSNKFINKSLKRKCSQIIEKYQFKIHPTKSKLIVKEGVEVTGVFLDDLGNLKAPKKLLKKLQKSYDKVKEMNENPSGFTKKNFVDELNRLQGLVAAVRSIENNRKVNLFLNELKYIRRKYNVPYRKKDIKKYFKTEHALLIQ

SEQ ID NO: 3368 - protein, 338 aa, unidentified
  source 1..338: note = Related to NZ_VCBM01000001.1; note = Rummeliibacillus sp.
MNFNNSKLYGLSNKKILADLLKVDKKRLKNVIEEFVPYKLPTELSTINGKKRDLYNPKNEHKKALKKLVGLLMQVGIPSYVYGGIKERSHIQNASIHRTKKYLMLIDIQNFFPSTSDSYIYNLFKDRFGMANDLAKILTDFVTVQCENREGRYLPQGYPTSPVLSYLSYAAMYQELLHLAVENGMQFSCYYDDLTFSSDKFISKSLKRKCSQIIERYHFKIHPTKSKLMVKKGVEVTGVFLGDSGEVKAPKKLLKKVQNSYEKVKEMDKNPNAFTKIDFVDELNSFQGLIAAVKSIENDRKVDLYLNELKHIRKKYDVPYRKGSAKEHFRSENAKFIL

SEQ ID NO: 3369 - protein, 338 aa, unidentified
  source 1..338: note = Related to NZ_CP090431.1; note = Priestia flexa
MNFNNSRLYALSNKKVLADILGIDKKRLKNVIQEFVPYRLPPELSTVNGKQRNLYNPNDEHKRALRKLVRLLMQLEIPPYVYGGIKEKSHIQNASIHKKGKYLMLIDIQNFFPSTSDSYVYDLFKNKFGMANDIAKILTNFVTVPCENSDGRYLPQGYPTSPILSYLSYLDMYEELLYLAVENGMKFSCYYDDLTFSSDIFISKSLKRKCSQIIGKYHFKIHPTKSKLIMKKGVEVTGIFLNDLGEIKVPKKLLKKLQSSYEKVKEMGENPSTYIKSDFVDELNRLQGLIAAVKSIEVNRKVDLYLNELKYIRKKYDVPYRKSSIHKHFKTESAKFIM

SEQ ID NO: 3370 - protein, 337 aa, Bacillus sp.
  source 1..337: note = Related to NZ_CP036356.1
MDFSASKLFGISNKKYVAELLNVEKAKLKNVSSEFVPYKFEQSVKGKKRILYNPNDIHKAILKKITKMISQLDIPDYTFGGIKGRNYIDNANVHRDNSYLLLVDIKNFFPSTRDSYIYGLFKNKFEMPSDIAKIFTDLVTVPCENGEGRYLPQGYPTSPILSFFAYLDMYEEIFEVVRANNMGFSCYYDDLTLSSNKFIAKSVKRRVTRIIRKYGFEVHPTKSRLVIKKYTKVTGVILKEDEIVAPKALLRKLHDTHNLMRLMDKDCVKHTKEDFIDVCNKVQGLISAIKSINDQKKLDIYINTLTHIRKKYNVPYRKANIATSFNTDYGRLIGVSI

SEQ ID NO: 3371 - protein, 341 aa, unidentified
  source 1..341: note = Related to NZ_VNKI01000001.1; note = Peribacillus simplex
MDFSTSKLFGISNKKYVAELLNVEKVKLKNVSSEFVPYRFEQSVKGKKRVLYNPNDAHKAILKKIVRMISQLYLPGYTFGGIKGRNYIDNANVHRNNSYLLLVDIKNFFPSTRDSYIYDLFKNKFEMPPDIAKIFTDLVTVPCESGEGRYLPQGYPTSPILSFFSYLDMYEEILKVTLENNMLFSCYYDDLTLSSNKFIAKSVKRRVTRIIQKYGFEVHPTKSRLVIKRHTKVTGVILKENDIAAPKALLKKLHDTYNLLLSLDKNCTKYTKEEFVDVCNKLQGLISAIKSINDKKKLEMYHNTLSHIRKKYNVPYKRANISTSFETDYGKLIGTLPRHIS

SEQ ID NO: 3372 - protein, 402 aa, unidentified
  source 1..402: note = Related to NZ_JABEQQ010000001.1; note = Lentilactobacillus kribbianus
MKHAKHRKKQCLNDYYQALKEITIVKNLVYVVKAIQYLTILKIIIAIIFFTLQVIVKIISWVIPYLEIIYNFLSQVTSLFCCFQRGNVKMYWKSCRLYGVKSKRELSYLLKVPLESLKNIDENYISENFVYDGRELTNPSDKLKKVLERILGYLFMLRIPPYEYGGIKGRNAIQNVQRHVGHGFILRTDIRHFFPNTKYDNVFDLFRNKLNMSIDCATILTLLTTNVAVNASYRSLAQGYPTSPVLSLLSYLDLFNEISDYADEHKFTFTAYYDDLTLSSETFINKSHLRMIEHIIKKYGFDAHPQKTKLVKVSKVHSKIKITGVLLQKDGLYVPKKLYKGLYEYVQRLRSVLSGDVSISNEEKKTLIQQVRGCIAAIQVISDDESFQGYEDMARSLEKTII

SEQ ID NO: 3373 - protein, 332 aa, unidentified
  source 1..332: note = Related to CP024635.1; note = Levilactobacillus brevis
MIFFLKLHLFFVAFKEVRKVYWKSCPLYRVKSKRKLSYLLKVPVESFKNVDENYISENFEKDGRNLTNPSDKLKVVLERILDYLFMLKIPPYEYGGIKGRNAIQNVQRHVGHGFILRTDIRHFFPNTKYNNVFDFFRNKLDMSIDCATILSLLTTNIARNSDHRSLAQGYPTSPVLSLLAYLNLFNEISSYANEKGFTFTAYYDDLTLSSNDIISHSHLRMVKHIIEKYGFEAHPRKTKLVNVSKFQSKIKITGVLLQKDGLYVPKKLYKGLHESVNQLNLALNSRQGISNKEKKKLVEQVRGCIAAIHSINDDTVFQGYEDMARHLEKSIV

SEQ ID NO: 3374 - protein, 321 aa, unidentified
  source 1..321: note = Related to NZ_BOLL01000005.1; note = Levilactobacillus wangkuiensis
MYWKSCPLYGVESKRKLSYLLKVSLNSLRDVDLNYPSENFEEKGRNLTNPSPKLKTVLETILNYLFKLRIPQYEFGGIKGRNAVQNVQCHVGHGYILRTDIRHFFPNTNYNNVYDFFRNKMKMSIDCATIISLLTTNIAAGAQHRSLAQGYPTSPVLSLLVYLNLFDEIDYYARAHDFTFTAYYDDLTLSSTSIINKQHLRKVKHIIRKYGFEAHPKKTKLVIVTEIHSKIKITGVLLQKNGLYIPKKLYKKLHEAVSLIDPVLNGNLKYSDDDKKKLVEQVRGCIAAIEAISLENDFQGYRDQARHLEKTIDYEQLSENK

SEQ ID NO: 3375 - protein, 314 aa, unidentified
  source 1..314: note = Related to NZ_AP018405.1; note = Lactiplantibacillus plantarum
MQFTTCKLYGIQSKRKLSYILKTSLASLKNVDLSFQSKNFYQQNRLLTNPSEELKVILQRITKYLFTIGIPEYEFGGIKDRSFVTNVEMHVGHGFVLRTDIRHFFPNTHYGDVYVFFHEIMNMSVDCATIMAKLTTYRCNQNYRSLPQGYPTSPILSLFSYLNMFEEINTYAVKNGFTFTAYYDDITISSKRFIGRSHLRVIIHILKKYGFQAHPQKTKLVKISKNSSRIKITGLLLQKDETLVPKKLYKKLHVAMKNIDSALKQSNSRLNKADAKKIVQQARGCIAAINTIGSNDEFQGYSDQIRQLEKRCYY

SEQ ID NO: 3376 - protein, 420 aa, unidentified
  source 1..420: note = Related to NZ_NIBN01000001.1; note = Enterococcus sp.
MIKKHKIVQVKQWLKEKTCKDGKINFTKTCTFLAAIQVCLWLIEIICMLCGFIISTFVEIAPFLEAFFKILENLASTLSYNLRRSFFVDFYNSKLYGVSNKKYLSELLHLEKSTLKKIDKFYEVKPFLKKVNKKERLLYNPSMQHKIALKRIVKMLSFIGFPDYLCGGVPEVSYVTNASRHLEKNNLLLLDITNFFPSTKDSYVYDFFLNTLNQSTDIAKIMVNLTTAKSEDGDYRFLPQGYSTSPMLSFFAYHKMYERLNAFAEKNDLTFSAYYDDFTFSSKDFIPKYLMKEAIKIISDYGLSVNEKKTKLVKVNHTKITGVVVHKDKMSVPKGLFKKTYEHYLTLLDMDENTENYTQDNFIDTCNRMQGCLAAIQSVEPERNLEHYKNMIRYIRNKYDVPVERKKKDKYFKKKEVRQT

SEQ ID NO: 3377 - protein, 408 aa, unidentified
  source 1..408: note = Related to NZ_UARO01000001.1; note = Enterococcus faecium
MINKHKIVQVKQWLKEKTCKDGKLDFTKTIAFLAAIQVCVWLFKIICRICGFSISIFIEIAPFLEAFFKFLENLASTLSYIKEGVFFYGFYNTKLYGVSNKKYLSELLHLEKSTLKKVDTFYEVKPFLKNINGKERLLYNPSSQHKIALKRTVKMLSFIGFPDYLCGGIPEVSYVTNASRHLEKKNLLLLDITNFFPSTKDSYVYDFFKNTLNQSTDVAKIMVNLTTATNNSGNSRFLPQGYSTSPMLSFFAYHKMYDRLNTFAEKNNLTFSAYYDDFTFSSNEFIPKYCMKEAIKIINDYGLSVNENKTKLVKLNHTKITGIIVHEDKMSVPKGLFKKTFEHYLTLLDMDKYPEKYSQYNFIDTCNRMQGCLAAIQSVEPERNLDHYKNTIRYVRSKYNVPVNKKNK

SEQ ID NO: 3378 - protein, 323 aa, unidentified
  source 1..323: note = Related to NZ_MJEA01000001.1; note = Enterococcus villorum
MDFSNTKLHGVSNKKYLSELIHLELHTLKKVDQFYTVTPFVKNINDKERILYNPSLPHKIALKRIVKMLGYIGFPDYLCGGIPNVSYVSNASRHLMQKNLLLLDITNFFPSTSDSYVYDFFKNTLNQSTDIAKIMVNLTTAKNESNNVRFLPQGYSTSPILSFLSYFRMYEQLNDFALNNNLVFSAYYDDFTFSSNKFIPKYYLKETTKIINKYGLNVNERKSKIVKINHTKVTGVIIHDEKIKAAKGLFRKMYECYLTLLDVDVNNNFYSKDDLINTCNKMQGCLAAIQSIERDRNLEHYQNMIRYIRRKYDVPVSKKSINR

SEQ ID NO: 3379 - protein, 330 aa, unidentified
  source 1..330: note = Related to CP042216.2; note = Enterococcus faecalis
MDFAKSRLYGVSNKKYLSELLQLELKTLKDVDSNYEVEPFFKEVNGKIRELYNPSDAHKRALKNIVKRLSYIGFPHYIYGGIPLVGYVDNASRHLEKEYLLLLDITNFFPSTKDSYVYDFFHNTMSQPADIAKILTNLTTIKKDEERFLPQGFSTSPMLSFLSYHQMYEELDVFSKRNNFTFSAYYDDFTFSSDKFIHTSKRREAIAIIEKYGLQVNKKKTRLTICNHTRVTGVIIHGDTKKAPKKLHKKMYDYYRLLLDMDKDPTKYTQDEFIDTCNRLQGCIAAIQSIEKERNLEHYKNTLRYIRTKFDVPVEKKKKHLYFKNVQINN

SEQ ID NO: 3380 - protein, 332 aa, unidentified
  source 1..332: note = Related to JAAVMB010000016.1; note = Vagococcus fluvialis
MEFTKSKLFGISNKKYLSELLNVELKTIKDVDSNYKVEPFFKEVNGKNRELYNPSEVHKKVLKKIVKLLSCIEYPEYVYGGIPNVGYVDNASRHLEKEYLLLLDITNFFPSTKDSYVYNFFYNTMCQSSDIAKILTNLTTVKIENGDERFLPQGFSTSPILSFLAYHEMYEKLEGFAKNNKFTFSAYYDDFTFSSNKFIHANKRREAIAIIEKYGLQVNNKKTRLTICNYTRITGVIINGNIKKAPKKLHKKMYDCYRLLLNMDKCPEKFTQNEFIDTCNRFQGCIAAIQSIETERNLEHYKNTLRYIRTKFDVPIEKKKKHLYFNNILIAD

SEQ ID NO: 3381 - protein, 322 aa, unidentified
  source 1..322: note = Related to NZ_FQUF01000018.1; note = Atopostipes suicloacalis
MEFKEKFKQKIVQIKQWLDSLEAKADNYIWLQFILIIVRLCDFIKVISIIALVIKCFLRLSYILLPYLIEFIEFIETLASTFSYKRRSFFMDFTQSVLYGVSNKKYLSELLHLELKTLKNVDKYYTVYPFEKKTNGKTRELYNPSNEHKRALKRMTGMLNKIKFPSYLCGGIQNVSYVDNASRHLNKDYMLLLDIANFFPSTRDSYIYDFFYNSMSQPSDIAKILVNLVTAKVNNHRHLPQGYSTSPVLSFLSYHRMYQELYEYSLHNCFTFSAYYDDFTFSSNNFIHPNRRRDIIKIIEKYDFKVNSKKTKLVIGNHVSSP

SEQ ID NO: 3382 - protein, 315 aa, Streptococcus sp.
  source 1..315: note = Related to AZYV01000015.1
MDFKRSILFGVSNKKWLADLLKIEKYKLTNISSNFIGKSFFREVNGKTRELYNAGLIHKRVLRLIVKYLQKIDVPAYLHGGIPGRSYVTNVEMHCENNFAIIVDISDFFPSTSAQKVFDFFRYDMNQSPDIAKILTDLTTVTKYEKSFLPQGYPTSPILSYFAYYNMYETLMRYAQANDFIFSAYYDDLTFSSKKPIPKRCMNRIIKIIESHKLKINKSKSKIRRINNVKVTGCIIVNGELKAPRKLQKETYDLYMIIKNDVLSTNDLSRMLKKFIGKISAIQMIEKNRKFPNYMKLIKDKQAELEELRVEKAKA

SEQ ID NO: 3383 - protein, 316 aa, Streptococcus sp.
  source 1..316: note = Related to NCUA01000007.1; note = Streptococcus oralis
MDFSKSILYEISNKKWLAELLKIEKNMLSNVGDNFVGKSFMKDVNGKTRELYNAGTIHKRSLKLIVKYLQKINFPTYLHGGIPGRSYVTNVESHSKNKFAVIVDISNFFPSTNAQKVFNFFRYDMNQAPDIAKILTDLTTVSKDEHSFLPQGYPTSPILSFLAYYHMYENLMKYAQNNGLTFSAYYDDLTFSSKKPIPKICLKEIVNIIESFNLKVNKEKSKVSKLDYTKITGCVIVKGELKAPRKLQKETYDLYRYLKNSNLSDEELLSLLKKFAGKISAIQSIEKERQFPNYFKLIENMKSELEERRISELDWL

SEQ ID NO: 3384 - protein, 311 aa, Streptococcus sp.
  source 1..311: note = Related to RBKM01001915.1
MDFTRTILYGVSNKKWLSELLKIEKSKLKNIRNNFNTVPFVKKVNGKNRELYNAGKMHKLVLKRIVKYLQSIDIPNYIHGGITGKSYVTNVESHKKNRYGVIIDISNFFPSTDAQNVYNFFRFDMNQSTDIAKIMTDLTTVSKGNKSFLPQGFPTSPILSFLAYHKMYELLNNYAKVRDLTFSAYYDDLTFSSRKRISKRCLREIVSIIESNSLEINLIKSKVSKLNYTKITGCVIVGNELKAPNKLQKETHDLFLKIKNGNLSETELSILLKRFLGKISAIQMIEKNRKFPNYLKLIEDKKRELMSRRND

SEQ ID NO: 3385 - protein, 324 aa, unidentified
  source 1..324: note = Related to CP038012.1; note = Sporosarcina pasteurii
MYIQGGIFLFRESFLYELSNKKFLSEIIQVDLSVLKNLEDLLETEKWKPYKLENKKRDLYNPTVQHKRALKRLVRSLYSITYPTYLYGGIKNKSYIDNAAIHKNNKYFLIADIEKFFPSTHESYVYDFFRNKMQMSIDISRILTLLVTYQHEEDSYRYLPQGFPTSPLLSFLAYSDMFKELEQFAETNNLVFSAYYDDLTFSSASFISKHLKRELALILRRYGFNLSTEKTRFQKRKANNITGVIVTKDGLKSPYKLTKKLMRLSSDLDNNLKNSSLTKEEIIVQLRRIRGCIIAIQSVDPSRNLQVYEKQINEVKRVHDVTFS

SEQ ID NO: 3386 - protein, 385 aa, unidentified
  source 1..385: note = Related to JADMDV010000024.1; note = Enterococcus asini
MKTRNEVKKTRGKHRKQLAQFTLCNIVVNFLMDFKDVLESLRAVFRLVSFVVDSLQYWIDLLYSLLFYFCEVYKMNYSTSPLFEVSSKKRLSYLLKTDISKLKQADISFSAPYFSKMKGRKTRQFFNPTDTQRITINAIKNCLEQIEIPNYIYGGIKNRSYIANARVHENAKSLILIDLKNFFPSTSDSYVYDFFKNKLNQPADVARILTIITTESGDHGRFIPQGYSTSPLMSFLAYESMYQQLNNLANQQQLHFSAYFDDITFSSSKYINKAVERSAKKIVRSFGLQINQEKSRTLFNNASKLTGVVITPTQIQASGKLHKQMIDNFDLLLNSLYSNSKPSKKDLLNLCNKTQGCINSIKAIEENRDLSYYTNKVKEVRRLIK

SEQ ID NO: 3387 - protein, 315 aa, unidentified
  source 1..315: note = Related to NRPS01000012.1; note = Carnobacterium maltaromaticum
MILLKYTNSSLYGITTKKHLSYILKMNLGSLSNIEPLFCANSFSKKKNNKSREFYNPTLEQRAVLNRINVALCQIGAPNYAYGGIKGRSYIDNAKVHSGQKALFLIDISNFFPSTRDKYVYKFFKNKLAMSTDVATILTLVVTEKLFDSDKRFLPQGYPTSPLLSLFAYIEMFESINKIAINNDLKYTCYYDDLTLSSSSYIDKKILRQVKKEISSYDLKVNDFKTRALFNKASKLTGVVVSPEKIVAPGKLQLQMIDNFSKLMDAIYSGKMTTKIEINELCNKVQGCLASIKSIEPDRDLTYYVNKLKIIRQML

SEQ ID NO: 3388 - protein, 318 aa, unidentified
  source 1..318: note = Related to nan
MNYKNSNLYSVQSKAKLARLLNIDANKLRAVRENFSVDAFVVEINGKKRLLHNPSYCYKQILKRMLLLLYPIGAGDYVFGGIKNRDYIMNAKVHKNNTYFCLIDIKDFFPSTNSDFVYRFFRYKMNMSIDVAKICTLLTTVSNSETSRPDNLPQGFPTSPYLSYLSYLELFEQLNNISISKNMNFSCYYDDLTFSSPRFISKGTKRDIIKLINSYQLQVNSSKTRLLKNSNGVKVTGAVIRDNQLLTPNSLFLKLYKEYDNLLSEFYLNSFDQKKILNMCEVVDGILASVTRIELTENAEYIKNKVQIIRETSNATIS

SEQ ID NO: 3389 - protein, 318 aa, unidentified
  source 1..318: note = Related to NZ_MKXO01000001.1; note = Exiguobacterium aurantiacum
MNFEKSILYNVQSKKHLANLLRIDARKLKAVREYFSVEPFVAEINGKKRLLYNPSYFHKQLLKRMLLLLYPIGAANYVFGGIKNRDYIMNAEFHKNNKCFCLIDIKDFFPSTSSDFVYRFFRYKMNMSIDVAKICTLLTTASSRETNKLDYLPQGYPTSPYLSYLCYLEFFEQLNNISVSKNITFSCYYDDLTFSSQHFISKGTKRDIIKLIESYQFQVNKDKSRLLKNSNGVKVTGAVIRDHKLLIPNSMHLKLYKTYDKLLNDFYLSSFDQTNIVNMCDAVDGILASISRVESIENIKHIKNKVRIIREISNAITS

SEQ ID NO: 3390 - protein, 346 aa, unidentified
  source 1..346: note = Related to NZ_LFQN01000028.1; note = Exiguobacterium acetylicum
MSLQISLALAFIILLLEKEIENYMNFQNSILYGIKTKKELAKLLDINKKLLNDVNYHFSTKPFEANINGKKRMLYNPNDIHKEILKKLIELLSPIKAKEYVFGGIKNRSYIMNATLHKDSTFFCLIDIKDFFPSTKEKFVYNFFYNNLKMSSDVAKVCTLLTTEYDIQQRNRHLPQGYPSSPYLSYLCYFKLFEELNAISISKNLIFSCYYDDFTFSSKQSISIKTKREIMKCIKKYNLTVNTDKTKLVKNKNGIKITGVVIRNNDVIPPNKNLHKLYIGFKELKIKFENDFFEKDEVLKLCEKVKGLYEAVQKIKFNNDLTYMVSYIKDIKIFYEKNKSIKNKSD

SEQ ID NO: 3391 - protein, 317 aa, Bacillus sp.
  source 1..317: note = Related to NZ_WEIO01000005.1
MVDFKLSKLYGINNKKYLSELLKVELSKLKDIETHFSTTPFYQKNQKGKRRRLYNPHPDYKKVLQRLNIHLSRIVAPDYVLGGIKKRSYVMNANLHKENDYFLLLDLKDFFPSTRDNHVYYFFRNKLKMSQDIAKICTLLTTEPSEDRTFRHLPQGYSTSPYLSFLSYFDMYNGIKNISDNQNIIFSCYYDDLTFSSKKRISFKFKETISNIVADYHLTINKDKTRFYTKKRKVIKITGAIINKGQLLKAPNSLQKKMYIYFKELTQKTQQRPVEKEHIIKLCNKVIGCLTAIQHIEPKREFPHIRKKVKEIRKALR

SEQ ID NO: 3392 - protein, 315 aa, Bacillus sp.
  source 1..315: note = Related to NZ_CP021500.1; note = Bacillus atrophaeus
MNYSTSKLFGVTNKKYLSELLSIDINELKNIEEFYNTSPFTKIIKGKERTLYNPPFKYKKVLNKINIYLQQITPPSFVFGGIKGRSYVMNATLHKDHSNFLLLDLKDFFPSTRDFYVYNFFKNKLRMATDIAKICTLLTTVKLGLNTQERNLPQGFATSPYLSFLCYYDMYNSIYKISNHKQIVFSCYYDDLTFSSSSYISKGFKRNIVKVIKEYGLVVNDKKTRLLFNKHGIKITGAIVKDNSLLSPNNTQLKMYSHFEKLMVLYSTDPTKQQEILELCNKVNGLLIALKIVETNRDLGYIKNKVKEIRKTING

SEQ ID NO: 3393 - protein, 316 aa, unidentified
  source 1..316: note = Related to NZ_BMHE01000064.1; note = Paenibacillus marchantiophytorum
MLNIQLCKLKNLKSKKMLSLYLRIELYKLKDITKHYSTAPFEKEFDNGKKRMLYNPNKDYKQVLKRINLILQQIPIPNYVFGGIRERDYVQNATVHKDNNFYLLMDLKNFFPSTSDSYVYDFFKNKLGMSMDNAKIVTLLVTVPNEGNSGIRSLPQGFSTSPVLSYLSYSDMFEKIHDLAVSQGIKFSCYYDDLTFSSSNMIGKSFKNRVIEIVEQFNLKVNNKKTHLTRNINGTRITGTIVKNNTLFAPNKLQRKLTEKFNELEKMEQVDILNKREVIQLLCNTVQGCCSAIMSVERTRKFPHILRRVREIRRSV

SEQ ID NO: 3394 - protein, 314 aa, unidentified
  source 1..314: note = Related to NZ_CP010976.1; note = Paenibacillus sp.
MIDYTVCTLYGVKNKKYLSELLKIELFKLKEIEKYYITLPFSKKMGNNKIRLLYNPSKEYKDILKRLNYFLQKIVLPDYVFGGIKKRDYIQNASKHKDNKFFLIIDLKDFFPSTSDTYVYNFFKNKLNMSIDVAKICTLLVTEQSEINTRYLPQGYSTSPILSYLCYFEMFNSINSLSINNNITYSCYYDDNTFSSKNIIIKDFKNKIVEIIKSYNLQVNPKKTILLKNTKGVRITGTIVNNNILSAPNPLQGKMYINFNKLVNSDLTDMNEAKNIIKLCNIVQGCSSAIKSIERQRKFPHILKKVKEIRSLIK

SEQ ID NO: 3395 - protein, 317 aa, unidentified
  source 1..317: note = Related to JAHHWV010000004.1; note = Cytobacillus oceanisediminis
MEYQKCKLYGISNKKYLSELLHIDAFKLKDIDRHFSTDFYISKSRNKERHIYPPKPYYKKVLKRLNWYLSRIAVPDFVNGGIKNKSYIMNGLYHINSNHFLLLDIKNFYPSTSDYFVYRFFKNRLNMSTDIAKICTLLVTEPHPMHDNYRHLPQGYPTSSLLSFLAYSDMYIHLYNYAMLNNITFTCFVDDLTFSSDDYISKSFKRNINKIVRQYNLEINSGKTMHRRINKGINITGTYIKENKLFAPNRLQKDMSIAFSELCAAYEANPKDINQLKLLCNQLQGYIVNVKLIEEARSLDYMQNMITKVRRYIKNKA

SEQ ID NO: 3396 - protein, 319 aa, unidentified
  source 1..319: note = Related to NZ_LT985747.1; note = Paenibacillus sp.
MDINNCKLQNISNKKYFSELIRIPLSHLKNVRKYYTTVPFTQMTQKNKPRTLYNPSTEHKRILKSINRHLQKIIIPEYVIGGVKGKSYINNGEIHNGQSFFCLIDFTDFFPSTNEKYVYNFFRYKLNNSVDIAKILTLLVTETSPSTGVDILPQGYPTSPILSYLSYHGMFSKLKILADANNYKFSCYYDDVTFSSNTFINKNFKKQVIRVTSDYGLKVHPQKSGIYILKNGIRITGTIVRKEGLYAPNKLQLKMINQFKELEQKAKVSADHDEIISLINRVQGTVSAIKSIEKDRSFPHITRRLKEIRHSSKINNIAK

SEQ ID NO: 3397 - protein, 309 aa, unidentified
  source 1..309: note = Related to VWVR01000006.1; note = Exiguobacterium sp.
MDYSSCKLYKIETKKSLSYILQTPKSSLKNVNLCYYPKVNIFNKNTSSGKVRTFYNPTGEHKKALRNINRSLSVLPIPPYVIGGIKKQSIISNASKHMSSRFFLSMDIKDFFNHVPQKYIYSFFKNDLKMSIDSAKICTTLVTYEIDNHSILPQGYPTSPILSYLTNKKMFDKISQLSSQNNIIFSLYVDDLTFSSPNPISKKFENEVRKILNFYSYKVNSSKTKRQYITKPVLITGVIINNGELLPQIKHTKQMIDYIHNIKSRDLHEVNIDSWGKKIRGYYYYHQAFESYSGIKFPQIKNFLGNYKK

SEQ ID NO: 3398 - protein, 342 aa, unidentified
  source 1..342: note = Related to NZ_RAPK01000002.1; note = Sinobaca qinghaiensis
MFIDEKNSLANLQKKTKLAKILNCDVEYLKNFSDYSEVKSFDKRVGPKTRRLFNADPNHKKILRKINKLLLSMNIPDYVYGGRPNRDYLSNAFLHKKNPYIQTADIRSFFPSTHESYVYGFFKNKLLMSEDVSKILTDLTTYSSSESPHYPEKSLPQGFPTSTIMSYLAYFDMFNGIYKQCRDRNIHFSLFVDDMTFSSDVKIPKSFIRHINNIVTQYDLSLHPNKIRRFSVDQPKLVTGVIIDPKTNNFHIPNKLHKKIYTNIQNFHSLNVNTYTDYVNLKRIILSLKGQLASCSRIDQEKTFNHIIKVIQDVEIHFIVPSVKGATHRQLYEEYISFVSFR

SEQ ID NO: 3399 - protein, 338 aa, unidentified
  source 1..338: note = Related to NZ_FOHJ01000001.1; note = Salinibacillus kushneri
MLISQPHSLFELHNKRRLASLLKTDVENFNRIEERYTVYPFKKKVGKKVRTLFNTDQHYKSLLRRLNKMLCKTNIPDYVYAGIPKRDFLDNALIHRQKPYIQTADIQNFFPSTRDSYVYGLLLHKFHTSPDVAKIITQLTTYPLDSKTALRHIPQGFPTSTILSFLSYFDLFNGIYNLCKQNDIHFTLFVDDMTFSSHKRIPKSFLRHINSIVKKYDLQLHPSKIHRMNPYNYKTVTGVVIDPCTGLLKAPNKLQRKMFNNFKAIHNYSINTFNDYIQFKQLVLKLEGQLKSINRIEPNRQMPYITTVVKDIKRNFITHSVKGSSRDVLKSEYEFFVK

SEQ ID NO: 3400 - protein, 421 aa, unidentified
  source 1..421: note = Related to NZ_JAEUZA010000002.1; note = Alkalihalobacillus gibsonii
MDDKSIGRDRNHYLETRPSRKEKHGRKKTKLRSVLIDVFIRTLLSRLFTEVFNIVSRFVLRIIDMISNLLYQKNKVIFMRIPENHAFYQLKSKKRLAAILGIDSPAFFKHLDLHFTCTEFSLTKNNKTRTLLNPSKQYKRILRKINQLLQGINFPTYLHSGVKQKNALSNACYHNSHSHICTMDIKNFFPSTSEAFVYKFFKDKFKMSEDVAKIMTLLVTYKNENEVARLPQGFPTSSILSYLVYFDFFNGVNALAHSRNMKFSIYVDDLTFSSNRAFTPSFLNRIVTIAQQYELTIHPDKTQFYNRHAHKKITGVILKQETVRAPLFIHKQINQHYLDILDCDLLTFSNFIKFKQKVIKTLGQIQYVRSIEGTHKYISIERNLNDFKEHFSVLSVKDKYRIQLKQEYKHFQGMFTHSIIF

SEQ ID NO: 3401 - protein, 350 aa, unidentified
  source 1..350: note = Related to JAFWLO010000012.1; note = Candidatus Saccharibacteria bacterium
MLNQGYPKLNLYTKKQLADAIRGKDLSFDSAMKLIDDCLINKDKYWSDNSEESKSNENKWVRNASGTPLGKLQKRIDQKVLALHDSELPIFIYGGVGKKGIKNAVIALQGKRNKRTLLKLDMSHFFEHISYGDVIKILVCHCGCGKDVAHIIAEIACIQSGKKSSNNTNEKVLARGFSTSSRLAVWRNLSLFRSLFYCMAKRLNKHDPRIAVYMDDIGITASRIDPVSLSSLYKDITKLIENSSKLVVNKNKTKIIDYLQHEYDVTDGHLLEDKIAQFEFLGIGIGRNRLYPGVKIRSKMAKLIKKSHLSDEELRTLKGQKRYVKFITGKKLGLPPNDASLNRKGLLWQN

SEQ ID NO: 3402 - protein, 331 aa, unidentified
  source 1..331: note = Related to JAFUEB010000001.1; note = Candidatus Saccharibacteria bacterium
MINQGYPKLNLYTRKQLANAIRDKDLSFDAAMKLIDDCLINKDKYWSDNPKESKQDDDKWVRNASGTPLGKLQKRINQKVLAPHDSELPIFIYGGVGKKGIKNAAIALQGKNNKRTLLKVDMRRFFEHITYEDIVRTLVCHCNCGKDVAQIIAEIACVRMGKKSLDNTNEKVLARGFSTSSRLAVWCNLILFRKLFYCISKRLKGHDPRIAVYMDDIGITASRVDPAMLSSLYKDIVNLIENTSKLEVNKNKTRIIDYLQREYDIIDGHLLEDKTAQFEFLGIGIGRSRLYPGVKTRSKMAKLIKKPNSSDEERRTLKGQKQYVKYITSKN

SEQ ID NO: 3403 - protein, 333 aa, unidentified
  source 1..333: note = Related to JAFWIP010000002.1; note = Candidatus Saccharibacteria bacterium
MNMINYPNFNIRSKNEIAKRISSRKLPQSEALALINDCLVDFDSLWVDNLKMSEPGKKKWVRDASRTKLGNLLSLIDKRIFAPYDTKLPSFIHGGVAGKGVKSAASSLLGKRRKRMLLKVDMSRFFEHVSSERLKYALIHKLGFSREAALIICKLCCVDAGPKNGLEKGKTIARGFATSNRLAIWCNLELFYRIKWLTEKRLGRYDARLAIYVDDIGITASRIPPKTMANFYSGLIVLVNKYGNGLEINHGKTRIINYLGNQFSVNGEPAVDNGGSPVKGSYEVLGIRMERNRVTAGRRTIGKIQSLKSRKSLTIPQKKSLKGLEKYKRYIGS

SEQ ID NO: 3404 - protein, 334 aa, unidentified
  source 1..334: note = Related to JABZTB010000283.1; note = Prevotella nanceiensis
MKKKDNPLIPINIRSKNELAKRISNKYLSVKDALTLINEVKNNFDDLWKDNLKDSKPEENKWVRNAKGTKLGTLLSLINKRLFAPYDNYLPCNIFGGVSGKNTKSATLHLLGNKRKRTLLKMDLHRFFEQNDYEKVLDFFHKKAGCSLRMSHFFATICCVPLGQKGTLGTKRVIARGFSTSPRLAIWCNLQIFKQIDRKSRSMLKGFDPRVSFYVDDIGITASRVNLKKMTDVFHCVKSLLDGSGNYRLELNTKKCFIVDYLNNTYDTNGEYIGKGHFEHLGNELMRNYVTPGIKTMSKLRSDEAKLKALSGQKYKRCLNSIRARKRYVHYTKS

SEQ ID NO: 3405 - protein, 334 aa, unidentified
  source 1..334: note = Related to SHNI01000007.1; note = Candidatus Saccharibacteria bacterium
MALKPNNYPAIRIRSKNELAKQISSIKRNPSSSLKLINDVVGNYDNYWKDHPKLSQPEKGKWVRDSSRTNLGKLLRDIDKHVLRPHDNLVPKFIFGGLTGLNHKAAVLHLLGRRRNRTILKLDITKFFEQISQERVYHLFYSKCECSKVASNLLASLCCVPYGPKEKPEDYNTIARGYPTSPRLAVWCNLDTFIKIERVVTRELKGKDPRIAIYVDDIAITASNVSIEDMMKLYPKIKDILENGDKNQKLPLNHAKTKIVKHSGETYDIEGEYQGKWAFEHLGLQMNRNSVTLGTKTRRKLRNTNQDFKKSGRKDRIIRRKRKSLLLYKSYIEK

SEQ ID NO: 3406 - protein, 333 aa, unidentified
  source 1..333: note = Related to CP040000.1; note = Candidatus Saccharibacteria bacterium oral taxon 488
MKNNQRNYPKIAIRSKRELAKRLSDKRDSVEDMARLISDVKTNYDNYWTDHPTQSQPEKGKWVRDASRTDLGKLLKLINVKVLAPHDSLIPTFVFGGVSGRNHKVAVTHLLGVKRKRIILKLDVSRFFEQIKYERVYSFFLAKGRCGQRGARLLADLCCVPIGAKDNPGTYKTIARGFSTSSRLAVWCNLDTFLRLERLVKKELQGKDPRIAIYVDDIAITASGITKEDMMKLYPKIKTILESDKNQKLPLNDAKTKIIYHSGDEYDIDGIYQGKRGFEHLGLQMNRNSLTLGTKTRWKLANLTHRYKESRRRNTTIRKKRKSTLRYKEYVER

SEQ ID NO: 3407 - protein, 325 aa, unidentified
  source 1..325: note = Related to JAAXVH010000004.1; note = Candidatus Yonathbacteria bacterium
MTVRRYPKLNIRSKNELAKHLSTKKISKESRLALINDVLTNFDTYWKDNLHESKPQERKYVRNAKHTHLDKLLRAINEQVLSPHDNLLPEFIFGGIKGKNHIKAAGHLLGEKRNRTLIKLDIQTFFEKIDDKRVYYFFKNKCGCSSKASRILANLCCIPEGPKDKPGTKKVLARGFATSSRLAIWCNLDTFLKLDWMIKKELKGYDSRIAIYVDDIGITASRVGKQKILNLEQKIEMILCSDKNAELPLNKEKTRVIPHQEGMEHLGIILRRNKLSLGKKTRSKLEETKKRISRAKDKDKVKKIKTQKRSLMSYKRSVETYKPAK

SEQ ID NO: 3408 - protein, 323 aa, unidentified
  source 1..323: note = Related to JADLDS010000026.1; note = Chitinophagaceae bacterium
MKHEDGYPKLCIRSKNELAKHISHKGFLPDEALALINNVKSNFNDYWKDSKKASKPQNDKYVRNAKGSPLGKLLRKIDRLVLTPHDSLLPNFIFGGVKGKNHAMAAYNLLGNKRRRRLLKIDISRFYERVELHRVINFFQYKCGCQYRAAKLLAEFCSVPFGAKDSKNPRITIARGFATSSRLAIWCNLGVFKKMERLVMRRLKGHDPRISVYVDDIGITSSGVTKEQMENLRDEVIQLLQTHDKNQPLPVNKKKTAIQSHEEGLYILGIKLNRNNLTIGRKTHSRIHNFKHKLKVSKAKKERDKLKQLIRGISRYKNYVENM

SEQ ID NO: 3409 - protein, 328 aa, unidentified
  source 1..328: note = Related to PFPL01000018.1; note = Candidatus Magasanikbacteria bacterium CG_4_10_14_0_2_um_filter_33_14
MLNKTYPKINIRSKCELSKRISHKKLPRQDALTLINDVKNNFEKYWKDNISKSKPEKNKYVRNAKRTPLGKLLKIINSKILAPHDNIVPNFIFGGPKGRDHVKAAYSLLGTYKKRTLLKADLQGFFEQIDEKNVIDFFLKCDCDYKTAKFLGYICCVFDGQKGSNSKKRVLARGFSTSSRLAVWCNLDVFIELDRLVKKRLKGYDPRLAIFVDDIGITASRVPIDLMDNLYKEIKELFEGKKQKQPLILNDKKKDIKQHFEGMEILGSFLYRNKLKLGKKSFSNKQKIKSLLKEKNVTNMKKIKNKYRSIKQYEKYVEMQGKQKNKIL

SEQ ID NO: 3410 - protein, 320 aa, unidentified
  source 1..320: note = Related to LCFU01000010.1; note = Parcubacteria group bacterium GW2011_GWA2_43_17
MQNRRYPKIFIRSKSEFAKHISHKNFTKEDALKLINDVKINFEKYWKDSKRSDPKKEKYVRNAKGTPLGMLLKKINSLILAPHDKILPNFIFGGLKDLNHAKAAKHLLGNKRKRTLLKLDIKHFFEQIGLGRVFIFFQNKCGCSKKASKLLSSLCCVSLGPKGSNNPIKTIARGFATSSRLAVWCNLDIFIALNKLIQKRLKGHDPRIAIYVDDIGITASRINKETMEKLYIEIKKLFYSFDKNQLLPLHDIKDKGGIITHNENMQILGLQLNRNTLSIGSKTRSKKNKLMNKLKISTDKKILKNKYMSLIRYKNYIESL

SEQ ID NO: 3411 - protein, 308 aa, unidentified
  source 1..308: note = Related to MFKM01000024.1; note = Candidatus Jorgensenbacteria bacterium RIFCSPLOWO2_12_FULL_42_11
MQTSRYPKLYIRSKNELVKHLSHSKFPKKEVLALINDVLNNFTRYWRDNEYRSEPEKEKYVRSAKRTPLGRLLDNINKAVLAPHDKMIPDFIFGGVKNMNHAKAAKYLLGKKRKRTSLKLDITRFFEQISEERVYHFFRDKCACSKKAAALLASFCCVPEGPKGNASERKTIARGFATSSRLAVWCNLDTFIKLDRLIKKRLKGNDPRVAIYVDDIGITASRVSKEEMGKLSLEVESLLLNTDRNQKLPINKRKTKISSHEEGIEHLGLRLYRNRLSIGAKTKSKIDRIRNRSERKPLIRYKHYIEKI

SEQ ID NO: 3412 - protein, 321 aa, unidentified
  source 1..321: note = Related to DMVZ01000029.1; note = Candidatus Moranbacteria bacterium
MQSRRYPKLFIRSKNELAKHISHENFPKEKALVLINDVIANFDFYWKDSVHSDPLKEKFIRNAKHTKLGLLLRKLNTLVLAPHDKLLPKFIYGGVKEMSHAKAAKNLLGSKRKRILLKMDLKKFFEQVSSERVAYFFQNKCECSKKTSEMLSCLCCVPIGPKNNGASKKAIARGFSTSPRLAAWCNLDIFIKLERLIQKRLSGHDPKISVYVDDIGITASRLPREVMEKLRDEVSSFLLTADSKQQLEINQDKTIITSHEEGMEYVGARLYRNKLGLGKKAKSKRDQTKNKLKKNSDPKVRESLRRKLNGMNHHKKYIETT

SEQ ID NO: 3413 - protein, 322 aa, unidentified
  source 1..322: note = Related to JAHKLX010000106.1; note = Candidatus Micrarchaeota archaeon
MSNRYPQLGLRSKNEIAKRICSKKLSQNEALELINDVIKNFDDYWKDSKESEPRKQKYIRSAAGNPLNKLLKAIDAKILQPHDHLVPNFIFGGLKGTSHIDAAYSLIGRQNARTILKMDIKRFYKQITRERVFFLFYRKCGCSVKAANLLADLSCVPVGKKGSGSTKKTIARGFPTSSRLAIWTNLDTFLRLQWEVSRLLRKHDPKVVVFVDDIGVSASRVSGKLFKHVKHVAQTILAAYDENQPLPVNKRKTQVIPFSDGAEHLGLLLGRNKISIGRKTKSKMARVKNKIASAVGLERKSLLKKRSSYYSYKKQIKKAYDN

SEQ ID NO: 3414 - protein, 321 aa, unidentified
  source 1..321: note = Related to JAACWQ010000004.1; note = Candidatus Pacebacteria bacterium
MANIYPQISIRSKNELAKQISSVKLPFEGALSLINNVIENYDTYWKDSKKSEPQKRKYVRTAVGTPLDTLLKAIDKKLLQTHDKLIPGFIFGGVKGKSHIAAAYHLVGNRNKRILLKMDISRFFEKITRERVFYFFNKKCNCSVKASNLLADLCCVPKGKKGSTDPTKTIARGFPTSSRLAIWTNLETFLKLRHTVTKKLKNHDPQTVIFVDDIGISASRTSKESLDEIRKSVQKILLSHDRNQPLPANKGKTKIIPFSEGAEHLGLLLGRNKISIGRKTKSRMATIRSLVGKSRGETKKSLIKREASYYRYKKQIEETII

SEQ ID NO: 3415 - protein, 326 aa, unidentified
  source 1..326: note = Related to DOZC01000042.1; note = Candidatus Pacebacteria bacterium
MQTNSRYPIINIGSKNELAKRLSSKNFSKDKSLELINNVLANFDKYWYDSKKSDPEKQKFFRSSVGTPLHKLLKLINAKILKVYDKSLPEFIFGGVSDRNHILAARELIGNKNDRTLLKIDVSRFFEQITMQRIVRFFHQKCNCSLRASYLLASLCCVPGGQKDSSANMQKYLARGFPTSSRLAVWTNLDTFLRLKWETNKRLKNHDPKIVIFVDDIGVSASRVDIKTINCLKESLIGLLESYDINQPLPVNHKKTEIIAFKNGAEHLGMRLGKNKISIGRKTISNKSKLNNSIKTSDGLGKSLLLKKKAAYYQYLKQIEQVNDMA

SEQ ID NO: 3416 - protein, 323 aa, unidentified
  source 1..323: note = Related to PFOQ01000006.1; note = Candidatus Pacebacteria bacterium CG_4_10_14_0_2_um_filter_40_20
MKKNNYPQFGIRSKNELAKRISSKSLPANEALILINDVLENHEGYWKDSKMSEPEKGKYVRSCVGTPLHRLLNLIDKRILRPYDKLAPHFIFGGLSKKNHIQAAHYLIGSKKRRSLIKLDIKRFYEQITQERIFYFFYKKAGCSVRASRLLAYICCVTQGAKGNPGVQRVLARGFSTSSRLAVWANLDTFLKLRWKLQAELGKNDPKIAVYVDDIGISVADVSQTKLEEIALMMAEILESSDANQPLPINNEKLDIMSFEKNAEHLGLRLGRKAIFMGNKIMSKIRKIKNDYQRAENNTKFKLMSKRIAYRLYQKQIDKQNEQ

SEQ ID NO: 3417 - protein, 323 aa, unidentified
  source 1..323: note = Related to JAHIUG010000089.1; note = Patescibacteria group bacterium
MFEQLRYPKIGIRSTCELAKRISDSYLPYDKALLLINNVILHFDEYWHDSKSSQPKKEKYVRSAVGNQLGELLRRIDRKILAPHDGKLPEFIFGGLSGRDHIQAGKRLLGKKRKRVLLGLDITRFFEQIKESRISYFFHKKCGCSLEASTLLARICCVPLGPKGGSSTNRVLARGFATSTRLAVWCNLDTFLRMSWKAKRLLRHHDPKVMTFVDDIGITASRVSHEEMKEIEKKVISILSHFDKNQPLPINPTKTKICSFSNGAQILGLGMGKRLSVGARSRSRISKTRLALKLATSPLEKRYLLQKKRGQDSYRRQVAQASD

SEQ ID NO: 3418 - protein, 325 aa, unidentified
  source 1..325: note = Related to VMFR01000001.1; note = Parcubacteria group bacterium Gr01-1014_31
MFSRPRYPRLRIGSKNELAKTISDSALPYPQALTLINDVIRNFDYYWRDNSENSQPNRGKFVRSAARTPLGVLLERIDKKVLAPHDRLVPNYIFGGMTGRSHIQAARSLLGQERGRILASLDITHFFEQIREQRVFFFFYRKCGCSPRASRLLASLCCVPVGQKGSMSTEKTLARGFATSTRLAVWCNLDTFIHLDREVKKLLKKYDPRVAIFIDDIGISASRVSQEKISAVVKIVEKILSDFDNNQRLPVNPAKTKIRTYASGAEHLGLKLGRNKLAMGSKSRSRRDSVINLLKKRGAYSPTRARRLLLKKQAYQRYQGQIRSA

SEQ ID NO: 3419 - protein, 328 aa, unidentified
  source 1..328: note = Related to PFMK01000011.1; note = Candidatus Gottesmanbacteria bacterium CG_4_10_14_0_8_um_filter_37_24
MQNNGRYPRINLRSKNELAKRISDKSFSFQSSLKLINDVLKNYNDYWYDSRQSQPEKGKFVRSSVGKPLGKLLKRINRKVLIPYDKLVPNFIFGGISKKDHIQAAYSLLGKQKNRMLLGLDISTFFEQIRKERVFYFFHAKCGCSARVSRILASVCCVPAGKKGSGSKVEVLARGFSTSSRLSVWTNLDTFLRLKWVTDRNLRNHDSKIVIFVDDIGISASRVTKNNLEILSRKIQAILSDFDRNQKLPINNKKTKIRSFTEGVEHLGLRLGRNKITAGYKTKKKLDKIKTEIKSSSGLNKKDLINKVKAYYVYKKQIKNVYSNSSNV

SEQ ID NO: 3420 - protein, 329 aa, unidentified
  source 1..329: note = Related to PFPK01000038.1; note = Candidatus Magasanikbacteria bacterium CG_4_10_14_0_2_um_filter_37_12
MPLEKRYPTINLRSKNEIAKRITDNKLPFKESIKLLNRVINNHSELWHDVISFSEPSKGKYVRSAKNTPLGKLLSLFDKKILRPHDKLIPKFIFGGVSGGSHVQASYHLLGICKKRTKLGLDITKFFEHNSEQRVFYFFHKKCNCSVQASKILSKLCCVPLGAKGSNNSKTLARGFATSTRLAVWCNLDLFLRIYWEAKKTLKYKDVKIAVFIDDIGISASRVDKRTMEDLSLKIRDILENYDKNQCLPLNNKKTEVKSYLDGEIEHLGLILGNKKLSFGRKTRKKLSDLKKDLDNKQIKGKQRKSLYTAKKSYYSYKKYIKNPIDDKK

SEQ ID NO: 3421 - protein, 326 aa, unidentified
  source 1..326: note = Related to JACROC010000008.1; note = Candidatus Harrisonbacteria bacterium
MRKEARYPKINILSKNELAKHISGSKLRFSDALKLINNAADNFNNQWYDSEHSEPEKEKFVRSAVGTCLGKLLELIDKKVLAPHDNLVPDFIFGGVSSKNHIQAAHHLLGNKRERVLLRLDIKRFFEQIHEDRVFNFFYAKCRCSARASRLIARLCCVPLGPKGQGSATKSLARGFATSPRLSLWCNLDLFLRLSWMVKKELRGHDPKIAIYVDDIGVTASRVSLERMEEISRIAENILENFDSNQKLPINPSKKEILSNVDGMEHLGLRFGRNKLSFGGKTRFNLNKIYSKLKSPLSKSEKLRLLNQLRSYQRYKQQIVKTSNAI

SEQ ID NO: 3422 - protein, 323 aa, unidentified
  source 1..323: note = Related to JACQFD010000021.1; note = Planctomycetes bacterium
MLKDRRYPVIALRSKNELAKRISGKDLPYPDALALINDVLQNFDAYWYDSDRSEPKKEKYVRSAIGKPLGKLLKLIDRKILAPHDSKVPGFIFGGLSGKNHIQAAYHLLGEKRKRTLLRLDIKGFFEQIHEERVFHLFNKKFGCSVEAAQLIARLCCVAVGPKNSGSTKKTLARGFATSPRLALWCNLDLFLRLQWKMKRVLRHHDPRITIFVDDIGVTASRIEEDQMRKFSTELENILAHHDPNQSLRINPQKKEILTAGMHKEHLGLQLGRNRLSIGKKTRFKRNEIAKALKQPQSEADKKALLKKRHSYFAYQEQIKNIS

SEQ ID NO: 3423 - protein, 325 aa, unidentified
  source 1..325: note = Related to MFAQ01000041.1; note = Candidatus Collierbacteria bacterium RIFOXYD1_FULL_40_9
MSDLRYPQINLESKNELAKRISDRYLPYSESLKLINDCLENLDHYWYDSRASEPEKEKFVRSARGKPLAELLKRINLAVLAPYDRLVPDFIFGGLSYRNHVQAAANLLGFQKKRTLLKLDISRFFERIGDGRIFHFFNKKCGCSVRASRLLSKICCVPKGPKGSGEVSKTLARGFATSPRLAVWANLDIFLKIDLTVHKMLRGHDPRLVVFVDDIGISASRVEMSKMQEVKEKVIDILQNYDPNQTLPVNQDKTKVIPFQKIPEHLGIKLGRNKLSPGKKTQLRMKNVSLLLGEAKSKKERDRLMIKKQAYRQYKRQLSSVNIPK

SEQ ID NO: 3424 - protein, 334 aa, unidentified
  source 1..334: note = Related to JAGOON010000014.1; note = Candidatus Pacebacteria bacterium
MGKQYTHKHPKLNLRTEKDLLRFLNAAKTVKTKNKTLKKQVTSKDLHFLSENAHLEWSDHPTESNPIKKKYVRFVKPGSSLNITNRRLNAALKLTLDKKVPGIFYGSVSKKSHIQAAEVLCNGKNTTIISLDITRFFESISPSRVARFFGKAGCSPEIIKVLVDITCVPLGSKNEPLSDYSLARGFPTSPRLALWATYEIFVKLNRVLLKNFPHLSPKMVIFVDDVGISIKNATIIDVEAIKETAFSIIENDKNGINLEVHKKPPKLKVRHISQTAEHLGLVIGKKSLAPGFKTRVKIGDVKTKLSDKSLSKTERETALQHKRGLMNYKRSVRP

SEQ ID NO: 3425 - protein, 335 aa, unidentified
  source 1..335: note = Related to JAGQLY010000031.1; note = Candidatus Kaiserbacteria bacterium
MRKQFAHKHPKLNLRTEKDLLRFLNASKEIKTKRGTLKRPVLFKDLTYLYEEPRLDWSDHPTESDSTKEKYVRSIKPGSILNTANRRLNEALRRTLDEQASQIFYGSVSKKSHIQAAGSLCNGKNTTIVSLDITRFFESISSDRVARFFCKAGCSPEIAKKLVAVTCVPVGPKEKPEEKYSLARGFPTSPRLALWSTFEIFVKLNRVLQKKFAHLSPKIVVFVDDIGISLKNATGEDIQAVKEIAFSVIESDTKDLSLKVHKNPPKLKIQHISENPEHLGLVIGKKNLSLGFKTRSKIGDVKVRLSDRTLSQEDRYKALQNKRGLMNYKRSITRP

SEQ ID NO: 3426 - protein, 335 aa, unidentified
  source 1..335: note = Related to nan
MRKHYTHKHPKLNLRTEKDLLHFLNARKTVKLKGKTVRRQVATKDLSYLDKNSRSDWNDHPSESKPENGKYVRYIKQGSTLDISNRRLNAALKQTLDKKVPSIFYGSVSKKSHIQASRALCNGKSTVIISLDVTRFFESVSLARIFRFFRKAGCSTEIADILVELTCVPLGAKEHPQSGFSIARGFPTSPRLALWATFEIFVKLNRILQKRYGHLSPKLVVFVDDVGISLKNSTPEEIEEIKALSFETIESDKNGIHLVVHKEAPKLKVQSIDQNAEHLGLVIGKNSLSPSFETRHKIGYVKAQLSKQTLSTENRDRARKNKRGLMNYKRSVSNG

SEQ ID NO: 3427 - protein, 343 aa, unidentified
  source 1..343: note = Related to MFLF01000011.1; note = Candidatus Kaiserbacteria bacterium RIFCSPHIGHO2_02_FULL_50_50
MKKNYTHTHPKINLRTEKDLLLFLNAKATKDRRYKIPRKLVSQKDVAYIRQNVHLDWKDYAYGGDSLKFESAAEKGKMTRSIKQNSCLDVVNRRLNASFRRVLDKHVPDVFYGSVSGRTHILAAKELTNGKKTVFLSFDIQKFFESISSNRVQRFFVKAGCTKEIADFLVSITCVPLGVKGLQKDKLSLARGFPTSPRLALWCTFEIFSKLNRILQKSFSHLFPKIVLYVDDIGISLKNPSEDEIVQIRDLVFELIESDKNGLSLTVHRDPPKFRVQKVEGRAEHLGVAIGKSKIAVGSKTVRNIAIVKNQLLSTNDKDERGRVLQKKRGLMNYRKTVTKNNL

SEQ ID NO: 3428 - protein, 319 aa, unidentified
  source 1..319: note = Related to AMFJ01028863.1; note = bacterium (gcode 4)
MCKLNIYSLKTLSERSWISRDFLLSCSDGSGRFRKKFFSDHKNSKITDDITTCKYIRVVKYGSQMQKFHKWINWELKRFDSKLPLTIYGWVEEKSTIDAISIHIRGVPFVFIKSDLSRFFESIPKEQIFSLFCGKFNCDKIVAEVISNSITFPQWPLGSKGELFLARWLHVSSRIAVWSALNFFKDLCYFFQKKYKKYKPKISYYVDDIGISLVTTDQIIIDEFMADLVWFVWQIHKNSDFLNLHPDKTNCTIIKDNNDFVEYLWGKIYMNRKDISNKTTEKTKQLYFLYKKAKTIEEKNFYAKRLTPLRSYKKRMRSS

SEQ ID NO: 3429 - protein, 302 aa, unidentified
  source 1..302: note = Related to NC_016816.1; note = Pantoea ananatis
MTKQHKIGLVKVLEIVTTILAFINESWTFVEKVLSLFNIVPNYMNSSMKPASDWLHKFEIKENRWVFIPNEDTLTLGRKIHKYIKSKWKFPLYMFHLRDGGHVAAANYHIENTYFCLIDISDFFGATSQSRITRELNKFIPYDRAREIAKLSTVKNLNSNGLKKVLPYGYPQSPILASFCFRQSYCGKVIHTLSKSGNISISVYMDDILLSSDDIEQLVYAFNSIKTALKKSGYTVNEAKTQSPSTSVNVFNLVLSKNLLKVSSIRIVEFLQAYISSQNPAEKKGIASYVGSVNKTQAKLFQ

SEQ ID NO: 3430 - protein, 302 aa, unidentified
  source 1..302: note = Related to CABFWX010000001.1; note = Klebsiella pneumoniae
MTKQHKIGLVKVLETTTVVLAFINESWTFVEKVLSLFNIVPNYMTLSMSTPSDWLHKFEIKTERWVFVPSKKTLERGRQIHAYIKQKWKYPRYMFHLRNGGHVAAANFHLKSNYFSLIDVSDFYGATSQSRVTRELGRLVPYVKARQIARLSTVANPNRNGFKHVIPYGYPQSPILASLCFHHSFCGGVISSISKSERVFVSVYMDDILLSSDDMNLLVEAFDTVRQALRKSGYKVNENKTQSPSPKIQVFNLELGHNHLRVTPKRIVEFLKVFISSANEHERKGIASYVGSINKSQAKLFR

SEQ ID NO: 3431 - protein, 309 aa, unidentified
  source 1..309: note = Related to CP028949.1; note = Serratia marcescens
MKKFKLGLVKVLWGVYALYHFLKDFVPFLNESISLFEKLLSYFNIALNYLFLRRFFLMVKWESKFEIKKDRWVYVPTDEVRLYGEKLHNYLRKRWVPPLYFYHLRDGGHVACAKKHLANEYFALIDIKNFFESTGQSRVTREIKNYFKYNDAREIAKLSTVRNPLPVGPKYIIPYGFPQSPILSTLCLHKSYCGGLFKKIDSSFGIDISIYMDDIIISGNDLELCNLNYKLLCDGLIRSGYEVNENKSQAPSKSIRAFNLELKKDSLRVLSSRVIEFLVAYIKSDNPHVRKGIASYVGSINAEQAKLFR

SEQ ID NO: 3432 - protein, 312 aa, unidentified
  source 1..312: note = Related to NZ_LT629693.1; note = Bradyrhizobium ottawaense
MRKGALRRIPRGFTAIPAKWRWGRFHLAPIVIFLENMRNVARSFLKDGTRYFVLTKSYAGWRTFSEGGRAAYDGEEEWRLLKERVFSHWQPNAAFTAFAKRAHVAALRPHLVNKCFAVIDLKGFFDHVTRTKVCRALEAIGLARSSAFKIAGESTIRQGDKCTLPRGFRQSSLLATLVLEKSLFGSALTGNRFESKVTVYSDDIIFSSNDFETLADEHSQAIALLRRSHFAINPTKTQTARAEVDIFNLRMSHRTLRFTDERMWKFLEQAASFVKGEDAEHKLHLYEKLFGDYIRSINPEQEKRLRTSLGLP

SEQ ID NO: 3433 - protein, 310 aa, unidentified
  source 1..310: note = Related to PFDU01000094.1; note = Candidatus Peregrinibacteria bacterium CG10_big_fil_rev_8_21_14_0_10_54_7
MPKGLNFQRKSDIVKRLGIEPKVLEEILYDKEKLFYVEEEIIKGKTRDFHKCRGSLYGFLPQLNKAIMSLDALPPELCGGVRGKSIFKSASQHQKKKFVLKLDLKDFFHSVKPYQVQAVFERLGCTPSMSKLLTYTCTANNHLPQGFSTSPILAAHVLAPFVEDMRALLRPHHLSFTIWVDDITISGYTNPVRLLPTIRSICKKHKVHLNEKKRKLLRAGKQTQEVTGVRISYDKLSTGATFFRDTERMVYVLKKFGWHEVKKKFAFNVTDKRKVIQKIKGRINHIRQANAHQAGKLDTALRDTLEVQAH

SEQ ID NO: 3434 - protein, 319 aa, unidentified
  source 1..319: note = Related to MFXY01000035.1; note = Candidatus Peribacteria bacterium RIFCSPHIGHO2_12_FULL_54_10
MNDTRLNLRSENDVVNRLHLRDKKFLQTLCENRDRYFQKRMLNTGTKEREICIPHDPLGHFLRKFNAVLRTLPVPPECYGGVPGRSVKDNASKHTNKRFVMNLDIQNFFPSVTANQVFEVLRRHGCYRETSELLTKLVMIDNRLPQGFNTSPLLSIQVLTPIIEELRPLLSEQDATFTVWIDDIAISSDKSPEPLVKRIAEKCRRHGFRLNTDKYHCGERGVSVQEVTGVVINGDELRPAGGFIKQTEKMIHVLVKYGLEDLNAAFDREFLDTAKAQAHIEGRIVWIDEFDSAKADKLKQQLHKLVVPASFRSVLVTAQ

SEQ ID NO: 3435 - protein, 301 aa, unidentified
  source 1..301: note = Related to PFDR01000059.1; note = Candidatus Peregrinibacteria bacterium CG10_big_fil_rev_8_21_14_0_10_49_10
MRNALNFQFPNQIARRLKIKSSMLQNALHNMTDLYCHQERDIDGKVRDIYMPYPPLKTVQRKLHLTLRKIPFPAEFIGGMPKHSIFDNARRHVGRNFVLNLDLKNFYPSIKPSQVESVFLRLGCNKGMSRLLTYLTTADGHLPQGFPTSTMLSALVLVPLADDLRALLQPKFVFSFWVDDLTISGDSDPTPLIPAVRKLCRKHGFRLKEEKKHLGVRGKVPQEVTGIIISGKDFSPANGFLPHTKNMLRALNKEGWEYLNTIERWGCTSKREVTSRLKGRIRFIGQFDKSRAEKLYDSLNM

SEQ ID NO: 3436 - protein, 320 aa, unidentified
  source 1..320: note = Related to SABB01000002.1; note = Candidatus Saccharibacteria bacterium
MPRCKIMVTKSANKTIISTRRLCVEILQIHKDELLSLVADTDSYYRPYVQKKKRADGTAKERRIEPSYGYLKTAQRLVNKRILKPAMADLPIEIMGGRPGVSVVNNANHHAQSKSLMKYDVKNFFPSIKYGHVYHIFRYRLGFCEEAANILTKLTTYPSTGDVHVPQGAPTSTSLAMFALEPMCDRLKVYCDDNDLRSSIWIDDITISGDPKALRQHRPRINHIVNGTPFQIHPDKDTGVLVKGGKAGHEKGRKITGVVIDNNNRLTIGRQKLRSLRSKVRRSKVVSDKLEGSLQFLRHVNPTQGNKLLREYRSKHKRSA

SEQ ID NO: 3437 - protein, 305 aa, unidentified
  source 1..305: note = Related to NZ_CP040004.1; note = Candidatus Nanosynbacter featherlites
MVNQKCITTTKLCRDILKIPKEELLALLADRQSYYVPFEKKKITAGGRVKIRTIEPPHGYLKRVLKKINITVLQPQMERLPYGVMGGRKGYSVVDNAKYHASAPALMKYDIKDFFPSIKYADVFHIFRYQLNYCEEAANILAHLTTFENSQHGVHVPQGSPTSMSIAIFAVEKMSCAVDDYCRENGLKFSIWVDDITISGPYDKLCRHRSTINHILNSTHYRINPDKDSGIVKKGQKGRSVTGVIISNDGRLTVGHSKLSRLRRQVKRSTRPSDKLRGRLQFLLQVNKHQARRLIHEYAEKHRKN

SEQ ID NO: 3438 - protein, 305 aa, unidentified
  source 1..305: note = Related to JAHJMQ010000120.1; note = candidate division Zixibacteria bacterium
MNTSSKKVCLWGSVEALAKTLKVPVDDLFAWCGRKKRFVTEEERLIGAKYRQLKVPHGEFKELLRKIDQQLKRCPIPNYFYGSRKGVSAIDCALVHLHSPYILKLDLKDFFPSTDYRRVSNSLSQVCDKEAVLKLLTELCTFQHHLPQGFPTSTTIAELTLIPLAQRLFGMCNQYGLQLSIYVDDICISGSPVLLRLEARILRMFQEMHFRLNLKKKELRSKQEGIAVTGVFMQNGFCTTKPKFDEKLLKKIWAYELAQMICDSTLAEDLLGSIRGQLLWTRQLDESKYLCFLSELRQGQMMSGT

SEQ ID NO: 3439 - protein, 308 aa, unidentified
  source 1..308: note = Related to QZJA01000016.1; note = Candidatus Parcubacteria bacterium
MKKRQLLNINTLNELALQLEIPYDFLIKMADRMDNNYYTFDKKLIKKNGKIKIRKFFEGNNNLKIIHRKINQLLDHINYPDSIQGGIVGKSIVTNASIHASRKYVANFDISNFFPSIDYRVVYRVYRFLKCSPDVARILTKFTTADAHLPQGFGTSPKVSGLVLFEVDMRLNKLLSRYGLKHSFWIDDLTISGDHSIKKFKNIICKIFQQSGFKLNHDKTEFTNSKQKQVCTGLTINYQPNADKAIRDKVRKELFLCKKFGVENFLNEHGYSIDKDKYLRSMAGKISFLYSINPKYLTYKKTFQEITT

SEQ ID NO: 3440 - protein, 305 aa, unidentified
  source 1..305: note = Related to DOZJ01000002.1; note = Candidatus Falkowbacteria bacterium
MKKRQFLKINTVKELSYQLGLPEAFLISSANKIDNCYRKFTDKDKKGKERTFYVANENLKKVHQKINKLLDTLDYPINIQGGIAGRSIVTNASVHVGKKYVANYDIKNFFPSVNYKIVYRSFEKQKCMPEVCRMLTRFTTADGCLPQGFATSPKVSGLVLYSSNFRIETLLKPYDLIHTFWIDDLTVSGNRPIKKFQKLFYKIFKQEGFSLHDDPKKARITDSQHRQTCTGLIINQELNPEKGLKDKVRKELFLCKKFGVNNFLKEHNSPFDKDRYLRKLAGNISFLCSVNKKNFIYKEQLKLIK

SEQ ID NO: 3441 - protein, 316 aa, unidentified
  source 1..316: note = Related to MFGH01000021.1; note = Candidatus Falkowbacteria bacterium RIFOXYC12_FULL_34_55
MKRKKYFKFYSIKSLAKHLGVSEGFLIDLANKQDGNYKFCQGVMIKNKSRDLYKANTSLKIVLNLIDKKILNYYDFPKTFQGGIRGRALRDNAQFHTGKKYILKIDIADFFPSISPEKIFKTLKQLQIADKPASLLTTLVTVKNPHPHLPQGFCTSPKIASLVLLNLEKRFHNLFKEKKCDYSFWVDDITFSSDMPIGKFKNLILKILKDEGFSVNQKKIELLTNKERMVVTGVVVNSFPTLSNDRKKEIEKPLYCLVKFGIVDYFKKNKIEISEASITKIRSSLLGKINFAKSINPELGIKYKKDFLKITWELKK

SEQ ID NO: 3442 - protein, 383 aa, unidentified
  source 1..383: note = Related to STFG01000036.1; note = Lampropedia sp.
MNALCKALDLTLDEISEALSLTAADRYKERSVPKPNGSIRIVHNPHHLIRKIQRRINRRIFSNPDIILWPDHVFGSIPNEEFSDSPAAEKDYVNCARQHCRAKSVLSVDIKDFFDNIHRDRVHQIFSDFLKCEEEVSDVLANICCRGDNLVQGALTSSYIATLCLYSNEGLVVERLRNKGVAYTRLVDDITISSKIADYDFSFAMRQIERMLDEFGLPLNTNKTKLQNAGMQPLIVHGLRVDFDQPRLPPDEPRRIRAAVKNLELLASTPGYRASRAYRKDFNRCLGRVNKLDRVGHKQHKVLLARLRSVIPLPSHMDIERAEQQVTRLQNDSAKAGYKETYWFYRRWYVASQRIGILKRSFPGKASELRERLNQLRPIKNYE

SEQ ID NO: 3443 - protein, 402 aa, unidentified
  source 1..402: note = Related to NSLA01000001.1; note = Rubrivivax gelatinosus
MHSPIRLQPIKVARGSVPTLAALCSALDIQRAELDAALALTAAERYQVRTVPKADGSERIVHNPHHLIRKIQRRLNRRFFANPDVIKWPDHVFGSIPNDDLSTSPAADKDYVNCARQHCGAKSILSVDIKNFFDNIHRDKVRDVFTLFFKYPTDVAEALADVCCKEDHVVQGALTSSYIATLCLYDVEGLVVSKLRHKGLVYTRLVDDITVSSRVTGYDFSYALRLIESMVDSAGLPLNTRKTRIQSVGMRPLLVHGLRVDFAEPRLPPEEPRKIRASVKQVELLAASPGYRASRAYRRDFNRCLGRVNKLARVKHTQHLPLLKRLQKIVPLPSHKDIERAEKQITRLERDSLKPGYKDTYWFYKRWHVASERLTILKRSFPKTASDMRDRLRKLHPKKAYE

SEQ ID NO: 3444 - protein, 402 aa, unidentified
  source 1..402: note = Related to JAHUXB010000001.1; note = Comamonas sp.
MTYTAKLHPEKVALSSISNIDNLCDALDISVAELTAAMKLSPEQRYTSGVVPKKDGSDRIINNPHHLIRKIQRRINKRIFSDQDVISWPDHVFGSIPNDDLSISPASDKDYVNCARQHCCAKSVLSVDIKDFFDNIHYEAVVSIFESFLKYPADVADALANVCCKGEHVVQGALTSSYIATLCLHAVEGDLVKRLRHKGLVYTRLVDDITISSKLANYDFGFSLKQVEKMLHGADLPLNDGKTRIQHASMQPLIVHGLRVDFSQPRLPPSEPRNIRAAVKNLELMANSPGYRASRAYRRDFNRCMGRVNKLGRVKHNQHSELLARVRRVLPLPSHKDIERAERQVDRLEVDFLKPNYRSTYWFYKRYYVAMERLGILKRSFPKKAAELRARLIVMRPSGKYE

SEQ ID NO: 3445 - protein, 402 aa, unidentified
  source 1..402: note = Related to NZ_LOXM01000118.1; note = Burkholderia ubonensis
MAHTPRFHPVKESAGSIADVASLCVALDVALSELSSARNLPADQRYFRREVRKKDGSIRVVYNPHYLIRKIQRRINRRIFSNSSVVSWPDHIFGSIPNDDFSESDASEKDYVNCARQHCGAKSVLSLDIRDFFDNIHREIVRGIFSRFFNYPDDVSDALADVCCMGDHVVQGALTSSYIATLCLWDVEGQVVRKLGYKGLVYTRFVDDINISSKVARYDFSYALRLVEEMVSEAGLPLNGKKTKIQYASIKPLIVHGLRVDFDQPRLPPEEPRNIRAAVKNLELLAASPGYRASRSYRKDFNRCLGRVNKLARVGHQLHEFLMQRLRKILPLPSNMDIERAEKMISRLERDAVKSGYTETYWFKKRYFAASERIGILKRSFPNKAKELREKLKNIGPSTYRE

SEQ ID NO: 3446 - protein, 401 aa, unidentified
  source 1..401: note = Related to NZ_PKPC01000024.1; note = Ralstonia insidiosa
METPKFNPVKEAPGSISSIAGLCSALDISQSELDEALALPVEERYKKGEVPKKDGSMRIVNNPHYLVRKIQRRINKRIFSDSNVISWPDHIFGSIPNDDLSDSVAADKDYVNCARQHCGAKSVLTLDIRDFFDNIHRDRVFGIFFKFLKYSEDVSNVLADICCKGGAIAQGALTSSYIATLCLHETEGDLVRRLRYKNLTYTRFVDDITISSRVANYDFKYALGLTESMLSEAGLPINGQKTKIQYTSMKPLIVHGLRVDFDQPRLPPEEPRKIRAAVKNLELLAAGPGYRASHAYRKDFNRCMGRVNKLGRVGHSQHSILLNRLRKILPLPSHMDIERVERLIARLEKDVAKPNYSETYWFRKRYYAASERIGILKRSFPKKAEEFRGKLREIRPSSQYE

SEQ ID NO: 3447 - protein, 402 aa, unidentified
  source 1..402: note = Related to VIVL01000004.1; note = Variovorax sp.
MTQPQRFDPIKVSAESIATIDSLCGALGIGAAELAQARGLAPSERYIQKELPKKDGSTRIVHNPHYLVRRIQRRINRRIFSNPSVISWPDHIFGSIPNDDTYESLVYEKDYVNCARQHCGAKSILSIDIKDFFDNIHRDQVSRIFKNFLHYSDVVAEALTDICCKDASIVQGALTSSYLATLCLFREEGALVKRLGYKGLVYTRLVDDITISSKISNYDFSYALGQAVQMLSEADLPLNAKKTRIQYASMKPLMVHGLRVDFQQPRLPPEEAKRIRAAVKNLELLAASPGYRASRAYRKDFNRCMGRVNKLRRVEHNQHPVLIARLRKILPLPSHSDIVRAEQIIQRLKKDMSRPNYQGSFWFHKRCHVAAERLGILGRSFPKKAKELREQLKLIRPSTGYE

SEQ ID NO: 3448 - protein, 401 aa, unidentified
  source 1..401: note = Related to NZ_MRCN01000006.1; note = Variovorax boronicumulans
MPQFQKLHPIKESSGSIANIDALCRALDISSTELAQVRALSSSQRYEKKEVPKKDGSTRTVHNPHYALRKIQRRINRRIFANPDVVSWPDYIFGSIPNDESAEDPIDRDYVNCARQHCGAKSILSVDIKDFFNNIHRHQVIGIFKNFLKYSEEVSVILADICCDDEHVVQGALTSSYIASLCLFETEGDLAKKLGYKGLVYTRFVDDITISSKIAKYEFSYALTLTEQMLNDAGLPLNSGKTKVQNASMKPLIVHGLRVDFEQPRLPPDEARRIRASVKNLELLAASPGYRASRSYRKDFNRSMGRVNKLARVGHSQHSILLSRLRRILPLPSHADIGKAEELIQRLQKDFWRPNYQTSYWFHKRYHVAIERLGILKRSFPKKAEELNRILKLIRPASRND

SEQ ID NO: 3449 - protein, 401 aa, unidentified
  source 1..401: note = Related to NZ_CP059488.1; note = Acidithiobacillus ferrivorans
MEARQIDIYNPKKISLESIGSLAKLASCLDVTLEEIQEAQELSASERYKIKETPKRDGSLRKVYSPHFLIRKIQRRINARILSNSDVIAWPDHIFGSVPNQHCGESLVVERDYISCARRHCGAKSVLTLDIRNFFDNIHQSYVENIFTEFLKYDVEVSKVLSDLCCLDGHVVQGALTSSYIASLCLWDVEGELVVKLGHKNLVYTRYVDDMNVSSVISDYDFTYAVRAIEVMLDKKGLPLNPNKTKIQHISTEPLTVHGLRIGFKEPRLPSSEVRNIRAAVKNIEILASEHRYRTSHAFRKDFNRCMGRVNKLGRIGHNQHQKLVLRLKKVIPLPSKKDIVRAKKIVERLEKDYSANKSTFWYMKRFYLAHERLNILQRTYFKTSAELRGRLKSISPTYGF

SEQ ID NO: 3450 - protein, 395 aa, unidentified
  source 1..395: note = Related to PDHS01000438.1; note = Candidatus Accumulibacter phosphatis
MTQYNPEKKASGSIAGLDNLCSALDIHRSELDEALALSSSARYTARSIHKKDGSLRVVHNPHYLIRKIQRRINRRIFSNASLIRWPDHIFGSIPNQSSDDGVPIAKDYMSCASRHCEAKSVLTLDIKNFFDNIHATLVRSVFLDFFKYCPEVSDALSDICCLDSHLVQGALTSSYIACLCMHDIEGSVVEKLNRKGLVYTRLVDDINISSRISQYDFYYAISMVDNMLLEKGLQLNLDKKRVQYISTEPLTVHGLRIAFKEPRLPADEVRRIRAAVRNIETIASERDYRTTHAYRKDFNRCMGRVNKLSRVGHNQHKLLVGRLKRVFPLPSKKDIDRVTTIVTKLEADSGQKKGTYWYWRRFYLAHERLTILNRSFPHAAQDLRQRLKLLKPLYE

SEQ ID NO: 3451 - protein, 400 aa, unidentified
  source 1..400: note = Related to SORD01000001.1; note = Janthinobacterium sp.
MIPVSSTTRLYPVKTATHAITTIQGLCEALDIVVEELDDVLLIPPKDKYSSQERRKKDGSVRVVHNPHHRLRVIQRRINKRLFSNQNFVSWPDHIFGSIPNQKFEGSKHPKDYVACAKVHCGAKSILTLDIENFFGNIHVSQVIKVFTQLLKFSPEVAEVVSKICCHEDYLIQGALTSSYIAGLILFDVEGMVVERLLRKNLRYTRLVDDINVSSVVSDYNFSYAKTIIEDMLIGKDLPVNHSKTKIQYSSTVPLTVHGLRVGFKEPRLPSDEVRKIRAAVHSIELMAKEPNYKTTHSYRRDFNRCMGRVNKLCRVGHNQYDKLLLRLQKNYPLPSKKDIERAIKIVTKLEVDYPTKQGNFWFAKRFYLAHERLNILQRSFPNVAYDLRFRLKAIKTVYE

SEQ ID NO: 3452 - protein, 397 aa, unidentified
  source 1..397: note = Related to JACYUQ010000003.1; note = Oxalobacteraceae bacterium
MVRVPQLFPKKTAVGSIATIDQLCNALSITEDELREVILLPDILRYSSRPIPKKDGSLRFVHNPHFRLRRIQRRINNRLLSNQSFLSWPDHIFGSIPNQQFDDGIHAKDYIACARVHCESKSILTIDIANFFDNVHISHVLQIFRDLLKCSEIVSEVLADICCHNDALIQGALTSSYIAGLALYDVEGRVVERLARKGLRYTRLVDDINVSSKNSEYNFDYAKKIVEDMLFSKDLPVNTSKTKVQFSSTLPLAVHGLRVGFKEPRLPGEEVSRIRAAVHSIEMMAREPNYRTSHAYRRDFNRCMGRVNKLSRVGHKQHGGLVHRLHQIMPLPSQKDVQRAIKIVEKLEADFSLKRHTYWYAKRFYLAHERLNILKRSFPGITDMLRLRLKPIKARYE

SEQ ID NO: 3453 - protein, 398 aa, unidentified
  source 1..398: note = Related to WKJJ01000006.1; note = Massilia rivuli
MPTVPQLNPVKVSTESIITVENLCSALSITLEELNEVRSIPNGERYIASQIPKKDGTMRVVHNPHFRLRRIQRRINKRILSRQSVVSWPDHIFGSIPNQLDSERIEHEKDYVACARVHCEAKSILSIDIANFFDNIHITKISKIFCEFFKYSTEVSNILAEICCHNDNLIQGALTSSYLATLSLYEVEGKVVERLLKKNLRYTRLVDDITVSSRLAGYNFDYAKALIEEMLIDMDLPMNSSKTRIQYNSTVPLTVHGLRVAFKEPRLPGDEVRKIRAAVHSIELMASEPNYRTTHPYRRDFNRCMGRVNKLSRVGHQQHSVLVNRLRKVMPLPSPKDIERTIKIITRLERDYPTKRGTFWFSKRYYLAHERLNILKRSFPGISKELRKRLKPLRSKYE

SEQ ID NO: 3454 - protein, 396 aa, Chromobacterium sp.
  source 1..396: note = Related to NZ_CP029495.1; note = Chromobacterium phragmitis
MIILRPYKKIPSSIANIDNLCSALDISTTELDEAISLAETDRYQVREIAKKDGSPRRIYNPHYLIRKIQRRINHRIFTDQNFLGWPDYIFGTIPNQKKSDGRIVQRDYISCAKIHCKSKSIASIDIQDFFDNIHIDHVENIFSKFFKYPDEVSEVLANICCLNSHVIQGALTSSYIASLCLFDVEGDAVERLIRKNLRYTRLVDDITISSTVSNYNFDYALSIIRKMLESKDLPINENKTKIQYASTVPLTVHGLRVAFSEPRFPSDEVRRLRAAVKNIETLSQEKNYRTSHAYRHDFNRCMGRVNKLSRIGHKQHAALVKRLQKVMPLPSQKDIERAFMIIERLEKDYSTHNSSYWYSRRYYLAHERLNVLQRTYTRIASDLRSKLRYLRPSYEK

SEQ ID NO: 3455 - protein, 398 aa, unidentified
  source 1..398: note = Related to NZ_CAJNBE010000044.1; note = Paraburkholderia aspalathi
MEKQPQLNPVKTAVDSIASVANLCHTLNVTQEELDAALTLDPEEKYERRAIPKKDGSDRLVFSPDRRLRKIQRRINKRIFAAQSVVSWPDHLFGSIPNQNGPENIKIEKDYVACARRHCQSKSILKIDIKNFFDNISEFHVKDIFVNFFKYSDDVANVLANLCCLNGHVIQGALTSSYIAGLCLYDVEGDVVRRLARKGLVYTRLVDDITVSSKSADFDFGFAKSIIEQMLVGKDLPINESKTAVHYVSTTPLTVHGLRVGFKEPRLPSDEVRRIRSAVKNIETLAKEDSYRITHGYRHDFNRAMGRVNKLGRVKHKQHEPLVRRMRKVLPLPSKKDIERATRIIDRLQADHAGKHDTYWYWKRFYLAHERLNVLQRSFPEVSKKLRTKLRLLRSSYE

SEQ ID NO: 3456 - protein, 398 aa, unidentified
  source 1..398: note = Related to NZ_CP012746.1; note = Paraburkholderia caribensis
MAHIPLLNPLKTALGSISSIDSLCEALNITREDLEEALQLDPSEKYVRLTTPKKDGSDRVIFKPDYRLRKIQRRINKRIFSNQNVVTWPSHLFGSIPNQFDADKTKIEKDYVACARSHCESKSILKIDIKNFFDNIHQHYVEDIFLNFFKYPEDVSSTLAEICCHESHVVQGALTSSYIASLCLYDVEGETVRRLTRKGLTYTRLVDDITVSSKIADYNFDYTKNVIETMLVGKELPINSSKTITQYISTTALTVHGLRVGFKEPRLPSDEVRRIRSAVKNVETLAKEDSYRTSHGYRRDFNRVMGRVNKLSRVKHKQHASLVKRMRIVLPLPSKKDIDRTTRIVERLLTDYASRHDTYWYWRRFFLAHERLNVLQRSFPEVSKHLRKKLKLIKPTYE

SEQ ID NO: 3457 - protein, 396 aa, unidentified
  source 1..396: note = Related to NZ_LPNA01000081.1; note = Burkholderia stagnalis
MAAILNPIKVATGSISSIDNLCAALDITRAELDAALELDILTRYQRDETPKKDGSMRVVYKPDYRIRRIQRRINRRIFSRADVILWPDHLFGSIPNQESDDGDEIQKDYVACARLHCEAKSIVSIDIQNFFDNIHSDLVLDIFEKFLQYPSDVARTLTDICCRGDHIVQGALTSSYIASLCLYDIEGKTVERLSKKGLTYTRLVDDITVSSKIANYKFDYAMSVIEDMLTSKDLPINTSKTKIQYVSTTGLLVHGLRVSFQQPRLPSDEVRRIRAAVQNIETLAAEKGYRQTHAYRQDFNRCMGRVNKLSRVEHNQHANFLRRLQKILPLPSKKDINRATKIIENLERDFEKKSGTYWYAKRFYLAHERLNVLNRSFPAITKRLRARLKPLKQNYE

SEQ ID NO: 3458 - protein, 396 aa, Pseudomonas sp.
  source 1..396: note = Related to NZ_AUED01000023.1; note = Pseudomonas vranovensis
MALLNPRKVSTGSISSIENLCSALSVSLEEIYAALSLPDEEKYAVSQVFKSDGSVRLVHNPHFLLRKIQRRINKRIFSRLSIIEWPDHLFGSVPNQREQDTKRLINKDYVSCAAKHCGAKSLLKVDVKDFFDNIHKDLVLDIFSNFMKFDREVSELLAEICCFRSHVIQGALTSSYLASLCLHDIEGAVVHRLSRKGLVYTRLVDDITVSSKISNYDFSFALDIIRAMLTSKDLPLNIVKTRSIYVSSEPLTVHGLRVAFPQPRLPSGEIARIRAAVRNIENLASERGYRTTHAYRHDFNRCMGRVNKLVRVGHDRYDSLLARLKQIFPLPSKKDIERARAMLDRLARDCATKRSTYWYAKRYYKLQERLIILKRSFPAVTKEIRKSLKGLKPDYE

SEQ ID NO: 3459 - protein, 396 aa, unidentified
  source 1..396: note = Related to SEFL01000928.1; note = Sphingobacteriales bacterium
MVLLNPKKISAGSISSIENLCSALDITLEEIYGALSLSEEDKYAVTEISKSDGGIRLVHNPNYLLRKIQRRVNKRIFSRPSVIQWPDHLYGSVPNQRNRQNSEMLNKDYVSCAAKHCGAKSLLKIDVKDFFDNIHQNLVLDIFNNFMKFDGEVSGLLAEICCFKSHVIQGALTSSYLASLCLYDVEGSVVERLMRKGLIYTRLVDDITVSSKVSNYDFGYALDIIRTMLTSKDLPVNLAKTRAIYVSSEPLTVHGLRVGFSQPRLPSGEVARIRSAVRNIESLASERGYRTTHAYRHDFNRCMGRVNKLVRVGHDRYESLLKRLRKVFPLPSKKDIERAHAMLARLNRDYSDKRGTYWYAKRYYKLQERLIVLKRSFPAVTKEIRKAIKGLQPDYE

SEQ ID NO: 3460 - protein, 397 aa, Pseudomonas sp.
  source 1..397: note = Related to NZ_BPLZ01000021.1
MATQLAPKKVSKRSIASIENLCSALDISLSEIYSALSLSDEEKYKVSTRAKSDGTDRIVHNPHFLLRKIQRRINKRIFSKPSVIKWPDHLFGSVPNQLDQSMTHIINKDYVSCAAKHCGAKSILKVDIKDFFDNIHEDLVLDIFRNFLKFDQEVSETLTNICCFHSRPVQGALTSSYLASLCLYDVEGSVVEKLSRKGLTYTRLVDDITVSSKSNNYDFSYALDIIKGMLTAKELPLNVAKTKSIYISSEPLSVHGLRVSFPQPRLPSGEVSRIRAAVKNIESLASERGYRTTHAYRHDFNRCMGRVNKLVRVGHNRHQPLLDRLRKVFPLPSKKDIDRARAMLKRLMRDKDSKRDTYWYAKRYYKLQERLIVLERSFPASAKEIRASLKGLKPSYD

SEQ ID NO: 3461 - protein, 395 aa, Pseudomonas sp.
  source 1..395: note = Related to NKIG01000020.1
MAAVNPKKVTSESIANIDRLCAALDITAEELCQVQNLHEDAKYQASTVEKSDGSFRKIYNPDFRLRKIQRRINKRIFSNSKVIAWPDHLYGSVPNQINDDFDLINKDYVSCAAKHCGAKSILKLDIKDFFDNIHKIIVHDIFLNFLKYPQDVSSALASICCLNDHVVQGALTSSYLASLSLYDVEGYVVEKLHRKNLVYTRLVDDITVSSKTSNYDFSYAINLIEGMLTEKELPLNKKKTKVQYTSSEPLTVHGLRVAFKQPRLPSDEVARIRTAVKNIETLAKEVGYRTTLSYRQDFNRCMGRVNKLSRVNHEKHLGLVKRLVKVYPLPSKKDISRAEAIVARLEKDYASKHSTYWYSKRFHTAHERLNILKRSFPCAEKALRKRLKSLRPIYD

SEQ ID NO: 3462 - protein, 399 aa, Pseudomonas sp.
  source 1..399: note = Related to JACASD010000120.1
MTRNVTARSFKISTRSISNLENLSSTLSIPLKTLQKTLVLPKPDRYRRDELPKSDGGIRIIYNPSQMIRLVQRRINSRILSNNQILAWPPFLFGSIPKSKDALGNEITRDYITCAAQHCGAKSLLKLDVKDFFDNVHADLVYGVFSQLLKFPHLVSASLTNICTFESHLIQGALTSSFLANLCLHDVEAFVVDRLAKKNLTYTRFVDDITISSKTSKYDFSYALSIVEEMLTSKDLPLNRQKTKVYFSSSTPLTVHGLRICFAEPRLPSDEVRRIRASVKNLETIANERSYRMTHAYRHDYNRCMGKVNKLARLKHNQHIPLLDRLRKIPPLPSKKDISRAIQIVSRLERDFFLKKNTYWYYRRFYIAYERLNVLKISYPRMTKLLKIRLKKLKPIYEK

SEQ ID NO: 3463 - protein, 398 aa, Pseudomonas sp.
  source 1..398: note = Related to LS483433.1; note = Pseudomonas mucidolens
MTRTVAARSFKVSNSSIADLQNLATALSVPLLTLQKTLTLPKSERYRRDELPKSDGGLRIIYNPSHEIRLVQRRVNTRIFSNSHILAWPPFLFGSIPKSRDALGNEVTRDYITCAAQHCGAKSILKLDVKDFFDNVHSDLVYGVFNKLLKFPHLVAASLTNICTLDSHLIQGALTSSFLANLCLHDVEAFVVDRLAKKNLVYTRFVDDITISSKVAKYDFSYAQAIIEEMLISKDLPLNSQKTKVSHASSTPLTVHGLRVSFSKPRLPSDEVGRIRAAVRNIEKIADERSYRMTHAYRHDFNRCMGRVNKLARVEHNQHRPLLKRLLKLPPLPSKKDISRAIQIVSRLERDFYLKKNTYWYSRRFYIAYERLNVLKISYPRMTKLLKLRLKKLKPVYE

SEQ ID NO: 3464 - protein, 398 aa, Pseudomonas sp.
  source 1..398: note = Related to NZ_BCBR01000170.1
MAGIAEVQRYKASVHSISSIENLASALGVSLSFLQEVLQIPDEHRYKKSELPKSDGGIRTVYSPDYRIRLIQRRINKRIFSNSRVITWPDFLFGSIPNHKDKCGQEVTKDHIACAASHCGAKSLLKLDVKNFFDNVHSDIVYGVFRDLLKYPDEVSRALTNICTFKSHLVQGALTSSYLASLCLHDVEAYVVDRLSRKGIVYTRFVDDITLSSKISSFDFGFARGVVEQMLTAKDLPLNSGKSRTQYLSSEPLMVHGLRICFNEPRLPADEVRRIRASVKNIEVIANERGYRLTHAYRHDFNRCMGKVNKLARLGHTQHTALVARLVKVYPLPSKRDISRAIQIIMRLERDVSAKASTYWYAKRFYMAHERLNILKRSYPRITLLLRNRLRKLRPNYE

SEQ ID NO: 3465 - protein, 399 aa, Pseudomonas sp.
  source 1..399: note = Related to NZ_RXHX01000002.1
MAMDASAAGGFKVSKNSIGSVDNLIQILAVSLKDFESVLMMPSELRYIKTEIPKSDGGVRRIHNPHFLIRLLQRRINTRILSNPRVIGWPSHLFGSIPNQRDEKNNIDSRDYIACAKAHCGAKSLLKLDVKDFFDNVSEDLVYGVFHDLLKYSEDVSSVLTDICTYNSHLVQGALTSSYLASLCLHDVEAHVVDRLRKKNLVYTRFVDDITISSRTSNYDFAFARSVVEQMLISKDLPLNSGKSRVFYTSSEPLTVHGLRVSFSEPRLPSDEVRRIRAAVRNVETISSERAYRLTHAYRHDFNRCMGRVNKLARVGHNQHKPLKNRLLAVYPLPSKRDISRSIQIVSRLERDVAEKRATYWYSRRFYIAHERLNILKRTYPRMTKILRARLKKLTPTYF

SEQ ID NO: 3466 - protein, 398 aa, unidentified
  source 1..398: note = Related to nan
MIKDKAHRIFKASTSSISSLESLASALDLQVDDFERVWAKEESSRYTRKEIPKSGGGVRVVFNPCVEVRKIQRRVNTRIFSNPHVVKWPGYLYGSIPKSLNSEDELASRDYISCAKQHCEAKSLLKMDIKNFFDNVHDDLVYGVFKDVLKYPEVVSNVLTRICTYRSSLVQGALTSSYLAMLSLYKEENDVVSKLKRKGLVYTRFVDDISISSKVSGYDFSYARSLVEKMLLNAGLPLNSNKTKVLYATATPLTLHGLRICFKDPRLPPEEVRRIRAAVKEIEIVAGESNYRNTYAYRRNFNRCLGRVNKLSRVKHKQHSNLVRRLSKVLPLPSQKEVNYVQHALVKLEGLFQSRGDTYWYRKHFYQLGDRLNLVARSYPRLAEEIRRRLREVKPTYE

SEQ ID NO: 3467 - protein, 398 aa, Pseudomonas sp.
  source 1..398: note = Related to NZ_JAGQFP010000002.1; note = Pseudomonas stutzeri
MRRSSAHRAFKVASGSISNVENLAAALGLTTLHFEKLWEIPEELRYSSKTIPKLSGELREVHNPCRELRIIQRRINTRIFSNPDVVKWPSYLYGSIPKGDNPEDEFNSRDYVACAKLHCRAKSILKLDIKDFFSNVHDDLVMGVFSEVLKYPDVVSQVLTRVCTYKSSLVQGALTSSYLAMLSLYGAEDDLVHRLRKKNLIYTRFVDDITISSKVANYDFSYAARLVEQMLVEKGLPLNTKKTITQYASLAPLTVHGLRVCFAEPRLPADEVRRIRAAVQSIEIVAKEKNYRQTYPYRKDFNRCMGRVNKLARVGHNQHSKFISRLHKILPLPSAREVEYVKAATLKLESLYATKRESFWYKKLYYRVGDRLNLVGRSFPNLAKSLRERLREVKPAYE

SEQ ID NO: 3468 - protein, 398 aa, Pseudomonas sp.
  source 1..398: note = Related to JAAMQS010000014.1; note = Pseudomonas kunmingensis
MKKDFAHRAFKASSGSIASVENLASALSLEVSDFERLWEIPEEKRYKLKELPKSSGGFRTVYNPCVALRVIQRRINTRIFSNPYIFQWPVHLYGSIPKSPNADDEYRSRDYVACAKQHCGARSLLKLDIKDFFDNIHEDVVLSIFRKVLKYPEDVSLVLTRICTHNSKVVQGALTSSYIAMLSLHQEEQGVVDRLRRKGLVYTRFVDDITVSSKCTNYDFSYAQSIIEQMLNNADLPVNTKKTEVQYATAAPLMVHGLRISFNEPRLPSNEVKKIRAAVQGLEIVAKENNYRQTYPYRKDFNRCMGRVNKLGRVKHNQHQKLVRRLVKILPLPSAKEVAYVKTAVERLEATYETKKSSFWYKKHYYRVNDRLNLVKRSYKTLAVTLRKRLQCIPPLYE

SEQ ID NO: 3469 - protein, 398 aa, Pseudomonas sp.
  source 1..398: note = Related to NZ_LR134290.1; note = Pseudomonas mendocina
MKRTLAHREFKAASGSISSISNLAKALNLQVSDFERLWEIPEESRYKSLEKPKTSGGMRVVYNPCPQLRLIQRRINTRIFSNPYVIRWPSYLYGSIPSSPNKSDINHSRDYVACARLHCEAKSILKLDIQNFFDNIHEKLVIEIFSDILRYPEDVSEILARICTYKSRLVQGALTSSYLAMLSLYKEEPEIVAKLKRKDLVYTRFVDDITVSSKIANYDFSYAQKIIEDMLSNAEFPVNSKKTQTQYASASPLTVHGLRVCYKEPRLPSREISNIRAAIRSLEIASKHGNYRQTYAYRKDHNRCLGRANKLARVKHPQHSKFVARLSRILPLPSQKEVNYVKSSVEILERDYLHKKDSFRYKRHYYRTNDRLNVVQRSYPSLVRDLRKRLRPIKPTYE

SEQ ID NO: 3470 - protein, 387 aa, Pseudomonas sp.
  source 1..387: note = Related to CP080287.1; note = Pseudomonas aeruginosa
MTTRHTFKVATGSIATLDNLSLALGVSHCELENALSMPQDERYTRLERHKADGSVRSVYKPHYLIRLLQRRINHRILANPDVIAWPSYLFGSIPSFKNEDGEWVAKDYVASARLHCGAKSLLKMDIKDFFDNIHSSVVEDIFLGLLNYPGEVAKALTNICTYNSHLAQGALTSSYIANMCLHGLEDEVFTKLSRKNLRYSRFVDDITVSSVVNRYDFSYVKSIIEGMLLERGLPVNSRKTKVQYSTTEALTVHGLRVCFPEPRLPSDEVRRIRAAVKNVEMLAQENGYRMTHAYRRDFNKCMGRVNKLSRVSHKQHGNLVRRLVKVYPLPSKKDISRARSMVARLERDYLEKRDTYWYSRRFYIAHERLNILKRSYKASAIELRGAS

SEQ ID NO: 3471 - protein, 396 aa, unidentified
  source 1..396: note = Related to NZ_CP033831.1; note = Serratia sp.
MKKNNYLKISKSSISSVENLCLALDLTLDDFLNLKMMSGCDRYVLNEKPKPGGGIRKTYNPNNLVRVFQRRINNRIFSNPHIIKWPDHIYGSIPNDMNSDGGIRRRDFVACASVHCGAKSILKVDVKDFFDNISKDIVYDIFNGFLKFNSEVSEALTDICTYDRSHLVQGALTSSYLATLALFNIEGRIVQRLALKKLKYTRFVDDITISSVNSRYDFDFAKSIVINMLHEKDLPVNLSKTKVYYSGSEPLTVHGLRVSFNQVRLPSDEVRKIRAAVKNIEIIANDTSYRKTGSYRKDFNKCMGRVNKLSRVGHKQHESLVARLNKVYPLPSFTDIKKTKDLIEKIRSKYDDGKNYFYYHKMYYAAMEKLNLVKRSFPNTAKNLRLRLRGLRPEYD

SEQ ID NO: 3472 - protein, 407 aa, Citrobacter sp.
  source 1..407: note = Related to CP055089.1; note = Citrobacter portucalensis
MSLPIRHTKKKTVSSINSISSLCSTLSITRAELETALSTPDKERYTPSEVEKSDGTIRNIYNPKSLIRKIQRRINRRIFNIYTPKGREKKNPPIIWASYLFGSIPNQFLDEDIEQKDYIACARVHCQSKSLLKVDIKNFFDNVQAIHVESIFSKFFFFSDDVSQALTNICCYEGHLVQGALTSSYLSCLCLHDVEWKIVDRLSRKNLRYTRLVDDITVSSTVSNYDFSYAKDIIINMLHEKDLPVNFKKTQQYYTSTTPLTVHGLRVSFSEPRLPSDEAKRIRASVRNIESLAAERNYRTTHAYRKDFNRCMGRVNKLKRVNHSQYESLVNRLFKLFPLPSKKDLDRVFISIANLEDDFHKGKHDTYWYWKRYHRVHERINILQRTFVREATIFRNKTKNIKPSYIQ

SEQ ID NO: 3473 - protein, 407 aa, unidentified
  source 1..407: note = Related to JTBU02000001.1; note = Serratia marcescens
MSFQIRHTKKNTVSAINSIQGLCNALDISLHDFNIALSTPDSERYTPSEIEKSDGSFRKIYNPKSFLRKIQRRINRRIFNLYTKKGREIKNPPITWASYLFGSIPNQFLDENIEQKDYIACARVHCQSKSLLKVDIKNFFDNVQDVHIEDVFRNFFLFDEEVSRALTNICCFEGHLVQGALTSSYLSCLCLYDIEGKIVDRLARKNLRYTRLVDDITVSSVVSNYDFSYAKDIIINMLHEKDLPVNSKKTQCYYTSTSPLTVHGLRVSFSEPRLPSDEAKRIRASVRNIESLSSETNYRTTHAYRKDFNRCMGRVNKLKRVNHSQYESLFNRLFILLPLPSKKDIERVSVSLLRLENDYKLGKHDTYWYWKRYHRIHERLNILQRTFTREASVFRIRLRLVKTTYIQ

SEQ ID NO: 3474 - protein, 407 aa, unidentified
  source 1..407: note = Related to MUJJ01000002.1; note = Pantoea vagans
MSYHIRHTSKRNITAINSIEALCKALSISKEELENALATPDHFRYTPSTAIKSDGSPRKVYNPKPMIRMIQRRINRRIFNSYNNKGREKKNPPIIWASYIFGSIPNQYYDLDLENKDYISCAAIHCGAKSLLKVDVKNFFDNIHDIYVKNVFENFFHFSNEVSEALTNICCYQGHLVQGALTSSYLACLCLYDVEGDIVQRLARKNLKYTRLIDDITISSEISNYDFSYAKSIVIDMLHKKDLPINNEKTKASYISSEPLMVHGLRVAFKEPRLPSDEVRRIRASVRNIECLASETNYRTTHPYRKDFNRCIGRVNKLKRVNHTQYDNLVARLLRILPLPSKKDIERISEQIDRLENEYSNNLHGSYWYWRRLNKVHERITILNRTFKSEAKTYRDRLKKINHCYIQ

SEQ ID NO: 3475 - protein, 393 aa, unidentified
  source 1..393: note = Related to NZ_CP091194.1; note = Lysobacter gummosus
MAVLKRVAKKSISSLTNLCDALSITIHELNGALALSDDQKYLRSTTPKPDGSLRIVHNPHRLLRKVQRRLNSRIFSNSAVVTWPDYVYGSIPNQIDVGGAIVEKDYIACARVHCGAKSMLKMDIKDFFNNVHEEAVRDIFLRFFKYSKEVSDALTSICTFEGGLVQGALTSSYIANLCLFDVEDSAVERLRRKKLRYTRLVDDITVTSTIANYDFSFAKDVITTTLVDKDLPVNERKTRVLYISSEPLTVHGLRVNYKEPRLPAKEVARIRSAVRNVELLASEGSYRTSHSYRHDFNRCMGRVNKLKRIGHRQHMVLIKRLLKILPLPAKRDIERAEKLLIRIKKDWLSNPDSYGYAKRFYILHERLNVLARSFPAVSAVMRKEMRGLRPVYD

SEQ ID NO: 3476 - protein, 400 aa, unidentified
  source 1..400: note = Related to NZ_VLXO01000050.1; note = Stenotrophomonas maltophilia
MARDSMSFRGTSGPIASVEKLASALRLPESLLLEVSERPIWRNYKPASAPNRRGGRPRLVFSPSRDVRLIQNRIVRTFFKNPKVINWLPFIYGGIHKDALKSGDSRDHVACARRHCGAKSILKLDIEDFFGNVSFDLVEDVFVGLLGWSKDAGSLAAKLCTRDGVLPQGGITSSYLALLCLHDIEPKLVRQLSYKKLTYTRYVDDITISSGSFTQEFSGPMRMVEQQLASKGLGINSAKVESLTVGLEAMSVHGLNVAYRDPVLPKSEVKRIRSVCRQTILDAREVGRRSINYRRRYNRAMGLVNKLSRVNSSSHKKLVQSLRLVSPLPSQADFEYATKIAYDMRDDYDKKKLGYWYWRRFNRLMARLTLIGVDNPGWAGNLRKYMKSHFLPGFKDDKDK

SEQ ID NO: 3477 - protein, 397 aa, unidentified
  source 1..397: note = Related to WELC01000020.1; note = Stenotrophomonas rhizophila
MGKDSMSFRGTSGPIASVEKLADSLRLPISLLKDVAARPEWKKYKPAKAPDKRGGRPRLVFSPSKDVRLIQHRLVRTFFKNPKVVNWLPFLYGGIHKDALAAGDSRDHVACARRHCEAKSILKLDIEDFFGNVSFDHVEGIFVRLLGWSREAGHLAALLCTRDGVLPQGGITSSYLALLCLYDMEPALVRQLAYKKLVYTRYVDDITISSSSFNQDFNGIKRLVEQQLGAKGFTINSSKVEDLTVGLEALKVHGLNVAYANPVLPKSEVRRIRSVCKQTIMDAREVGRRSINYRRRYNRAMGLVNKLARVKSSSHAALVSKLRAVSPLPSHADFSYATEISYNMREGYDKKKYSFWYRRRFNRLMARLSLIKSDNPVWAANLRNYMTSHFLPEYKEE

SEQ ID NO: 3478 - protein, 393 aa, unidentified
  source 1..393: note = Related to NZ_CP052863.1; note = Stenotrophomonas maltophilia
MTLRGSAGPIRSNCALARALGCTEKFLSDVIARDTSSKYRLVEAPAKLDGTRREVYSPSRDVRLIQRRIVNRFFKNPRVIKWPPFIYGGIHRDALAPGESRDHVACAQKHCGARSMVKLDIRSFFDNVTHDMVVETMVMQLGWSRGPAILLADLCTRDGSLPQGGITSSYLALLSIYDVESKIFNIVGYKKLVYTRYVDDITISSRNSGYDFSPIVKMVDQFLLSKGLSINDAKTSVSVSGLEPLVVHGLNVANKHPVLPKAEVKRIKSVSRQTINDASEEGRRTHGFRRRYYRSMGLINKLSRVRSSSHKSSLSKLKSVSPLPNFADYDIATVVAYRLRDLYGAKKGGRWYWRKFNVLMARLDLIAVENPGWAKTLRRYMRRHYRPDYRRPE

SEQ ID NO: 3479 - protein, 367 aa, unidentified
  source 1..367: note = Related to NZ_JABDRS010000003.1; note = Stenotrophomonas maltophilia
MRDVASRASTTNYRSVDAPIKSDGLPRRVYNPARDVRLVQSRIANRFFKNPAVIKWPAHIFGGIHKKALPAGDSRDHVACAAKHCGAHSLLKLDIRNFFDNVTHEIIVETMTRQLAWSRSPAVLLADLCTREGVLPQGGITSSYLALISIYDIESKLVRNLEYKGLAYTRYVDDITISSKVASFDYAPIVRMVDNLLLSKGLSINEAKTSARISGLEPLVVHGLNVANRSPVLPKAEVARIKRVGRQTILDAQEEGRRSHGFRRRYYRSMGLINKLSRVGSASHASSLEKLKAVSPLPSFDDYKISTNVAHKLRADYDIKKSGVWYWRKFNVLMARLDLIGAENPRWAKTLRRYMRQHYRPEFKRPK

SEQ ID NO: 3480 - protein, 369 aa, unidentified
  source 1..369: note = Related to NZ_CP063658.1; note = Lysobacter sp.
MNLLLDVAERSAEENYRPVSAHSKLDGTERRVFSPSRDVRLIQRRLVNRFFRKPQVVSWPPFLFGGIPNDALPQRDAPRDYVACAAQHSIARSALKLDVRSFFDNVHSDVVEPIFSGLLRWDEEPAVLATRVCTRLDSLPQGGITSSYLALLCLFREEGNVARTLRRKGLTYTRYVDDITISSTSVLQEFDFAHALVERMLMNHGLFINSSKVNLQKAGSSPLEVHNLRVGCGPPRLPQREVKRIKQVCRQTELDASEGRRSYSYRRRYFRAVGLVNKLARVGNNQHRHLITRLSTIRPLPSQKDYELATNVAHDLRERYVLGHDRYWYRRRFHILMERLNLIGVEDPAWAANLRIYMKAHYAPTSVDA

SEQ ID NO: 3481 - protein, 400 aa, unidentified
  source 1..400: note = Related to NZ_LR733312.1; note = Luteimonas sp.
MKSKPYSSMRGSNGPIRNLDHLCTILDVERRVLDRVLAMPGSQRYALARSRAAKSDGSAREVFNPCREVRRIQLKIVKRILKVPGAVRWHDFLYGSMPNQIDAHGNELKKDYVTCAAQHCDARSVLKIDIKDFFGNIHSDTIMRIWTELFGYPGDVAFVLTNLCLKDDNLPQGGITSSYLAMLCLFDLEAKTVATLRLKGLRYTRYVDDITISSPLSNYDFELALALVRAMLISRALPINESKVKRVSLSTEAITVHGLRVNFETPRLPAAEVGRIRASVKTIELLAADTSFSSTPGFRKSFNKCMGRVNKLKRVGHSQHSKLLKRLQAVRPLPSRRDIKKAVASIRTLSAEFHSRGNTFGYRKRYYILMERLNLIARSHKELAAMLRAHVKRIKPSYVD

SEQ ID NO: 3482 - protein, 373 aa, unidentified
  source 1..373: note = Related to JAFRGP010000385.1; note = Rudaea sp.
MAITQDELFQALRLTDDVRFQPIPEKRKPDGTIREIYNPHPLIRKIQRRLVTRLLSGSAAFQWPDHLYGSIPNVSSPDGEVQSKDYVACARRHCGAKSLLKLDIKNFFGNVHHDTVYRIFRELLGYGSRVSKVLACLCTHKGSLPQGGLTSSYLAMLSLHDLEGYVVERLRLKSLVYTRYVDDITISSKVLNYDFGYALKIVDNMLVERGLPLNLKKNRIERISTSPLIVHGLRIAFDKPRLPADEVGRIRASVRYTELIYLEANFRFTSSYRKAFNRCLGRVNKLKRVGHSQHGVLLRRLLRVRPLASKKDLIRAHVTASRLANEYGRYKETYGYHRRFYLLQERLNLIQRTYPKIAKSLRLKLNIIRPEFN

SEQ ID NO: 3483 - protein, 372 aa, unidentified
  source 1..372: note = Related to NZ_MDDY01000002.1; note = Xanthomonas arboricola
MDVPISDFRAALLLSEEERFRLLPDKKKADGTDRIVYNPDPLIRKIQRRFLTRILSRPSAVKWPEFLFGSIPNHSFNGIDVSRDYVACAARHCGSKSLLKLDIKSFFENVHSDLVLEIFRGVFSYGDLVSRVLTRICTHKGGLPQGGIVSSYLAMLCLHDVEARVVERLRQKRLTYTRYVDDITVSSKSSNQDFDFSKRIIEEMLLSKNLPLNYKKVLVSRVSTTALTVHGLRVGFKEPRLPADEVKRIRASVKYLEILYVDGDYKYTSSYRKNFNKCMGRVNKLKRVGHSQHGQLKSRIIRLMPKASRSDLARVFKISKRLQSDYLEKKDTFGFYKRFHILAERLNLVARTHPGIARLIRRRLREIKPTFE

SEQ ID NO: 3484 - protein, 351 aa, unidentified
  source 1..351: note = Related to NC_013889.1; note = Thioalkalivibrio sp.
MRQPKLNGSDRIVNNPHYLIRKIQRRLNKRFFANPDFIRWPRHIFGCIPNYVDDDGELVTTDYVSCASKHCQSKSILKMDISDFFGNVHQDHVYKVFLNLLSFPEDVSKILTDLCTLRGSLPQGGLTSSYLASLCLHDKEGSVVRRLENKGLVYTRLVDDITVSSHVANYNFSYAKKIITDMLIEKDLPINEDKTIVQRLSTEPLTVHGLRVGFKEPRLPAGEVKRIRASVQSMEQLAREPNYRVSHAYRRDYNRCMGRVNKLSRVGHKQHSILVRRLKSIRPLPSRADLDRLEVMVSRLEKDHAEKRATFWYWKRYHRAHERLNVLQLIYIAKAKKFRERLKKVKPLYDS

SEQ ID NO: 3485 - protein, 399 aa, unidentified
  source 1..399: note = Related to JAGPVE010000007.1; note = Marinobacter sp.
MDDFLFHKVSTASISNVKNLCTALDITETDLEKALSLEPSARYEEVQVNKSDGSLRTAFKPHYLIRRIQRRINKRIFAPQKNEPNTIQWPNYIFGSIPNQIIDGEEIQKDYISCARRHCKAKSLLKIDIKSFFDNIHSDLVYDVFNEFFKYPKSVCEVLTDICCHENRVPQGGLTSSYLASLVLHDIEPTVVKRLLRKGLHYTRLVDDITVSSKIHDYDFSFAKKIITDMLYEKDFPINEQKTRIEREASTPLCVHGLRICFNEPRLASHEVKNIRAAVKNIEIVAMERHYRTTHPYRKDYNRCLGRVNKLARVGHNQHAKLVSRLKKVEPLPSERDIKRCTTMVTNLEMDHSTKGSRYWYWRRYHKAHQRLNILQRTFVHTANDLRARLKVIRPSYES

SEQ ID NO: 3486 - protein, 397 aa, Pseudomonas sp.
  source 1..397: note = Related to CP071730.1; note = Pseudomonas aeruginosa
MGQFQPTKNPKGSIATIDALCAALSISIDELNQALAMPIDERYTLPKKELFKSDGSPRVAYKPHHLIRKIQRRINKRILGQEGYIDWPNHIFGSVPNKKVPDGEDIVKDYINCARQHCLAKSMLKMDVKDFFDNIHVDLVFSIFNSFLSFSDVVSNTLANICCRGEFVVQGGLTSSYLACLCLFDVEADVVVRLKNKGLIYTRLIDDITVSSKRSGYDFSFARQIIEDMLFSRNLPVNSKKTAIHYHFSAPLMVHGLRVSFNEPRLPASEVKKIRAAVKDIEVLAKDHLYRITHAYRHDFNRVMGRVNKLSRIGHTQHENLKNRLLKCYPLPSFKDITRARLAVERVERDYEEKCATYWYKKRFYRAHERLNLLKRSFPDTASELRDRLRDLRPEYD

SEQ ID NO: 3487 - protein, 399 aa, unidentified
  source 1..399: note = Related to NZ_PZJP01000003.1; note = Salinicola aestuarinus
MSTNNNLYFQKNASNSIGSISNLANALNLTVNEIVRAVNLPNEVKYTANPQQKADGSQRMAYNPHRYLRKVQRRINKRIFADPSVVSWPDYIFGSVPNTTLSLSEVIKKDYVSCAARHCLAKSLLRLDIKDFFPNIGEHLVRAVFEDFYHFPPDVSEILVSLCTKDGGVPQGALTSGYLACLCLFDVEPEVVRRIEMKGLTYTRYVDDIVVSSKVHDHNFSLQEKLISSMLEDKDLPVNDTKTLIQRSSTAPLIVHGLRVSFKEPRLPSDEVRRIRSAVRNLEKQASEPNFRTTRVFRSAHNRCVGKVNKLKRVGHKQHSEYLRRLNLIKPLARRSDVERVVSMIRRLENDHGSISDTYAYHKRYFRAHERLNIIQRNYENIAFKLRQRLKSIPSNYVK

SEQ ID NO: 3488 - protein, 395 aa, unidentified
  source 1..395: note = Related to CP059843.1; note = Cobetia sp.
MIIMNNYKIKGSVIASPQNLAKALNLTLEEINAANALSTEKRYKEKNLPKADGNFRKIYKPNHRIRTIQRRLNKRIFSSSNVIEWPSYLYGSIPNTIGDDEIEMKKDYVTCASIHCQAKSVLKIDVKDFFDNIHSDLIFNIFIKLFKYPQEVAELLTDLCTYKNKLPQGGLTSSYLACLSLFDVEPDVVKRLENKDVKYTRFVDDITISSQHPNYDFSFAKKLVFDMLHSKDLPINEAKTTVQRLSSAPILVHGLRISFKEPRLPPEEARQIRAAVRNIEKLSKHPDYRTSNAYKKDYNKCIGRVNKLARVKHIQHKKLISRLRKVKPLPNRQAVIRARSMIRQLEHIYPTHLHDYWYKKKYFQAHERLNIIQRSFPNIAKTLRFKLKTIRPQYE

SEQ ID NO: 3489 - protein, 411 aa, Pseudomonas sp.
  source 1..411: note = Related to JABEMH010000004.1; note = Pseudomonas fragi
MSWVGRATFISNGLVILLTNPIKHSKNSISNRENLCKALRVSDDFLGSVLALSQSERYTKKDHVKKAGGGSRPIYNPHRFLRKIQNRINIAFFSNYYVIRWPHFIYGSVPNQKNGDGYDSKDYVSCAGRHCGAKSLLKVDVSSFFDNIHQDVVFAIFNDFLKYDAEVSSILTDLCCHHSHLVQGGLTSSYIASLCLYDVEGAVVDRLNRKGLTYTRLVDDITVSSKSLNTDFTYALKIISDMLTGKDLPINESKTRVFRTSTEPLTVHGLRVSFDTPRLPADEVGRIRAAVRNVESLAAQPGYRISHDYRHDYNRCMGRVNKLLRVKHTQHKVLLRRLNAVKPLPSRRDVNRAKDMVARLEMDFDSKKHTHWYKSRYHRVMERLIVLNRIYDKTSVQLRSKLRRLRPVVEN

SEQ ID NO: 3490 - protein, 397 aa, Pseudomonas sp.
  source 1..397: note = Related to NZ_UUEU01000227.1; note = Pseudomonas viridiflava
MLLNPIKVSKNSVSSRENLCKLLRVSDEFLTSVLALSQEERYTKKDHVKKAGGLSRPIFNPHRFLRRIQKRINIAIFSNNYVIRWPHYIYGSIPNQKNGDGYDSKDYVSCAGRHCQAKSLLKIDVSSFFDNIHADIVFSIFNDFLKYDREVSVILTDLCCHNSHLVQGGLTSSYIASLCLYDVEGDIVERLNRKGFTYTRLVDDITISSKSLGTDFTYPLKIVGDMLVAKDLPINEGKTRIYRTSTEPLTVHGLRVSFDSPRLPADEVGRIRAAVRNIESLAAEPGYRTTHNYRHDYNRCMGRVNKLHRVGHNQHGPLLDRLDAVRPLPSRRDVNRAKDMVARLEKDHKGKGHTHWYKARYYRLMERLVVLDRVYDKTCYQIRLKLKTLRPEREVEK

SEQ ID NO: 3491 - protein, 401 aa, Pseudomonas sp.
  source 1..401: note = Related to NZ_CP027762.1
MLANPLKISKNSVSSRENLCKLLRVTDEFLASVMTLSQEDRYTKKEHVKKAGGISRPIYNPHRFLRKLQKRINIAIFSNHYVIRWPHFIYGSVPNQKNNDAYDSKDYVSCAGRHCGAKSLLKVDVSSFFDNIHQDIVFSIFSNFLKYDEEVSRILTNLCCHNSHLVQGGLTSSYIASLCLYDVEGDVVERLNRKGFIYTRLVDDITVSSKSLNTDFTYALKIISDMLTAKDLPINESKTRVFRTSTEPLTVHGLRVSFNTPRLPADEVGRIRAAVRNLESLADQPGYRTTHGYRHDYNRCMGRVNKLLRVGHNQHKPLLARLNSIKPLPSRRDVNRAKDMVARLEKDFDAKRHTHWYKSRFHRVMERLIVLNRVYDITSKQLRSKLKRLRPESEDIIDKHV

SEQ ID NO: 3492 - protein, 394 aa, Pseudomonas sp.
  source 1..394: note = Related to JAGYWD010000006.1
MLTNPLKFTKNSISSRENLCKALRIPDDFLATVLALPPDDRYTKKDHVKKAGGISRPIYNPHRFLRRIQKKINIAIFSNNYVIRWPHFIYGSVPNQTNNDGYDRKDYVSCAGRHCGAKSLLKVDVSSFFDNIHQDIVFSIFKDFLNYEKEVSEILTNLCCHNSHLVQGGLTSSYIASLCLWDIEGKVVERLNRKGLTYTRLVDDITVSSKSLETDFTYALKIISDMLTTKDLPINESKTRIYRTSTEPLTVHGLRVSFSTPRLPSDEVGRIRASVRNLESLAAEPSYRTSHGYRHDYNRCMGRVNKLHRVEHNQHKPLLMRLRAIRPLPSRRDVNRAKDMVARLEKDYDTQSHTHWYKSRFHRVTERLIVLDRIYTKTSTLLRSKLKKLRPVGE

SEQ ID NO: 3493 - protein, 402 aa, Pseudomonas sp.
  source 1..402: note = Related to PCQD01000007.1
MVRLFPQKVSTASIANVDSLCQALSIPRSVLDQVLALGLDERYKEVMHIKKADGTNRPIYNPHHLLRRIQKKINERIFSDTKIIKWPGFLYGSIPNQTGSSGQDVSKDYVACAAVHCGAKSLLKIDVESFFDNIQRDIVLNIFSKFLKYPEDVADVLTNICCYKGRLVQGALTSSYIASLCLWDVEGNVVRRLNLKGLRYTRLVDDITVSSVGLATDFSYAKKLVEDMLSDRDLPIKASKTKVYRMSSEPLTVHSLRVNFSSPRLPADEVGRIRAAVKHVERLASEPNYITTHSYRKVYNRCVGRVNKLSRVGHNQHKILLARLNKIKPLPSFSDIRRAKAMLARLKSDFGSKGHTHWYRSRYYRLDQRLRILSRRYERTSDQIREEIRGIKPFKKHSSETH

SEQ ID NO: 3494 - protein, 364 aa, Pseudomonas sp.
  source 1..364: note = Related to NZ_RWLL01000003.1; note = Pseudomonas aeruginosa
MLSLPDNILYTEKEIPKAGGKVRVVYNPHRLLRRVQRKINTQIFSSSNIIEWPTYLYGSIPNQEYEAELKHLNNKDYVSCAARHCGGRSVLKLDVESFFDNVHEDVVRSIFADFLKCSPEVSDVLTSLCCKGEHIVQGALTSSYLASLCLYDVEGTVAERLRRKGFVYTRLVDDITVSSKKLGVDFSYAKSLIVDMLKEKDLPVNEGKTKVYRASTAPLTVHGLRIGFSTPRLPSDEVRRIRAAVRNVELLAKENNYRTSHAYRHDFNRCMGRVNKLERVKHNQHQSLVRRLKDIKPLPSIRDIGRAKKMLERLRKDYKLRSHTYWYRARYFKVLERLNVLQRTYEHVAFDFRVELKGLKPTQN

SEQ ID NO: 3495 - protein, 400 aa, unidentified
  source 1..400: note = Related to nan
MNLVGNNLDIPRKISTGAIASLNSLYNTLGCTESEITSVLNIPPDQLYTEIRISKAGGKQRVVYNPHRLLRRLQKKINEQIFSNSDVISWPCYLYGSIPNQNYEDGLEIYSRKDYVSCAARHCGARSLLKLDVENFFDNIHYDVVYAVFSDFLKCSSDVSDILSRLCCKGEHLVQGALTSSYLASLCLYDLEGAVAERLRRKGFVYTRLVDDVTVSSKKLNVDFTFARNTVVSMLEGKDLPVNESKTKVHRVSTVPLSVHGLRIGFSTPRLPADEVRRIRAAVRNIESLATESNYRTTHAYRHEFNRCMGRVNKLLRVEHSQHPSLASRLERIRPLPSFRDIARAKGMIDRLRSDHTSRAHTHWYKTRYHKVLERLIVLQRTYKHVSYEFRVELKGLKPI

SEQ ID NO: 3496 - protein, 404 aa, Pseudomonas sp.
  source 1..404: note = Related to NZ_JAETZZ010000009.1; note = Pseudomonas putida
MIDARFVNPIKLSADSISSVSSLCDVLDISQKELGEVLALSGEERYSSKEISKAGGKSRIVHNPHKLVRKIQRRINNRIFTAENYIQWPSYLYGSVSNQEYDVEDDQTYLNGKDYVSCAARHCQASSILKLDVQDFFDNIHIGLVEQVFKDFLCFPEPVAKVLANLCSRNEHLLQGALTSSYLASLCLWDVEGKVAERLGRKGLVYTRLVDDITVSSKSIKTDFTYAKNIIIGMLESKDLPVNEAKTQVHRASTKPLTVHGLRVGFSTPRLPADEVRRIRAAVRNVESLAEEPNYRVKHAYRKDFNVCMGRVNKLQRVGHSQYDALVSRLEKVQPLPSKRDIGRVRSMIERLRSDYPKRAHTYWYRVRFYKVHERLNILKRTYRHEALDFRIELKALKPPKSGQ

SEQ ID NO: 3497 - protein, 396 aa, unidentified
  source 1..396: note = Related to NZ_JAAAFX010000009.1; note = Variovorax boronicumulans
MAVLVPYKKTNTSIGSIESLCGTLGITQEELARAIAMPLVMRYTTVEAQPKADGSVRSVSNPHFLIRKIQRRLNKRIFSNGALIGWPDYIFGSIPNQFDALGVEADKDYIACAARHCGAKSILHLDVQSFFDNIHRTQVLAIFEDFLKYSEAVSDQLADICCNGENLVQGALTSSYLATLCLWDVEGEMVNRLNRKSLTYTRFVDDITISSKVASYDFSYAQGIVQDMLASKDLPINSGKTRVRRISSEALTVHGLRVNFSQPRLPSDEVRRIRSSVQNVEKLAVESNYRQSHSYRKDFNRCMGRVNKLKRVGHKQHADLLKRLREILPLPSFKDIERAHLMVARLKDSYQAKGDSFWYRRRFYATHERLTILDRSFHAIAVKLRGELRLIRPSYD

SEQ ID NO: 3498 - protein, 408 aa, unidentified
  source 1..408: note = Related to NZ_JAHNZV010000018.1; note = Psychromonas antarctica
MSYKYDFGKRSKRSIGSIAKLIAVLDITQKELDIVNLLTETQKYKKKETVKSDGTVRVVYNPDKTLRKIQRRINKRIFNQRGNKGGLISWPNYIYGSIPNTPQYNSNQKNLDFSKDYVACAANHCGSKSLLKMDISDFFDNIHSVHVKSVFTDLLKIPDDVSDLLTALCCLKGNVVQGALTSSYIASAVLFDVEGDVVRRLHFKGLTYTRLVDDITVSSQKLNYEFTFAQNLIADMLSKKDLPINLNKTIISNCSTEELIVHGLRVNFKEPRLPSSEVSRIRASVKHLELLSQDSIYRVSRDYRKSYDRCLGRVNKLGRLGHKQHATLLTRVLRIWPLPNKKDINLASNLIKKLEGWHLTTKADEYWYYRLCNKAHSELNILQRSYSKTALSLRKRLKNITPNREDYL

SEQ ID NO: 3499 - protein, 337 aa, unidentified
  source 1..337: note = Related to DNQQ01000166.1; note = Shewanella frigidimarina
MSYKYDFGKRSKRSIGSIAKLLDVLDIKQEELDLVNSLTEDQKYKKNEIPKSDGTVRVVYNPHKTLRKVQRRINKRIFNQRHNKGGLISWPSYLYGSIPNTPQQNSTTKTFDLSKDYVACAANHCGSKSLLKMDISNFFDNIHETHVKNIFSNLLKFPEDVSNTLTSLCCLKGNVVQGALTSSYIASAVLFDVEAQVVRRLHFKSLTYTRLVDDITVSSQKLNYDFTFAQRLIADMLQSKDLPINLSKTIIFTCSTEELIVHGLRVNYSEPRLPSSEVARIRASVKHLELLAQDSVYRVSRDYRKSYDRCLGRVNKLGRLGHKQHSILLERTVKIKP

SEQ ID NO: 3500 - protein, 400 aa, unidentified
  source 1..400: note = Related to QFOM01000049.1; note = Shewanella oneidensis
MAFRYDFIKRNRNSISSIPNLLDALGIEQVQFEQFQNLRDLDKYKASSVPKSDGKIRTVYNPAQLIRLFQRRINTRIFHPKHSQGGLITWPSYLFGSIPNNPQSPESSSRNYITCAGMHCGAKSILKMDISDFFDNIHHREVINIFEKLLKFPNDVSRTLADICCHKGNVVQGALTSSYIASAVLFDVEPNVVRRMHEKHLVYTRLVDDITISSKIYDYDFSYAKNIVIDMLRKKGLPTNENKTIVINSSTKEGLVHGLRVCFKEPRLPADEVGKIRASVQHVERFARDAEYRTSREYRRIYNRCLGRVNRLKQLGHNQYQNLKDRLIKIEPKPCKADIKKARNLVRKVKTLHKDYGSGYRYRRLYYKAQYELNILQRTFSVTADSLRKQLRRVKPTYEQ

SEQ ID NO: 3501 - protein, 408 aa, Aeromonas sp.
  source 1..408: note = Related to NQMB01000054.1; note = Aeromonas veronii
MENTLNYRKRYTSSIGSVSNLLSCLDITQQEYDAFCALASEEKYKSFKLPKPDGTSREVHAPHKLVRKIQRRIVRRIFGSPNRNQWDKKRPKGGAIIWPEYIYGSVPNDYYNNTPISKDYVACASNHCGCKSILKMDLKDFFDNITPDLVFNVFNNLLKYPRPVSNALVKICCHNGKLIQGALTSSYIASAVLFDAEPKLVKRLKSKNLIYTRLVDDITVSSLNQDYDFSYATELIRQVLYEKNLPLNESKTIVLRVSTSDILIHGLRVSFSKPRLPADEVSRIRASVKNLESLAKIADYRVSRDYRRSFNRCLGRVNKLKRLGHNQYKALQRRVIKILPMPSRMDITRLDSFVYKLEGWYQNHSDSYWYKRLYHRAYYDLNILNRTFKASAEKLKARLRLIKPNCDD

SEQ ID NO: 3502 - protein, 408 aa, Aeromonas sp.
  source 1..408: note = Related to NZ_PGGC01000010.1
MENTLNYRRRYKNSISTVSNLLSCLDVSSSEYEDFKALAHSDRYKEFYVPKADGTSRHVHAPHKLVRKIQRRIVRRIFGSPKRNPWDKHRKKGGAIIWPEYIYGSVPNDCYNNTMISKDYVACASKHCGSQSVLKIDIKDFFDNITPELVFNVFNKLLKYPRAVANALVDICCHNNMLIQGALTSSYIASAVLFDVEPAIVQRLKSKGLSYTRLVDDITISSRNPEYDFSFSLELVRQMLYGKNLPLNETKTNIIRSSTIDILIHGLRVSFKEPRLPSDEVSRIRASVKNLESLAKIADYRVSRDYRRSFNRCLGRVNKLKRLGHKQYISLQTRVLNILPLPSKMDITRLDSFIHKLEGWYANHKEEYWYRRLYHQAHYDLNILNRTFEHSSRRFRSRLNDIKPMCDD

SEQ ID NO: 3503 - protein, 407 aa, unidentified
  source 1..407: note = Related to JAKRFW010000006.1; note = Pseudoalteromonas sp.
MTSKYEYHVRKRTNRSIPSIKSLKRALSISDTEIDSFYELIKEGKAYKRVLGHLKSSGDERLVYDPHPLVRKIQRLINSRVFNPRKPKEGLIVWPPYLYGSVPNTVKVIKGKVEVTSRDYISCAKNHCLTKSILKIDIKDFYENIHKSDVFDIFSKVLKYPDDVSTLLADFCTYKDKIPQGGLTSSFIASAVLHDVEPKLVQRLHKKKLIYTRLADDITVSSFTNNYDFNLCISLIKEMLISKDLPINEDKLVISNHSNSATLVHGLRVNFKEPRLPEDEISKIRASVRSLEKLAQDSKYRTSRDYRRSHSICMGRVNRMQSIGHNKARQLMVRVLKILPLPSYQDIITSHKLVYKLEKSFKKDKCEYFYKRLYNLAQYELNILQRSFSREAHELRNRLKRVKPNEV

SEQ ID NO: 3504 - protein, 407 aa, unidentified
  source 1..407: note = Related to LKDX01000018.1; note = Pseudoalteromonas sp.
MKTHFQYHIKKRTNRSIPSIGVLKRTLSITDEEFDSFYTLIANDDAYKKVSGHFKSSGDERLVYNPHPLVRKIQRMINSRIFNPKKPKEGVVIWPKYLYGSVPNTLKWVDGKLEVFHRDYISCAKNHCLTKSILKVDISDFYENIHWQDVYEIFNKVFKYADDVSKALADFCTYDNKVPQGGLTSSFIASAVLHDVEPKLVQRLHKKKLIYTRLVDDITVSSYTKNYDFTLAVGLIKEMLLSKDLPINEEKLVISNHSNSSTLVHGLRVNFKQPRLPEDEVSKIRASVRSLENLAKDSKYRTSRDYRKSHAMCMGRVNRMQSIGHNQAKQLLNRVLKILPLPSYQDIITAHKLVYRLEKNFENDKGTYSYKRIYNLAHYELNLLQRSFSSHAKGLRLRLKEVRPNEV

SEQ ID NO: 3505 - protein, 386 aa, unidentified
  source 1..386: note = Related to NVWL01000003.1; note = Oceanobacter sp.
MKHLEKVPSAKSIGSLNKLSHALGIEKSILIDVAESIGGYRKSERTKDNGKIRVVYSPSRIVRKIQSAINERIFTDPRIISWGEYLYGSIPNDEYVTRDYISCAARHGMCKSILKMDISDYFDNIHEDAVFDVFNGFLKYPNDVSTILAGICTHEGRVPQGGLTSSYLANLVLYDVEEIVINKLEKKKLTYTRYVDDITVSSLSYGYDFTYAQDLIKNMLHGKGFPVNEEKCVIERSGTIGLSVHGLRVGYDRPRLPREEMRRIRANVQKVEIISKEPGYRTTHSYRRDFNRCMGRVNKLVRLKHDQGAKFIKRLNAIKPLPSIKDINRCRKMVWFLAKDYENKKRRLSYERRFYICHERLNILKRSFYQEEQYLRSNLRTIRPVS

SEQ ID NO: 3506 - protein, 422 aa, unidentified
  source 1..422: note = Related to CP011924.1; note = Pseudoalteromonas piscicida
MDKVFLDSSYSMGRPSLLVRSENMELIDYYDKDSGNSISSIKNLCLALDINESELDEISQLGDDRYVKSEVPKSSGGVRIVYNPHRTLRKVQRRINNRIFNPKSGAIIRWPSFIYGSIPNQHLLHGELEHKDYVACVKNHCLRSSILKVDVQDFFNNIHIDHVVEIFTSFFKYPDDVSNCLAELCCYKDFVVQGALTSSYIASLCLFDVEPDVVRRVKRKGLVYTRLVDDITISSMDRDYDFSYVKSLVIDMLHEKDLPVNVEKTNVFRVSEGPLLVHGLRISFQEPRLPADEISRIRASVKNVERLASEPKFRTTHAYRQDYNRCMGRVNKLKRVGHNQHKKLTERLLKVHPKPSKKDLKRIKVMISTLERDYEKKGDNYWFYKRFYRAQERLNLIAKSYPNYVNKLRPRLKKVFPNYDKS

SEQ ID NO: 3507 - protein, 399 aa, unidentified
  source 1..399: note = Related to PNDP01000055.1; note = Pseudoalteromonas sp.
MEVIDYFAKDSDNSISSIKNLCRALDLTESEINEVRALGSDSYIQSEIPKSSGGLRRVYNPHYKLRKVQRRINNRIFNPKSGAIVHWPSFIYGSIPNQNLLDGDIDHKDYVACVSNHCLSRSLLKIDVQDFFNNIHIDHVTDIFKNFFKYSDDVSECLAEICCYNGFVVQGALTSSYIASLCLFDIEPEVVKRVRRKGLRYTRLVDDITVSSLERDYNYSYVKNLIIDMLHQKDLPINEEKTNVFRVSEGPLLVHGLRVSFREPRLPSDEVSRIRASVRNLEKLASEPKFRTTHAYRKDFNRCMGRVNKLKRVGHNQHRKLITRLLKVSPKPSKKDLKRIEVMLERLERDYDKKAGNYWFYKRFYRAQERLNLIAKSYPNLAKNLRLRLKCVFPIYDKH

SEQ ID NO: 3508 - protein, 399 aa, unidentified
  source 1..399: note = Related to LAHP01000027.1; note = Arsukibacterium sp.
MATDVLFKKVSAPIVSIEKLCLALDISKEELNDALKLTSSERYTKSEVPKPNGKVRIVHNPHKLIRKIQRRINTRLFNPKPTGRGVVEWPYYIFGSVPNVKDPIKPIERDYIACARQHCLSQSILKIDITDFFDNIHIDHVYYIFRHLLDYSDEVCNVISDICSLNGALLQGALTSSYLACLCLFDVEPNVVIRLQRKGLRYTRLVDDITVSSIKDGYDFTLAKNIIVEMLESKDLPVNDAKTQIIHKSSVPLVVHGLRVNFKEPRLPSSEVSKIRASVKNIEQLAKERHYITTHAYRKDFNRCMGRVNKLKRIGHNQHQSLVERLRKILPLPSKKDIERCKEMVSGLESDFPNKKGHFWYHRRFYRANERITILDRTFKSIAKELRLKMKDIRPLYKD

SEQ ID NO: 3509 - protein, 399 aa, unidentified
  source 1..399: note = Related to PBYW01000011.1; note = Alteromonadaceae bacterium
MFDRFTFSAAKAPITSIDKLCETLSVSREELYDTLDLPDELKYTETQIPKSFGKVRKVHNPHKKLRKLQRRINRRLFNPKGKSDSVINWPVYIYGSVPNQEIEGVTYNRDYVACARQHCGSRSILKLDISDFFDNVHEDHVKNVFANLLKYEEEVAEVLTQLCCFNGSLVQGALTSSFLACLCLYDIEPKLVKKLSRKNLRYTRLVDDITISSTQPHFDFSMVKDIVLRQLYEKDLPVNKDKIVELYSGTSPMLVHGLRVNYSEPRLPSEEVSRIRAAVKRIELQAIEPNYRTSHTFRKDFNRTLGRVNKLARMGHNQHKKLSARLSNVRPLPSKKDIERCWSMLARLQRDYNSQKNSYWYKRRYHRLSERLIILKRTFHKTEARIREALKKIKPGFVD

SEQ ID NO: 3510 - protein, 425 aa, unidentified
  source 1..425: note = Related to NZ_LJSO01000004.1; note = Pseudoalteromonas sp.
MANVYTDEMELCQLPLNNKYNFKYIINSGPIKSIQDLCEKVLDIPISELYKALSIAEEERYQRASVPKKDGTIRVVYNPHYLIRKIQRKINSRIFNPKVKLGKNPGVIKWPPYIFGCIPTQYQEVDEGELITDSRDYIACAKKHCLSKSILKIDISNFFDNVHKSIVEDIFKELLKYPDDVAEVLADICCKGEHLVQGGLTSSYLASLALWDVEPEVVKRLNNKGLKYTRLIDDITVSSKKQNFQFDLVKDVIVNMLHNKDLPVNNSKTEVSYASTKPLIVHGLRVNFKEPRLPSDEVSRIRANVHNVEKLAKERHYRTIHPYRKDFNRCMGRVNKLKRLGHNAHKPLLKRLQAILPLPSKLDISRCEKMITRLEADFDKGKGNTIWYWRRYNRASQRLIVLKRTFIHQALDFRERLKNVKPTVV

SEQ ID NO: 3511 - protein, 328 aa, unidentified
  source 1..328: note = Related to NZ_JACAVQ010000006.1; note = Aliidiomarina indica
MTYRMYFERKVSGPIDSRAKLCQALSIGDEELTQALALTEAERYTESSVPKADGTTRTIYNPHHKIRKLQRRINTRFFNPSKKIHGNDSGIIRWPSYIFGCVPNDIGDDGETEVQKDYVACARVHCPSKSILKMDISDFYNNVHRDLVLEVFKDMLGFTDDEVASLLTDICCKGDSLVQGGLTSSYLACLALYDEEPEVVRRLKRKGFRYTRLIDDITISSPNENVNFDYVKDLVVNMLHAKELPVNRDKTKVQYVSTEPLLVHGLRVNFKEPRLPKGEAARIRANVHNVERLAKERHYRTIHPYRRDFNKCMGRVNKLARVNPPLAG

SEQ ID NO: 3512 - protein, 402 aa, Alcaligenes faecalis
  source 1..402: note = Related to NZ_UFSQ01000006.1
MTTALINDKIKKSNSALIGNFKNLLHALEISDDDVSKLRAFLPHDRYKEKTIKKKDGSDRKVYAPIPVLKKIQNRIKNRILANQDVISWPSYIFGSIKNQKIEGGGIDSRDYVSCAAKHSGAKSLLTVDIKDFFDNVHEDIVAAVFERYVSTDKEVINWLLDVCCYEQHLVQGAPTSSYLANMSLYDIEPQLVHKLARKGLIYTRLVDDISVSSKIYDYNFSYALKLIEDALSEKGLYLNPEKISQRSVGSAPLTMHGLRIDYQTARLPAAEVGQIRAHVKNLEDAAKSYKSRTSYAYRQDYARCMGRVNKLARVKHNQHSKYLARLRAIQPLPSGNESTYCLKKLEVLEKTYLEAKETFSYRKNFYRLQEKINILSRSFPRSAEDMKKRMKLIAPPPKDGK

SEQ ID NO: 3513 - protein, 405 aa, unidentified
  source 1..405: note = Related to JAKCOW010000055.1; note = Shewanella algae
MSRPTIRNSAPINTLETLLKTLSISSDQLEEILALSAGERYTKPLNDVHKKDGSIRKIRCPHHSLRVIQRRISKRLIYDKVIWPEYLFGSIRTRDYEDLSERDYISCAAKHCGAKSLIKIDVENFFDNVSRETVVGIFKDLIRCSDKNSELLSEICCYEDNLVQGAITSSALAMLALWDIEGKVVDRLARKGLVYTRLVDDITISSKSHNFNFDHALNIVKQMLYEKDLPFNQAKTKIERLSSEALTVHGLRVAFKEPRLPSSEPRVIRSYVQRLEKLASDGFHRRTADYRKDYNRCVGKVVKLHRVKHNKYRPLKDRLDRIPPLPSKRDLKVVEKLICRLERDYNSETKGIGGGKYQDTYWYKKRYSRIMYRLSIVKRSYKNKYDEYIERLDKVKPDTKGLYND

SEQ ID NO: 3514 - protein, 400 aa, unidentified
  source 1..400: note = Related to NZ_BMXV01000003.1; note = Marinobacter zhanjiangensis
MIDPRFPLFPEKTTEKSISTLQSLADAFSIPLADLEKARQLSPIERYRAKEIPKAGGGIRQVYNPSYLIRLIQSRVNKRIFLDLVRWPGYLYGSLPNTYIDDEPVYRDYIACAKNHCLSKSLLKIDISNFFDNIHRDHVYRIFNGLLKFPPPVSEYLTDICCYEDFLVQGALTSSYLATLCFWNCEGDVVKRLSRKGLVYTRLVDDITVSSRRHGFNFDYAEHHIKMMLIDLDLPANDRKKQILRDGIEPLHVHGLRVNYQTPRLPADEVRRIRSAVHNVVKMAKINNYRTSSSYRSLHDRCVGRVNKLARVGHNKHKIFKDQLLGVLPLPSRRDVEKAEGAISFLESLDRSRIKERRYTRKYHLVRYRVSIIARTYEKEARSFESRLYALSDCVGSYDW

SEQ ID NO: 3515 - protein, 400 aa, unidentified
  source 1..400: note = Related to NZ_NIHC01000001.1; note = Marinobacter salexigens
MIDPRFPLFPEKTSKQAISSLESLAEALSVTVKDLEEVRSLESDKCYRLKEIPKNGGGLRKVYDPHPLIRRLQSRINKRIFLDLIQWPGYLFGSLPNINIDGQLVSRDYIACAQKHCKAKSLLKVDVNNFFDNIHRDHVFDIFRMFLKFSDEVSNCLADICCYNGFLVQGALTSSYIATLCFWQNEGYVVKRLSRKGLIYTRLVDDITVSSKRHDFNFEYAEHHIKMMLVDLDLPANKRKREILRDGIEPLQVHGLRVNYASPRLPADEVRRIRAAVKNVVRMSKINNYRTSLSYRAMHDRCMGRVNKLARVGHNKHGDFKRELVDVIPLPSVRDLEKAESSISFLEKLDPERLKLRKYTRRYHLAKYRVSIVARTYCQEADDLSFRLQKLSVFVGDYEL

SEQ ID NO: 3516 - protein, 398 aa, unidentified
  source 1..398: note = Related to CP034246.1; note = Shewanella algae
MNTMISSLYPQKSSTSSISNLENLAESLSLDKNLLEYSQKLTQEERYKKIKIPKSNNSYRTVHDPIDIIRKIQNRINTRIFTQLVDWPDYLFGSIPNDIIDSRDYISCARKHCLAKSIFKLDISNFYDNIHRDFVYDIFNNFFKFPTEVSDFLTDICCYDDYLPQGALTSSYIATLCFWNVEGDLVKRFQRKNLVYTRLVDDITVSSKKHDYDFEYVEKHIKNMLLHFDFPVNNSKTKIMRDGLEPLNVHGLRVNYPEPRLPSAEVNKIRAAVHNVVKMSKINNYRTSKSYRNLYDRALGRVNKLARVGHNKHSELINKLKKVTPLPSKRDLNYIKNNIRTLKNLNELDCKKLRQLKYKRKYHLINYRISILNRTFPNKASTLRNELKLLKDKILDKQ

SEQ ID NO: 3517 - protein, 368 aa, unidentified
  source 1..368: note = Related to JAGPVP010000081.1; note = Zhongshania sp.
VAELEAIRGIPLSERYREKPLQKGHGKIRLVYNPSFKIRLIQNLINTRLFKDLIWWPEFLFGSLPNSLHEERLIERDYIACASVHCGAKSIYKIDISDFFDSIHKDFVYEIFSKLFSYPHEVAEYLTDVCCYENKIPQGGLTSSYIATACFWDLEGEVVKKLSRKGLKYTRLVDDITVSTTVSNYDFSYVDRHVRDMLIAKDLPVNESKTLALYSGMAPLFVHGLRVDFKQPRLPAKEIANVRASVHNVCSWAKVDSYRTSVTYRAAFDRCLGRVNKLARVGHEKHAVYVAKLRKVAPLPSQFDIDSAEASISRLEKISTAKLVSVKYKRHFALVRYRITIIKRRFPSIAEKFKLRLRALEVRRNAAL

SEQ ID NO: 3518 - protein, 425 aa, unidentified
  source 1..425: note = Related to nan
MTVTPCYSALDYGGVGHDIKLPRMAVEMTDLRPEKITKSSIGSISKLSVVLSIPESDLSAILKILPENRYKKITIPKGVGGERIVYSATPLLRKIQHRINTRIFKKLIKWPPYLYGSLPNDKELVGGQTKTTVQRDYIACAQNHCGAKSILKLDIANFFENIHRDTVKKIFRKFFHYPENVSDYLTEVCCYGDTLVQGALTSSYLASLCMWDTEYKVIQKLSRRNLVYTRLVDDITISSKHRGYDFRNAESHVRAMMLKKDFPLNLSKTKIMRAGSSPLLVHGLIVNFRTPRLPSSEISRIKASVNNLVKASATDNYRTTYSFRAQYFRCLGRVNRLARVNHNKHEYLINKLKKIRPKPCKTDIERVENAIDRLKSLKDKTTDSYRRIYNIARYRIGIVSRSFDRKSMILLSELKKLEKPVSKID

SEQ ID NO: 3519 - protein, 409 aa, unidentified
  source 1..409: note = Related to NZ_PDWP01000037.1; note = Pseudoxanthomonas suwonensis
MIHTYFSGAAMLPGKGVQKIARHSIGSVRSLCRTLSIEESELDELLTWPADARFKKKKIEKSSGGHRTVFVPNWKFRRIQRKINKRILGNTKIIRWPKYIFGSVPSSSADAEEVVGRDYIACAAVHAGSKSILKVDISDFFDNVEHDVVSDVFEKFLKYPPEVVEALCNVCCLKGRLPQGAPTSSYLANLAFWDVEHRLVRRLHQKGLRYTRYVDDITISSRKHAQDFSLALRLVDGMLIDKNLSRNEKKTLTLRSGINPLVVHGLAVEHSVPRMPAQEYKRIRASVRALENFVTDPGFRTYNAYRRMFNTCQGRVNKLSRLKRVAHASYVNRLRRIRPLPSHRDLAWCKKVAERLLARFKVPGATDGYFFKRDLFRLRERLNLLRRTYLHEAAELKNRISHIRIFSHE

SEQ ID NO: 3520 - protein, 399 aa, unidentified
  source 1..399: note = Related to NZ_VSSP01000009.1; note = Luteimonas sp.
MSLKSHVTKVSRHSIGSVRSLCRTLSIDEPELQALLSWVPESRFKKKAVTKSSGGSRTVYVPHWRYRKILRKINKRILGNTKIIRWPDYVFGSVPSSDADDARLIGRDYIACAAVHSSSKSILKVDICDFFDNVEQPLVRNIYTDFLKYPPAVAETLCNLCCIHGKIPQGAPTSSYLANLVFWDLEANLVARLKQKGLTYTRYVDDITISSRKYSQDFSLALKLVDQMLMDKDLTRSEVKTQVLRSGTKPLLVHSLRVEHATPRIPSPEYRRIRSAVRTLENFAADAGFRTYDAYRRMFNVCLGRVNKLSRLRKKSHTAYITRLNRVGPLPSHRDLRWCQRTAREVLKRFAIPGESERFFFRRKLFRLRERLNLLQRTYVHEASAIRDSLAQIKIYSHE

SEQ ID NO: 3521 - protein, 388 aa, unidentified
  source 1..388: note = Related to VWWQ01000001.1; note = Comamonas sp.
MTKLIEDFTKRVAGSISSIPTLANALDINLSEIENLLNTPADQRYKEKFIEKKHGGVRKVYNPSALVRKIQQRIINRIFKPLVDWPFFVYGSIPKSNGQPAKDYVAAANVHAGAGSLLKMDIKDFFDNIQREVVFDVFFDFFKYPYPVSEILTDICCRDDRLCQGALTSSYLAALCIFDVEAKMVKRIEKKGVTYTRYVDDITISSKNRSYDFSYVEKVVEEVLMSKDLPVNKGKTSVINLTSKPLLVHGLRVNTSNARLPIAEVKRIRAAVQHLEVASREPNYITLPTYREEFNKCMGRVNKLARVGHIQHSALVNRLKRIRPKSTRSDLYVAIQMLKIIRRTSQQRRQHYFFKKQCAQAKTLLTLIKKNNKYSRRAAILLNYLRKI

SEQ ID NO: 3522 - protein, 395 aa, Proteus sp.
  source 1..395: note = Related to DPFJ01000041.1
MLTDLPINRSSSGISTLISLSKTLGFSLEELEDIRNIPLDKRYFKLEKPKIDGTKRVVYRVHHKLKRLQRRINSRIFRELVIWPEFLFGSIPNDNDEVSLKRDYISCASRHCSAKSILKIDIKNFFDNIHRDLVSDIFSDFFRIKSEANEYIVDICCLENFIVQGALTSSYIASLCLHDLETNVYRRAKRKGLIYTRLVDDITVSTKVNDFDFTQIKKHIETMLAEKDLPINYEKSGVFQISTKPLLVHGLRVDYSKPRLPSDEVKKIRASLHNLIGNAVKNNNKTTIAYRTEYNRCMGRISKLGRLGHEKHKVFMGKIKCIRPMPSYLDVKNCKKKLKGLESLYSRGFNRSNKYSREFNVVSHYITLIKRSNSFMKIANEFRERLNKIKPNVEK

SEQ ID NO: 3523 - protein, 396 aa, unidentified
  source 1..396: note = Related to NZ_CP035382.1; note = Leclercia adecarboxylata
MSNDLPSNKSNSGISTLTSLSKALGFSIDELVEIRSIPLDRRYHKLEKPKSDGSMRIVYRPHHKLKRLQRRINNRIFRELVIWPNFLFGSVPNDNDGEDSLNRDYITCANQHCGAKTLLKVDIKNFFDNIHKELVSDIFSDFFYINAEANDYITDICCAGEFIVQGALTSSYIASLCLHDVETTVYRRAKRKGLVYTRLVDDITVSSKVYDYDFSQIKKHIEDMLAEKDLPINIVKSGVFQVSTKPLLVHGLRVDHNKPRLPSYEVRKIRASLNNLIGNSIKNNNKTSLAYRVEYNRCMGRINKLGRLGHEKHAVFMGRIKKVRPMPSFQDVRECKKKIKWLEIQYSKGFNKSDKYFRVFQITGHVISLINRSDAFSTIAKELRTRLNKVKPDVEK

SEQ ID NO: 3524 - protein, 396 aa, unidentified
  source 1..396: note = Related to CP008955.1; note = Yersinia kristensenii
MPSDIPINKSNSGISTLNALSKTLGFSLLELDEIRNIPLDKRYVKLEKPKADGSVRVVYRPHHKLKRLQRRINSRIFRELVVWPDFLFGSVPNDNDEEQSLKRDYITCAGQHCSAKSILKIDIRNFFDNIHRDLVSNIFNDFLCIKSEANEYIVDICCAGDFIVQGALTSSYIASLCLHDVETKVCRRARRKGLTYTRLVDDITVSSKVYDFDFSQIRKHIEDMLAEKDLPINSDKSGVHQISTKPLLVHGLRIDHSKPRLPSDEVKRIRASLHNLINNSSKNNNKTSLAYRVEYNRCMGRINKLGRLGHEKHTVFMGKIRKVRPMPSYRDVRECKKKLKRVEYLYSKGLNKSEKYFRNFQLVGHNISLINRSSSFSVLAKEFRVRLNKVKPDVEK

SEQ ID NO: 3525 - protein, 396 aa, Enterobacter sp.
  source 1..396: note = Related to NZ_JAHEVU010000002.1; note = Enterobacter quasimori
MSSELPIKKSNSGISTLDSLSKTLGFSLEELEEIRSIPLEKRYFKLEKPKTDGTMRTVYRPHHKLKRLQRRINKRIFRELVIWPDFLFGSVPNDNDDEDSIKRDYITCASLHCSAKSILKIDIKNFFDNIHKDLVGDIFEGFLCIKSEAKEYMIDVCCAGEFIVQGALTSSYIASLCLYDVETQVYRRAKRKGLTYTRLVDDITVSSKIYDFDFTQIRKHIEDMLAEKDLPINFDKSGVFQISTKPLLVHGLRIDHNKPRLPSNEVRRIRASLHNLINNATKNNSKTSLPYRIEYNRCMGRINKLGRLGHEKHAVFMEKIKRVRPMPSFSDVKECKKKLKKLEELHAKGFNKSERYLRNFQLVGHSISLIKRSDSFSILAKELRMRLNRIKPNVEK

SEQ ID NO: 3526 - protein, 396 aa, unidentified
  source 1..396: note = Related to LR134235.1; note = Klebsiella variicola
MSPDLPTKKSSSGFSTLTSLSKTLGFSLEELNEIRDISIDKRYVKLEKPKTDGSMRIVYRPHHKLKRLQRRINKRIFRELIVWPSFLFGSVPNDNDEEDALKRDYITCASQHCSAKSILKIDIKNFFDNIHRDLVGDIFENFLCIKSEAKEYMVDVCCAGDFIVQGALTSSYIASLCLYDVETTVYRRAKRKGLTYTRLVDDITVSSKVYDFDFTQIRKHIEDMLAGKDLPLNHDKSGVFKISTKPLLVHGLRIDHDKPRIPSDEVKRIRASLYNLTSNSKKNNNKTSAAYRVEYNRCMGRINKLGRLKHEKHVIFMEKIKRIRPMPSFRDVKECKKRILWLEKLYSKGLNKTERYFRVYQVTGHNISLINRSASFSDIAKEHRFRLNKVKPNVER

SEQ ID NO: 3527 - protein, 397 aa, unidentified
  source 1..397: note = Related to nan
MLSDLPRNKSISGISTLLSLARALGLPREYLEEIKNMPLETRYSKLEKPKIDGSMRVVYRPHHKLKKLQRRINNRIFRELIIWPEFLFGSIPNDNDSDDDALKRDYITCAGQHCSAKSILKMDIKNFFDNIHRDLVDDIFENFLHISLEAKEYLVDFCCSGDFIVQGALTSSYIASLCLYDIETKVYRRAKRKGLVYTRFVDDITVSSEIYNFDFSQIRKHIEDMLADKDLPINLEKTGVYQVSTKPLLVHGLRIDHSTPRLPSYEVRNIRASLHNLMKNSTKNNNKTSLAYRVEYNRCMGKINKLGRLGHEKHDVFMKKIKKIRPMPSYKDVKHCKEMLKKLEDLYEKGFNKSNKYYREYQIVGHNISLIKRSNSFLVVSEDLRKRHNKIKPNFEK

SEQ ID NO: 3528 - protein, 395 aa, Escherichia coli
  source 1..395: note = Related to NZ_LR778152.1
MSSDRPIKTTASAIPSLKKLSQTLGFSIEELEEIRAIPLEKRYVKLEKPKIDGTMRTVYRPHFKLKRLQRRINSRIFRPLVIWPVYLYGSVPCDNDDESIKRDYITCASQHCAAKTILKIDIKNFFDNIHQDIVRDVFDKVLNIKDDALDYIVDVCCAGDFIVQGALTSSYIASLCLHDVEADIYARAKRKKLVYTRLVDDITVSSKIHDFDFSQIRKHIEDMLAKKDLPINVEKSGVFITSTKPLVVHGLRIDHSKPRLPSDEVKKIRASLHNLIANASKNNNKTSLAYRIEFNRCMGRINKLGRVGHEKHLVFMSKIKLIRPMPSYKDIVDCKGKLVKLEKLHAKGYNTSDIYFRRYQLVSHLLSLINRSSSFHEVVKDLRKRLNRIKPNVQR

SEQ ID NO: 3529 - protein, 395 aa, unidentified
  source 1..395: note = Related to JACFXZ010000002.1; note = Pectobacterium aroidearum
MPSDIAINKSDSGISTLQSLAKTLGFSLQELQEIQSIPLDKRYQKLEKPKVDGTKRIVYKPHHKLKRLQRRINSRIFRELVVWPDFLYGSIPGDNDEDDLIKRDYVNCASQHCAAKSILKVDIKNFFDNIHKDLVRSIFENFLHINSDALDYLVDVCCMGDFIVQGALTSSYIASLCLYDVETKVVRRARRKKLVYTRLVDDITVSSKIYDFDFSQIKKHIEDMLADKDLPLNQEKTGVFQTSTKPLTVHGLRVDHSKPRLPSDEVKKIRSSLHNLVINSKKNNNKTTAAYRVEYNRCMGKINKLGRVGHEKHEQFMLKIKSIRPMPSKRDIIECNKKITTLEKLFKAGLSSHESYKRKFYLVSHQISIVKRSNAYKNIADELRERLSKVKINEN

SEQ ID NO: 3530 - protein, 396 aa, unidentified
  source 1..396: note = Related to NZ_HG738868.1; note = Serratia marcescens
MTTDVPIKKSSSGISSLESLSKTLGISLLELSEIRGIPTNKRYEKILVPKADGSQRIVYKPHYKIKKIQRRINSRIFRELVIWPDFLFGSIPNDNDTEESIKRDYVSCSSLHCGAKSILKIDIKNFFDNIHKDLVSDIFCNFFCIKGDALNFLVDICVKDDFIVQGALTSSYIASLCLHDVESKIVRRARRKNLVYTRLVDDIVISSKVFDFDFSQIRKHVEDMLADKDLPLNHEKSGIFYNSTKPLTVHGLRVDHHKPRLPSDEVKRIRASVHNLVTLSRKNNARTSLAFRKEYNRCMGRINKLTRVKHEKDKVFKKMVEFIYPMPSYGDIISCKKDISSLETSFKNGFNKTEWYYRKYNLVSYKISIIKRSSAFINLADELRDRIKKVKPNEDR

SEQ ID NO: 3531 - protein, 395 aa, unidentified
  source 1..395: note = Related to NZ_CP027225.1; note = Phytobacter sp.
MSSDLPKNTSSKGISSLSLLSKTLGIAVEELREIRAIPLDKRYEKILVPKSDGTNRIVYKPHYKIKKVQRKINSRIFRKLVVWPDFLFGSVPNDNDDEDSIKRDYVTCASLHCGAKSILKIDIRNFFDNIHRELVSDIFSTFFKCKSTALDYLVDFCTKGDFIVQGALTSSYIASLCLYDKETHVVRRARRKGLTYTRLVDDITISSTVFDFDFNQIRKHVEDMLADKDLPLNYEKSGVFHNSTTPLMVHGLRIDHLTPRLPSDEVKRIRASLNNLINLSEKNNSRTSLAFRKEYNRCLGRVNKLGRVGHEKHPIFLKKIKVIYPMPSYKDVISCKKAIASLETSYVNGFSDKDWYSRKFNLASHKISIINRSLAFQLIAKQLRVRLNKVKPDEE

SEQ ID NO: 3532 - protein, 406 aa, unidentified
  source 1..406: note = Related to CP015613.1; note = Serratia inhibens
MGRPYVTLFGEIMDKFKPYSKSKAPISTLQKLAQTLSISIDELNEISALPEDEKYERKELPKADGSKRVVYSLHPKMRLLQSRINKRIFKELVIFPPFLFGSVPGKNDGANSNIKRDYVSCAKAHCGAKTVLKVDISNFFDNIHKDLVRDVFNNVLNIRDEALEYVTNLCCKGDFVVQGALTSSYIATLCLYEQEGNVYQRAIRKNLVYTRLVDDITVSSKINGYDFTQILSHIENMLSTHDLPVNKRKTKIFHCSSEPIKIHGLRVDYNSPRLPSDEVKRIRASLHNLKKLAVKNNTKTSMAYRKEFNRCMGRINKLGRVGHDKYELFKEQLLAIKPMPSPRDITIVESAVTSLEISCSKGNGNKHWYKRKYNLTLYKLIILTRSKAFDGIVDTFKERLKKVKPA

SEQ ID NO: 3533 - protein, 394 aa, Citrobacter sp.
  source 1..394: note = Related to CP040698.1; note = Citrobacter freundii
MDKFKPFSKSNAPISTLLKLSQTLSISVDELREIEALPDDEKYTRKDLPKADGSNRVVYSLHPKMRLVQSRINKRIFKELLVFPPFLFGSVPSKNDGVDSNVKRDYVSCAKAHCGAKTVLKVDISNFFDNIHKDLVRDVFSNVINIQDEALDYVTKICCKGDFVVQGALTSSYIATLCLYEQEGVIYQRALRKNLVYTRLVDDITVSSKINNYDFTQILGHIEDMLAEHDLPINKRKTKILHCSSEPIKIHGLRVDYKSPRLPSDEVKRIRASLHNLKKLAVKNNTKTSVAYRKEFNRCMGRINKLGRVGHEKYKVFKEQLLEIKPMPSLRDSKIIDAAINSLELSYSKGNSNKHWYKRKHDLTLYKLIILTRSQSFDKTVSLFRARLKKVSPT

SEQ ID NO: 3534 - protein, 394 aa, Escherichia coli
  source 1..394: note = Related to CP088348.1
MDKFKPYSKSNAPITTLEKLSKALSISVEELKAIAELSLDEKYTLKEIPKIDGSKRIVYSLHPKMRLLQSRINKRIFKELVVFPSFLFGSVPSKNDVLNSNVKRDYVSCAKAHCGAKTVLKVDISNFFDNIHRDLVRSVFEEILHIKDEALEYLVDICTKDDFVVQGALTSSYIATLCLFAVEGDVVRRAQRKGLVYTRLVDDITVSSKISNYDFSQMQSHIERMLSEHDLPINKHKTKIFHCSSEPIKVHGLRVDYDSPRLPSDEVKRIRASIHNLKLLAAKNNTKTSVAYRKEFNRCMGRVNKLGRVGHEKYESFKKQLQAIKPMPSKRDVAVIDAAIKSLELSYSKGNQNKHWYKRKYDLTRYKMIILTRSESFKEKLECFKSRLASLKPL

SEQ ID NO: 3535 - protein, 397 aa, unidentified
  source 1..397: note = Related to NZ_CAKLIV010000013.1; note = Pectobacterium versatile
MFKPSLKNTNQGYISSLESLSRTLSIPIDKLIEISNIPVDDKYLLKEIPKADGSTRHVYKLHPDLRLLQSRINSRIFRELIVWPDFLFGSIPNDNDPSSEDVKRDYISCAGLHCQAKTILKVDIKDFFDNIHEDLVKDIFSNVLNIKDKSLEYLTQACCRNGFIVQGALTSSYIASLCLFDMEGKIVSRARKKNLVYTRLVDDITVSSKISNYDFSQIRQHIESMLAEKDLPINNKKTKVFYSSTQPLYVHGLIVDYSKPRLPSDEVRKIRASLNNISKLAVKNNSRTSVAYRKEYNRCFGKIGKLKRVGHNKYEVFLGKIKKIKPMPSLRDVKMAKATVKSLEVSHAKGNNNKYWFKRKYDLARYKIVILNRTKEFELLVAELRERMKNVKPNFER

SEQ ID NO: 3536 - protein, 404 aa, Proteus hauseri
  source 1..404: note = Related to AWXP01000008.1
MLNNENYCPHTPYSIAKKRITSLKILSDTLSISESELIRINSLSDHEKYTELKVPKIDGTDRIVYSLNSDLRKVQYRINKRIFRELIKWPNHLFGSVPSNNDSNKDQIKRDYVACASLHCGAKSILKIDINNFFDNIHKDIVTDIFSNVLKIEGYALEIITDLCCKGNFIVQGALTSSYIASLCLHDLEADIIKRAERKNLVYTRLVDDITVSSKLSNFDFSQIKSHIENMLANKDLPVNKNKSKILKESIQPLVVHGLRVDFEQPRIPSDEVKKIRASLHNLCNLAKKNNMRTSSTYRKEYNRCLGRINRLGRLNHNKHSSFIKIIEKIKPLPSWRDVQKTKAALNSLKASYSKGNNNKSWYIRKYHLTYYRTSILNRSTEFHDMVIYLREKLKKIKPKDKRG

SEQ ID NO: 3537 - protein, 395 aa, unidentified
  source 1..395: note = Related to NZ_OU659150.1; note = Providencia alcalifaciens
MTSNKPISKSKKPILNLDVLSATLSIDKVELLRVDSLPSDEKYKQITLAKIDGSKRIVYSLSADLRKIQSRINKRIFRELIIWPDYLFGSVPNENDNDDSIRRDYVACAELHCGAKSILKVDIKDFFDHIHRDLVKQIFENVLNIHNDALELITNLCCKDDFIVQGALTSSYIATLCLFDQEHEIVTRTRRNGLVYTRLVDDITVSSKLSNFDFSHIQMHIDNMLASKDLPINKSKSKVTKVSMEPLTVHGLRVDFISPRVPSDEVKRIRASLHNLNMLVKKSNSRTSAAYRKEYNRCLGRINRLGRLGHNKYPIFLESIKKIIPLPSWRDVLKTKAALKSLESSYSKGNKNKSWYIRKYDLTYHRTAILNRSPVFNKLVIYIRNKLNGIKPDER

SEQ ID NO: 3538 - protein, 394 aa, unidentified
  source 1..394: note = Related to JACYNA010000001.1; note = Pantoea agglomerans
MSIDIPTRKQNIKSLRSMHSLSSCLDISLGDLNEARALTSELRYKKKEVKKINGDTRDVYDPHQLIRRIQKRINNRIFKPLIIWPNYIYGSVPSNKEEKKLGIERHYIACAKQHCKAKTILKVDIKSFFDNIHKDIVRDIFNRVFKFKGDALEYLTDICCYEHRIVQGALTSSYIASLCLFDLEADVVNRTRRKQLTYTRLVDDITVSSPLVNFDMSQILEHIKNMLAQKDLPVNESKTQVYNISTESLKVHGLRISFNEPRLPSDEVGRIRASVHNLEGLAKKNNSLTSVAYRVEFNRCVGRVNKLGRVKHKKYKTLSDKLRLIQPKAAKRDLSKIERAICFLENSYLGGNSKKHYYKKKYDLALFNLIILRRTAAYISFADGFKARLSKIKY

SEQ ID NO: 3539 - protein, 394 aa, unidentified
  source 1..394: note = Related to NZ_JAENMQ010000001.1; note = Lelliottia aquatilis
MITDIPIKKPNTNSLRSLHSLSSCLNISLSDLNEAREMPSHLRYKKKQVKKINGDSRDVYDPHPLIRRIQKRINNRIFKELIIWPGFIYGSVPTNKEEKKAGIERHYIACAKQHCNAKTILKVDIKNFFDNIHRDVVYSIFQRVFKFKGEVLNYLTDICCFDHKIVQGALTSSYIASLCLFDLEHNVVNRARRKQLVYTRLVDDITVSSKLVGYNMNQILEHIKSMLDEKDLPLNEDKTQVHNISTESLKVHGLRISFNEPRLPSDEVGRIRASVHNLEQLAKKNNSITSIAYRLEYNRCVGRVNKLGRVKHGKYKILSAKLKLIQPKAAKRDIDKIERAVQFLENSYKGGNSQKDYYKKKYDLAFFNLIILRRTAGFVSIADGFKKRLEKVKY

SEQ ID NO: 3540 - protein, 394 aa, unidentified
  source 1..394: note = Related to CP043932.1; note = Klebsiella pneumoniae
MVARNPIKKPGAQSLRSLQSLSSCLDITLADLKTAIAMPSHQRYKKKQVKKINGELRDVYDPHQLIRRIQKRINNRIFKELILWPDYIYGSVPTNKDEKKKGIERHYIACARKHCNAKTILKVDIKNFFDNIHRDIVYSIFSKVLKFKGEALEYLTDICCYDDTIVQGALTSSYIASLCLFDVESDIVNRAERKKLVYTRLVDDITVSSKLVNYNMNQILDHIKDMLAGKDLPINEDKTQVHNISTESLKVHGLRISFNEPRLPSDEVGRIRASVHNLEKLAKKNNSITSVAYRIEYNRCVGRVNKLGRLNHNKYKVLSLRLKDIQPKAAKRDIVKIDRAIKFLENSYKGGNSKKDYYKKKYDLTLYNLIILRRTPGFLLIEKGFRDRLQKVKY

SEQ ID NO: 3541 - protein, 380 aa, unidentified
  source 1..380: note = Related to NZ_JAFMOV010000254.1; note = Rahnella perminowiae
MRSLQSLSSALDISLQELEMAKNMPCNIRYKKIELKKVNGDIRDVYNPHSLIRKIQKRINNRIFKTLIIWPDYLFGSVPSNKEEKKQGIERHYIACAKKHCQAKTILKVDIKSFFDNIHRDVVYSIFKKVFKYKGDALEYLVDICCYESNVVQGALTSSYIASLCLFDVEYEVFRRAERKELVYTRLVDDITVSSKTVGYNMSQILDHIRNMLMEKDLPLNEEKTQVHNISTESLKVHGLRVSFDTPRLPADEVGRIRASVHNLEQLSKKNNSLTSAAYRLEYNRCIGRVNKLKRLGNNKHPMLRDKLKAILPKAAKRDIDKLKRAVSYLESSFASVNSGKFYYKKKYDLTIHGLIILRRTPAFSSIEASLRQRLSLVKY

SEQ ID NO: 3542 - protein, 357 aa, unidentified
  source 1..357: note = Related to NZ_JAGKOO010000001.1; note = Providencia huaxiensis
MPYHERYKEIELKKSSGDVRIVYNPAHLIRKIQKRINNRIFKPLILWPNYLFGSIPKNELDKKEGIDRHYIACARKHCEAKTILKVDIKNFFDNIHRDIVYDVFKKVLKYKGEALEYLVDICCFGDKIVQGALTSSYIASLCLFDLEFDIVKRAARKQLVYTRLVDDITVSSKIVNFDMSQMLNHIKNMLLNKDLPINEKKTQVHNISTESLTVHGLRISFATPRLPAHEVGRIRASIHNLEQLSKKNNSLTSVAYRLEYNRCVGRVNKLVRLNHNKKDEFKRRLKAILPKASKKDIKEITRSINFLESSYALGNSNKAYYKKKYDLTIYRLIILKRTPSYHEMEAEFRNRLLNIKY

SEQ ID NO: 3543 - protein, 381 aa, unidentified
  source 1..381: note = Related to HF933424.1; note = Yersinia enterocolitica
LRSLQSLSNALDISISDLNAAINIPVEKRYHRLELSKVNGEKRIVFDPDHRVRKIQRRINKRIFKELILWPEYLFGSIPTNQSDKENKIERHYIACAAKHCKAKTILKLDIKNFFENIHRDIVVSIFSDVFQYKGEALKYLVDICCYNEYIVQGALTSSYIASLCLFDVEYDVFRRAERKGLVYTRLVDDITISSRVVDYDMAQIKSHVENMLNEKDLPINQKKTEVHNISTEALTVHGLRVSFNEPRLASNEVKRIKASVHNIVNLSQKNNSKTSEAYRIEYNRCMGRVNKLGRVGHNKYKLLLDTLKKIKPKASLLDLQSVHKLVGELEKLHVKGSYNEFEFKRKYNLAVFKLIVINRTDSYKPFSDWIKSRLEKIKPC

SEQ ID NO: 3544 - protein, 325 aa, unidentified
  source 1..325: note = Related to NZ_CABHWQ010000046.1; note = Yersinia alsatica
MSVNFPVKKPGAKSLRSLQSLSDALDISISDLQAAKKLTKEERYKRIEIPKVNGDVRVVYRPDHRIRRIQRRINKRIFKELILWPSYLFGSIPSTKPEKREGIERHYIACAQKHCNAKIILKLDIRNFFENIHKDIVEDIFSKVLKYKGDALNYLVDLCCFDDNIVQGALTSSYIASLCLHDLEYDVYRRAERKKLAYTRLVDDITVSSKTVNYDMGQIRGHIEEMLNKKDLPININKSEVHDVSTEPLTVHGLRVSFDKPRLASDEVRRIKASVYNITQLAMKNNSKTTVAYRIEYNRCMGRVNKLGRVKHNKHLVLLNILKAI

SEQ ID NO: 3545 - protein, 398 aa, unidentified
  source 1..398: note = Related to CPZT01000016.1; note = Yersinia enterocolitica
MSIIRPEKLKDSGSLKKLESLSRALGLSVNELKEVKSLPLSKRYTEVKVPKIDGTFRIVYKPDYRLRKVQRRINNRIFKELVSWPYYLFGSVPSSPDDKKNGIKRDYVNCAKKHCNAKTILKVDIKNFFDNIHRDLVEDIFKNFFKYKGEALEYLVDLCCNGGYIVQGALTSSYIATLCLYDIEFDIVKRAERKNLVYTRLVDDITISSKVSNFDFSQIKMHVEKMMLEKDLPLNLEKTKIHHISTEPLSVHGLRVSFDTPRLASDEVKRIRASLSNLIALSKKNNSITSATYRKEYDRCMGKVNKLGRVEHNKHPIFLNKLKNIRPLPSEKDACRALANIHRLEVMYKNGNSAKYSYIRSFHLASYRLIILSRTACFSRLVNSLRVRLKKIEPKLQN

SEQ ID NO: 3546 - protein, 399 aa, unidentified
  source 1..399: note = Related to NZ_MDKE01000022.1; note = Oceanisphaera psychrotolerans
MYIKKPQITTLNAIANVSNLCSVLDISEEELNQALALSDYDRYVQAKTEKNDGSFRTIHKPHYLLRKVQRRINTRIFQKIVRWPSYIFGSVPNTKDEGNNVVENKDYVSCAAQHCGAKSLLKLDIKDFFDNIDIFHVKKIFTGLFKYNCDVSNVLSDICCYRGVVVQGALTSSYIASLCLWDEEYKIIERLQRKGLVYTRLVDDITVSSRISNFQFDHAQSIISKMLQDKDLPINNNKTKVFHASIEPLMVHGMRVNFKEPRYPSDEVRRLRAAVQNIEKLSSEVGYRTTFAYRKDFNRCMGRVNKLKRVKHEKHQVLINKLNKILPLPSKTDLRRCKLAVKRLENDFNNKKESYWYKKRYYMAQDRLNVLQRTYYKTALKLRSRLNVIKPEYDNVENA

SEQ ID NO: 3547 - protein, 398 aa, unidentified
  source 1..398: note = Related to NZ_SODO01000004.1; note = Oceanimonas baumannii
MQKDKPYITTTNVISSIPNLCKSLNITEDELSQALSLGSDMYVRDRVEKSDGSYRVIHKPHYLLRKIQRRINKRIFQKLVGWPSYIFGSVPNTVNYKGEVVEPKDYVSCAAQHCGAKSLLKLDIKDFFDNIHIYHVERIFSGFFHYNEEVSKTLSQICTYNNVVVQGALTSSYIASLCLWDKELEVVERLKRKNLVYTRLVDDITVSSKVSNYQFDNASALIVEMLRSKDLPVNNNKTKVFHATIEPLMVHGMRVNFKEPRYPSDEVRRLRAAVRNVEMLASEPGYRTTFAYRKDFNRCMGRVSKLKRVKHEKHKHLVERLNKVLPLPSRTDLRRCKLSVRRLENDYNKKRESYWYKKRFYMVHDRLNVLQRTYFKTAYQLRERLKKIRPWYDHVENE

SEQ ID NO: 3548 - protein, 395 aa, unidentified
  source 1..395: note = Related to BADY01000010.1; note = Pseudoalteromonas sp.
MDRLIPEKSTFQSISNIKNLCAALDISEKDLSSALSLRDNEKYVIDHVEKSDGTLRKIHKPHYEIRKIQRRINKRIFKKIVLWPDYIYGCIPNEISSDGKLIKARDYVSCASQHCSTKSLLKIDIKDFFDNISAHLVFEMFSRFFKYNDEISQTLTKLCCFKGTLIQGALTSSYIAALCLWDLEHKVVSRLKRKQLTYTRLVDDITISSKTSNFQFDYALTLVSNMLLEKELPINLHKTKSSSSSILPLVVHGMRVNFEEPRYPSNEVKKLRAAVHNIEKLASEPGYRITHAYRRDFNRCMGRVNKLKRVGHNSHSKLVEKLLRVLPLPAKVDLKRSHTIVARLEKDFKEKHTSYWYHKRFYKAHDRLNILQRTYSKTAQELRLKLKAIKPKYEN

SEQ ID NO: 3549 - protein, 397 aa, unidentified
  source 1..397: note = Related to JAHKPR010000090.1; note = Colwellia sp.
MERLSPIKSSSKSISNKLNLCKTLDITIDELDSALTLPNNQKYITAYIDKPNGEQRKIHKPHYKIRKIQRRINNRIFKRLVLWPSYIYGCIPNEKDETTNITIQARDYVSCAAEHCTSTSLLKIDIKDFFDNISFYLVNDMFLNFFKYPTEVSKILSEICCYKGNLIQGALTSSYIAALCLWDCEEKLVARLKRKGLRYTRLVDDITISSTISNYQFDYAISCVTNTLNEKELPINPEKTSISYESITPLMVHGMRINFPEPRYPANEVKKLRAAVHNIERLASEPGYRITFAYRKDFSRCMGRINKLKRVKHSSHGKLVSRLQKILPLPAKVDIKRAKIMVDRLVKDFDEKKDTYWYHRRFYRAHDRLNVLQRTYNKTSKILREKLKGKSPTYDNK

SEQ ID NO: 3550 - protein, 399 aa, Vibrio sp.
  source 1..399: note = Related to REBK01000001.1
MCNLSPKKTTEHSISSIANLCDALDITPNDLDELSLLSDQDRYTRDTVEKSNGTLRTIYKPHFLLRKIQRRINRRIFTRIVEWPDYIFGSVPNTKGPDKKVIQRKDYVSCAAQHCESKSLLKIDIKDFFDNIHIYHVKKIFLDFFKYPEDVSELLADICCFEQRVVQGALTSSYIASLCLWDTEPQLVKRLQRNNLTYTRLVDDITVSSKVSNFQFEMAMSQITRILEDKDLPINYSKTKVSYVSISPLMVHGMRVNFSEPRYPSDELRKLRASVHNIEKLASQTGYRTTFAYRKDFNRCMGRVNKLKRVKHNKHAVLLKKLKKILPLPSKTDLKRISLSVKRLESDYLDKKETYWYRKRFYMAQDRLNILNRTFNQSAAQYRERLNRIKPLYDRVENG

SEQ ID NO: 3551 - protein, 366 aa, unidentified
  source 1..366: note = Related to UGTC01000001.1; note = Plesiomonas shigelloides
MNSLSPQKNTTESIASITNLCTALSISIDELNTVLQMEPSEWYVKDYVPKSDGSERVIYKPHHLLRRIQRRINKRILSRIIKWPEFIYGSVPNEKVDANTIIRKDYVSCAAKHCGAKSILKVDIKDFFDNIQQYHVLNIFRGFFNYSDEVSKTLANLCCYNERVVQGALTSSYIASLCLWDVETEVVKRLMRHRLVYTRLVDDITVSSTVSNFQFDSALSYIRSMLEGKDLPLNMAKTKSLYVSVEPLLVHGMRVNFPEPRYPSDEIRKLRASVHNLERLASQVGYRTTYAYRTDFNRCMGRVNKLKRVGHNKHAVLLKKLKKILPLPSKTDLKRINVTISRLESDFDRKRTRTGIRKDILRRMIG

SEQ ID NO: 3552 - protein, 395 aa, unidentified
  source 1..395: note = Related to CP000020.2; note = Aliivibrio fischeri
MYQLEPIKKTKQVIASIPNLCSALDITIDELNKALSLSSEERYVQGKVSKSDGSYRDVYNPHNLIRKIQRRINRRIFIKLVGWPSYIFGSIPNNIDKNGKVLEAKDYVNCAAQHCLAKSLLKMDLKDFFNNIHIDHVKEMFEKFFNYPKDVSEALSNICCRGDSLVQGALTSSYIASLCLWDLEPHLVKRLKRKQLIYTRLVDDITVSSKISNFQFDMTIEHITSMLHEMDLPINNSKTKVAYTSIEPLTVHGMRVNFKEPRYPSDEVRRLRAAVHNIESLASEPGYRVTFAYRKDFNRCMGRVNKLKRVEHEKHQTLVNKLLKILPLPSEKDLKRCKASILRLETDFPLKGDTYWYRKRFYIVHDRLNVLQRTYKRTALKLRNRMKPIRPEYDD

SEQ ID NO: 3553 - protein, 395 aa, Vibrio sp.
  source 1..395: note = Related to BODJ01000024.1; note = Vibrio cholerae
MYQLEPIKKTDESIASIENLCNTLDISLKEINEALSLSPDERYVYRKIPKSDGSYREVYNPHNLIRKIQRRINRRIFIKLVKWPSYIFGSIPNNVDSVGQVLEAKDYVSCAFQHCQSKSLLKMDLKDFFNNVHIDHVHDIFEGFFNYPSEVSRVLSDLCCREDSLVQGALTSSYIASLCLWRFEPLLVKRLKRKNLVYTRLVDDITVSSKISNFQFDMTIEHIKNMLYEMDLPLNNEKTKVIYTSIEPLTVHGMRVNFKEPRYSSDEVRKLRSAVHNIECLASEPGYRVTFAYRRDFNRCMGRINKLKRVGHEKHKTLVSKLLKILPLPSEKDLKRCKASILRLEADYPLKGDSYWYRKRFYILHDRLNVLQRTYNKTADSIRDRMKEITPKYDD

SEQ ID NO: 3554 - protein, 400 aa, Vibrio sp.
  source 1..400: note = Related to MCYK01000079.1; note = Vibrio lentus
MYAFQFHPIKKSTSVIANFKKLCEALNISEVEMKKALSLPPEERYVASSVKKADGSTRAIFKPHNLIRKIQRRINRRIFKTLVIWPSYLYGSIPNTIDPTTKKVIEHKDYVNCAAQHCSSKSLLKMDIKDFFDNIHRDYVSDIFTVFFKFPPDVSEALTSICCRENTLVQGALTSSYLANLVLWDIEGDLVKKLNRKNLTYTRLVDDITVSSKVSNFQFDLAISLISSALISKELPINTSKTQVSYVSSNPLTVHGMRVNFPEPRYPSDEVRKLRASVHNLQCLASQPGYRQSHSYRKDYACCMGRVNKLKRVKHEKHAVLIKKLNKIKPLPSEVDQRRCKQMLRRLQNDYKNKHLDYWYCKRFYRLHDRLNVLQRKSCFRDLAEKIREEMRLIKPTYDQ

SEQ ID NO: 3555 - protein, 400 aa, Vibrio parahaemolyticus
  source 1..400: note = Related to ABGCYW010000004.1
MRNIRPALTTSKPIKSLASLESTLGLSSKQLSEILDIPECQKYVEKAVPKPDGSLRTVYRPHPLIRKAQRRINNNIFKEIVIWPSYVFGSLPNSVINQDEIERKDYISCAAQHCGAKSLLKMDIKSFFDNIHIDYVNHMFCNFFDYSSDVADILSRLCCRGDFIVQGGLTSSYVASLILWEFEPKLVKRLTRKKLIYTRLVDDISISSKISNFDFSMTKSLVTNTLHELDLPVNERKTKVSYVSTEPLSVHGIRVNFKEPRLPSNEVRCIRAAVHNLTVLASQPGYRTTHDYRSDFSRCMGRVNKLKRVEHEKHKDFLEILQNIKPLPSPKDLKRAREMLGRLERDYTTQSGSRGYRTRFFRLQERLNVLSRKKEYLNDAKKIRHKLKSLKPDETARSNF

SEQ ID NO: 3556 - protein, 397 aa, Vibrio sp.
  source 1..397: note = Related to NZ_POSL01000026.1; note = Vibrio diazotrophicus
MRNLNPTLTTVKPITTLERTLGLDSNEISTILAIPENQKYVEKTVPKADGSLRTVYRPHPLIRKAQRKINNNIFKEIVIWPSYVFGSLPNSVIDKNEIERKDYISCAAKHCGAKSLLKMDIKNFFDNIHIDHVVSMFINFFGCKAEIANTLSRLCCKGEFIVQGGLTSSYVASLILWQLEPELVRRLSRKKLTYTRLVDDISISSKTSHFDFSMVISLVTNMLHELDLPVNETKTKVSHLSTEPLSVHGIRINFKQPRLPSNEVRRIRASVHNLTVLASQPGYRTTHDYRGDFARCMGRVNKLKRVEHEKHSEFLSILQKIKPLPSPKDLTRAREMLSRLERDYSDKNETRGYRTRYFRLQERLNVLYRKKDYICEAKSIRKKLKSIKPNENARNNF

SEQ ID NO: 3557 - protein, 400 aa, Vibrio sp.
  source 1..400: note = Related to NZ_CP051101.1; note = Vibrio navarrensis
MYLSQPSLNTKNAINSMAALEKTLGLTAKEIQSIISLPESQKYFEKKVPKSDGSIRLVYCPHPQVRRAQRKINNNIFKKLVKWPSYIFGSIPNTKISKEQIEKKDYISCAGQHCGAKSLLKMDIKSFFDNIHFDHVLDMFVNFFHYDKDVSFTLAKLCCKSNYIVQGGLTSSYVASLILWRHEPELVKRLQRKNLTYTRLVDDISISSHVSNFDFSMVQQLVTNMLYEIDLPVNNDKTKVYHLSTEPLTIHGIRVNFNEPRLPANEVRKIRAAVHNLTILASQPGYRTLHSYREDYARCMGRVNKLKRVQHEKHSEFLKTLQNIRPLPSEKDLKRARVVYHRLMRNYSEKKDTRGYRTSFFKLQERLNVLCRKKCFREEAQKIRRKLKEIAPSKQAKENF

SEQ ID NO: 3558 - protein, 400 aa, unidentified
  source 1..400: note = Related to NZ_CP068230.1; note = Shewanella algae
MTIIEPSLNTPNVIASIRALEKTLGLTQQDITTALEIPESKKYHVKQVPKQNGELRSVYRPHPLIRRAQRRINNNIFKKIVLWPSYIFGSLPNTINKNNEVERKDYISCAAQHCGAKSLLKMDIKDFFDNIHIDHVRSMFIHFFKCGDDVADILAKLCCKENHVVQGGLTSSYIACLILWNIEHKLVNRLARKNLTYTRLMDDITVSSKISNFDFSMTTNLIANMLQELDLPINTSKTKVCHLSTEPLTVHGVRVNFKEPRFPSNEVKRIRASVHNLTILASQPGYRLTHDYRSDYARCMGRVNKLKRVNHEKHKEFLVILQKILPLPSVRDKKRAKQMFIRLIKDYRIKYKTKGYRTRYFRLQERLNVLSRKKDYLNFTKYIRKKLKNIKPDEHSKTDF

SEQ ID NO: 3559 - protein, 401 aa, Vibrio sp.
  source 1..401: note = Related to JAHUCR010000005.1; note = Vibrio fluvialis
MTIIKPQKIHPTTIASKSALCVTLGFTLLELNEVLSVPSSERYKRKEIDKPDGSKRVVYNPHPLIRRAQRRINTNIFKKLVSWPYYLYGSIPNTVIKESGLPKIIIRKDYVTCASKHCGAKSLLKMDIKNFFDNIHENHVRNLFLRFFHFSPEVAHILTNICCHESNVVQGSPTSSYIASLILWDVEHLAVKKISRKNLVYTRLVDDISVSSKSSKYDFSMIEDIITQMLTSRDLPVNKKKTKHCYLSTEPLTVHGIRINYKEPRFPSDEIRRLRSYVHNLQTLAKQPGYRTTHSYRTDYAICMGKVNKLKRVNHNKHFIFLEQLRAIRPLPSEDDLDRCRYVIARLDAYNTIHGNESFSYRKRFYRLQERLNVLQRLSKYKTAAKEMRARLKSLRPPNEV

SEQ ID NO: 3560 - protein, 408 aa, unidentified
  source 1..408: note = Related to NZ_PJPV01000060.1; note = Endozoicomonas acroporae
MAKPLLFNLKTMYQILKPEKINSKSISSLDNLCEALNISVDELNEALNLPESEKYTEKTVPKSNGAIRHVFKPHHLLRKIQRRINKRIFTKLVKWPSYLYGTLPNDLDGNGDIILNRDYINCARQHCQSKSLLKVDIKDFFDNIHEDYVFEIFHVFLKYPDDVSKALTKICCHNKNVVQGALTSSYISCLSLWNMEHKIVKRLQRKNLIYTRLVDDITVSSKVSNYNFDAALSHIKNMLYERDLPLNIEKTRPYYISMEPLTVHGLRVNFDTPRLPSDEVRKIRAAVHNISKLSSEPGYRTTFAYRKDYNRCIGRVNKLKRIGHEKHEALLKKLIEIPPLPSRKDIERTRASIERLERDFQSKGSSYWYYKRFYRAHDRLNVLQRRFDVIASELRDRLKEIKPLYDKN

SEQ ID NO: 3561 - protein, 421 aa, Aeromonas sp.
  source 1..421: note = Related to NZ_KQ087566.1; note = Aeromonas caviae
MSILQYMNENQPIQAPIKPTLKTSKKISSPENLLVALGLSASELNCALYMTSAERYTAKKVPKSSGGERIVHIPHPLIKKIQRRINNRVLSKIVVWPYYLFGSVPSEIDVLYEDAILKRDYISCAQQHCKAKSILKYDIENFFDNIHYDLVNDIFINFFKFDCDTARILSDLCCIDSEDGSHIVQGAPTSSYLACLCLWDIEHDIVQRLKRKNLIYTRLVDDITVSSKIYDYNFENAKKSIEDMIHEKDFPINKAKSRALSTSSEPLLVHGLRVNFHTPRLPSDEVGRIRASVKNVELRAATNNFRTSKAYRKAFERCLGRVHKLARVGHNAHTKLRDRLLKIQPLPSQRDIDRVKHNVTRLEILAANGCDDLRYSRSYYISMYILNIINRTERYKPLVSELRARLHAIAPSKEVGGTYFD

SEQ ID NO: 3562 - protein, 408 aa, Aeromonas hydrophila
  source 1..408: note = Related to VHIX01000003.1
MAPLQPTLKTTKKIASSANLLTALGLDESELSSALAMTPAERYTAKKVPKSSGGERTVHIPHPLIKKIQRRINNRILSKIVIWPYYLFGSVPSEIDVLYEDEILKRDYISCAQQHCRAKSILKYDIENFFDHIHYDLVYEIFTNFFNYNDETSKTLSNLCCMESDDGHHIVQGAPTSSYLACLCLWDIEHKVVTRLERNNLVYTRLVDDITISSKIHDYNFENAKKSIEDMIHGKDFPINKAKSRTFSISNEPLLVHGLRVNFNTPRLPSDEVGRIRAAVKNIELRAAKNNFRTSKAYRKAFEKCLGRVHKLARVGHNSHIKLRDRLLKIKPLPSMRDINMVKRYIDRLEVQAKSGVDDIKYSRSYHITMYYLNIINRTERYQSLVSELRARLHLITPSKEDRGTYFD

SEQ ID NO: 3563 - protein, 408 aa, Aeromonas sp.
  source 1..408: note = Related to CP023817.1
MAPQKPTLKTDKKIASLANLLTALGLDESELLSALSMTYLERYTPKKVPKSSGGERTVHIPHPLIKKIQRRINNRIFSKIVIWPYYLFGSVPSEIDVLYENELLKRDYISCAQQHCKAKSILKYDIENFFDHIHYDLVYEIFTKFFKYDHEVSRILSDLCCIDGEEGNHIVQGAPTSSYLACLCLWDVECNIIKRLERKNLVYTRLVDDITVSSKIHDYNFENAKKTIEDMIHGKDFPINKEKSRTFNISNEPLSVHGLRVNFNTPRLPSDEVGRIRASVKNIELRAATNNFRTSKAYRKAFERCLGRVHKLARVGHEAHIKLKERLRKIKPLPSPKDVNKVKHYVDRLEVIAKTGCDNIKYSRSYHITMYYLNIVYRTEKYRPLVSELRSRLHAIAPSKEEKGTYFD

SEQ ID NO: 3564 - protein, 422 aa, Aeromonas sp.
  source 1..422: note = Related to JAIEYG010000002.1; note = Aeromonas veronii
MSILKNVTNSSVSVAPNKPTLKTTKTIASLANLCTALGIDSSELDAARSMTSSQRYVEKKVPKSSGGERTVFIPHPLIKKIQRRINNRVFSRIVVWPYYLFGSVPSEIEVTHHNDILKRDYISCANQHCKSKSILKYDIENFFDNIHYDLVYELFTDFFHYSDDVAEVLSDLCCINGVNGYVVQGAPTSSYLASLCLWDVEYKVVKRLERKNLVYTRLVDDITVSSKIHDYNFENARQAIEEMILNKDLPINKSKSKSFSISSEPLSVHGLRVNFNTPRLPSDEVGRIRASVKNIELRASTNNFRTSKAYRKAFERSLGRVHKLARVGHEAHRKLKDRLLKIQPLPSKRDVQRVKRAVDLLEQKSKGCVDEIRYARSYHIAMYYLNIVNRTDRYKPLVESLRTRLHLIAPDKEKHGDYFEEV

SEQ ID NO: 3565 - protein, 390 aa, Vibrio sp.
  source 1..390: note = Related to NZ_CP019291.1; note = Vibrio vulnificus
MPKLISKNKISSVDNLCRALDISRCELDAIYALNDDEKYSEPSKLAFKKDGKKRVIKCPIPIIRKVQNRINSRIFKTLVKWPEFLFGSIPNDEFEDIELKKDYVTCASLHCEAKSLLKIDISDFFSNIHEDFVRELFLDFFNYDEDLVDYLIKICCYKGTLVQGALTSSYIASLILWNEERYVVRKLERWGLVYTRLVDDITVSSKRSKYNFSIAEHHIYEMLFKKDLPVNKEKSKTFFSSSSPLTVHGLRVSFKTPRLPSDEVRRIRAAVQCLENLYSEPNYNTSYSYRKDFQRCVGRVNKLARVHHEKHKPLMNRLRKIRPKPSEIDLKISKKILSKLKMEYDDKKDKYWYKKQYWQLVDRVNLISSTYHKEACYFRNELKNIKPEFD

SEQ ID NO: 3566 - protein, 390 aa, Vibrio sp.
  source 1..390: note = Related to DS179564.1; note = Vibrio campbellii
MPRLISKNKISSVDNFCHALDIPRQELDLIYSLTDEDKYTEPAKLAFKKDGKKRVIKCPTPSIRKVQSRINSRIFKKLIKWPEFIFGSIPNDDFEEHELKKDYVTCASLHCEAKSLLKIDISDFFSNIHQDFVEELFKNFFKYDEELVKYLVHICCYKGTLVQGALTSSYIASLILWDEERKVVKKLDRWGLVYTRLVDDITVSSKTSRYNFSVVEHHIYEMLFKKDLPVNKEKSKIFFSSSSPLTVHGLRVSFKTPRLPSDEVRKIRAAVQSLEVLYSEPNYNTSFSYRKDFQRCVGRVNKLARVSHEKHKPLMNRLRKIKPKPSEVDIKIAYKVLAKLKKDYTNKKDKFWYKKQYWQLVDRVNLISTTFYFEAASIRKDLINIKPEFE

SEQ ID NO: 3567 - protein, 389 aa, Vibrio parahaemolyticus
  source 1..389: note = Related to JABCGZ010000001.1
MPKIIPKNKISKVDNFCQVLDISREELEAIIQLNDEDKYLEPKTLAFKKNGKKRLVKCPIQPLRKIQKRINNRIFKEIIQWPEFVFGSVPNDDELEIQKDYVTCASLHCEAKSLLKVDISDFFLNIHEDFVRDLFKRFFNYDEELCDYLVALCCYNGTLVQGALTSSYLASLILWDLERSVVNKLKRWKLTYTRLVDDITVSSKISKFNFEIAEHHIKNMLMLKDLPVNSNKSKVIYSSSSPLMVHGLRVSFKTPRLPSDEVRRIRAAVQSLERLYNEPNYNTSFSYRKDHQRCTGRVNKLARVKHEKHKALMRRLKKIRPNPSIVDVKIAEKILVKLKKDYPTKHSKYWYARQYWKLIDRINIINQSFIIDAKRLRAEASKIKPENTI

SEQ ID NO: 3568 - protein, 391 aa, unidentified
  source 1..391: note = Related to JADQAO010000002.1; note = Photobacterium damselae
MPKITTTKKISNIDNFAKAIGVSKEYIDSVISLSDDDKYTDPKKKAFKKDGKIRIVKCPSSKLRKIQSRINTRIFKDLIKWPDFLYGSIPNDDDGEIEIKKDYISCASRHCEARSLLKIDISDFFLNIHESFVYDLFNKFFKYDDELCRCLVSLCCYKGTLVQGALTSSYIASLILWDVESNLVRRLERWQLVYTRLVDDITVSSKVEKYNFDIAKYHIKEMLFSKDLPINEKKTSVSYNSSTPLMVHGLRVSFKTPRLPSYEVKRIRSSVQSLELLFKEPGYNTSFGYRKDYQKCMGRVNKLARVQHNKFPILMNRLKKIRPKCSKLDVKISRRILRKLQEDYPQKKDMFWYKKQYYKLIDRINFISNTFKSEAHEIRLDAKKISPPEDD

SEQ ID NO: 3569 - protein, 395 aa, unidentified
  source 1..395: note = Related to NZ_CP019628.1; note = Pseudoalteromonas aliena
MIQPKYKFGPIKDLNQLAASLSYTLKELNTLLSTPDDKKYSDPSQPAYKKDGSIRKIKNPSDDFRRVQGRINHRIFKQGIEWPSYLFGSIPKESAGRETDYIECARRHVEAKSICKIDITNFFDNIHEIFVYEMFLELFRFPEPVAKALTNLCCYNKSLVQGARTSSYIATLILWKEEGRIFERLSRKNLVYTRLIDDITVSSKIANYNFDVPKKHIENMLLEIDLPVNEDKFKIQYTSMTPLEVHGVRVTYSKPSFSKSEMMNIKAAVHHLEVLVKTPNTRTEMWYRKDYNRCMGRVNKLARVKSPRHKKLVKKLKVIRPLPSLKDLNYSKIRLKNLKEDSKNSKKIASYSYYKRYFLLMNRTNLIKLTYPDKAKALRNELYKIKPKYNPKDFK

SEQ ID NO: 3570 - protein, 390 aa, unidentified
  source 1..390: note = Related to JAHKPW010000058.1; note = Colwellia sp.
MDIPKYNHPPFVELDKLCKMLRISRTELENILSSPSDVRYKDPKTTAYKKDGSIRKIKCPLKELRSIQEKINNNIFKTGFYWPKYLFGSIPKKAALSNRDYVSCVSLHCRAKSICKIDISNFFDNVHISLVKSVFKNLCHFSDEVTDVLADLCCYNDFLVQGALTSSYLATLILWDKEPELVENLKKKGLVYTRLVDDITISSRISNYNFDIATKRVEVMLLEKDLPINKSKYEYNYLSIEPLTVHGLRVSFDKPKLPKHESSNIRASVKNLENLAQLDSARTKMWFRTDYNRCMGRVNKLARVKNQKHQALVERLKVIEPLPSINDIKYARLRLKNLEADYSTKKKTFNYKKRYYKLNQRIHLISKTYPDVAKKIRESLKEVPPDEKPI

SEQ ID NO: 3571 - protein, 391 aa, unidentified
  source 1..391: note = Related to JAGJEH010000004.1; note = Pseudoalteromonas luteoviolacea
MDSNLYRDNPINSIRNLLAALDISESEYEKFLITKEEDRYHRPHAEAFKKDGSVRKVYCPCKLTRKFQRRLNNRIFKKSIVWPPYVFGSIPIDVKTHESKDYIKCAAMHCKSKSLLKLDISDFFDNIDQYHVVKIFTEAFSYHQEVADFISKICCFKGHLVQGALTSSYVANLIFYDLEPELVKSLSRKNLTYTRFIDDITVSSKVSHYNFSSTKRLIEDMLLKKNLPLNEQKVEVLYSSTKPLMVHGLRVDFSEPRLPSKEVANIRAELNNLKRKAKEKKYRKSRSYRKSYDKCLGRVNKLARVKHSAHAKFKPQLKEIQPLPSAVDIKLCHVILKKLASFPDDKRESYWYKKRFNQLVYLNGIIKRLYPKSYSIIKEKSKELEPKSRVY

SEQ ID NO: 3572 - protein, 394 aa, unidentified
  source 1..394: note = Related to NZ_CP011034.1; note = Pseudoalteromonas translucida
MEIKYYRGDPIKKLENFISFLDLEDDYEAFISSNSSSRYREPVKSAYKSDGSKRRVLCPNKLTRKFQRRINNRFFKPKIIWPEFVYGSIPKLINGIEDSRDHIKCAEKHCGAKSLLKMDISDFFDNIHKEHIKDILVNTLDLSNEVADFICDVCCFENTLVQGALTSSYVANLIFFDLEHLLVKRLERKGLTYTRFIDDISVSSTASNFNFNTAKKLIEDMLLQKDLPINEQKEEVSYSSIKPLMVHGLRVEFDQPRLPAKEIAKIRAEVHALTKKAQENNFRKSRSYRRSFDRCLGRIHKLARVKHPKHGYFKNALSDIQPLPSAVDIKHCFFIIKKLETYPDSYREKYWYKKRFNLVVYMNGIIKRLYKDKYTEISERLKEIEPKDRKYDIG

SEQ ID NO: 3573 - protein, 387 aa, unidentified
  source 1..387: note = Related to BCAI01000026.1; note = Pseudoalteromonas sp.
MDYCKYPKAPILSIKKLCLHLGVAESNLKKALLIPHNLRYKDPSSPAYKKDGSRRLIKSPKDPIRTIQRKLNSRLFSHVKWASYLYGSIPKGKNGDIKDYIGAAKVHCQAKSICKLDISDFFNNIAEPHVIEMFRLFFRFSETVSKDLANVVTYKGNLVQGALTSSYLAMLLFWDLEPQLVSRLKSKGVKYTRLVDDITLSSEVHNFDFKLSIRLVEEMLAKKDLHLNEVKVKSSYISTELLLVHGLNINNDTPCLPKGELRKVRAAVHNLCSEADEEIRKEYWYRKEFEKCLGRVHKLKSFGKTRSFNNLMNKLNRVKPLASKQDLKYAMKRVASLKRDYKNRRKRSSFTYRKRYFIAQYKVGFLKDDYSLEHNLLRSELKRVKPK

SEQ ID NO: 3574 - protein, 370 aa, unidentified
  source 1..370: note = Related to JACJDY010000006.1; note = Pseudoalteromonas sp.
MSLHLGVQTSDINKALLIPADSRYKDPSSPAYKKDGTKRLIKSPRDPIRTLQRKINTTLFCHLKWANYLYGSIPKGKEGDVKDYINAAAIHCQRKSICKLDIADYFNNITEHHVNNLFNDFFRFSEDVSKVLTDIVSYKSNLVQGALTSSYLAMLLFWDLEPQLVTRLKYKGIKYTRLVDDITLSSNVHDFDFSLAIKLVEDMLKEKDLHLNQVKIQSSSISTQLLLVHGLNINNKLPCLPKGELKRIRAAVHSISCVTDEKMRRENWFRKDYEKCLGRVYKLKSFGKNKSFNNLINKLNKVRPLASSKDLKYAKKRVQSLKSDYKRGKKKESFAYRKRYFFAQYKIGFLKVEFPQAYFILRSELKKVKP

SEQ ID NO: 3575 - protein, 393 aa, unidentified
  source 1..393: note = Related to NZ_CP064795.1; note = Salinimonas sp.
MDRCSYINSPISSLSSLSKTLGEDISQIVAVADAPASEKYNKPKTPVFKKDKTERIVRSPVRALRSLQYRINKQIMVKGVSWPSYLFGSIPKGHNGEVSQDYIAAAKVHCGAKSLCCLDISDFFDNIHACDVFAVFNELFHFSTEVSTILTKLVTFDERLVQGALTSSYLAMLVLWKTEPGLVEALGRKNINYSRLVDDITLSTKKYNYNFSYEVSLIEKTLHEKGLFFNEEKAKVYSVSSELMLVHGLNVMGKNPAMPRYEARRIRAAVRQLEKLAEQEGARCEMWYRREYNRCQGRVYKLERFGKSNSFRNLLNRLQKITPLPSKKDITYAKLRVKKLESDFNNVKKRETYNYMRRFSIASHRVAFLKGYYDEEWKKLRTRLKAIFPDYRK

SEQ ID NO: 3576 - protein, 401 aa, unidentified
  source 1..401: note = Related to NZ_LRRU01000020.1; note = Pseudoalteromonas gelatinilytica
MTTPDIPLFKAGPIKSKAHLAKVLNIDISDIDDVLNMPLDKRYRPPKNPILKSDGTIRKIFNPHRKVRFLQRRINNRINKQCIRWPSYIYGSIPKSIENGNRDYVECAHKHCGAKSILKVDISNFFDNIQEFHVKNMFKNLFRYSDEVSEIITNICCYGDRVVQGALTSSYIASLILWDVELYLVRKLKRLNLTYTRLVDDITVSSTSHNFDFNGTSKLIEEMLNEKGLPQNIDKTRVYRLSSEPLKVHGLVVSFPNPIYSKDEVKNIRAAVHQLKHRAEKQEDQKSKSYRNDYQRILGRVNKLSRVKNDKHAKLIKILRSDGLRPKPSQSDKISAEKRFDKIVIDYSRKKSQYNFYKRYHYLKHLLFFIKGEGGSDYKKFAQDKLDKLSRYEPEFKIKDY

SEQ ID NO: 3577 - protein, 341 aa, unidentified
  source 1..341: note = Related to CP069213.1; note = Shewanella litorisediminis
MDNIKPIFQAGPIKSISRLVTALGITLSELEHVLHLSPNERYSDLKNPIYKKDGSVRVIKNPNRDIRKIQFRLNQRISKACVRWPDYLFGSIPKTDQSGNRDYVACAQVHCGAKSILKLDVSSFFDSIHKDHVYSLFHGLFRYSEEVSLCLANICCYEDHLVQGALTSSYIATLILWDVEQELVRKLRRAGLKYTRLVDDITISSTCHGYDFSMAEKLVFDMLAAKSLSLNVKKSVVYRTGTESLKVHGLEVSFSKPNLPKSEVKKIRAAVHQISLLAKNKSVRRTYKYRANYHRTLGRVNKLARLENDKRDRFLKVLLSTSVRPLPSGRDTGRDSTLCII

SEQ ID NO: 3578 - protein, 391 aa, Acinetobacter sp.
  source 1..391: note = Related to NZ_VOXY01000007.1
MNTKFEFLGSPIKDIDHLAKILDVDIEDILYAVQIEDEDKYSSRTIAKKDGRERTVYNPKPIFRKIQRRIKNRIFSQISWPDFVFGSIPADDNSHDFIECAQQHCLAQSILKLDIEDFFDNISQELVESIFKKFFRYPDPVSEILATLCCVDLKVPQGGITSSYLASIALHSLEENLFLRMKSKKLTYTRYVDDITISSKNRDFNFEAIINIVESLLNNLNLPLNKKKIEINRFSSIPLTVHNIRVDFKSPRYDKTEVKNIRAAIHRLSELAKKPNHRTHYYYRIDFNRCQGLISKLQRVNHQSYTKLQNKLNKIYPLPNDSDIKYIEKSIKELKVFFPKQIGEGNYIYNKKFFKIQHRIGFLKSHPKKIYDSKAFDLNAELQLYRIRNKV

SEQ ID NO: 3579 - protein, 390 aa, Acinetobacter sp.
  source 1..390: note = Related to NZ_CP088955.1; note = Acinetobacter calcoaceticus
MNTKFEFLGSPIKDIDHLAEILDLDINDILFAAQLDDADRYTSRSIAKPDGRERIVYNPKPIFRKIQRRIKNRLFTQISWPDFVFGSIPADEKSHDFIECAQQHCLAQSVLKLDIEDFFDNITMRLVQDIFEIFFHYPEDVSEILAQLCCVDLKVPQGGITSSYLASIALFSLEEKLFLRLKSKKLTYTRYVDDITISSKNRDFNYDSIINIVENLLNSINLPLNKKKIEVNRFSSTPLKVHNIRIDFKEPKYDKSEVKNIRAAIHRLSELAKKPNHRTHYFYRIDFNRCQGLVSKLRRVNHPSYLKLQDRLNKIAPIPNNADVKYIKNSIIELIKYFPQQKGEGSYVYNKRFFKTQSRIGFLKSHPKKIYNNLAVQLNTELQLYRMRGK

SEQ ID NO: 3580 - protein, 399 aa, Acinetobacter sp.
  source 1..399: note = Related to NZ_VPEJ01000008.1
MNELTKIIYKGGPISRSELSTVLGVDEIELDFILMLEDEAKYKSSQLVKNDGRFRNINNPSPIVRKIQRKIKNRIFSLISWPVYLYGSIPAENENSHDFIACASRHCRAKSLVKLDVEDFFDNISQELVQKIFENVMFFDKDAADTLAKICCLDGRVPQGGITSSYLATLALYSIEERLYFRLKNKKLVYTRYVDDITISSKDRDFSFDMIIKIIEKELNSLDLPLNKDKVEICRFGLEPLKVHNVRVDSKLPRYDQADVKRIKAMVHRLELLVKKPNYRTHYFYRQDYNSCMGFINKLGRVEHPSYFKLKNKLKKIFPLPNNADVTYVRNSIDNLKELKLNSKNAFVYQKKFYKIQYRIALLKKHPKGIYNAKAVELNRELQLLRLNDELERKTESGN

SEQ ID NO: 3581 - protein, 392 aa, Acinetobacter sp.
  source 1..392: note = Related to AP022302.1
MIKSKYIYKGSKIDSLDKLSEVLSIDIDELTNVLLLEDEAKYKAGFIKKSNGKLRNIYNPNTSLRKIQRRIKNRIFTQQIEWPDYIFGSIPADEISSNDYVASAEKHCGARALLKLDIEDFFDNITQELVEKIFKNFFKYNDELSKILAQLCCVDGKVPQGGITSSYIASLALFSIEERLFFRLKNKKLIYTRYIDDITISSKNSEYNFDSIIKIVEGQLNSIDLPLNIDKIKVERFSSKALKVHNIRVDLKTPKFDKIEVKNIRAAIHRLEQLVKKPNYRTHYFYRIDFNRCQGLVSKLSRVNHVSVEKLQRKLNAIKPLPNKADIKFIEDSIKSLKKHFPLQKENGSFIYNRKFFKIQHRIGFLKSHPKGIYTEKAISLNTELQKYRLIR

SEQ ID NO: 3582 - protein, 394 aa, Acinetobacter sp.
  source 1..394: note = Related to NZ_CP045101.1; note = Acinetobacter johnsonii
MNNVNFVYRSKKFQKFLDLAKRLDLSAAEILKISKIPDSEKYETDEIEKSDGRIRKIHKPCADIRKIQRRINKRIFNAVIWPNYIYGSIPANKLNNENKDYVECASMHCQARTILKLDIEDFFDNVSEDLVYRIFNKLFGFSEKVSLVLARICTVDGALPQGGLTSSYLASLALFEIESNIYSRLKNKKLTYTRYVDDITISSKKDNFNFQSTINILEVALNSIDLPLNQAKINVSNFSSELLRVHNIRVDQSKPRLDKAEVVKIKDNVSRLKEIAFDKKQPNIRTYYFYREDFNRCLGLINKLGRVNHPSYEKLNKALMKIYPIPNLSDIQYVRDSINKLKNLYPAYMNSYIYRKLFFRIQHRIGFIKKHKIYEKTARNLNLELQKYRAMYEK

SEQ ID NO: 3583 - protein, 398 aa, Acinetobacter sp.
  source 1..398: note = Related to NZ_CP067019.1
MTIPDKYLFKLNTTNKISSLNNLASALGVTLSDLKYAANLPDNKKYEHFFIKKSDGRERLIHKPCKEIRNIQRRINHRIFKPLVIWPVYLFGSVPSEKHEPAHDYINCAKRHCLSKSVLKLDIKDFFDNIDESLVKKIFREFFKYSESVVNILTKICCVNGHVPQGALTSSYIASLCLFSIEPLLAQRLNNKNLRYTRYVDDITISTTKHKFDFNATINIVENLLNSVDLPLNIEKIKTEYFSTEPLKVHNLRIDFNKPRYDKSETKNLRAAINRLSIQKKIPNYRSHYFYRSDYNRCVGLINKISRVNNPCSNRFFKKIKKIKPLPNPNDLEYVRKSIFELIRDSLTHKNTYRYRKKFFRTQQRLIFIRSHPQYIYEGSANALNILLQKYRLNYEEK

SEQ ID NO: 3584 - protein, 398 aa, Acinetobacter sp.
  source 1..398: note = Related to ABDHTD010000004.1; note = Acinetobacter baumannii
MSLPENYLFRLNTANKISSLNNLAKALGVQVSYLRKIADLPDEKKYEVFSIKKNDGRERLIHKPCKEIRNIQRRINHRIFKPLIIWPTFLYGSIPAEKEEPVNDYINCAKKHCLSKSVLKLDIKDFFDNIDEALVKNIFRDFFKYSEAVSNLLTKICCVNGHVPQGALTSSYIASLCLYSIEPILAQRLNNKKLKYTRYVDDITISTKKNNYDFNATINIVEGALNSIDLPLNIEKIKVEYFSTKPIKVHNLRIDFKTPRYDKDEARKIRSAIDRLVKQKEIPNYRSHYFYRADYNRCIGLINKINRLKHPSSKNFLKKILRIKPLPNPNDLDYVRRSIFELSRDYAIMKNSYQYRKKFFRIQQRLIFIRSHPQMIYENSAQVLNSILQKYRPLYEEK

SEQ ID NO: 3585 - protein, 391 aa, Pseudomonas sp.
  source 1..391: note = Related to CP061850.1; note = Pseudomonas aeruginosa
MDELKVRLKDGVDPIQSVDNLCSALDIPRSELDEVLALSDDERYIEISLPKSNGSRRLVYDPHPRLRRIQRRIKSRLLVSQILYPRYLYGSLSDSEYPRDYIRCASIHCGAKVLLKADIKNFFDNISRRLVLEIFERVFHYPEEVSDVLSDLCTRAGVVPQGASTSSFLANLCLLNEWCFVRDIQYEKLRYTRLVDDITISSTTTGKDLSRCMRTLTAMIESAGFELNENKTGIEHVTTKAFSVHGLRINKPSPCLPREEVRRIRADVHNLKRKASVPNARVSFEYRKLYESISGRVNKLKRLNHGRYNELRRQMNAILPLPSTKDIKRCQIMLATLERDYDLHRDSYLYKLRYSRLIHRLGILKRIYLHEAAAIRDALQDLKPEFVNEAD

SEQ ID NO: 3586 - protein, 390 aa, Pseudomonas sp.
  source 1..390: note = Related to NZ_LR130779.1; note = Pseudomonas oleovorans
MEELKARTKDGIDPIQNLDNLCDALGISREELDTALSLTDEDRYVEIKLRKKNGSTRIVYNPHPKLRRIQRRIKNRILSSQIIYPHYLYGSLSDKENPRDYIRCAAVHCGAKTVLKVDIRNFFDNISRDLVFEVFKTILHYPPEVSDTLANLCTRCGVVPQGASTSSFIANLCLLDEHDLVRKLSYDSLRYTRLIDDITISSKTPNKDLEKWMRVLKRMIEDSDFELNEEKSGIEHVALKAFSVHGLRINRSTPGLTREEVRKIRSDVHNLKNKASEPNARVSFEYRRLFESVSGKVNKLKRVNHPRYNILRKQMRDILPLPSKKDIKRCQIMLATLVRDHANHNSSYLYKVRHARLRHRLGILRRIYHHEAAAMRQTLRGLEPNFSDDT

SEQ ID NO: 3587 - protein, 390 aa, Pseudomonas sp.
  source 1..390: note = Related to NZ_WIFO01000002.1; note = Pseudomonas stutzeri
MDEFSPHAKPNIAPIQSIANLCNALSLTREEFDYASSLATPNGYIPIELTKKDGSKRTVFDPHPALRRVQRRIKNRILATNVVYPKFLYGSLSDPDHPRDYVRCAAIHCGAKTIAKIDISNFFDNIDYDLTFRIFADILHYPREVSLALANICTREGTIPQGAATSSFIANLCLFEEGGLVEGFTRENLRYTRLVDDITLSSTSTQKNLTRHFSKLEKMLQDAGFTLNVDKSGIEHISTKAFSLHGLRISQASPQLPREEIRKIRADVHNLKQEAAKANARVSFNYRRLFESVSGKVNKLKRLEHPRYQTLRAQLTDIRPLPSKRDIRRCQVMLATLKRDFPDHSESYLYKKRYFRLRHRVGILRRIYEREAQKITQELKDLKPRHVDEH

SEQ ID NO: 3588 - protein, 392 aa, Pseudomonas sp.
  source 1..392: note = Related to NZ_CP035088.1; note = Pseudomonas viciae
MDEYAPQKTTSESIFSIDNLLAALGLSEAEYKSIQDLEEKNRYTPLHLKKKNGDDRVVFDPHPLVRKFQRRIKNRLFNQIRYPTYLYGSISDPEHPRDYISCAQRHCKAKTILKIDITSFFDFIDYDLVYKIFNELFFYSDEISEALANICTREGVVPQGAPTSSFIANLCFFDTEGRIVKGLERQQLSYTRLTDDITVSSAIQDKDLNKAKSTIVSMIEHAGFKVNEAKTSIESISTTAFKVHGLRVNKETPQLPRDEIRAIRAAVNNLKILSREPNARTSFDYRKRYESISGRVNKLARTGHPRYKKHRLELKSILPLPSQKDIRRCLTMLSTLMRDYDVFCSTPLYMKRYHRLRHRLILLQRVYKHEAKKIWTELKVLTPTKSKAEHEL

SEQ ID NO: 3589 - protein, 392 aa, Pseudomonas sp.
  source 1..392: note = Related to UETT01000008.1
MDEYVPKKLTDESIFSVDNLISALGICEADFKIIQSLETKDRYTAINLKKKNGDDRIVYDPHPLIRKIQRRIKNRIFTQIRYPKYLYGSISDPDCPRDYISCASRHCKAKTILKIDITSFFDNIDYDLVYKIFRELFFYSDEVSETLAGICTREGVVPQGAPTSSFIANLCFFDIEGGIVKGLERQNLNYTRLTDDITVSSTTQDKDLNKAKDKIISMIQNAGFRINEDKTCIESISTTAFKIHGLRINKNTPQLPRDEIKRIRAAVNNLKILSKEPNARTSFHYRKLYESVSGRVNKLARTGHPRYHKHRQDLRDILPLPSQKDIKRCLVMLSTLMRDHETLCSSPLYMKRYHRLRHRLILLQRTYKHEANKIWKTIKDLTPTKSAAEHAL

SEQ ID NO: 3590 - protein, 389 aa, Pseudomonas sp.
  source 1..389: note = Related to NZ_RFFM01000002.1; note = Pseudomonas zhaodongensis
MDEFSFSKTTNQSISNIANLAYALDVSEELIDEALALPSDQRYTPHRPGNGNRLVYRPHPLIRKIQRKIKNRILVDLVRYPRYLYGSLRDVGFPRDYISCAQVHCLSKSVLKIDITKFFDNISANVVEDIYSDFFSFPFPVADVLANLCTHEGWVPQGAPTSSHLANLCFFREEPSLVRQLHRQGLRYTRLIDDITISCDSYGYDFTKDEERVRRLITEKGFSVNEAKTGLHYQGNSNIKIHGLRINFPKPQMTQEESRNIRVAVHQVEQWAAEPNCRTSIAYRKLFESTSGRVNKLKRLSHSKYDRYRKRLQKLLPLPSNKDYDRCIGLYNGVVADAAKGVHSFRYYRRYCLLQNRLNLIQRTRSYRAEAVRMRAVLKGLKPTYKNDI

SEQ ID NO: 3591 - protein, 382 aa, unidentified
  source 1..382: note = Related to NYWB01000030.1; note = Pseudomonadales bacterium
MDQLTFTKKTDQSIGPSAENLANALGISPEELDEALQIPSAQRYIPFTVSGGTRVVYRTHSRIKFIQQKIKNRILADCINYPKYVFGSIKDPDFKRDYVNCAAQHCGARSLLKVDIEKFFDNISIGNVRRIFRDLLHYPDPVCSMLCDLTTHNGYLPQGAPTSSHLATLCFFKEEPDIVEQAQAQGLVYTRLMDDITVSSKSYDYDFHRLERLIRNMIETKDLTVNEGKSETFPTVSSTTLVHGLKINTETLRVSDKTLSNIRAAINQLEKDAKQPNKRTLSNYRKRYERTSGSLSVLHRLGHPKYEKYRRKLRRLRPLPSPYFLNKTWELMESIENIQDMRESAIYRKRFYMLHHKLNLAQRTFKAEAKTMRERLKEIKPK

SEQ ID NO: 3592 - protein, 360 aa, unidentified
  source 1..360: note = Related to JAGPVE010000050.1; note = Marinobacter sp.
MAHLQDLALPFDGRYFELSKPKRNGGTRIVYDPHPDLKAIQKKINSRIFRAVFYPRYLYGGIRDTLDSRDYIKCATVHCPSGVVAQLDIDGFFDNILFHQIYEVFTGFFHYSPDVSNLLARICAKDEFNLPQGAPTSVALSNLVFFNDEPNLVRHILDSGARYTRFIDDITISHPDSKFPIEKYAKATIRIIERNGFRINESKSGTLRDTGLIDVFGIRVNGAIPRTPQNYSKNLRRKIYQLEELAKIPNERKQEGYRTSWNSTSGRLAKLKRTSSGKYRTYRKRLNKIKPLTHEREARRVKAKTRRMLVDSQKIQNPEAFKKRYQKLMHEIGSLKSTYPALNTSLKSLMAQVRENMAEE

SEQ ID NO: 3593 - protein, 360 aa, unidentified
  source 1..360: note = Related to JAINWM010000001.1; note = Marinobacter adhaerens
MEHLEALAQPFEGRYFEIQKPKKNGGIRVVYDPHPHLKAVQKKINSRIFRTVTYPRYLYGGIRDTADSRDYIKCATVHCPSSVVVKLDIDSFFDSVLSHQVLDIFSDFFNYSPAVAELLTRLCTKDDFNLPQGAPTSVALSNLVFFREEPGLARGIEGSGARYTRFIDDITISHSDSKFPVEKYLKAARRVITEKGFDINEDKTQTVRDTGLIDVFGIRVNGATPKTPKKYSKELRQKIYRLEELARIPNERKQEGYRASWHSTSGRLAKLKRTNSGKYRTYRRRLDKIKPLTHEREASRIKAKTRRLLNDSQQIHNKDAFRKRYQKIMHEIGLLKSTYPALNTSLKSLMKQVRENMDAQ

SEQ ID NO: 3594 - protein, 382 aa, unidentified
  source 1..382: note = Related to NZOQ01000019.1; note = Alteromonadaceae bacterium
MPLNISYSAPHRIASKRNLAKALNIGDEELEYLIAQKNHHYRQKRLPKKSGGTRTVYAPERNLKALQRKIVARIFHLVRFPPYLQGSISDPENQRDYIKCATQHCGAVAVSHIDIKNFFDGIEFDRVVDIFEGVFLFRSEVSLLLAELCTLDGYVPQGAPTSSYIANMIFFKDEPKIVNLANKSGITYTRLVDDITISTDVKNTCLRTLTKKVIRMIESYDLEINADKTKSMIRGSVPLTVHGIRVVEKKPKISRDEYRNIRDAVHRVVLASSTPNYRTKFEYFKLYHRVSGRLSKLKRLEHPGYTRLRNKLKPLLPLPSKGFKAKVTEKIEKLERNYSLSSSHEWYKKEWNVTSYKLGIVGRTYKKESSELRARIKAIRPS

SEQ ID NO: 3595 - protein, 382 aa, unidentified
  source 1..382: note = Related to SNZY01000014.1; note = Idiomarina sp.
MKISTYKPINVIGNPANLAAALDSSLEELGSLIENKAKLYQKKIIPKKNGKSRTVYSVDRELKKIQNKINNRIFSEVEFASYLFGSISDPDLPRDYLLCAESHCPSAIIATIDIKDFFDHITDEKVEKIFSGFFNFPDDVAELLTELCTFQGRVPQGAPTSSYLANLMFGTQEKRIAKAANECGARYSRLLDDIIISSPQKNFSIDTLYQRVEQMIVNSGFQINETKSKVDILGPKPLEVHGIVVTGNSPKVSKLKYQEIRRLVHQVSDLSKTDNRRTTHRYYKKYHRAYGLLSILKRVNHPAHKKLKSKLTSAPPLPSNRFRNSIFRRLSKLESKHQIHQQRKWFAKDWNRISHELGILRRSYPEDATNARNRLNLITPYV

SEQ ID NO: 3596 - protein, 393 aa, Enterobacter sp.
  source 1..393: note = Related to NZ_KI973178.1
MAKDFSFKNTFTPIQKKESLLALLGISDIDKFEKLISDGVEKAYYIKPPIEKKNGGHRIVYAPNRMLKSILRKINNKIFSQINFPDYLYGSIPDKENPRDYILCAQQHCKSKILVKMDIENFFPTMKSKFVYQIFKELFRFSDEVSNILTTLTTYEGFVPQGAPTSTYLANLYFYDCEPSKVSYLRKLGFRYTRLIDDITISRLNKEEDWKFVESVISNFIKQKELTVNNEKTKLLSAKSPQSFKVHGLCIEDEAPRFSKTERTNIKTQVHQVVRTAYGRDQIRMQPSFHKKYFSVKGKITKLKRVDCPDYPVLKNLLKKHCDPLPEHKEIKRINRVISNLSKDHVSIGHTERYKSRYFQVVFRLDILKKLYPVEANEFRARLRQIGPTKNEN

SEQ ID NO: 3597 - protein, 328 aa, unidentified
  source 1..328: note = Related to JSXC01000034.1; note = Pectobacterium fontis
MLKSILRKINNKIFSQVNFPDYLYGSIPDKESPRDYILCAQQHCKSKILIKLDIENFFPTMKDRFVYKIFKELFRFSDEVSSILTKLTTYEGFVPQGAPTSTYLANLYFYDCEPSKVRYLRGLGFRYTRLIDDITISRIKKEGDWKFVESIISEFINKKELTVNEEKTKLLSADSPQSFKVHGLCIEDTTPRFTKIERSNIRTQVYQVVKTGYGHDKIRMQLSYHKKYFSVKGKITKLKRVNCPDYPLLKKLLKKHCDPLPEHKEIKRINRVISNLSKDHTNFGHTERYKSRYFQVVFRLDILKKLYPIEASEFRSRLRQIGPIKNEN

SEQ ID NO: 3598 - protein, 393 aa, unidentified
  source 1..393: note = Related to BX571875.1; note = Photorhabdus laumondii
MPKGFSFKDTFTPIQRKESLIGLLGIKDIEKFESLLRDGVENAYYIKPPIKKKNGGERIVYAPNRMLKSILRKINNRIFNQINFPDYLYGSIPDKENPRDYILCAHQHCKAKILIKLDIENFFPTMKTKFVFNIFKDLFKFSDEVSNILTKLTTYDGFVPQGAPTSTYLANLYFYDCEPNKVNYLRSLGFRYTRLIDDITVSRLKKEGDWKFVETIISEFITQKELSVNKDKTQLLSANSPQSFKVHGLCIEETTPRFTKNERINIKTQVKRVVKTGYNRDNIRMQKNYHDVYFSVKGKITKLKRVNCPDYPLLKKLLAKHCDPLPEHKEIKRINRVISNLSKDHATFGSTERYRSRYFQVIFRLEILKKLYPVEANEFKARLKLISPIKNEN

SEQ ID NO: 3599 - protein, 393 aa, unidentified
  source 1..393: note = Related to NZ_CAKAKG010000001.1; note = Leclercia sp.
MPKDFSFKDTFTPIQKKESLIALLGIKDVEKFNNLVRDGVERSYYVKPPIKKKNGGERIVYAPNRMLKTILRKINNKIFNQINYPNYLYGSIPDKENPRDYILCAQQHCKAKILIKIDIENFFPTMKAKFVFKLFKEVFKFSDEVSDILTKLTTYDGFVPQGAPTSTYLANLYFHDCEPNKVSYLRSLGFRYTRLIDDITISRLEKEGDWKFVEGIISDFIKQKELTINDKKTKLLSTHSTQSFKVHGLCIEESSPRFTKNERLVIKTQVNRIVKTGYGNDKIRMDKNYHNSYFSVKGKTTKLKRVNCPDYPVLKKLLSRHCDPLPEHKEIKRINRVISNLSKDYAVCGNTERYLRRYFQVIFRIEILKKLYPVEANEFKLRLKLISPIKNEN

SEQ ID NO: 3600 - protein, 390 aa, unidentified
  source 1..390: note = Related to NZ_LVHW01000001.1; note = Pantoea agglomerans
MASSFSFKETFTPIQSVQSLINLLGVKDTEKFEDLIRNGAETSYYIKPPIKKKNGGERIVYAPNKMLKSLLRKVNQKIFTQINYPDYLFGSIPDKENPRDYILCAEQHCKAKVLIKIDIENFFPTMREEYVYKIFNKLLKCSEEVAQILTKLTTFDGYVPQGAPTSTYLANLYFFDSEPKKVQHLRNNGFRYTRLIDDITVSRATKEGSWKYVESFIGEFITQKHLSINKDKTISRSSSSPQQFKVHSLSIEGEKPKFPRIERLKIKDHVHRVVKTGYGKDNERMKKSFHYLYFSVRGKITKLKRVDCSDYPIFKKMLKRHCDPLPDHKEIIRLNRVISNLSRDFNSLGESERYKNRYFKVMFRLSILKKLYPKETNEFKKRLKLISPKK

SEQ ID NO: 3601 - protein, 396 aa, unidentified
  source 1..396: note = Related to CP042493.1; note = Leclercia adecarboxylata
MQSNNFVINKKNLPPIKNVDSLIKLLGVDAGYLDFLIEHGVEKNYYRKDPIPKKNGGERIVYAPNKKLKSLLKRINNKIFSQISFPHYLYGSISDSEHPRDYIRCASVHCKAKILIKIDIQDFFPSMDSVGVNSIFSKFFNFSDEISQILTKLTTYHGIVPQGSPTSTFLANLYFYDVEPSIVSHLESEGFRYTRLIDDITISKSERGESYKYIKPRIIKMITNKGLVINEKKCSEQSLKSSQSFKVHGLCIEEETPKFSKPEILKIRGQVFNILRVGYCNDKMRMSRDFHKFYFSVKGKTTKLKRVNSPEYTELKKLLKRNCDPLPDHLEIKRLNRVISNLSKDYVLLHNSKRYKSRFFHVYFRLVILSKLYKEEADEFKTRLKRIRPSSDMSSL

SEQ ID NO: 3602 - protein, 354 aa, unidentified
  source 1..354: note = Related to NZ_CP042173.1; note = Yersinia sp.
MLTRGVASFYTEKEINKKSGGKRLLHAPNRKIKFILRKVNNKIFNKVLFPHYLFGSISDKENPRDYIRCAEVHCKAKILIKVDISNFFPSINTYSVRDIYKVFFNFSDEVSDVLTELTTVNGTVPQGAPTSTFLSNLYFYNIEPQLVKYLESLGFRYTRLIDDITISKLDKNNFRFADDRVKAMITQKGLTINEGKSSIQSTVAAKGYKVHGVCIDEDKPRFTKSECMKITDEVYQIARVGYNRSDVRMRQSYHKAYYSVKGKITKLKRVGYVKYNDLRKVLNKHCEPLPDHDEIKRLNRVISNIQRDYTGKPATDNYKRRYYQAHFRLSVLRRIYKEEAKQFRARLISVRPNR

SEQ ID NO: 3603 - protein, 389 aa, Aeromonas sp.
  source 1..389: note = Related to JAHUWU010000005.1
MNNRPTYHGGVISNPLTLARVLGIELADLLAMSVDTVSHYKAKEINKKTVGAGKRVIHMPDESIKRLLRRVNSRIFNGVTFPGYLYGSISDQENPRDYIKCAELHCRASVLIKVDISNFFSQITTEHVYKIFLKFFNFSHEVSEILSKITTVTGFVPQGAPTSTFIANLCFFETEASLVTYLHGAGFRYSRLIDDITVSTLNNKLPWQYVEDRIVRFLDKEGFSINADKTESISTPSAQSFKVHGLCIGDEKPRFSKKHIDEIKKSVNCVLKKALFSDKNRKEKSYHKLFYSTQGKTTKLKRVKHNSYPSLKKALGRYALPLPDERESYRLNIAVKNLERDYPTLSSKLAYRNRYYKAKFRVGILSRIYRRDATLLNNRLKDILPTYED

SEQ ID NO: 3604 - protein, 395 aa, Vibrio sp.
  source 1..395: note = Related to PIFQ01000031.1; note = Vibrio splendidus
MDKPHYPCRPIGSVDVLANTLGVHIRRLRNIASKVDSSYTSYELKPHPVTNKVRTVVEPKHELKKIQKKINSRIFLHVNFPEYLQGGIRATSQSKRDYIENASRHGRSQTLINLDVKNFYPNIKADVVRDIFKYFFKFSDDVVDILTTLTTYRGSIPQGGCTSSYLANLVFFNDEYRIVSSLRGRNLRYTRLLDDITISSVTTIDNKTSEKIIKDIAGMLRKRNLSLKSPKTKVTDRSEMHKDFEVTGLCVRASEPKVRKKDRRLIRLSVFQCESQAKTDRTSDDYHKNWNKTSGLVAKLKRLNHSQAKDYRKRLAEILPLYDEYRESKIVKRAYAALKVPVSSHEKIGTIRSYNNLIYQLGILSRTNKKVAKGLSKSLKDHYSSVPTIENFWEN

SEQ ID NO: 3605 - protein, 395 aa, Vibrio sp.
  source 1..395: note = Related to NZ_AFWF01000003.1; note = Vibrio ichthyoenteri
MDKPHYPCQPIGSIDVLANTLGVHKRKLISIASKVNTSYSSYELPAHPITKKVRTVVEAKHELKKIQKRINSRIFLHVKFPEYLQGGIRATDKVKRDYIENATKHGRSQTLINLDVKNFYPNIKSEVVRDIFKYFFKFSDEVVDILTTLTTYRGCVPQGGCTSSYLANLVFFNDEYRLVSSLRGRQLRYTRLLDDITISSVKKIDQKLSEKIIKEVAGMLRKRSLSLKSPKTKVSDRSEMHKDFEVTGLCVRDSEPKVRKKDRRHIRQLVFNCELKAVNDRTSDEYHALWNKTSGLVAKLKRLKHSQASDYRKRLAVILPLYDQYQEGKIVKRANAALKVPVDLHSKFGVMRRFNSLIYQLGILSRTNKSVAKGLSCLLKKHYSSVPSINDFWET

SEQ ID NO: 3606 - protein, 395 aa, unidentified
  source 1..395: note = Related to NZ_CP035780.1; note = Photobacterium damselae
MDKPLYPCKSIGSIQVLAQTLGVHPKKLVSLARKANASYTSYELPPHPTTQKIRVVVEPKHELKKLQKRINSRIFINVKFPNYLQGGLKATSTVKRDYIANAFLHGKSKTLINLDVKNFYPNIKQKNIVDIFKYFFKFSDEVVDILTALTTYNGSLPQGGCTSSYLANLVFFNEEYKLVSSFRGQKLRYTRLLDDITISSEKTIIDKDKEKIIKRVAAMLKKHGLSLKSSKTKVTDRSEMHKDFEVTGLCVRATTPKASKKDRRYVRQLVHNCELMAVKEKTSNEYHALWNKTSGLVARLTQLKHNEAKGFRERLSEILPEYDQYQKDKVIKRARAALKVPSTAHSEWGTIRRYNRIIYHLGILARTDKKQAHRIKLTLKKHYSSRPTINEYWES

SEQ ID NO: 3607 - protein, 395 aa, unidentified
  source 1..395: note = Related to MCUF01000038.1; note = Shewanella sp.
MDKPLYPCSSIGTLDVLSKTLGVHPKKLKSIASKVNDSYSKYELPAHPTTGKVREVFEPKHELKKIQKRINSRIFEHIIFPEYLQGGIKATPEIARDYIANATIHGRSKTLINLDVRNFYPNIKENVVSDIFKYFFKFSDEVVEILTKITTYNGSLPQGGCTSSYLANLVFYNDEYRLFSSLKGRGLRYTRLLDDITISSPQLIDKELSVQLIKDVAALLRKRNLNLKSNKTKITNRSEIHKDFEVTGLCVRAAKPRTRKKDRMYVRQLVFNCEKMAVESKSSEEFHKLWNKTSGLIAKLDRLKKSHAKDYRKRLSVILPIYDQYQENKIIKRSKRALKVPITSHSQWGTIQQYNNLIYQLGILGRTKKGLAKNLRKSLKLHYSSVPTINKFWEQ

SEQ ID NO: 3608 - protein, 395 aa, unidentified
  source 1..395: note = Related to JACJDR010000003.1; note = Pseudoalteromonas sp.
MDKPLYPCKPIGSIEVLAKTLGIHTSKLQSISKKIEESYTPHTLKPNSSTGKVRSVFDPKFELKKLQKRINSRIFENIKFPEYLQGGLKATASCKRDYVENAEIHGRSKTLINLDVKDFYPNIKVDTVRDIFKNFFRFSDDVVDILTVITTYRGCLPQGGCTSSYLANLVFYNNEYRLFSSLRGRGLRYTRLLDDITISSKTAIDNKVREKAIKDVAAMLKKKNLRLKSSKTKITDRTEMHKDFEVTGLCVRSRLPNIPKKERKYIRQLVFNCEKIGRNDKTSKEYHSLWNKTSGLVTRLGRLGNTQASDYRSRLSEVLPEYDEYEEAKLVKRSNAALKVPQSEHLKWGVIKRYNIIIYHLGILTRTKTLLARNLRNKLKEHYSLVPSVKDFWEK

SEQ ID NO: 3609 - protein, 395 aa, unidentified
  source 1..395: note = Related to NZ_AP023033.1; note = Agarivorans aestuarii
MDKPLYPCKPIGSIHVLANTLGVHPLKLKSIANKAESSYTSYNLKQHPTTGKVRTVCDPKHELKKIQKRLNSRIFAKVEFPPYVQGGIKATIDSKRDYIENATIHGRSQTLINLDVKNFYPNVKADAVKNIFKYFFRFSDDVVDLLTKLTTYRGSLPQGGCASSYLANLVFFNDEYRLVSSLRGKQIRYTRLLDDVTISSQKPLDGNTSEKIIKQVAAMLRKHNLSLKSPKTKVSDRKELHKEFEVTGLCVRASFPKVRKQDRRYVRQLVFNCEQLAAQTRTSEDYHSLWNKTSGLVAKLVRLQHSEGKSYRKRLTKILPLYDQYQENKICKRYYAALKVPREQHVQWGTINKYNKLMYSLGILSRTNKKRAQHFRKKLATHYSSVPVIEDFWES

SEQ ID NO: 3610 - protein, 394 aa, unidentified
  source 1..394: note = Related to JAACRB010000019.1; note = Shewanella frigidimarina
MDKPRYPCKPIGSIDVLATTLGVHKKKLIDIASKVNSSYTSHELPKHPITGKIRKVVDPKHELKKIQKRINSRIFELVIFPPYLHGGIKATSSIKRDYVENASQHGHSQTLINLDVKNFYPNIKTNAVSGIFKYFFRFSDDVVEILTTLTTYNGSLPQGGCTSSYLANLVFFNTEYKLVSSFRGKAIRYTRLLDDITISSKNKIDSKSTTKIIQKVSAMLRKNELSLKSNKTKISDRSEIHKEFEVTGLWVQPVNPQMRKKDVRHVRQLVFECEKLASKSKTSEDFHILWNKTSGLVAKLSRLNHSQAISHRERLSNMLPEYDQEAQDKLVRSTNAALKVPVSSHSKWGVLKKYNLIIYNLGILARTNKILSKKLRVSLKKHYSSVTTISEYWG

SEQ ID NO: 3611 - protein, 395 aa, unidentified
  source 1..395: note = Related to LR721750.1; note = Aliivibrio wodanis
MDKPLYPCKPIGSIDVLAKTLGVHPTKLIDIASQVNNSYTSYQLPAHPVTGKERTVLEPKYELKKIQKRINSRIFEQVQFPSYLQGGLKASHSIKRDYVQNATIHSHSQTLINLDVKNFYPNIKTEAVSNIFKYFFNFSDDVVSILIKLTTYHGSIPQGGCTSSYLANLVLFNSEYKLVSSLRGKNVRYSRLLDDITISSKTKLDPKFIEKTIKDVAALLKKQKLSLRSQKTKITDRAEIHKEFEVTGLWVRPSQPQVRKKDRRYIRQLVFNCEQKSKTDKTSDEFHKLWNQTSGQVTILERLKHSQASDYRQRLAKIYPEYDQYQENKLIRKIKAALKVPISEHHQLGTIKRYNGLIYQLGILSRTKKTLSKNFRRTLKAHYSTVPTLNNFWNK

SEQ ID NO: 3612 - protein, 397 aa, unidentified
  source 1..397: note = Related to PYLU01000035.1; note = Photobacterium iliopiscarium
MDKPQYPCKSIASVEVLAKTLGVHLKLLNNIASKVEESYSSYVLPAHKVSGKIRTVFEPKHELKKIQKRINSRIFERVIFPEYLIGGIKATPTIPRDYVQNARIHSKSKTLINLDVRNFYPTIKAQEVKKIYKYFFKFSDEVVELLTLLTTYKGAVPQGGCTSSYLANLIFFNSEYQIVSSLRGQNIRYSRLLDDITISSTSEISSKKITVIIKSVSAMLKKHNLSLKGKKTKISDRDECHKDFEVTGLWVKEAEPKLRKEEVRRIRQLVYHCQLESINGMDSDEYHKIWNNVSGLVTKLTRLKHSQGKKYRDILTLILPIYNDYEINKLKKKINFALKIPKEDHYRIGVIKKYNQLNYKLGILGRTHKGMAKDARKRLKCHYSTIPKMDNYWEMDS

SEQ ID NO: 3613 - protein, 395 aa, unidentified
  source 1..395: note = Related to WEJX01000068.1; note = Plesiomonas shigelloides
MDKPYYGCASIGSVDVLAKTLGVNVKILESIVSKVDDSYTSYDLAPHPVTGKVRTVVEPKHDLKKLQKRINSRIFCGVKFPSYLQGGIASTEDVDRSYIKNAEIHCSSRTLINLDIKNFYTNIKYDVVFDIYKNFFRFSIPVCDVLTKLTTYKKQVPQGACTSSYLANLVFYNNEYLLVSFLRGKGFSYSRLLDDITISAKSECSEILTSDIIKRVASMLRKKDLKINNKKTKITDKREEHKEYKVTGLWVKHATPKLRKDERRYIRMLVYVCECKAQESRSTDEYHAFWNKTSGLVAKLKQLSHSQADSYRKRLSSILPICSEEKVYSINRRVKNALKIPVADHGSVSVIRRYNKLMYQLGILSRTEPELAKSLRKKMLHHYPSIKTINEYWHG

SEQ ID NO: 3614 - protein, 395 aa, Vibrio sp.
  source 1..395: note = Related to LIZL01000063.1; note = Vibrio splendidus
MDKPLYPCEPIGSLDVLAKTLGMHPAHIQSIASKVDESYTTFLLPPHPKTNKIREVRDAKFELKRIQKRINSRIFSHIRFPNYLQGGLKATXEQSRDYVENAGIHSRCLTLINLDVRNFYPNIKTKSVEQVFKHFFNFNDEVIEPLVKLTTFKGSVPQGGCTSSYLANLVFFNNEYHLVSKLRGQGIKYSRLLDDITISSEKKLSDDKCTELIKLVASMLKKHDLRLNNGKTSISFRNDINAKFEVTGLWIKHKTPRIRKNERRFIRQLVYNCELKARIDKTTTEYHELWNKTSGLVAKLERLNHCQSKDYRKRLANLLPEYSQSNAAQVLRAVSLALKVPKSEHQKLGRIKRINQLKHQLGILSRTHKSDAKKARQALNKHYSSSISKQKFWER

SEQ ID NO: 3615 - protein, 395 aa, unidentified
  source 1..395: note = Related to BPET01000001.1; note = Shewanella sp.
MDKPYYPCDSIGSVEVLAKTLGLHPLHLQNIADKAEESYTTFLLSPNPKTGKEREVREAKFELKRIQKRINSRIFEHVIFPAYLQGGLKATEDQGRDYVENASIHSRCRTLINLDVRNFYPNIKARSVKDVFKQFFRFSDEVVDLLVKLTTFQGAIPQGGCTSSYLANLVFFNNEYHLVSKLRGQGFAYSRLLDDITISSDKELSQAKASEVIRMVAAMLTKQKLRLNGDKTSISYRNELSAKFEVTGLWIKHKQPKVRKQERRYIRQLVYNCELKSKQDKTTDSYHTLWNKTSGLVTKLERLNHSQAGSYRKRLAVILPEYSPMQTDQLLKKVSAAMKVPASEHRKLGVIKRYNQIKYQLGILSRTQKGVARKARKALVAHYSSASTKLEVWES

SEQ ID NO: 3616 - protein, 395 aa, Vibrio sp.
  source 1..395: note = Related to NZ_JSTD01000043.1; note = Vibrio cholerae
MDKPLYTCKPIASIGLLAKTLGVHPDHLVDVANKIDTSYTSFELAPHPKTGKVRTVLEAKKNLKRIQKRINSRIFSNVKFPAYLQGGLKSDESTQRDYIENARLHSHCRTLIQLDVRNFYPNIKPIYVEPVFKQLFRFNDEVSQILTQLTTYKNSVPQGGCTSSYIANLLFFNSEYHLVSKLRGQGLQYSRLLDDITISSQEELSKQKCEEVIKLVAGMLTKYGLKLKGSKTQTEYRSNRNANLEVTGVWVKHRAPKVRKEERRYVRQLVYVCEQKAKVSKTTQEYHEHWNRTSGLVAKLERLEHGQAKKYRERLRAILPIYSESTANQVLKSVNTALKVPKTSHKELGRVNRLNKIYYQLSILSRTKRYEAKKARRQLKQYYSSSPTKQEIWEI

SEQ ID NO: 3617 - protein, 388 aa, unidentified
  source 1..388: note = Related to NZ_CP084222.1; note = Arsenophonus sp.
MDKPYYPFNAIASIEALARTLGIHPKLLCSIADKVESSYSTYDLANKNRTVFEPKYELKKIQKRINSRIFEKVEYPLYLQGGIKSEVKRDYVENAKIHSHAETLISLDIKKFYTNIKADKVFSVFKYFFKFPDDVSTILTTLTTYRGRVPQGGCTSSYLANLVFFNSEYSLVSAFRGKDVKYSRLLDDVTLSSEKNLDSIKCTNLIKNVVAMFRSYELRLNTKKTKIEYRGKANKGFEVTGLWVEHKKPKVRRKEQRYIRQLVYNCELQYNDRKTNSEYHELWNKTSGKVAKLVRLDHSQAKNLRERLRLVLPQYDNNTAYKLKKLTNKSLQVPKEHHQKIGRIRDYNRLIFKLGILKRSHPALAKVLIKKMKSHYLNVPTNKEYWLE

SEQ ID NO: 3618 - protein, 388 aa, Vibrio sp.
  source 1..388: note = Related to CP063377.1; note = Vibrio diabolicus
MDKPYYPHDAIASVEKLALTLGIHPNRLLSIADRADESYTEYELVDKDRTVFEPKYELKKIQKRINSRIFELVEFPLYLQGGIRANVKRDYVENAKIHANATTLISLDIKKFYTNIKADKVSAIYKYFFKFPDEVVDILTKLTTYKGKVPQGGCTSSYLANLVFFNSEYRLVSAFRGKGISYSRLLDDVTLSSASNLDSSGCTEAIRKVVGMFTAHDLKLNSKKTKIEYRGKAAKGFEVTGLWVEHKKPKLRRKERRYVRQLVYNCELKYESDKTTPEYHELWNKTSGKVAKLTRLEHSQAKALRKRLRNVLPEYDDYTANKLKHLAYRALQVPKEHHQKIGRVNDFNRLIFKLGVLRRSHPSLAKVLIKKLKVHYKNVPTKKEYWLE

SEQ ID NO: 3619 - protein, 395 aa, unidentified
  source 1..395: note = Related to NZ_KB907054.1; note = Psychromonas ossibalaenae
MDKPHYPFEPIGSIDKLARTLGVSPAVMEAISNRIDESYSEYELPPHPKTGKVRTVFEAKHELKRIQKRINSRIFELIEYPTYLQGGIKATPKRDYVENANMHVGANSLISLDIKNFYPNIKASQVFNIFKQLFNFPDALAKILTKLTTYKGTVPQGGCTSTYLANLVFFNSEYHLVSAFRGQGIVYSRLLDDVVLSSPKVLSNSECTDAIQKVAGMFKKYEFRLNSSKTKVEFRGNSNSEFNVTGLWIEHSKPKIRKKERRYIRQLVFNCELKYIQSKHSDDYHIFWNKTSGLVAKLERLKHPQAKKYRDRLKQVLPIYDDVNIRKIIKLTNKALKVPKEEHSRYGRIQNCNRILYRLGILGRSEAKLAKNLRRKLKSHYSTIPTKKEYWFGTA

SEQ ID NO: 3620 - protein, 392 aa, unidentified
  source 1..392: note = Related to JAHKPW010000044.1; note = Colwellia sp.
MDKPYYPYQAIGSIELLARTLGISSKRLISIASRVDNSYAEFELHPHPKTNKIRTVFDPKYELKKLQKRINSRIFEKVQYPKYLQGGIKAPDSRDYVENAKIHSKSNTLISLDIKNFYPNIKEKYVYDIFKQFLNFPDEVSKILTTLTTYKGFVPQGAVTSSYIANLIFFNSEYSIVSALRTKGVIYSRLLDDVSISSEKRLNETEITKNIKFVVSMFTKYDLKLNTKKTKKEYKNKKNPYEVTGLWVGHAKPKARKLERRYIRQLVYNCELKYPSMKDSSDYHELWNKSSGLVAKLERLGHSQAKRLRARMSSVLPCYDDIEIIKTKKLIRKALKVPREYHQKHGHIKIFNKLIYRCGILSRTHKKLSKHLRQQLQAHYQNVPTIREYWHG

SEQ ID NO: 3621 - protein, 396 aa, unidentified
  source 1..396: note = Related to NYUN01000050.1; note = Haliea sp.
MDKPEYPHKAIGSVDALAQSLGTNPSALKNLVSKVDNSYTPILISTNNGTKERQVYEPKYYLKKIQKRINREIFEKVKFPTYLQGSIRDVKNTRDFVKNAGVHSGANDLISLDITGFYDHIKEEYVSDIFTKLFSFPPDVSEILTKLVTYKGIVPQGACTSSYVANLVFFNSEYRVYSRLKNRHNVKYTRLLDDVTLSSERRLTDKELTICIDEVKSLFRKYDLKSNDSKKKVQTRKFHGHLDFQVTGLWVGHKTPRLRKKERRYIRQLVYSCEREYERDSTKTEYHELWNRTSGKVAKMARLNHSQSRALRERLKKVLPTYNQDQAETLIYNIKRFVDKVKKNKIKSDPAKTKNFNTLVYQVNILTRTNKSLANSLRLQLMSIRKSVNLKSALWD

SEQ ID NO: 3622 - protein, 388 aa, unidentified
  source 1..388: note = Related to NZ_CP047240.1; note = Pseudoalteromonas sp.
MDKPYYPHKPIGSVAILANTLGITELKLRAIASDSDNSYTEFLISDGKRTVCEPKFELKKLQKRINRRIFEKVQYPEYLQGGIKSTSKRDYVQNALIHSKATTLISLDIRRFFDNVKESYVYDVYKYLFKFPDEVAELLARVTTYRGTLPQGACTSTYLANLIFFNSEYRVVSILRGRGISYSRLLDDVTLSSGENLKKEEVTNSIKEVIDLFKKYDLRQNNKKLKVEYRDTPNGDFCVTGLWVEHSTPKLKKKERKYIRQLVYETEKLYRTDRTSEKYHELWGKASGKVAKLNRLGHKQSDSLRQRLSNILPEFDKYTTKKIVTIHYRLLSIPKIKHKRIDVAKQYNKQLHKLGILSRTNKTLAKKLRMALKQHFNQVTTIERYWHD

SEQ ID NO: 3623 - protein, 392 aa, Citrobacter sp.
  source 1..392: note = Related to CP077405.1; note = Citrobacter braakii
MDKPYYPFRPISSIAILAKTLGIHEKMLLNLANKVDDSYTEFLINVKGKDRTVYEPKHDLKKLQKRINHRIFEKVQYPVYLQGGIKDPSNKRDYVENAKIHCERDPNIIISIDIKSFYDNIKSDYVFNVYKNFFIFPDEVSEILTKLTTFKNKVPQGACTSSYLANLIFFNTEYSLVSKFRSTGICYTRLLDDVTLSSNKFLSEEKISSSIKDVVAMFRKYKLKHNNKKTKVECQKNAKNSFKITGLWVGHSKPKTTRHDRRYIRLLVKICENKFKDDKYSLEYHTFWNKTSGLVAKLSRLEQSNHVSLRERMSMILPLYDDKEKDKIIRECKAILKFNNKVAFTIGQVETINKVIGKLGILARNNKSLSKIWRSRIRKHCQSLPSKRSMWL

SEQ ID NO: 3624 - protein, 392 aa, Enterobacter sp.
  source 1..392: note = Related to JAHEVB010000007.1; note = Enterobacter hormaechei
MDKPYYPFRPISSTSILAKTLGIHEKMLLNLANKVDDSYTEFLINVKGKDRTVYEPKHDLKRLQKRINHRIFEKVQYPSYLQGGIKDNSNKRDYVENAKIHCDNNPNLIISLDIKSFYDSIKSDYILNVYKNFFHFPDEVSLILTKLTTYRNKVPQGACTSSYLANLVFFNSEYSLVSKFRSKGICYTRLLDDVTLSTNKKISEEYISASIRDVVAMFRKYNLKHNNKKTKVEFQKSAKDSFKITGLWVGHATPKTTRHDRRYIRLLVKICENKFKDSKYDLEYHAFWNKTSGMVAKLARLDQSNHVKLRERMSQILPHYDVREKEKIIRECKMVLKFNNKISFTIGQIDAINKLIGKLGILSRNNKALSRVWRNRIHKHCKSKPSKRSMWL

SEQ ID NO: 3625 - protein, 392 aa, unidentified
  source 1..392: note = Related to NZ_CP055904.1; note = Klebsiella aerogenes
MDKPYYPFRPISSIPTLAKTLGIHEVLLVNLSNKIDDSYTEFLINVKGKDRTVYEPKHELKRLQKRINHRIFEKVQYPGYLQGGIKDNNNKRDYVENANIHCEHKPNIIISIDIRSFYDNIKSNFVFLIYKNFFHFPDEVANILTKLTTFRNKVPQGACTSSYLANLIFFNSEYSLVSSFRNNSITYTRLLDDVTLSSSKALSESQITASIKEVIGMFNKYNLKHNNKKTKVETQKNSKDSFKITGLWVGHSKPKATRKERRYIRLLVKICENKANTDIYSEEYHAFWNKTSGLVAKLTRLDQSNHKDLRERLNAILPLYDDKSKNKVIRECKIILRYNNKVSLSIGQVDTVNKLIGKLGILSRNNRALSKIWRTKIRKHFKCMPTKKEIWQ

SEQ ID NO: 3626 - protein, 413 aa, unidentified
  source 1..413: note = Related to CP018628.1; note = Lelliottia jeotgali
MVDFDANYLLTSFTPLKHWCAMDKPYYPHNPISSVAILAKTLGIRKDLLVNLVNKVDSSYTEFLITVKNKDRTVYEPKFELKKLQKRINSRIFEKVQYPTYLQGGIKDDSNKRDYVENAALHCKNKPETIISIDIKSFYDNIRSSYINDIYKNFFNFPDEVADTLTKLTTYRNKVPQGACTSSYLANLIFYNSEYTLVSKFRNKNITYTRLLDDVTLTSRDNISEEKISEHIKSVVGMFRKYNLKHNNKKTKVETQKNAKNSFKITGLWVGHAKPKITRHDRRYIRLLVKICENKFKDDKYSEEYHAFWNRTSGMVAKLTRLDQSNHIELRKRMATILPLYDDNEKDKIIRECRRVLRFNNKIDLSIGQLDIINKLIGKLGILARNNNALSKIWRNKIKNHFPLLPTKREIWE

SEQ ID NO: 3627 - protein, 395 aa, unidentified
  source 1..395: note = Related to JACYNC010000004.1; note = Pantoea agglomerans
MLMDKPYYPHKAISSVNVLAKTLGIRESLLIELSIKSDTSYHEFTVCTKKGKDRTVYEPKPLLKRLQKKINSRIFEKVKYPIYLQGGIKDEISKRDYVENARLHSKSKPSHLIGLDIKSFYDNIKTPKVHDIYKYFFKFPDPVCDVLTKLTTHKGKLPQGACTSSYLANLVFFNSEYSLVSYFRKMGVTYTRLLDDVTLSSPVQLSEHQVGEAIKKVVGLFKKYNLKHNNKKTSIENNKNIKNGFQVTGLWVGHSEPKTTRDERRYIRILVKTCEQKHKSDPYSQEFHELWNKSSGLVAKLKRLGQPSHDSLRARLSVVLPLYDQKMASKLIMECKSLLTIKNKIQYSAGEVSNINKTLYKLGILSRNNPISSSIWRKRIRANFKNLPSKKELWE

SEQ ID NO: 3628 - protein, 393 aa, unidentified
  source 1..393: note = Related to CP026378.1; note = Mixta calida
MDKPYYPYKAISSIETLAKTLGIRVNLLSLLVEKSDSSYHEFIVCTKKGKDRTVYEPKPLLKRLQKKINSRIFEKVKYPVYLQGGIKDEINKRDYVENALLHSKNKPKQLIGLDIKSFYDNIKSDKVFDIYKYFFKFPDPVSDALTKLTTFKGKLPQGACTSSYLANLVFFNSEYNLVSYFRNMNITYTRLLDDVTLSSPVKLSEKQIGESIKKVVAMFRKYNLKHNNKKTSIECNRNLKNGFQVTGLWVGHATPKTTRDERRYVRLLVKTCEQKYKNNPYTEEYHELWNKTSGLVAKLKRLNQPSHDTLRNRLSLVLPLYDAVMVSKLMMECKSLLRVKNKIEYSVSEVNHINKTLYKLGILSRNNPGRASIWRKKIIANFKNLPTKRELWE

SEQ ID NO: 3629 - protein, 392 aa, unidentified
  source 1..392: note = Related to CGBL01000001.1; note = Yersinia aleksiciae
MDKPNYPHKPISEVSVLAKTLGISEVMLKSIASKVDTSYTEFDIESNGKDRHVYEPKFNLKKLQKRINSRIFEHVNFPSYLHGGIRDVNIRRDYVENARLHSKTKVNSLINLDIRSFYDNIKIDKVYKIYKYFFKFTDPVCEILTTLTTYKNKVPQGACTSSYLANLVFYNSEYQVVSALRCKGITYTRLLDDVTLSSKKTLSETTISNSIKSVIGMFTKHGLKQNKKKMKIESIQNKKDGFQVTGLWVGHAEPKTRRDERRYIRLMVYVCEKEYPNSMSTESYHELWNKTSGLVAKLNRLNQSNYKSLRERLGAVLPLYNDSERDKIIRECKSLLKLDSSKPVSYGQLDSINKIYSRLGILARNNTNLSRSWRKKLRSHFRKLPTKKEIWL

SEQ ID NO: 3630 - protein, 392 aa, unidentified
  source 1..392: note = Related to NZ_MJIB01000008.1; note = Rahnella sp.
MDKPYYPHKPISSVEVLAKTLGVSEPALRSIANKAGNSYTEFLIESKGKDRTVYDPKFELKKIQKRINSRLFENVIFPSYLQGGIHDKENRRDYVENAKIHSTEKIKSLINLDIKSFYDNIKKAKVNDIFKYFFKFPDPVCDILTSLTTYKNKVPQGACTSSYLANLVFFNSEYLEVSKLRGKGVTYTRLLDDVTLSSSKQLNDEEIEIYIKSIHGMFKKHGLKFNNKKTKIEHIKSKKEGFRITGLWVGHQLPKTTRNERRYIRLLVRICENEYSKSMYSEGYHELWNKTSGLVAKLNRLNQSNHESLRTRLGLILPLYDDAERDKILRECRNLLKIKATIELKYGHVDSINKAYGKLGILSRNNKLVSRMWRKKLKSHFRKLPTKRDIWL

SEQ ID NO: 3631 - protein, 390 aa, unidentified
  source 1..390: note = Related to JAFJAP010000008.1; note = Serratia marcescens
MDKPYYPHQPISTIESLARCLGVTTITLNSISSAIDSSYTEFVISSKNKERTVYEPKFELKRIQKRINNRIFEKVEFPRYLHGGIKSLEHKRDYVENAKMHSNTSVETIIGLDVKNFYDNIKKERVYIIYSQFFNFPHEVSELLTQLTTYKNKVPQGACTSSYLANLIFFNSEYGLVSKLRGKKITYTRLLDDVTISAAKKISDEEITKVIRDVSALFTKHGLKLNSGKTRVHHDKYAADSFEVTGLWVGNIAPKTRRQERRYIRSLVHACENEYLVDKYSSDYHALWNKTSGLVAKLYRLEQSNHKALRERLGKILPLFDDVAKRKIIIDCKSMLKIAPCSLNYGKLKRLNLIYSKLGILSRNYKCEAKLWRKKLKAHFVKHPKKSEVW

SEQ ID NO: 3632 - protein, 390 aa, unidentified
  source 1..390: note = Related to KI929259.1; note = Serratia marcescens
MDKPNYPHCPIASIDALARCLGVASTKLLSISRDIDNSYSEFIIESKGKDRTVYEPKFELKRVQKRINQRIFEKVKYPIYLHGGIRDPDNKRDYVENARIHSANSCKTIIGLDVRNFYDNIRADKVTPIFKLLFKFPNDVSELLTKLTTYRGKVPQGACTSSYIANLVFFNSEYTVVSRLRSLGISYTRLLDDVTLSSPKELSPERISECIRSVVALFKKHGLEHNKKKTRIENKNNNAQSFIVTGLWVGHKTPKVTRHERRYIRTMVHACERLYLDDNSTDAYHNIWNKTSGLVAKLNRLEQSNHKGLRERLNKVLPVYDEAARRKIILDCKSLLKLNATSLTYGQLTRLNLVYSKLGILSRSFLFESRLWRRRLNAHFKNKPKKSEVW

SEQ ID NO: 3633 - protein, 392 aa, unidentified
  source 1..392: note = Related to QDKH01000022.1; note = Brenneria sp.
MDKPYYPHNPISDVSTLAKTLGINEVMLNVIVSNVDTSYTKFDIPSKNKTRTVYEPKLNLKKIQKRINSRIFEAIQFPIYLQGGIKDSVDKRDYVENARTHSVNSPSTLINLDIKSFYDNIKYDKVFDIFKYFFKFPDDVSKVLTDLTTFKNKVPQGACTSSYLANLVFFNTEYSIVSSLRGKEIYYTRLLDDVTMSACCVLPEEIISESIKKVVGMFKQYGFKSNNKKKKIEYNKNMKGGFQVTGLWIGHTNPKTTKKERRFIRLLVHTCFKKYNESMTNESYHELWNKASGLVAKLKRLDQSNHKALREKLASILPLYDDSERKKIVHECNRLLKIPSSKTLTYGEIDRINRVFYKLGILSRSEKNLSRMWRRKLKQHFKNIPKKRASWL

SEQ ID NO: 3634 - protein, 391 aa, unidentified
  source 1..391: note = Related to NZ_WUBF01000012.1; note = Pectobacterium polaris
MDKPYYPHSPISDLPTLAKTLGVNLVMLNVIVNKVDDSYTEFQIPSKNRFRTVYEPKLNLKRIQKRINSRIFEFIQFPFYLQGGVKDSIDKRDYVENAKMHSSNNPETLISLDIKSFYDNIKSDKVFDIFKYFFKFPDDVSNTLTKLTTFKNKVPQGACTSSYLANLVFFNSEYTIVSNLRGKGICYSRLLDDVTMSANYSLSEEVVSESIKKVVGMFKQYGLKSNNKKKRIENNKNLKGGFQVTGLWVGHKNPKTTKLERRFIRLLVHTCFKKYNESMTSDSYHELWNKTSGLVAKLKRLDQSNHKALREKLARILPLYDENEKKKIIQECNRVLRIAPSKTLTYGEIDRINKLFYKLGVLSRNEKQLSRMWRKKLKFHFKNIPRKREVW

SEQ ID NO: 3635 - protein, 398 aa, Aeromonas salmonicida
  source 1..398: note = Related to CP022426.1
MTRLQVFMDKPYYPYSPIASIDSLSLTLGVVPKVLLDIAKNSSNSYTEFIVPSKNKDRLVYEPKYELKKIQKRINARLFEKVQYPLYLQGGIKDNLVKRDYVENAKLHVKSKHLINLDIKAFYDNIKPHHVFSVYKYLFKFPDDVCDVLTQLTTYKNRVPQGACTSSYIANLIFFNDEYTLVSSFRQQGISYSRLLDDVTLSSNKELSSEDVTNAIKKVAALFKKYDLRLKNSKTKIEVKSNKEAEYKVTGLWIGNGEPKVRKDERRYIRQLVYICGLKYAKSSSCQEYHEFWNKISGMVAKLTRLNHPEAAKLRVKLSNILPTFSVEVKRKVIHDIKKLMRKPATQGSYTLGEIARVNNSMYLLGILGRTDFNLARNLRRDLKRKYKNLPTYNQIWS

SEQ ID NO: 3636 - protein, 391 aa, Aeromonas sp.
  source 1..391: note = Related to NZ_UETL01000014.1; note = Aeromonas media
MDKPYYPHSSIASIDSLSSTLGVVPQRLLDIAKNSCNSYTEFVVPSKNKDRLVYEPKYELKIIQKRINARIFEKVEYPEYLQGGIKDLAKKRDYVENSKIHVNSKHLINLDIKSFYDNIKPLHVHNVYKNLFKFSDEVCDVLTLLTVYKNRVPQGACTSSYIANLIFFNSEYTLVSSFRQQSIIYSRLLDDVTLSSNKELPQDTVTKAIKSVAAVFKKYDLRLKNSKTKVEVKSDKKSEYKVTGLWIGNGEPRARKSERRYIRQLVYICGLKHHTSSSSQEYHDFWNKVSGMVAKLTRLNHPESASLRLKMSDILPTFSKEMKAKIILDIKKLLRKPSAQCSYTQGEIARVNKAFYLLGILGRTDKILAKNLRCDLKRKYKNLPTYNEVWR

SEQ ID NO: 3637 - protein, 391 aa, Aeromonas sp.
  source 1..391: note = Related to AP024466.1; note = Aeromonas jandaei
MDKPYYPYSPIASIDALSLTLGVIPEALVDIARKSSSSYTEFVVPSKNKDRLVYEPKHDLKRIQKRINTRIFEKVEYPRYLQGGIKDALIKRDYVENASLHTTSKHLINLDIKSFYDNIKACHVFAVYKYFFKFPDDVCEILTLLTTYKNKVPQGACTSSYIANLIFFNSEYSLVSSFRQRGVTYTRLLDDVTLSSNKELAEEEITKAIKDVSALFKKYDLRLKNNKTKIELKANKDADYKVTGLWIGNGAPRVRKHERRYIRQLVYVCSLKYKESSSSKEYHDLWNKVSGMVAKLTRLKHSDASGLRSKLTEMLPTFGDDVKRKIIHDIKKLMRKPDPQCSYTHGEIARVNKAIYLLGILSRTDRNLANNLRRDLKRKYKNLPTYNDIWS

SEQ ID NO: 3638 - protein, 391 aa, unidentified
  source 1..391: note = Related to RBJB01000003.1; note = Marinobacter nauticus
MDKPYYPHKPIGSLDALAKTLGVHPKLLLDFAEKANSSYTSFNIVSKSGKIRTVYEPKYELKKIQKRINDRIFEAVRFPLYLQGGISDDQSKRDYVENAKIHANSQCLIVLDIKNFYGNIKSDYVFDVFKYLFKFPDEVSMLLTKLVCLRGRVPQGACTSSYVANLVFHNSEYHVVSYFRQRGVVYSRLLDDVTLSTNDRPSAESTQEYIERVIALFKKYDLKPRSDKIKVYIKGSHAYTYDVTGLWVGHAKPKLRKSERRYIRQLVFECEKKYQASSCDPSYHKFWNYVSGQVAKMTRLGHHQSKELRRRLGLILPTIDALEEQKIAADVQKIAKLRRNHTYKSGDISRINKLYYKLGLLSRTNKGRSKALRSMLKSAHPNVPNKREYWL

SEQ ID NO: 3639 - protein, 391 aa, unidentified
  source 1..391: note = Related to NZ_VZZZ01000001.1; note = Marinobacter changyiensis
MDKPYYPHLPISTNETLAKTLGVHPKLLQDFCARSNSSYTSFSVTSKSGKQRIVFEPKYELKKLQKRINHRIFEKVRFPIYLQGGIKDYEKKRDYVENAKIHANSKTLISLDIKNFYDNIGEAYVYRVFKYFFNFPDEVSKTLTALVTLNGRVPQGACTSSYIANLIFFNSEYRIVANLRGQGVKYTRLLDDITLSIESEISEEHTSQLIKDVIALFKKHDLKVQNKKTKISVKHSHAQPYDVTGLWIGHSKPKLRKSERRYIRQLVFECEKKHSQGSAEIDYHKFWNHVSGQVAKMHRLGHSQSADLRSRLAMILPTLDDLSERKLEIDLNKLINSKKQTSLKYGDITRINKVFYTLGILSRTKRNKSRKLRRKLKNAYPKIPTKVEYWL

SEQ ID NO: 3640 - protein, 391 aa, unidentified
  source 1..391: note = Related to NZ_LAPT01000169.1; note = Pokkaliibacter plantistimulans
MDKPYYPFKPIGSLDALATTLGVHPKLLTDFSNKANDSYVKFEIVSKSNKRRTVYEPKFELKRLQKRINSRIFEKVEYPVYLHGGISDEINKRDYVENAKLHAKSNTLICLDIKDFYGSILLDHVFDVFKNFFHFPPDVSSLLTKLVTLNGNVPQGACTSSYLANLVFFNSEYNLVSRFRGRGVTYSRLLDDVTLSSNDKLSDTLVQKYIEEVSKLFAKYSLHIKNKKTRVHIKSDHSKPYDVTGLWVGHSSPRLRKSDRRNIRHEVFLCEKEFEFDSTSEKYHKQWNRVSGLVAKMQRLQHSQAKILRQRLSKVLPTYSDADAAAVIRDANKILNAKKKENMKIGELNRINRVLYSLGILGRTNSGKAKSLGKNIRAKYNNLPGKRAFWV

SEQ ID NO: 3641 - protein, 393 aa, Pseudomonas sp.
  source 1..393: note = Related to CP033104.1
MAKDKPYYPHGPIGSLAILAKTLGVPPKLLSDLAKKASSSYTPFVIETKGGKQRDVYEPKYELKRLQKRINSRLFEKIEYPTYLQGGVKDEAQPRDYIENSKIHAGSKFLISLDIRNFYDNIHIDSVLSIFKHLFKFPEDVSTLLTSLVTREGKVPQGACTSSYIANLIFHNSEYSYVKKLRDNGFYYSRLLDDVTISADRLVPQEEVTKTIKYVAGLFSEHGLRLRGSKTKIERADDLKSAYAVTGVWVGHGIPKIRRTERDMIRHSVYICEQEYAKNCFSDEYHALWNKVSGQVAKLTRLNHAQAPKLRHRMRSILPLYDSKATASIWRETDKMLKRPKKSHTKIGVINAYRRLIYQLGILARTDKGLSRALRRQLQSRFSGVPSKALMWE

SEQ ID NO: 3642 - protein, 393 aa, Pseudomonas sp.
  source 1..393: note = Related to JAEHTA010000001.1; note = Pseudomonas monteilii
MAKDKPYYPHQPIGSLATLAKTLGLPPKLLSDLSRKADVSYTPFNIITKGGKSRDVFEPKYELKRLQKRINSRLFECVEYPFYLQGGIKDDAKPRDYIENSRIHSGSQFLISLDIRDFYGNIQLESVRSVFKHLFKFPDDVSETLVKLVTREGRVPQGACTSSYVANLIFHNSEYSYVKKLRDKGFSYSRLLDDVTISCNRLIPQEEATEIIKYVSGLFREHGLRLRTNKTKLERSDDLKASYSVTGVWVGHGVPKIRRAERDMIRHSVYICERECVKDRYSDAYHDLWNKVSGQVAKLTRLNHVQAPALRDRMRDILPLYDSKAVASVRREVDKMLKRPVAHHSKVPVIDAYRQLVNKLGILGRTNKTLAKALRRQLKARFAGVPTKAMMWE

SEQ ID NO: 3643 - protein, 348 aa, Pseudomonas sp.
  source 1..348: note = Related to NZ_CP077075.1; note = Pseudomonas xanthosomae
METKGGKIRNVYEPKYELKRLQKRINSRLFEAVEYPKYLQGGIKDEENPRDYIENSRIHAGSRFLISLDIRDFYDNIPFASVVSVFKYFFKFPDDVSEVLAKLVTREGRVPQGACTSSYIANLIFHNSEFSYVKRLRDKGFSYSRLLDDVTISSDRLVAQEEATASIRYIAGLFREHGLRLRQSKTKMERSDDLKAPYAVTGVWVGHGVPKIRRAERDTIRHSVHICECEYEKDRFSDEYHALWNKVSGQVAKLTRLEHAQAPKLRKRMRKILPLYDSKAIASILRETDKMLRRPKSHHSKIGVIDAYRRLINKLGILSRTDRTLSRAMRKQLKAKFSDVPSKAMMWE

SEQ ID NO: 3644 - protein, 392 aa, Pseudomonas sp.
  source 1..392: note = Related to NZ_UWAB01000407.1; note = Pseudomonas viridiflava
MAKDKPYYPHASIGSLAMLAKTLGVHPKVLTDLASKASNSYTHFLVSTKGKDRDVYEPKFELKKLQKRINSRLFEKVQFPNYLQGGIKDESNPRDYIENSRIHAGSKFLISLDIRNFYDSIPLESVISVFKHFFKFPDDVSDVLARIVTRDGRVPQGGCTSSYVANLIFHNSEYSYVKKLRDEGFSYSRLLDDVTISSPRLISQDEATQRIRYLTGLFKEHGLRLRQSKTKLERSDDLNAAYKVTGVWVGHGIPKLRRSERDMIRHSVYICEKEYAKNPFSDEYHVMWNRVSGQVAKLTRLDHSQAPKLRDRMGEILPLYDSKAVASIWREADRMLRRPLSSHKRIAVIQSYRRLVNKLGIMTRTNRPLAKNLRRQLKARFSGVPSKVMMWE

SEQ ID NO: 3645 - protein, 393 aa, Pseudomonas sp.
  source 1..393: note = Related to AE016853.1; note = Pseudomonas syringae
MAKDKPYYPHASIGSVAMLAKTLGVHPKLLNDLAGRATDSYTHFVIRTKGDKERNVYEPKYELKKLQKRINSRLFEKVHYPFYLQGGVRDEDHPRDYIENSRIHAGSKSLISLDIRNFYDNIPYESVVSIFKYFFNFPDEVSDLLSKIVTRDGKVPQGACTSSYVANLIFHNSEYNFVSRLRNQGVTYSRLLDDVTLSSSRLLSQDEVSGYIKYVAGLFSEHKLRIKKSKTKIERSDDLSAEYTVTGVWVGHGVPKIRRAERDLIRHSVYICEREYQKDRFRDEYHELWNKVSGQVAKLTRLEHSQALKLRARMRDILPLYDGKATAAIIREADLLLKRPRTSHVKVSVVNAYRRLINRLGILTRTNKTLARGLRRQLKTKFSDVPSKVLMWE

SEQ ID NO: 3646 - protein, 393 aa, Pseudomonas sp.
  source 1..393: note = Related to CP054472.1; note = Pseudomonas aeruginosa
MAKDKPYYPNAPIASIEVLAKCLGVSPRVMLDLAGKVGSSYTEFLVSSKSKDRTVYEPKFELKKLQKRINSRIFSAVQFPTYLQGGIKDAKSPRDYVRNGEFHAGSCMLVSLDIRNFYDNIKRERVEDVFKNFFRFPPDVCQVLTDLVTLKGKVPQGACTSSYIANLVFHNSEYSIVSYLRSKGITYTRLLDDVTLSSKKPLSDESLSDVIGRISGMFKKHGLRIHPGKKKIELASDSRSDYKVTGVWVGHGVPKLRRKERDYIRHLVYICECEYKKDPTQDSYHELWSRTSAHVATMTRLEHSQSVELRKRMSKILPLFSEARKKQVIVEAGKLLRRDFSKAMRLGVIKTYNKTMHSLGILSRTDRAKSKRLRKELRLKFSGIQSMQQYWEG

SEQ ID NO: 3647 - protein, 393 aa, Pseudomonas sp.
  source 1..393: note = Related to JAHUVZ010000002.1
MAKDKPYYPNASIASIDILAKCLGVSPKVMLDLASKTESSYTEFLVSSKSKDRTVYEPKFELKKLQKRINARIFAAVQFPGYLQGGIKDSDSPRDYVRNGKCHAGSNMLVSLDIRNFYDNIKRESVEDIFRNFFRFSPEVCSVLTDIVTLKGKVPQGACTSSYIANLVFHNTEYSVVSYLRSRGITYTRLLDDVTLSSKSELSDEVLSEIIFKVSGMFKKHKLRIHPGKKKIEIAKDSRSEYKVTGVWVGHGVPKLRRKERDYIRHLVYICEQEYKKDPSVDSYHELWNRTSAHVATMTRMEHSQAVDLRERMSKILPVFGVDRKTQVIVEANKLLRRDISNNVRIGVIKTYNKTMHSLGILSRTDRAASRYYKRALRRKFSGVKTIQQFWEE

SEQ ID NO: 3648 - protein, 392 aa, Pseudomonas sp.
  source 1..392: note = Related to NC_018028.1; note = Pseudomonas stutzeri
MAKDRPYYPNASISSIDVLAKCLGVSPKVMLSLAKNSSNSYTQFTVPSKGKDRVVYEPKLNLKKIQKRINSRIFEHVQFPPYLQGGIKDNLSPRDYVENSKFHAGSSVLVSLDIRNFYDNIKYDSVYDVFLYFFKFEPSVCTVLTDLVTLNGKVPQGACTSSYIANLVFHNHEYSLVSYFRSKGITYSRLLDDVTLSSSKEIPPQEIEEAISKVAEMFKRHKLRIHPKKKKIEVSSDTRSEYKVTGVWVGHGVPKLRRKERDYIRQLVYICELEYKKDPTAEDYHDLWNRASAQVAKMTRLDHSQASALRSRMSKLLPLYSPAKRKQVIIKAKTLLSRNKSDAKELGFIKMYNKTYHSLGILSRTDKPTSRYYKAALERKFSVEPIKQFWEN

SEQ ID NO: 3649 - protein, 393 aa, Pseudomonas sp.
  source 1..393: note = Related to QJRF01000029.1; note = Pseudomonas taiwanensis
MAKDKPYYPHSSISSIDTLAKCLGVAPKVMLDLARDTENSYTEFVVPSKGKDRTVYDPKHNLKKIQKRINSRIFEHVLFPEYLQGGIRDVDSPRDHVNNGRAHTGSSVLVSLDIRNFYDNIKYPSVFDVFKNFFKFPDEVSKVLADLVTFRGKVPQGACTSSYVANLVFHNTEYSVVSYLKSRGIQYTRLLDDVALSSNRVISKADLEGAIEKVAGMFKRHKLRIHPRKKKIEYSSDSRSEYKVTGVWVAHGVPKLRRKDRDYIRHLVHICELEFLKDPTADSYHELWNRSSAQVAQMTRLGHSQAASLRSRMSEILPLYGPSRKTQLNIEVKKLLGRKQSESNSLGFIRTYHKLINALGILSRTDRGLARSYRGLLTAKFPHVRSKVKYWEQ

SEQ ID NO: 3650 - protein, 393 aa, Pseudomonas sp.
  source 1..393: note = Related to NZ_FRBQ01000013.1; note = Pseudomonas punonensis
MAKDKPFYPHAPISTLDVLAKSLGVSPQVMSKLSSSADDSYTAFSVSSKNKDRTVYDPKYNLKKLQKRINSRIFEHVVFPQYLHGGIRDVSHSRDYINNSRIHAGSRVLVSLDIKNFYDNIKRDSVFDIFKSFFRFPDEVSTLLTNVVTMRGKVPQGGCTSSYVANLIFHNTEYSVVSYLRSFGIEYSRLLDDVTLSSSHPIPPEKLEQAISKVAGMFKRHGLRVHPHKKKIESSSDSRSPYEVTGVWVGHGVPKIRRKDRDYARQLVYICTKEYLKDYTSDAYHALWNKSSAHVARMTRLDHAQARQLRDRLSKILPQYSAARIKQLSFEYKKLINRPVADVATLGFSKSFHKLIHSIGILSRTDAHLARHYRKSLRAKFPRVLSKADHWGI

SEQ ID NO: 3651 - protein, 393 aa, Pseudomonas sp.
  source 1..393: note = Related to QTSW01000011.1; note = Pseudomonas lactis
MAKDKPYYPLSPIASINALAKTLGVVPKLLVDIAANVSTSYTSFDIESKKGKLRTVYDPKYELKRLQKRINSRIFEKVIFPLYLQGGIKDQENPRDYVENCKLHAGSSFLISLDIKNFYDNIRMSSVFDIFKYFFKFPDPVCEILTSLVTLDGHVPQGACTSSYIANLVFHNSEYKLVSCFRDQGLNYSRLLDDVTVSSKNLISQEKTTDIIRSVAAVFKKYDLRLNSKKTKVERSDDLGADFKVTGLWVGHGQPKLKKDERRYIRQLVYVCEKDYQNNPCSEKYHELWNRVSGKVAILTRLKHVEAQNLRARLGCVLPLYDEDAKAKICFESKKLLRRHPSTHSKVGVMTAYHKIIHSLGILTRTDRALARSLRKQLRARYSALPLKRDIWE

SEQ ID NO: 3652 - protein, 393 aa, Pseudomonas sp.
  source 1..393: note = Related to NZ_CP043571.1; note = Pseudomonas migulae
MAKDKPYYPLSPIASIETLAKALGVVPGLLKDLGEDASNSYTKFDIVTKNGKERTVYDPKYELKRLQKRINSRLFEKVIYPGYLQGGIKDPNNTRDYVENCKLHAGSKFLISLDIKNFYDNIRETSVLSIFKHFFKFPDDVSVLLTKLVTLNGRVPQGACTSSYVANLVFHNSEYSLVSKLKSRGLVYTRLLDDVTISSSTLLTQDVATDLIKDVAAVFRKHNLRLNNSKTKVERSDDLAAEYKVTGLWVSHGQPKLKKEERRYIRQLVYICEQEHQKSPFEESYHDLWNRVSGKVAIVTRLKHVEAADLRGRLSKILPLYDSTKRSQILFEAQKLLRKHPSTHTRMGVINSYHKIIHAIGILTRTDRVLARALRRQLKAKFSDLPLKSQVWE

SEQ ID NO: 3653 - protein, 393 aa, Pseudomonas sp.
  source 1..393: note = Related to CP073082.1; note = Pseudomonas aeruginosa
MAMDKPYYPYRPISSIDALARTLGVVPKLLCDLADDPATSYVKFTIFSKNGKQRDVYEPKYELKRLQKRINSRIFELVIFPSYLQGGIKDVEFPRDYIENSKIHAGSGALVSVDIKDFYNSIREPSVLSIFKNFFSFPDDVSCLLTRLVMLEGRVPQGACTSSYVANLIFHNSEYSLVSKFRAKGLAYSRLLDDVTVSATKPISQEESTLAIKSIAAMARKHDLRLNSKKTKIERSDDINADYAVTGVWVGHGVPKLRKDERRHIRHLVYICEKEYAKDCFSVEYHSLWNRVSGQVSKLTRLKHAQAKSLRERMGNILPKYDFQAKAKIIYECSRLLRRPVSSHKKIGVINNYRRLIYSIGILSRTDRSTAKALRRQLVERFAGVPSKAEMWS

SEQ ID NO: 3654 - protein, 393 aa, Pseudomonas sp.
  source 1..393: note = Related to NZ_CP027733.1
MAKDKPYYPHHPIGSVESLAKCLGLPPRLLKDLSEDTSNSYTEFSITSKSGKERIVYDPKFELKRLQKRINSRLFEGVFYPSYLQGGIRDQKNPRDYIVNGTIHAGSKNLIGIDIKDFYNNIKEESVKPIFTRLFNFPDAVASILTKLVTRDGRVPQGACTSSYVANLVFFNSEYSLVSRMRARGFSYTRLLDDVTLSSKRPITKEESTELIKEVAAIFKKHNLRLNNKKTKQESAGDVKAEYKVTGVWVGHGIPKLRKAERRHIRHLVYICEKEYLKCRFSEEYHALWNRISGQVAKLTRLEHSQAEDLRLRMSGILPEYDNQMKASIIFEADKLLKKPVAHHVRPGVISSLNKTLYSLGILTRTDKPLARHYKKMLRLRFINAPTKSEMWG

SEQ ID NO: 3655 - protein, 390 aa, unidentified
  source 1..390: note = Related to NZ_OBMO01000006.1; note = Alcanivorax xenomutans
MDKPYYPHNGISSIQSLAKTLGIHPSLLVDIASKTTDSYTEFQITSKNGKIRTVYDPKYELKRIQKNINQKILEKVEYPTYLQGGIRDLENRRSYVDNAGIHAGSNHILSLDIKNFYDNIRPEKVKEIFLYFFKFSDETSELLTKLVTLGNKVPQGACTSSYIANLVFFNSEYRIFSELKSKGISYSRLLDDVTLSSRKHLSRDEASEHIRLVCSIFKKNGLRLNNKKTKNELKGSNPNFKVTGLWVEHKNPKIPKKERHHTRHLVYICEKEYAKSPSSEHYHQLWNKTSGQVAKLKQLGHSQHKQLRTRLKKILPILDESSKKKLILDCKKLLHLERNAKERFGVLKRINKCIYMLGILSRSDKGLSSNLRRQLLKHFGDLPTHKDYWI

SEQ ID NO: 3656 - protein, 396 aa, unidentified
  source 1..396: note = Related to NZ_FUKJ01000432.1; note = Crenothrix polyspora
MKLKPHYPHNPIASIEALAITLGIHPKLLQDLANKANDSYINFTVSSTNRKGEDKDRHVCEPKHELKKLQKRINSRIFEKVEYPNYLQGGIKDEENPRDYVANATRHANANQIICIDVKQFYPSIKSQYVVKVFQYFLNFPPDVSEILTKLVTYHGRVPQGGCTSSYIANLIFYDTEYLLVSELQKHGIQYSRLLDDITLSTQKNFTKEQENFYIKKIADIFKKYELKINNKKTRNEHSSNPAVSFEVTGLWIGHKKPKARKEERRFIRQLVFMCEREYTQSPYSEKYHERWNEASGKVAKLQRLEHLQATKLRERLGIILPLYDENMQSQINQETKKLVKLSAPQNQRLGNIKRVNILIHKLGILARNNKSLANSLRSQINEVYANKPTIKEIWE

SEQ ID NO: 3657 - protein, 396 aa, unidentified
  source 1..396: note = Related to PERX01000093.1; note = Methylobacter sp.
MKLKPHYPYNPIASIEALATTLGIHPKLLQDLANKVDDSYTNFIVKSKNKKGEQKDRDVCEPKYELKKLQKRINSRIFEKVEYPLYLQGGIRDEESPRDYFANATCHANATQIICIDIKKFYPNIKSKYVTKVFQYFFKFPPDVSELLTKLVTYHDRVPQGGCSSSYIANLIFYDTEYLLVSELQRHSIQYSRLLDDITLSSQQNFTKDQETQYIQKIAKIFKKYELKINSKKTKIEHRANPEVGFEVTGLWIGHKKPKARKEERRFIRQLVFMCEREYKLNPCSEKYHERWNEVSGKVAKLQRLEHLQARKLRERLRLILPLYDENVQNQITQEAKKLIKLPSPQNQRLNNIKRVNQLIYKLGILARNNKTLANSLRLQINKAYANKPTIKEIWE

SEQ ID NO: 3658 - protein, 392 aa, unidentified
  source 1..392: note = Related to NZ_JACXSS010000001.1; note = Methylomonas albis
MKLAPHYPNNPIASVEALAITLGIHPKLLLDLSNKIDNSYTSFLTPQKNGKERLVHEPKYELKKLQKRINSRIFEKVEYPEYLQGGIKDENNPRDYVANALRHSHANQIICIDIKQFYPNIKSEYVSKIFQHFFKFPAHIAELLTKIVTLHNRVPQGACTSSYIANLLFYDTEYLLVSELQKHNIQYSRLLDDITLSTQTTLTKEQETFYIKKIAALFKKYELKINGRKTRIEHRANPEASFEVTGLWIGHKKPKSRKEERRFIRQLVFMCEREYKVNRCSEKYHERWNEVSGKVAKLQRLQHVQAKKLRERLSLVLPVYDEPMQKQLIQETKKLVKVTAPQNQRIGNIKRVNSLYYRLGILGRNNKSLANSLRLQLNKVYGNKQTKKEIWE

SEQ ID NO: 3659 - protein, 396 aa, unidentified
  source 1..396: note = Related to NZ_CP014360.1; note = Methylomonas sp.
MKLKPHYPHNPIASIEALATTLGIHPKLLQDLANKADDSYTDFLITSKNRKGEVKDRTVCEPKFELKKLQKRINSRIFEKVEYPLYLQGGIRDEESPRDYVANAQIHAHANQIICIDIKQFYPSIKIPHVKNIFKYFFKFPEEVSEMLAKLVTYRGAVPQGGCTSSYIANLIFYDTEYLLVSELRKHSVKYSRLLDDITLSAEKDFTKEQEEFFIRKISAMFTKYGLSMHSGKKRIEHRSNSDVSFEVTGLWIGHKKPKARKEERRFVRQLVFMCEREYKVSPYTKEYHERWNEVSGKVAKLQRLEHQQAKNLRKRLGLILPLYDENMEKQLTHETKKLITLSLPQSKRPGNIKRVNSLINKLGILSRNNKALARSLRLQLSTVYADKPSNKEIWE

SEQ ID NO: 3660 - protein, 302 aa, unidentified
  source 1..302: note = Related to JACYUQ010000012.1; note = Oxalobacteraceae bacterium
MDKPFYPFPGIGSVEALAKALDVHHDLLLDIAKKVDQSYTSFDIPKKNNSGYRTVCEPKHELKRLQKKINSRILELVKYPSYLQGGIKDKSLSRDYVKNAAIHVKPTVLISLDIKNFYPNIHRSHVLNVFKNFLGFHPDVAEVLTCLTTLNDRVPQGGCCSSYLANLIFFGDEFKLVQKLRKLGWRYSRLLDDISISSTDDIKDNISPIKEISSLCKRYGLKLNNSKTDVSHRSNGVASLAVTGVWIGHSEAKLRKDERRYIRQLVYVCEKKYADDPCDSKYHDFWNRVSGKVAKLSRMEHV

SEQ ID NO: 3661 - protein, 398 aa, unidentified
  source 1..398: note = Related to NZ_AQXY01000025.1; note = Thioalkalivibrio sp.
MPQKSAKKPHYPYKPIGSVETLARMLGVHPKILTDIANRTDDSYTDFTITTPSGKERNVSEPKFTLKKIQKRINRTILEKVEYPLYLMGGIRDLEEPRDYVSNASAHAGASTIIKLDIKNFYPNIRRQNVYDIFRYLLRFPEPVSDLLTTLCVRHHRLPQGACTSSYLANLIFFNAEYQLAASFERQAIAYTRLLDDITISSPKQLTPAKTTEIIRSVAAMCKKHGLKLNNKKTRVDRVHQRDSDYIVTGLWAKHSVPKVPRHERRAIRKMVHDCENRFTTDPASPEYHSMWNQASGKIAKLKRLGHSQAQPLRARMRKILPQIGDQEKDNLILECKKLANKSRRNTDRIGHILRVNRAIHKVGLLSRTDKRLARSLRRQVVAAYPNKPTIKDYWEIK

SEQ ID NO: 3662 - protein, 343 aa, Escherichia coli
  source 1..343: note = Related to NZ_CP050193.1
MSYKQFKVETGKNKKERQIFEPKRSLKGIQKKINKEIFEKIDYPHYLHGALSGRDYISNAAVHTRKRTVICLDITNFYPSISKKDVCSIFKNLMRFSPEVSLCLTELVTLNDKVPQGGCCSSYIANLLFFNSEYNLYNRLKSMGLSYSRLLDDITISSDKDLSSEEKTKVIKLVHGMVNQYRLSINESKTTIEHSKDSSSKLSVTGLWVKHGVPKLTKENRRYIRYLVYICKKQGAYERHTKEYHDLWNRCSGKVAQMSRLGHVQAVELRAILSEIMPVYDDYKISKLKLMAKHYLNKFTPPLTDDQIRKIDRMLYDFDIVGRTNKNLAKLYRRKLVALLPDR

SEQ ID NO: 3663 - protein, 379 aa, unidentified
  source 1..379: note = Related to CP068315.1; note = Klebsiella pneumoniae
MNKPRFNGTPIASLDSLAAMLGIDRKRLDWMVLSVSRSYKQFTVETGKNKKERKIFEPKRSLKGIQKKINKEIFENIDYPHYLHGAITGRDYISNASVHTKKKTIICLDITNFYPSISKRDVTLIFKNLMRFSPDVSIALTELVTLNNQVPQGGCCSSYIANLLFFNSEYNLYNRLQSIGYSYTRLLDDITISSDEDISLEEKTKVIQLVYRMVSQHRLSINEDKTTIEHTKDSSSKLSVTGLWVKHGVPKLTKENRRYIRYLVYICQKQAAYERHTKEYHDLWNRCSGKVAQMSRLGHVQANELRCVLSDILPIYDDYKIGKLKYVAKHYLSKFTHPLSEEQIRKVDRMIYDFDIVGRTNEKLAKDYRSKLRALLPER

SEQ ID NO: 3664 - protein, 331 aa, Escherichia coli
  source 1..331: note = Related to DADHSI010000124.1
KKRTIFEPKKALKALQKKINREIFENVTYPSYLHGGLKEKDYISNSASHTKKKTIICMDIQDFYPSISKRDVHQIFQYLMRFSPDVSSALTELVTLNGKVPQGACCSSYIANLVFFNKEFNIVNKLSRKGLSYTRLLDDITVSSDNDLSDAEKTEIIQLVTGMARSYRLNINKDKTSIEHSKDSNAKLQVTGLWVKHGIPKLTKADRRYIRYLVYICKKDYDAKKDSVEYHDLWNKCSGKVAQMERLGHSQAKDLRQTLSEILPIYDEFRIKKCTMFAKRYIKTFSPPLSEEQISKVNKLIYKFGIVARTQKNLAKTYRRELRALLPIEKQ

SEQ ID NO: 3665 - protein, 380 aa, unidentified
  source 1..380: note = Related to NZ_CP083739.1; note = Hafnia paralvei
MMKPLFNGTQLASQDSLAAMLGVTTERLNKIVLSIPKSYKSFNIETGKNKKVRTLFEPKKGLKHIQKKINKEIFENVNYPNYLHGGLKERDYVSNAGTHAGKKTIISLDIENFYPSISKRDILNIFKNMMRFSPSISETLTELVTLDGKLPQGACCSSYIANLIFFNDEHNIVRKINNMGMNYTRLLDDVTISSDKKLSKEEETKAITTVVGMINRHRLSLNDAKTVIEKSDHPNSKLHVTGLWVKHKTPKINKENRRYIRYLVFICEKESAVDRTSTEYHTLWNKASGKVAQMSRVGHEQSVELREKLGKILPLYDEFKIRKIVFLANNYIKNFSLPLSEEQVSKVNKIIYDVGIVGRSNKKLSNELRKKLRSILPKDA

SEQ ID NO: 3666 - protein, 379 aa, unidentified
  source 1..379: note = Related to MECU01000027.1; note = Shigella sp.
MKPLFNGTQLSSHSSLAAMLGVTPEILDKIVLSIPKSYKDFCIKTGKNKKERAIFEPKKGLKYIQKKINEEIFCKVKYPVYLHGGLKNRDYVSNAGFHSGKKTIISLDITNFYPSISKKDILNIFKNMMRFSPSISETLTKLVTLNDKLPQGACTSSYIANLIFFNDEHNIVSKLNRMGMTYTRLLDDITISSDKKLSKEEETKAITTVIGMINRHRLSINNDKTVIEKSDHHNSKLHVTGLWVKHKKPKVSKENRRYIRYLVFICQKESVVDRTSSEYHKLWNKASGKVAQMHRLGHPQSIELREKLSEILPLYDEYKIRKIVFLSNNYIKNFSLPLSDEQIKKVNKIIYEIGIVGRTNKKLANELRGKMKSMLPKVK

SEQ ID NO: 3667 - protein, 384 aa, unidentified
  source 1..384: note = Related to NZ_WVWD01000013.1; note = Leclercia adecarboxylata
MNKPYYKKSPIASVEKLSLTLNVTPERLAVIVDNIHNSYKTFTKVTGRNKKERSLSEPKKGLKKLQKRINQEIFENVSFPDYLHGGLKGKDYLSNAKVHTNKKHLISLDIENFYPSISKKNVLEIFKYMMRFPEDVSKVLTELVTLDGHVPQGSCCSSYIANLVFFNTEYNYVNQLKNKGYHYTRLLDDITISSDKELDKKEKTFIINQMRAMVEKHRLKINDEKTKVESHTDLRSSFEVTGLWTKHKNPKLRKPQRRHIRYLVFICSKQAEYERTSNEYHALWNKVSGKVAQMQRIGHTQANQLREQLTKILPIYDDFKIKKVIYLADILSKTKKEEITFAKVERYRKIIHKLDIVSRSNKKLADKHRSVLHTIFKDCKVESE

SEQ ID NO: 3668 - protein, 384 aa, unidentified
  source 1..384: note = Related to JAGNRY010000075.1; note = Paludibacteraceae bacterium
MKKPIYKKSPIGSLESLSAMLGINQSQLDHIINSIPNSYKSFKIETGKKLKLRQLHEPKKGLKSLQKKLNKEIFENIEYPYYLHGGIKNRDYLSNARIHSGSKSLISLDIKDFYPNIRKTDVINIFKNLMRFPADISEALTKLVTLNGEVPQGSCCSSYIANLIFFNNEYNIVTKIENKGFRYTRLLDDITISSDRELTNNEKTFIINSVRSMIKSHRLNINEDKTKIESSSNLNDGFEVTGLWAKHKAPKVRKNHRDHIRHLVFICKKQAEYDKESPEYHALWNKASGKVAQLTRLNHAESNPLRIILNSILPEYNEHKIKKITKIADNLIKEKNKVTSNDLINKINKLLYELSIVSRTRKSLAYRYRKKINSCFSSVLKVSI

SEQ ID NO: 3669 - protein, 367 aa, unidentified
  source 1..367: note = Related to CP066129.1; note = Morganella morganii
MLGISKSQLDNIINHVSDSYKSFIKETGKNKKSRELFEPKKTLKQIQKKLNKEIFEGITYPNYLHGGIKNKDYITNAKVHSGAKSIISLDIENFYPSIRKNDVLNIFKNLMKFPQDVSESLTKLVTLNGVVPQGSCCSSYIANLVFFNSEYHLVTKVKNKRFEYSRLLDDITISSKTEFTNEEKTFVINNVRAMANRYRLSLNENKTKIENSSDLKSDFEVTGLWAKHSVPKLKKCHRRYIRYIVFICEKQALFDRTSMDYHALWNKASGKVAQLKRLNHSESNMLRDRLSLVLPEYDDDKIQKIIKIADNLLVNGHKLNAIDLKDKINHLFYEFGIVSRTKKSLAYRYRKKIRANFSSITDKVTIS

SEQ ID NO: 3670 - protein, 394 aa, Pseudomonas sp.
  source 1..394: note = Related to NZ_UUIA01000028.1; note = Pseudomonas viridiflava
MANDKPYYSKKPIASVEALAQCLGVTPERLLLIAKNSEKSYIEFTVYTGKDKTNLKKRVLHEPKPFLKSIQKKINREIFEHVIYPEYLHGGLKERDYITNVSLHAGAKTIIAMDIQDFYPSIQRTHVQDIFTLLCKFPPAISSLITDLITINGRVAQGACCSSYIANLIFFNSEYGRISKFRSQGLTYTRLLDDITISSRVVLEEKKISNAIESVASLFTKFGLKLHPRKTKVEQSSDTKAKFEVTGLWAKHGNPKIRKKDRHYVRHLVFICQKEFEKDSNCSKYHELWNMTSGKVAVLTRLKHAQSKDLRKKLGSVLPTYDSEASAKLQRIAYKLCRIPETETSSPGKLKIYHKLKYHFGIVARTDRQLAKKWKEVLDTKFKASAIAARSTNE

SEQ ID NO: 3671 - protein, 385 aa, unidentified
  source 1..385: note = Related to nan
MKKPIYNGKPISTLDALSKALGTNLSRLRIFIDTAENSYTTFTLEKKVNGIVVKERTLNEPKKNLKDLQKRINQAIFNNVSYPEYLQGGIKGKDFITNSKNHLSAKSLINLDIKDFYPSISIHHVYAIYNKLFKFPHTVSDALVKLTTKNGVVTQGGCCSSYIANLIFFNSEHDLVQKLESRSLTYTRLIDDITISSAKPMSKDEITNTINLTNNHLTKFNLNLNRDKTNIDHHHNKSDNFEVTGLWVRHGKPKVKSAVRRQIRQLVFKCKIQYELCPTDKSYHDLWNKTSGKVAILTRLGHANSKIYRKKLSEILPLYDIKKEEKIERIINYLIDTESKEINSPRRIKLYHKMIYHCGILGRSNKSKAKLLKNKLKAKFIAVQV

SEQ ID NO: 3672 - protein, 394 aa, unidentified
  source 1..394: note = Related to NZ_SOBR01000014.1; note = Chromohalobacter marismortui
MADKPYYPGSSVAHISTLAAMLEINRDLIEKHSKNTSSSYTTFLISPPSKKSREVSEPKESLKKIQKRINSRIMSEVDYPKYLMGGIRDTASRRDYVNNSKLHLKPETLINLDIENFFPNIHKEHVKNVFKYLFRFSEDVSETLSCLTTLEGVVPQGGCTSTYLGNLVFFNYEYGVVSKLRSKGISYSRLLDDITLSSKKRLTEEEKTWAISLVAGMINHYGMNMHDGKTRIEHRESRDAKYEVTGAWVRHGEPKIRKDDRKKIRSAVRKCEIMYEESPYSSEYHKQWNKTSGRVAQLGRFNHKAEEKKLRERLKTILPLYDDVYSKTLSVKVNQVVRRRRKNQINIDSVGTRNYILKLYHELGIMARTKKTQARRLKQSLRENFGNIISNPHY

SEQ ID NO: 3673 - protein, 393 aa, unidentified
  source 1..393: note = Related to NZ_NSKA01000004.1; note = Halomonas sp.
MADKPYYPLPPIGSVSVLAAMLKINEKQLIHIANNASNSYTSFEITPEGKKPRDVVEPKEQLKYVQKKINAMIFSEVKYPIYLMGGISDKVQSRDYINNGKLHLNKNTLINLDIENFFPNIKHVYVKKIFTHLFKFPESVSEILTKLTTLNGRLPQGGCSSTYIANLLFFNYEYHIVSQLRNKGITYSRLLDDITLSSNKKLNKEDKTHAISAVDGLIKRFELSINTSKTRIEHKDDLSAQYEVTGSWVRFGELKFPGKARKKIRSAVKKCELMYQENCYSAEYHSQWNRTSGRVAQLKRFGHHKQEREFRTRLGKILPLYDEQQAITLRTKVYQLVKKRKLNKLRLDNPGLRKQILTLYHQLGILARNNTSSKILKNELRENFSFLINNPYY

SEQ ID NO: 3674 - protein, 393 aa, unidentified
  source 1..393: note = Related to CP040452.1; note = Halomonas sp.
MGDKPHYPFEPIASSKTLAKTLGVNLPLLLKTASNTSNSYTSFIVPTKSKDRTVYEPKTTLKYIQKKINKEILSRVEFPSYLMGGIKDTQSPRDYLANSRMHLRKESLINLDIENFYHSIKKPYATQIFKQLFKFNDEVSNLLTELVTLDGQVPQGACTSSYIANLVFFNSEYTVVNNLRAKKIAYTRLLDDITLSADRKLTNIEKEWLISQVTGMIVSHELKIKDAKTRIENRDHPRSRYEVTGAWVKYGEPKLRKKERNKIRHDVYICELFHEKDPTTEEYHRLWNRTSGLVSKLGRFNHKNEADKLRKRLSFILPKYSDIQAKTLQTKIYQIVNRKKKNNIDINNPGLSKQILRFYHNLGILSRTHPHLSKPLKNQLRSEFGTMIRNEYY

SEQ ID NO: 3675 - protein, 391 aa, unidentified
  source 1..391: note = Related to JABFTW010000016.1; note = Halomonas sp.
MADKPYYPHAPISNIDTLAKMLGVRSSLLILIANKANSSYVSFEVETKNKQRMVNEPKTILKYIQKKINSQIFNSVEFPAYLMGGIRDPKTPRDYISNAAIHAKAKTLISLDVKDFFPTTQEVHIKSVFKNLFNFPEDVSNTLTKLVSLNGRLPQGGCTSSYVANLIFHNSEYKVVSQLRQKGIRYTRLLDDITLSANRPLSKNECEKYIRLVAGMITKHDLTINSGKTKVEYSKNIASPYEVTGAWVRHGKPKLRKKERNEIRHIVHIVEKKYAENPYDKEYHDLWNKASGLVAKLKRFEHINESKGLRKKLKATLPLYDDQKAETLRVQANKLLRRQARNTLNYNSGTKKSIDKLVYDLGILSRTRPEISKPLKKKIKDSFTGIDFDGI

SEQ ID NO: 3676 - protein, 395 aa, Vibrio sp.
  source 1..395: note = Related to JAERHH010000003.1; note = Vibrio vulnificus
MNSVRRDKPYYPSSPISSVSRLSDVLEVRENVLRDLIQNKSTHYHSFSIETTSSDGKKKNRSIHEPKFLLKKLQKRINSRILSKVEYPHYLQGGIYDEDNPRDYYSNAAIHSKANCVMSVDIKNFYPSIKTEQVTRIFKFFFKFPQDVSELLAELVTYEGFVPQGAVTSSYIANLLFFEDEYKVVAHLAGKKLLYSRLLDDITISGKSISNQDFGKIKTQIVGMFKKRGVRINRKKTALVYSGIRSVTGLRVEHSTPRCDRKEKRRIRAAVKHCEIQYQIDRTSDEYHSLWNSTSGKVAKLERVGHSQAKKLRTRLQQIYPTLSTGQVHALKIAIKKLEKVPSSKRMKIGYLKQVNKLIHRTSLVFRTDKPLAHSLTERLITIKPVKTYSDFWEK

SEQ ID NO: 3677 - protein, 410 aa, unidentified
  source 1..410: note = Related to JAGOQM010000006.1; note = Neisseriaceae bacterium
MNKFNFDKPYYTQRPISSIKALANALGADQQALIQLANNKTNYHYYTKHVKSGSKTKQRSIFDAKHSLKKIQKRIISRIFCHIEFPQYLHGGIKDLNQPRDYFSNATVHCNSKNIISLDIKNFYDSVRDDKVLIIFLNFFKFPKDVAQILTQLVTVQWSDYDKDISQSARHLPQGAPTSSYLANLIFFDNEYKLFNHFKRQKISYTRLLDDITISSLSEFTKAQKTKIITRVAGMVRESDLKLNNKKTICTSFREPGKKMIVTGLWVNHSIPKLQKHSLKKILEGVKSCEYIHSRCPFSFEYHKEWNTYSGKVANMARSYPNLAKRLRVRLSTILPIFSPKQTLVLERQIDTLLNSKTTQTNKLTNIKRFNKAYYAIGIISRTDKRLARKLRSRLLTRMPNITYKDYWEN

SEQ ID NO: 3678 - protein, 389 aa, unidentified
  source 1..389: note = Related to NZ_CADFBN010000021.1; note = Burkholderia gladioli
MRPQYLKKPIGTVATLSAALRVSEPVLRHAESNLDAHYTPYEIPKRDGRVRSIVIPSLHLKTIQKRINREIFAHVEYPSYLYGGVNGQDYVRNASAHRGAQVLIALDVKDFYPSISRKRVANIFQHFLHFGAEVSDLLAGLTTYQNKVPQGACTSSHLANLVLHDVEYSIAQYCHNAGLVYTRLLDDITISSRKHVSGEKITKIIAMVSRMLKSKGLKIKRQKTKITSKSNPEDLMEVTGLWLNRGAPRANSFARRAIRVEVYKCSQSAKKDKASSNYHKDHASASGKVAMLNYLGHGEAGRLRKMLADILPIYDERELTKTEKMVRMLRRSSEKDREKYAYNVRFHKVMQRLNIVARTDKVLADRLRQELCASRPVKSSNAALYDEPI

SEQ ID NO: 3679 - protein, 336 aa, unidentified
  source 1..336: note = Related to NZ_CADFFT010000005.1; note = Caballeronia sp.
MIPSLHLKTIQKRINREIFSHVTYPEYLYGGVPGKDYVRNAKRHELAHVVIALDVKNFYPSISKLRVSNIYQHLFKFGADVSDFLAALTTYENKVPQGACTSSHLANLVLHDVESSVVKYCNDSGLVYTRLLDDITISSTRRLPEKKVEKIVGMVATMLKGKGLKLKHNKTRVSTKANPEELMEVTGLWLNRGAPRVHSVSRRLVRVEVYKCKEAAKVERVSESYHKAFARASGRVAMLCYLGHAESGRLRKSLSEMLPLYDVREVTKTKKIVKMLGRTSEKDRSKYSYNVSYFKTMQRINIVSRTDPLLARTLRHQLLMCKPKNKSDAALYDEPI

SEQ ID NO: 3680 - protein, 389 aa, unidentified
  source 1..389: note = Related to NZ_CADESX010000025.1; note = Burkholderia anthina
MRPYYTKNRIGSVAALSAALRVSEPILKHTADNLERHYTPYEIPKSNGKPRLIVIPSLHLKTIQKRINREIFSHVAYPHYLYGGVSGKDYVRNAEAHQNAHVVIALDVKDFYPSISFARVVGIYQHFLKFNPEVAELLASLTTFKNKVPQGACTSSHLANLVLHDVEYSIAQYCENFGLIYTRLLDDITVSSTKALSPQKIKKIIDMISKMLRDKGLRVKHQKTRVSSKANPENLMEVTGLWLNRGAPRANSFDRRLVRVEVYKCKQAAAVDRTRPEYHKAHASVSGKVAMLNYLGHAEAGRFRTTLAEILPLYSVGEITKTEKIVAMLCKSSLKDRGKYTYNLNYYKTMQRLNIVARSDFALAKRLRVKLLGYKPTKLSSDALYDEPI

SEQ ID NO: 3681 - protein, 396 aa, unidentified
  source 1..396: note = Related to CP090714.1; note = Burkholderia multivorans
MSTFFSVMRPYYTKKPIGTTAALASALRVSEPVLKHAANNLDRHYTPYLIPKGDGKQRAIVIPSLHLKTIQKRINREIFSHIEYPHYLYGGIDGKDYVRNAGAHKDRHTIIALDVKDFYPSITFERVLGVYQHFLKFSPEVAELLAKLTTFNKRVPQGACTSSHLANLVLHDVEYHVVQYCENAGLTYTRLLDDITVSSPKPLPVQRVSKIIEMISKMLKGKGLRLKKPKTRVSSKSNPESLMEVTGLWLNRGAPRVNSATRRAIRVEVYQCKQAAATSRTSLDYHKKHASASGKVAMLNYLMHAEAGRLRKALADILPLYDVSEMTKTRKIVEMLSRASVADRGKYSFSLSYFKTMQRLNIVARSDAALAHSLRRKLLVCKPTKPSSATLYDEPI

SEQ ID NO: 3682 - protein, 362 aa, unidentified
  source 1..362: note = Related to FOWV01000008.1; note = Ralstonia sp.
MHTARNIEKHYTPYEIPKADGKVRAIVIPSLHLKTLQKRINREIFSNIVYPPYLYGGIEGKDYVRNASAHRSAHVVIALDVKDFYPSISFHRVLNIFQYFFKFSPEVSELLAKLTTFQNKLPQGAATSSHLANLVLHDTEYHLAQYCENAGLIYTRLLDDITISSTKPLSEQRISKLIDMVARMLREKGLKLKNKKTRISSRSNPKILMEVTGLWLNRGSPRVSTDNRRKIRTEVHQCAVAAMTSRTSQSYHKAHASVSGKVAMLNHVGHAEAERFRKTLADILPLYDANELTKTINIVNVLSRSSESDREEYAFNLNYFKTMQRINIVARSDPRLARRLREKLATCKPINQSDEALYDEPI

SEQ ID NO: 3683 - protein, 395 aa, unidentified
  source 1..395: note = Related to NZ_QBUB01000002.1; note = Paraburkholderia sp.
MLTLLPMRPFYKKKKIGSVASLGAALRVSDVVLKHTAATLEQHYTPYEIPKKSGKPRSILIPSLHLKTLQKRINREIFAHVQYPDYLFGGVEGKDYVRNARVHAGSHVLISLDVKDFYPSITFDRVKRIYQHFLQFDPAVSELLAKLTTYNNSVPQGACTSSHLANLILHDVEYHLAQYCATAKLTYTRLLDDICISSKTALSKEKIAKLIDKVSSMLRDKGMKLKHQKTRVCSKSNPKELMEVTGLWINRGAPRVKPTERRKIRVDVHRCQVLANQSLTNREYDRAHASVSGRVAMLSYLGHSEAERLRKSVAAILPQFDIHEISKTKKIVALLSRASAKDRNKYSFILNFNKTMQRLNIVARTDPKLAVQLRKSMATCRPTKRADATLYDEPI

SEQ ID NO: 3684 - protein, 357 aa, unidentified
  source 1..357: note = Related to LFMX01000035.1; note = Candidatus Burkholderia humilis
MLRKTLHFLSNSQERREASFDSYSSLHLKTLQKRINREIFAHVEYPNYLSGDIEGKDYVRNAKAHAGSYVLISLDVKDFYPSINFNQVKRIFQYFLKFEPGTSELLAKLTTFNNSLPQGACTSSHLANLVLHNVEYHLAQYCKTARLTYTRLLDDICISSNSPISKEKISRLIEKVSKMLRDEGLKLKHRKTRVSSRSNPKELMEVTGLWINRGAPRVKSAERRAIRVEVYCCKDAAQTSLTDREYHKAYARVSRKVAMLNHLNHREASRLRRGLSEILLRFDIHEITKTEKVVAMLMRASIKDREKHSFILNFNKTMNRLNIVARTDPKLAIRLRKEMAKCRPTKRTSATLYDQPI

SEQ ID NO: 3685 - protein, 356 aa, unidentified
  source 1..356: note = Related to NZ_QREJ01000001.1; note = Paraburkholderia sp.
MDKHYTPYQIPKKNGKPRTIMIPSLHLKTLQKRINREIFSHVKYPDYLYGGVEGKDYVRNAEMHAKAHVLVSLDVKDFYPSISADRVTGIYQYLLKFNPGVAELLARLTTYKGAVPQGACTSSHLANLILHDVEYHVAQYCKNAGLVYTRLLDDICVSSEAALSEKKISRIIEMISRMLRDKGLKLKHQKTRISSKSNPKELMEVTGLWVNRGMPRVNSTERRSIRVEVHRCRQLAAGRRTDLAYHKAHGSVSGKVAMLNYLRHSEAGRLRRSLGAILPEYDQAEMTKTVKIVEMLSRTSPKDREKYSFNVSFFKTLQRLNVVARTDPKLAVRLRKKLASCRPTKHSSATLYDEPI

SEQ ID NO: 3686 - protein, 377 aa, unidentified
  source 1..377: note = Related to NZ_QPER01000002.1; note = Paraburkholderia agricolaris
MNALCAALRISESALKHLAANLDRHYTPFEIPKDNGKRRALLIPSLHLKTLQKRINREIFSHVAYPAYLYGGVENRDYVKNASVHQRAEVLIALDVKDFYPSIEMKQVVSIFQHLFKFPKEVADILARLTTYEGKVPQGACTSSHIANLVLHDVEYHIAQDFHNRNYVYTRLLDDICVSSLKPLSPEKVEDVIKKVSSMVKKKGLKLRAAKTRITSRSNPESLMEVTGLWLNRGTPRVNPKQRRSIRSAVYQCQKTAMSDNSSLTYHVEHASASGKVAMLKYLKYGDATRMRTILQGIVPVYDKAELTKTKKIVDMLCRTSHRDREKYAYSLGYHKAKHRINIVSRTEPMLAHALRAKLKKCPPTKTRSEMIYDESI

SEQ ID NO: 3687 - protein, 404 aa, Chromobacterium sp.
  source 1..404: note = Related to NZ_MUKT01000065.1; note = Chromobacterium haemolyticum
MTTLSSHACFMLSGFMRPQYNKNPIRSIDSLCDALRVSEVVLRHTAENIQHHYTPYSIPKANGKTRVVHIPSLHLKTIQKRINKEIFSHITYPDYLYGGIEGKDYVKNANAHAGANVLIALDVKDFYPSIKREHVTDVYQHLCNFSKDVAELLTDLTTLRERVPQGACTSSHLANLVLHKVEYPVVQNLRNQDFRYTRLLDDICISASKFLSPAKIETIISDVARMLKSKELRLHPKKKSITSKNNPESLMEVTGLWLNRGHARAKREERRAIRTEVYRCEKEAARSRYSPEYHKMHGSVSGRVAKLNYLHHPEAKNFRLRLQEILPLYDEHEIIKTSKIASVLSKVAKADRAKHWFAIQHHKAQYRVNIVGRTNVKMASKLSRQLSLCRPPKTLSELIYDEPI

SEQ ID NO: 3688 - protein, 389 aa, unidentified
  source 1..389: note = Related to NZ_CP043568.1; note = Comamonas testosteroni
MRPIFNKKSIGSIEALSDALQVNKHILQNTADNIFQHYHPYEIKKKDGGTRLIHIPTLHLKIIQKRINKNIFDNVTYPDYLHGGIEDKDYVKNALSHANAEAIICLDIKNFYPSITQTRVSKIFQYFFKFPEDVSNLLAKLCCHEERVPQGACTSSHLANLAFFDSEYHFASFCKSKKYTYTRLLDDITISKSSAFSDTEISKAIASVKSIISPHGIKLNNKKQKIVSRSNPKDLMEVTGLWLNRGRPRAHRSYRKVVRLEMHICEKMAKTDRFSEEYHKLHNRVSGKVSKLSYLGHHEATNYRDTLQKILPLYDIHKATNLHKNALILSKVNANIRKKFAYFKRYSKINYELNILARNNKPLSKTIRNILSNCKPSGLRDDLLYNEPI

SEQ ID NO: 3689 - protein, 389 aa, unidentified
  source 1..389: note = Related to NZ_STFG01000005.1; note = Lampropedia sp.
MRPFYDARPIGSLAALSKTLQVELSILQRTASNIEEHYHAHEIVKKSGGTREINIPSNHLKIIQKRINKHIFENVVYPSYLHGGLPEKDYVKNANCHSSAEVVIALDIKNFYPSISIDKVEEIFQFFCHFPKDVSKLLAELCCLNNSVPQGGCSSSHIANLILNNTEYSLVSWLSSKKYTYTRLLDDINISSKHLISKEEITKIIKKTKETISKSDLKLNNKKQKITSRSNPEILMEVTGLWLNRGTPKAHTYDRKLIRAEMHKCQTMAKKDRFSAEYHEIHNSISGKVAKLSYLKHKESERYRYILRGILPLFDKSKEVSIRKQANYLLKSKPNYRKKYVYFKKYHKLLYKLNILTRNNKSLANQIKGNLKSCKPLGMKDELLYNEPI

SEQ ID NO: 3690 - protein, 384 aa, Achromobacter sp.
  source 1..384: note = Related to CADIJU010000023.1; note = Achromobacter marplatensis
MRAQYTKKPIGSLEVLSRALEIDLGVLINTANAIDQHYHAHQIPKKKGGFRTINIPTLHLKSIQKKINSRIFSNVVYPEYLFGGIKERDYVKNAAQHAGCKALIALDVKDFYPSISLNAVKDIFQYFFRFPRDVAELLGKLCCLNERVPQGACTSSHLANLSLQENEYHFAQYCKNKGWTYTRLLDDISVSSKEVFQQKDVDAIISKAKAVLAGARLKLNNKKTRILSKANPVDLMEVTGLWLNRGRPRAHRSDRNAIRSEVYQCEILAKEGRERKKYHDFHSHVSGRVSKLAYLEHANSKLYRERLRKILPIYDVNQATNLLRQAEYISKTTLSNRKSVAYYKKYHILKHRLNILMRTDRGLARRIQSMLSLCKPTLQSSDML

SEQ ID NO: 3691 - protein, 365 aa, unidentified
  source 1..365: note = Related to NZ_CP012334.1; note = Bordetella sp.
MDLGILRNTIRTIDKHYHPHSIPKKNGGSRIIHIPTTHLKTIQKRINRQIFDNVIYPSYLFGGVREKDYVRNTSEHGGCNALVALDVKDFYPSITVAAVKKIFQYFCKFPAEVAETLAGLCCLNGRVPQGACTSSHLANLVLHDEEYHLAQYCKNKGWTYTRLLDDISVSSKAEFDVKEIDAIIRKVKYMLGKSALKLNNRKTRVLTKANPVNLMEVTGLWLNRGVPRAHRADRNTIRGEVHQCEVAARDSRTEKQYHELHNRVSGRVAKLSYLKHANSREYRERLRSVLPLYDEHQATNLLKQARYMAKTKTNIRKTPAYCKKYFILQHRLNILMRTDRGAAGKIRAILTTCRPAIASASAYIE

SEQ ID NO: 3692 - protein, 389 aa, unidentified
  source 1..389: note = Related to NZ_JABUXU010000004.1; note = Advenella sp.
MRPQYLAKPIASLNVLSVALGVDIDVLRNAASNIERHYHPHSVPKKDGSLRSIYIPSIHLKKIQKRINRNIFENISYPGYLFGGIKERDYVKNANAHASAELLIALDVRGFYPSITRDKTLNIFKFFFKFSHDVASLLADLTCLRGQVPQGACTSSHLANLVLHDTEYHLVQHLNNKGLTYTRLLDDISISSKTQLEEKQVQTLIGKVRTMLNEQGLKLQNKKTKITSRKNPENLMEVTGLWLNRGRARVHRNERRIIRAELHKCESMSRLSKSSPEYHDFYNRLSGRVAKLTYLEHKEALSYRSRLREILPIYEKNEIHRTIQLVTSLQKSSIKDRGKYAYYAKFHQVRYRLNILGRTDGGLAKKLATTLQTCKPTSDKERLFYHDII

SEQ ID NO: 3693 - protein, 389 aa, unidentified
  source 1..389: note = Related to NZ_CP003915.1; note = Advenella mimigardefordensis
MRPLYLAKPIASLQALSSALRIDVHVLKSTAANIDRHYHPHSVPKKDGSSRSIYIPSIHLKKIQKRINRNIFDKIKYPDYLFGGIKERDYVKNANAHASAETLIALDIRGFYPSITYEKTLKIFKFFFKFPEDVAALLTDLVCLRGRVPQGACTSSHIANLSLHEAEYHLVQHIRNKEFTYTRLLDDISISSKKQINEIQIQTLIGKVRKMLNEQGFKLQNKKTRITSRKNPEKLMEVTGLWLNRGQARLHRQERRLIRAELHNCEKLSKLSRTSIDYHELHNSLSGRVAKLTYLGHKEAACYRSRLREILPVYDDNEIHRTIKLVSFLEKSSVNDRKKYAYYAKFHQVGYRLNILRRTQSGLANKLAEILRTCKPPLNKEELFYHEII

SEQ ID NO: 3694 - protein, 387 aa, unidentified
  source 1..387: note = Related to SMLK01000007.1; note = Ramlibacter humi
MRPIYSAQPIGSTAALALALGMSESALLALAASASIRYSAFEIPKKNSDKVRTVCEPHHELKVAQKRINRAVFEHVVYPEYLQGGIADRDYVRNARIHAHSKSLIALDVQNFYDNIQAPDVLKIFKFFCKFPEDVARVLTQLTTRGGRVPQGACTSSHIANLVFFATEHRVVREFFQQGLRYSRLLDDITVSSAKQLSQERTSKIIHKVKLLLAEKHLRLKTSKTRVSSNSNPEVLMEVTGLWLNRGAPRAFRAERHDIRARMFKLERMHELSSHDLDYHAEHNRISGRVAKITYLGHFEAENYRSRLQKILPTYDGTEVARTLKLVRLLCATPAHQRDNLAYIDKYHHVLYRLGILSRTHRRLASKQRALVMKCAPSTSREELLYG

SEQ ID NO: 3695 - protein, 386 aa, unidentified
  source 1..386: note = Related to FOWG01000001.1; note = Variovorax sp.
MRPIFHGKPIASIASLAAALGLNATTLQDFSARAQSQYTRFEIPKKNGGTRTICSPTHDLKVIQKRINRAIFSNVEFPPFLFGGIEGKDYVKNAQAHAGAKTIITLDVTDFYPSISKKRVAEIFKYFCHFPDPVSHLLAELVTLDEVVPQGACTSSYIANLVLFETEHRLVEEFRQRKLTYSRLLDDICISSQRNIAPKEVQEIISRTASLLKSKGFRIKNRKTRVSSASNPETLMEVTGLWLNRGHPRVFRAEREKIRTQLHRCEENFKISRTAPEYHQEHDRLSGLVAKPTYLNHFEATNFRNRLSAKLPHYNRADTYKTEKIVESLERVNMGDRGKISYIEKFNQVTHRINILARSNAKLATNLRDRLRKHAPTKTKEDLIYG

SEQ ID NO: 3696 - protein, 401 aa, unidentified
  source 1..401: note = Related to CP022423.1; note = Vitreoscilla filiformis
MDHRSVQLSRCLFLSMRPIFNGTPIASVDALARSLSLSAQQLRTLAGAVSGHYRDFDIPKRDGSFRTVSGPTEELKIIQRRINRHIFERVQYPSYLFGSIKERNYVQNARSHSRAHVIVAMDVENFFPSIKREAVLNIFKNLFRFPQEVASLLADLCTKDGHVPQGACTSSYIANLALHDIEHRLVSNLRHEGLIYSRLTDDISISSPHPLAKKRIESLVVQVAEMLKCKGFKPKRRKTKVTSKNNSAELMEVTGLWLNLGEPRVKRDERASIRTEVRRCIRESKVERTSPEFHKLHDRTSGRVAMLSQLKHREANRFRVALRLCAPLYSPIEIKRTQKIVAAVCKTPLRSRETAVYIQRFYQARYRVNIVSRTDPKLAKELHARLSSHVPKMKKEEAIYG

SEQ ID NO: 3697 - protein, 394 aa, unidentified
  source 1..394: note = Related to NZ_FOGD01000002.1; note = Giesbergeria anulus
MSVIFNSCMKAKFLGTPIARVESLARTLGVSIHDLRTIAGAASSRYNDFQIDKKDGGKRDVSSPRIELKLIQKRINREIFEKVYFPSYLNGGIKGRDYVKNAYEHGNSETIISLDIENFYPKVSRISILNIFKNFLKQPEEIAEILTNLCTKDNKLPQGGCASSYLANLVFFDIEPRLVSRLQEEGFTYTRLIDDITIYSKNLISKKKISDLIESITKMLKSRGFKLKQKKTRCTSASNPEKLMEVTGLWLNRGAPRVRRNERAEIRKEVRECLISAELNKTDKEYHDLHQKVSGRVAKLSQLNHCQAERFRKELREILPIYSDADIRKTRRLVAKIIKTPRTTRSSLGYIKKYHQIVYRINILARSNKSIARSLREKMKICAPTITKENSIHG

SEQ ID NO: 3698 - protein, 392 aa, unidentified
  source 1..392: note = Related to NZ_JQNP01000001.1; note = Janthinobacterium sp.
MNISYSHPPIGSISKLAKMLDVSEAYLYQVAKNPENFYAFSEIPKKNGDFRTISDPVKELKIVQRRIIRRIFCNCIFPTYLFGSIKDIENPRDFVRNAQFHSNANEVMAFDIDSFFPSIQAKYVKLVFKYLLNFPNDVSDLLVKLTTLNGSIPQGAPTSPYIANLVFYDQEPKLVKLFTDKKLRYSRLVDDITISSEKPITSGNKTFIYEQVKKLLDSKSLKINKKKYQVTNTSNSGKKTIVTGLIIENNIVKLPKETIKSISRQVYTLNRMADVATTDVKYHKAHGSTSGLVALYSRLSKEKSDVHRLSLRGIKPTYSPSRLKKIASLCRRFIKYGESHTKKHGDEDYAKKYYKYKHKISIIRRTDKKTAYRLDLALKPIKPLHLLSSYHE

SEQ ID NO: 3699 - protein, 392 aa, unidentified
  source 1..392: note = Related to NC_015856.1; note = Collimonas fungivorans
MKIAYSNSSIGSVAALAKMLDVTENFLTLVASKPDDFYSISKIPKKTDGFRTISDPVKELKIVQRRIVRRIFSKCSFPSYLFGSIRDEINPRDFVRNAQYHSQAREVMAFDVESFFPSVRPQFVKKVLKFLFNLPNEVAEMLVSLMTLQDGLPQGAPTSSYVANLIFYDCEHKIVKTLNAMGFTYSRLVDDITVSSKTIIKNEERRFIYEQISKMLGEKKLKISQRKYGVTNTTVIGKKTVVTGLVVEDKMIKLPKEKVKLIGQMVYELKSKAEVSTTDHEYHKSFNKASGLVALYSRLNTKKAEIHRQHLRQILPTYDNKKAKKIGWLCRKFIGYSKLHPSKFSEEGYTRKYYKFKHKISILSRTNRTLAISLEKDLKPLKPTCLLASFHE

SEQ ID NO: 3700 - protein, 392 aa, unidentified
  source 1..392: note = Related to NJIE01000028.1; note = Xenophilus sp.
MRIEYQGKPIRSIKALSTCLGVSEDSLSQISLDIENQYSISEIPKKKGGFRTISDPLPPLKIIQRRIVRRIFSNIKFPDYLFGSIKDDNNPRDFYKNALYHQKAKEVLSFDIESFFPSCRPKFIYKIYKYLFNFSDEVSHLLVNLTTLNNGLPQGAPTSSYLANLFFYDNEHKIFKTLKSKGFLYSRLIDDIVVSKQSKINSNEKQFIYRNILSLLREKEVNLNKDKYSYSNTKTHGKKTIITGLQVRNGNTILPKEKTTEIHKKIHEIEHLGEVDRTSNKFHEAYGTASGLLALYKRVDITKAEKLHKKIITIKPIYHPNRIKKIKWICNKFVRISKSNPRRIGEYNHAKKYHRLMHKISIIRRTHTALAKQLKARMQSIKPTRLLSEYEP

SEQ ID NO: 3701 - protein, 393 aa, unidentified
  source 1..393: note = Related to NZ_SSSP01000010.1; note = Rhodocyclus tenuis
MPLQVTYRGSPIRSLEALSSALSCDEPILKHISNHVADYYTFFEIEKKSGGARQIKPPKPILKAIQKRINSRIFSLCEFPEYLQGSIKDATNPRDFVSNARAHSNGKTVVAADIKNFYPSVTESNVKEIFKYLFRFSDDVTAVLVALTTLDNSLPQGAPTSSYLANLVFYNNEHKLVTELRRKGLIYTRLIDDITVSSPVVLDKNEQEWIIRKIKGFTASKGLELHRGKLKVCTTSTPGANVIVTGLWIDRGHPRISREARNKIRAAVHRCKKEHEAGHKTLGEFHDRHNSVSGSVALISRLGHTQGKQYRLILNENLPEYSKEYAGKLTKICYRFSAKKGLRKETLSYTKRYYQLMYHLSILGRSDKKKANFLRSLLKQNPPKHCLRELSEE

SEQ ID NO: 3702 - protein, 419 aa, Alcaligenes faecalis
  source 1..419: note = Related to NZ_CP021641.1
MCFTLRYFPEWLPQVFLELIDSLPFLSLGYMNRITFASRPIASRAALAKALSIDERVLAEFEQNANAYYYFFERPKKHGEGIRSITAPKPLLMQLQRRVNNRIFSGCNFPRYLHGSIKDSEIPRDFLTNAREHITADHVITLDIRNFYPSIGREEVFKIFKYLLRFTDEVASSLTSLVTLNGTVPQGAPTSSFIANMVFYDREPRLVEELIRSGVRYTRLLDDITLSFSNRISSEKLKGEIIGKVRTMCSAKGFKLHDGKQKIHSLISSPNPAIVTGLSIRNNKLGLPVAYRNKTRAKVHNCVQQYRAGHQTAAEYHSLHNSTLGDITLLKRLKYKCADTYEEKLRSCLPTYHPKKAQQLRRACEDLAIKIRPSSVASLTRRFHVLMHCLTVLQRTKPDLAAALRTLLRTSYAKAISNE

SEQ ID NO: 3703 - protein, 389 aa, Achromobacter sp.
  source 1..389: note = Related to JAHUWQ010000001.1
MNRITFASRPIASRAALAKTLSLDERVLRQLEQNVNALYLSFERPKKHGEGMRSITAPKPALMQVQRRINTRIFSGCKFPRYLHGSIKDLEAPRDFLTNASEHKAAEHVITLDIKNFYPSIEREVVFKIFKYLLRFPDEVATSLTSLVTLDGVVPQGAPTSSFIANMVFYDREPKLVEEFIRSGVRYTRLLDDITLSFSNRISSEKLKGEVIGKVRAMCSEKGFKLHDGKQRIHALISSPNPAIVTGVSIRNGRVGLPPVYRDKTRAKVHTCVKQFDAGHQTAAEYHRLHNSALGDVTLLKRLNYSCAEAYAEKLRSCLPTYSPKKARQLRRMCEDLAMKMRPTSVAALTRRFHVLMHCLTVLGRTKPNQARTLRTLLRTSHAKAISNG

SEQ ID NO: 3704 - protein, 339 aa, unidentified
  source 1..339: note = Related to FTMV01000007.1; note = Janthinobacterium sp.
MRSLSEPILLLKILQKRILNRIFCHIKFPHYLHGGIKATNPRDFHSNASAHLGAEVAITLDIKSFFPNVTSMVVENSFLRLFQFPDEVATVLAKLTMLNNQLPQGAPTSSCISNIILFDREYKIAANLEAQGFQYTRLIDDITISSKKKISSERVSKVIDIIAKMLGHYGLKIHPDKTHVRSKGNPLDLMTITGLWINRGSPKLDRKKCFEISCEVIQLKREALKNGVNEVKYHTRYSSVAGKVALLERLNHSRATRLKLILDTILPTYNNYDVAKVANLVSKFCKNQRDSNSIGYLKKFYQLQHAVSIVKRTHVPTAKSLQALLNIRRPKRTMSEFYG

SEQ ID NO: 3705 - protein, 392 aa, unidentified
  source 1..392: note = Related to NZ_JAAOLX010000002.1; note = Iodobacter sp.
MASKHKIYYDGLPIGSIKTLAKTLSCTEARLIKISTDPSFFYTTFLKTVKNKNRELSEPNPELKLIQKRIVSRIFNHIKFPHYLHGGIKALDPRDFHSNAKAHSGAETAITLDIKNFFPSIKADQVENLFLHLFKFPPNVSSVMSKLTTLNNCIPQGAPTSSYISNLILTEKEYRIAAKLESQGFIYTRLIDDITISSKKELPEKKITQIITNIAGMLTHYNFELHPEKVHIYSRSNPEKLMVITGLWLNRGMPRIEKSRRLQISNDVIAIAKLATSSTGTSDASYHEKFNAASGKVALLQRFKHTEARRLRAILNEIQPTYNDYDKCKINKLAFRFLNKKTSKETIGYLKKFYQFQYRASIIKRTDPALAKRIQEKLNLNRPTSTKKAFYE

SEQ ID NO: 3706 - protein, 391 aa, unidentified
  source 1..391: note = Related to NZ_KB467824.1; note = Janthinobacterium sp.
MTTHKIFYSAKPIGSIAKLATALGFTESFLRSVSNRTTDYYTEFVKSVKGKDRELSEPKPHLKTLQKRINTRIFSHVKFPSYLHGGIKTIDPRDFVTNASQHCKSETAITLDIKGFFPSITTAQVENIFRNLLNFPNEVSALLASIVTLNGLLPQGAPTSSYISNLVMWEKECRLVSRFEGRGLIYTRLIDDMTISSKTRIPEKLVTKIIEDVAGMLQHYNYTLHPKKKNIFSKRDPEHLMLITGLWLNRGAPKLLKEKRAEISHGVIAATHMASEPDMIFNPKYHAIHATCSGKVALLQRLGHTRAIRLRNILNSIEPQFSPQYCHRISVVVRKFYAKGRVKNDLGSLKIFYEFQHKVSIVKRTDPILAKKLQIYLNAIRPQATMRELNG

SEQ ID NO: 3707 - protein, 394 aa, unidentified
  source 1..394: note = Related to CP074381.1; note = Cupriavidus necator
MATYDKIYYESNPIGSVAALAKSLDVAESRLLQVAADIQSFYHIFEKTVGKKTRQLCNPNDELKRLQKKVVSRIFAHLVFPPYLHGGIKAEDPRDFLSNAGVHVGAHVAIAIDVKDFFPSISEQSIAQAFKLLFRFPKEVAEILAKLTTLNGFVPQGAPTSTYLSNVVMFDKEYRLVARLRAKGLRYSRLIDDITISSEKSMMPSEIDRVTTDVIKMLRAYNFYHHEAKYRILTRSNPKDLMMVTGLWLNRGAPRVARKKREDIAAHVVQLSKRALENHAREDESYHQEFHALSGKVALLQRVGHREASRLRSILREIKPIYGEQELRRLRKIIPAFCEKVIDRSKLGYIKKFYRFQYCVGIVRNSHPKLAATLQASLNSVRPTKTLRELDEHE

SEQ ID NO: 3708 - protein, 390 aa, unidentified
  source 1..390: note = Related to NZ_AP018441.1; note = Undibacterium sp.
MRQNHKIVYDASSIGSLQVLAKTLDISVHRIQKIASVQTDFYTIFEKQVKNKIRELAEPKAELKIIHKRIISRIFSHFRFPHYLHGGIKADTPRDFISNASAHAACKTAIAMDIKSFYPSITYEHVYQMFLRLCKFPPQVSEALAGLTTLNGSVPQGAPTSSYIANLVIWDREYKLASLFEQKGFVYTRLIDDITVSTEKSMSKEAIENVIKLVSSMLVNYGFKIHPDKTQIYSKSNPEKLMLITGLWLNRGMPRLDADKRVKISASVTRLTKNGVKDCVSDEYHQQHSKLAGQVALLKRLKHVEAGQLRKLLDATPPIFEHSKIAKIQKVVKMFVRKEIDSSKLGYLQRFFHLQHQVSIVKRTNPRIARQLQIMLNKRRPTSTKESHYA

SEQ ID NO: 3709 - protein, 341 aa, unidentified
  source 1..341: note = Related to JACFQL010000003.1; note = Snodgrassella sp.
MIKPQLFYYPLAGIQSIESLAKHLDIDLDKLTYLLENINSQYIGPIFIKKSNGGSRPIYRCRPQLKYFLKRLNSKVFKLVHYPNFLYGALPNKSIYTNASQHLNAKVMCNFDIKSYFTTITFDHVFDIFKNFFHFSTEVSNILATLTTINNQVPQGSPCSTYIANLVFYRSEVNVANKLKDKNYVYTRFIDDITVSSQYKKTKKDIEEVHTIVIGMIRAYKFSLQTEKRSIAPSHKCQILTVNQINIVKSNLSISKENRKKIRAAVHELKCNLNDNNIEFVVKNFESVYGRVQYLKNIHIKEAQGMLKQLEQIRSKILKPLQIYKYRKLKEAIRKKQGYKL

SEQ ID NO: 3710 - protein, 351 aa, unidentified
  source 1..351: note = Related to NZ_MEIP01000014.1; note = Snodgrassella alvi
MLNLQFKYPLAAVQSIESLAKHLNIDCNTIIYLLENIDFLYEGPIPILKSNGKTRPIYLCKPRLKYFIKRLNSKIFKVVSYPDFLYGALPNRDTYTNVSQHLNAKVICNFDIESFFTAITYEHVFDIFKNFFHFSAEVSQVLAKLTTVNNQVPQGSPCSSYIANLVFYRSEVNVVQKLRNKNFVYTRFIDDISVSSLSKKKKKDIEEVHRIVIGMIRAYQFSLQTEKISIAPSHKTQSLTVNKINIVKSRLSIPKKKRANIRAALYQLEQHFQEKDMKFVVKNFESVQGKVQYLSKFHPKIADKMMKRLEKIHIKIAQPLNHYKRNRLKSDIRKYRNINFIRNKSALTEKI

SEQ ID NO: 3711 - protein, 339 aa, unidentified
  source 1..339: note = Related to NZ_CP051298.1; note = Alicycliphilus denitrificans
MSPSATSAPSYSQRRIGTLQALHVPLGLPASDLLALAERADGLYRVAKRITKPDGSIRIAYDTLDPLKGVHRRVKSQILDHVSYPAYLTGSIKGCDAKVNASLHARARIVINEDISGFFPSTSADRVFSIWHNFFGFSEEVARCLTRLTTRHGELPQGAITSSFLANLVFWRDEPALHDKFAAQGLVYSRYVDDIAVSSKTFLTNKEKTDVIRQVYGMLLKHGYRAKRAKHEIATSARRMAVTKLAVNSKPGLDGATRDKTRAVVQAVEQRSAQGEVLSFDRGPYAQAMGKVLHLERFHPGDAAPLKRRLLALKEAAASITSSHPSTWRPNEKKLGSHS

SEQ ID NO: 3712 - protein, 323 aa, unidentified
  source 1..323: note = Related to CP000352.1; note = Cupriavidus metallidurans
MSQSATNAPSYSQRRIGTLQALHVALGMPVGDLPTLAERANDLYRVAKSITKPDGSIRNTYDAREPLKEVHRRIKSQILDHVNYPAYLTGSIKGCDYKVNASLHARARIVINEDISGFFPSTSADRVFSIWRGFFGFSEDVARCLTQLTTRHGELPQGAITSSFLANLVFWWDEPELFGKFAAQGLVYSRYVDDIAVSSKTFLTNEAKTNVVRQVYGMLLKHGYKAKRAKHEIATSGSRMAVTKLAVNNKPGLDKATRNKIRAVVHAVERRIAQGEALSFERGPYAQAMGQVLHLERFHPGDAAPLKRRLLALKEAGAALPHS

SEQ ID NO: 3713 - protein, 331 aa, unidentified
  source 1..331: note = Related to NZ_JGXC01000015.1; note = Bordetella bronchiseptica
MSPSATSAPFYSQRRIGTLHALQVPLGRSVSELLVLATRADSLYRVAKSMTKADGTIRNTYDALEPLKEVHRRIKGQILDHVNYPAYLTGSIKGTDYKVNASLHVRAKIVINEDISGFFPSTSADRVFSIWRGFFGFSEDVAQCLTQLTTKHGELPQGAITSSFLANLVFWRDEPALRARFAAQGLVYSRYVDDIAVSSKAFLTDEEKSDVVRHVYGMLREHGYQPKRAKHEIATAGTRMAVTKLAVNAKPGLDKSARSRIRAVVHAVEQRVASGEALSLERGPYAQAMGQVRHLERFHPGEAAPLKQRLLALKKATKPQSPNSDDHAETA

SEQ ID NO: 3714 - protein, 327 aa, unidentified
  source 1..327: note = Related to JACCEN010000001.1; note = Alcaligenaceae bacterium
MNPSATNAPSYRQRRIGSLEALHNSLGLPASNLLALAERANILYRVAKSITKADGSIRNTYDALEPLKETHRRIKSQILDHVSFPAYLTGSIKGCDYKTNATLHVGARILINEDISGFFPSTSADRVFNVWHCFFGFSKAVAQCLTLLTTRHGELPQGAITSSFLANLVFWQDEPTLHAKLASQGLIYSRYVDDIAVSSKSFLTDEEKSKAVRHVYGMLLKHGYQPKRAKHEISTSATRMAVTKLAINSKPGLDRATRSRIRAIVHAVERRFELGEVLSFDQGPYAKAMGQVRHLERFHPGEAAPLKNRLLALKSISRTRSRHRKVE

SEQ ID NO: 3715 - protein, 319 aa, unidentified
  source 1..319: note = Related to NZ_CP048030.1; note = Sinimarinibacterium sp.
MSPPATSAPSYSQRRIGTLNALRLPLGLSVDELLSLAQRADGLYRVAKSITKPDGSIRNTYDALAPLKAVHRRIKSQILDHVVYPAYLTGSIKGSDYKVNASLHTSARIVINEDISGFFPSTSAEHVFNIWHGLFGFSQEVSQCLTQLTTRQGELPQGAITSSFLANLVFWQDEPTLHARFAAEGLVYSRYVDDIAVSSKTFLSNQEKSEVMRKIYGMLLKHGYQPKRAKHEISTSGTRMEVTKLSVNAKPGLGKAVYSKTRAAVRDIEERIALGEVLSFERGPYAQAMGRVLHLERFHPGKAAPLKRRLLALKEGAKT

SEQ ID NO: 3716 - protein, 319 aa, Alcaligenes faecalis
  source 1..319: note = Related to MSZR01000033.1
MNLQATSAPSYSQHRIGTLNSLRLPLGLSVDKLLSLAQRADSLYRVAKSITKPDGSIRNTYDAVASLKAVHRRIKSQILDHVIYPAYLTGSIKGSDYKVNAALHTNARIVINEDISGFFPATSTEHVFNIWYGLFGFSQEVSQCLTQLTTRQGELPQGAITSSFLANLVFWQDEPTLHAEFAAQGLVYSRYVDDIAVSSKTFLSNKEKSEVVRQIYGMLLKHGYQPKRTKHEISTSGTRMEVTKLSVNAKPGLGKAVYSKTRAAVHDIERRIANGEVLSFERGPYAQVMGRVLHLERFHPGKAAPLKKRLLALQEGTKT

SEQ ID NO: 3717 - protein, 319 aa, unidentified
  source 1..319: note = Related to NZ_ATUS01000004.1; note = Spongiibacter tropicus
MSLSAISAPLYRQRRIGTLHALHVPLGLSVDELLSLAKRADGLYRVAKSIAKPDGSIRNTYDALAPLKEVHRRIKSQILDHVDYPAYLTGSIKGSDYKVNAALHSNARIVINEDISGFFPSTSAELVFKVWNGLFGFSQDVSQCLTQLTTRQGELPQGAITSSFLANLVFWQDEPILHTKLASQGLIYSRYVDDIAVSSKAFLTNQEKSEVMRQIYGMLLKLGYQPKRAKHEISTSGARMEVTKLSVNAKPGLGKAVYSRTRAAVRDIELRISNGEILSFERGPYAQAMGRVLHLERFHPGKAAPLKKRLIALKESAKT

SEQ ID NO: 3718 - protein, 323 aa, unidentified
  source 1..323: note = Related to PQGD01000025.1; note = Proposed Superficieibacter electus
MIHTPSDSPFYSKRRISSMTALSKALNISPIELLNLANRADHMYRLASTITKPDGSTRQTWDAYAPLKKVQRNIRRNILDYVVYPAYLTGSLKGCDYKVNASLHVGATIVINEDITRFFPSTSTAIVQSIWRYFFGFSHEVAECLTKLTTRQGELPQGAITSSFLANLAFWKDEPALQASFRARGIIYSRYVDDIAVSSVNFLDKPAKTNVIASIYGMLSRHGYQPKRAKHEIRTSGQRMEVTKLSVNSKPGISSAKQSQIRSAVHHLEQAILRGEIIEFDKGPYAQTLGLVHLLARFHPGKAKKLKQRLLALKSSGCTNMYT

SEQ ID NO: 3719 - protein, 323 aa, unidentified
  source 1..323: note = Related to NZ_LS483470.1; note = Leminorella richardii
MIHTPSDSPFYSKRRISSMTALSKALNISPIELLNLANRADHMYRLANSITKPDGSTRQTWDAYAPLKKVQRNIRHNILDYVVYPAYLTGSLKGCDYKTNATLHAGSSIVINEDITLFFPSTSDTIVHNIWQHFFGFGNEVAECLTKLTTRQGELPQGAITSSFLANLVFWKDEPILQASFRARGIIYSRYVDDIAVSSVNFLDKPTKTNVIASIYGMLSRHGYQPKRAKHEIRTSGQRMEVTKLSVNSKPGLSSAKKSQIRSAVYHLEQAILRGEIIEFDKGPYAQTLGLVHLLARFHSGKAKKLKQRLLALKSAGHANMYP

SEQ ID NO: 3720 - protein, 323 aa, unidentified
  source 1..323: note = Related to CP007044.2; note = Chania multitudinisentens
MNHIPSDSPFYCRRRISNMAALSKALNTSLDELNSLARRADQMYRLASSLTKPDGSVRQTWDAYEPLKKVQRSIRCNILDNVVYPAYLTGSLKGCDYKVNASLHIGAKIVINEDITCFFPSTSATIVQNIWRNFFGFGKEVAECLTRLTTRQEELPQGAITSSFLANLAFWKDEPVLQASLRARGLIYSRYVDDIAVSSVNFLDNSAKSAVIACVYGMLFRHGYRPKRTKHEIKTSGERMEVTRLSVNSKPGLSASRQSQIRSAVNHLEQAFLRGEIIEFGKGPYAQTLGQVHLLARFHPGKAEKLKQRLRALKKMERMNKCP

SEQ ID NO: 3721 - protein, 323 aa, unidentified
  source 1..323: note = Related to NZ_NJCX01000054.1; note = Xenorhabdus kozodoii
MKHTLPDGPFYSRRRIHSMASLAKALNIPASELISLACRADRMYRLANNIPKADGSVRQTWDAHEPLKKIHRSIRRNILDHVTYPYYLTGSLKGCDYKVNASLHAGATIVINEDITGFFPGTSAAVVHCIWRNFFCFGQDVADCLTRLTTRHGELPQGAITSSFLANLAFWDAESALHSSFKARGLIYSRYVDDIAVSSETFLDNSTKTEVIASLYGMLFRHGYRPKRTKHEIRTSGERMDVTKLSVNSKPGLSTSRQSQIRSAVNHIEQAFLRGEITVFDSGPYAQTLGQVHLLARFHPGKAEKLKQRLLALKKLAQSNKCS

SEQ ID NO: 3722 - protein, 320 aa, unidentified
  source 1..320: note = Related to NMZX01000011.1; note = Pantoea ananatis
MNPVLSDAPFYRRRRIGSVASLAKALSVKEDELFSLAARADQMYRLASSVLKPDGSVRQTWDAREPLKSLHRSIRRNILDLVAWPSYLTGSLKGCDYKVNASLHAGARIVISEDISGFFPATTEAIVRHIWRGFFGFSQDVADCLTRLTTRHGALPQGAITSSFLANLAFWDVEPELQAGFRARGLIYSRYVDDIDVSSYTFLDNHAKAAIIADIYGMLFRRGYQPKRAKHEITTSGQRMEVTKLSVNSRPGLTASKQSQIRSAVYHAEQAFLRGEITCFDSGIYAITLGQVNLLARFHPGKAEKLLQRMRALRNKSEES

SEQ ID NO: 3723 - protein, 322 aa, unidentified
  source 1..322: note = Related to NZ_LR134306.1; note = Yersinia pseudotuberculosis
MNPSTILPRYKRQRIASLDALQAALGVSIEQLQSLAEHADNSYRVAKSVIKPDGSTRHTYDAFKPLKDIHRKIKNHILDHVAYPSYLTGSIKGCDYKVNAEIHTQAKIVISEDITAFFPSTTAKKVFKIWRDFFGFNSDVARCLTRLTTRKNELPQGAITSSFLANLVFWQSEPFLYEQFSMRHLKYSRYVDDIVVSSKSFLDDVEKTEVIRQIYGMLLTNGYHPKRAKHEISTSASRMEVTKLAVNIKPGLKKAKKSMIRAAVHRLETLISEGKEISFESGDFVEVMGQVQHMKRFHPGKAEALIKRLNTLKLSYIVLHNK

SEQ ID NO: 3724 - protein, 328 aa, unidentified
  source 1..328: note = Related to NZ_JPQP01000023.1; note = Bordetella trematum
MHLSTINAPSYKRKRIGTLEALAYPLGLNAAALEDLARRADAMYRLAKEIVKPDGSVRHTYDAFKPLKVVHGRIKREILDQVAFPLYLTGSIKGRDYKVNATLHSRAKIVINEDISGFFPATTSQHVFDIWHRFFGFSEAVARCLTDLTTYHGELPQGAITSPALANLVFWRREPQLQAEFAAKGWTYSRYVDDIAVSSTIGMAPHQKTEAIRKVYGLLSGYGYKPKRNKHEITTAAQRMVVTKLSINAKPGLAQSERDRIRAAVHEVERLVSSGNSISTDSGVYAKAMGRVTTLARFHPGEAAPLRQRLLRAKQTLQPLLSPSTRAP

SEQ ID NO: 3725 - protein, 332 aa, unidentified
  source 1..332: note = Related to NZ_SNVV01000001.1; note = Azoarcus indigens
MSLSTSSNSPFYKGTPIRQRTSLAAALGSTLHRIEYVAPRANKLYRLAHAELKSDGTIRQTFDAKPLLKDLHRRIKTEILDRVTFPDYLTGSLKGRDYKSNAELHEGAAIVIAEDIENFFPNTTSDKVFDIWRHFFRFSEPVAQLLTSLTTKDGALPQGAITSPQLANLVFWRDEPLLQAKLAADDITYSRFVDDVTVSSVVPIPAENKTELVGAIYGLLRRNGLQPKRVKHELKTRRERMAVTKLTVNDKAGLSAKERSRIRAAVHRLELKGAQQLLEAGELASVLGKVHHMARFHPGEARPLKARLLKISAHGCAATPSEQSPLPPCSEP

SEQ ID NO: 3726 - protein, 316 aa, unidentified
  source 1..316: note = Related to JFAX01000020.1; note = Candidatus Accumulibacter sp. SK-12
MNPSPSDSPSYNGRPIRSIQSLAKAVYCKPQRLAFVSERASDLYRVAKEVPKADGTVRRTYDAKKLLKDIHRLIKTEILDRVDFPPYLTGSLKGQDYKSNAEIHVGAAIVIAEDIGNFFPSTTAERVLDIWRNFFRFSAEVAQCLTNLTTRNNELPQGAITSPQLANLVFWRNEPQLHARFKADGVDYSRFVDDVVASSKTPITPKKKTEIIAAIYGLMKRSGYQPKRRKHELKTARERMTVTTLNVNDTVGIPKEERSRIRAAVHRLEGLVTSGRGEVDLKHEYAVVAGKVNNLGRFHPGEARTLRERLAALDLC

SEQ ID NO: 3727 - protein, 315 aa, unidentified
  source 1..315: note = Related to NZ_SSSP01000011.1; note = Rhodocyclus tenuis
MNRLPTSSPLYSGQAIRRIESLGKALRFSPQRLGYLGNNADRLYRIAHEIEKSDGSKRVTFDAKPALKEVHRRIKSEILDRVTFPLYLTGSIKGRDYKTNAELHVGAALVITEDIGSFFPSTTTAHVFDVWRNFFRFSDEVARLLTALTTRNGELPQGAITSPHLANLVFWRDEPALHDRFAADGIVYSRFVDDIAASSKTPIPPEHKNEIVRLIFGLMLRRGYKPKREKHDLKTAGQQMTVTKLTVNQLPGLPKAERGRIRAAVDHLERLASRGPLSAEQWREHASVSGRVTHLARFHPGEAAGLKARLKMLHP

SEQ ID NO: 3728 - protein, 320 aa, unidentified
  source 1..320: note = Related to NZ_UZVX01000004.1; note = Burkholderia ambifaria
MNQSTTNCPSYDAKPIRLITSLAKALETDENQLLLLADEANELYRIAKKIRKPDGSLRRTYDALPRLKDIQRRIKFRILDRVTFPSYLTGSLKGRDYKVNAALHSGAKILIAEDIGSFFPSTSASRVFDIWKNFFGFGHEVACCLTKLTTLRNELPQGAITSAHLANLVFWREEPQLRTRLDQSGIVYSRFVDDVAVSSRSVIEPAQKTEVVTSIYGMMIRHGYRPKRTKHELHTARNRMVVTKLTVNAKPGLEKTERSKIRAMVHELERLSESLDNTQAILDRLNSVAGKINMLGRFHPGKAQSLKKRLLEVKQIIAAR

SEQ ID NO: 3729 - protein, 303 aa, unidentified
  source 1..303: note = Related to JAGOBW010000017.1; note = Shewanella sp.
MLSLAHKANTMYRIAKEVEKGDGTVRRTFDAHRPLKDIHRRIKLEILDKVVFPDYLTGSIKGRDYKVNAALHAGAKIVISEDIGAFFPSTTDAIVFDIWHGFFGFSHDVATCLTRLTTYNGELPQGAITSPQLANLVFWRSEPVMYQRMADMGLKYSRFVDDIAVSSRLVIAPEAKTVIISLIYGMMFRQGYRPKRSKHDISTSKDRMTVTKLTVNHKPGLASSQRSQIRAAVHALECNLAVKQTADVAAKLPSVIGKVIMLRRFHPGEGLRLKQRLAAIQASQSPQRECKAELQFGPLAGSL

SEQ ID NO: 3730 - protein, 346 aa, unidentified
  source 1..346: note = Related to QLTK01000002.1; note = Paraburkholderia bryophila
MIHVNRLEVPRYTATPIESMAALSRALGVTNQHLAAVAAKASSLYRVADKIEKADGTLRETFDAKPVLKDIHRRIKLAILDRVSFPNYLTGSVKGQDYRTNALLHRNSKILISEDIQGFFPSTTQHLVQEIWSQFFGFSADVAQCLTALCTKDGALPQGAITSPHIANLVFWRVEPAIRAEMAFRGLRYSRYVDDVCVSSSTGIAHADKQSVISVIYAMLARHGYSAKRSKHKIQTASGRITATKLGVNGDPSLSGQQRGQIRAAVHKLELTFAAGAFSDARALLPSVTGRVSMLARFHSTEGQALKQRIASVREQLLLVPMVTRADDATHKAIRDSVDDISTVPW

SEQ ID NO: 3731 - protein, 344 aa, unidentified
  source 1..344: note = Related to CP008726.1; note = Burkholderia oklahomensis
MILMNQIEVPRYTAAPIESMAALSRALGVTSAHLLAVAARASSLYRVAEKVEKADGTFRETFDAKPVLKDIHRRIKSSILDRVAFPRYLTGSIKGQDYRTNALLHRNSKILISEDIQGFFPSTGQCLVYEVWSQFFGFSDDVSRCLTSLCVKDGVLPQGGITSAHLANLVFWRVEPAVRAELARFGIRYSRYVDDICLSSPDAIGHEDKKKVIALVYAMLARHGYSAKRSKHNVQTSRGRIVATKLGVNREPSLSRQQRGQIRAAVHKLESLFADGDLDGVRERLPSAGGRVSMLGRFHAAEGAALAKRLASIRRALDLLPVISKTSAVMSQVSHSDLDGTVPW

SEQ ID NO: 3732 - protein, 341 aa, unidentified
  source 1..341: note = Related to NZ_JADZ01000026.1; note = Curvibacter gracilis
MDLFLIKPRYRASPIRSIAALARSLRWDALALVDMAERANGMWRTVKPKPGSIRQTFDAMGPLKEIHQSLKLNIFSKVDFPEYLQGSLKGRDYVSNASLHKDKQILICEDVKGFFPSVGAAYVEDVWCGFFGFAPDVAKLLTKLTTKDGCLPQGCIASSFLANLVLWRHEPLLHAKLAQRGITYSRYVDDMVMSAATHLDKATQTWVIAQVYGMLARHNLKASRKKHEVFSATQPMIATKLIVNRKPSLSLKKRSQVRAQVRQLEIAVGTGLDAEELRDLANKAAQQVGQLGRFHKTQAEHLRNRIAIVRGTLPIEHPSIITAPSNAPLSQELSTGSLSSK

SEQ ID NO: 3733 - protein, 342 aa, unidentified
  source 1..342: note = Related to NZ_JAELTO010000123.1; note = Xylophilus sp.
MDLFLIKPRYRASPIRSIAALARGLRWDAKALVELAERANGMWRTVKPKPGSTRQTFDAMGPLKEIHKRLKLNIFPKVDFPEYLQGSLKGRDYVTNASLHKDKQILICEDVKGFFPSVSAAYVEDVWCSFFGFAPEVAKLLTQLTTKDGSFPQGSIASSFLANLVMWRYEPLLHAKLAQRGITYSRYVDDMVMSAATHLDKETQTWVIAQVYGMLAQHGLRASRKKHEVFSASKPMIATKLIVNRKPSLSPKKRSQVRTQVRQLEIAAADGVNAEELWDLANKAAQRVGQLGRFHKTPAASLKNRIAIVRGSLPPENQPAITGQTIAPLYQEHPPTGTAPWE

SEQ ID NO: 3734 - protein, 342 aa, unidentified
  source 1..342: note = Related to NZ_CP065406.1; note = Diaphorobacter sp.
MDLYPIKPRYRSNPVKSIAALARGLRWDAQSLVELADRANGMWRTVKPKPGSTRQTFDAMGQLKEIHQRLKLNVFSKVDFPEYLQGSLKGRDYVTNASIHKGKQILICEDVKGFFPSVSAAFVEDVWCGFFRFSPDVAKLLTRLTTKDGYLPQGAITSSFLANLVMWRYEPWLHAKFAQRGITYSRYVDDMAMSSATHLDKETQTWIIAQVYGMLAQHGLKASRKKHEVFSASQPMIATKLTVNRKPSLSPKKQSKVRTRVRQLEIAATSGASTDELRELANKAAQQVGQLGRFHKTPAAKLKSRIAVVRDNLSPEALSVTTAPAKVRLDTVPLVTDARPWE

SEQ ID NO: 3735 - protein, 340 aa, unidentified
  source 1..340: note = Related to CP017420.1; note = Delftia tsuruhatensis
MSLCLSKPSYQAKPIRSIAALARALRWGEQALVQLADRSESMWRTVKPQPGSTRQTFDAMGQLKELHTRLKLHIFSKVVFPDYLQGSLAGRDYVTNASLHAKKKILICEDVKRFFPSVGAIYIEQVWRDCLGFAPDVARLLTKLTTKGGYLPQGAITSSFLANLVLWRHEPLLHAKLKQRGISYSRYVDDMALSSASHLDKDTQTWAIAQVYGMLARHDLKASRDKHDVFAASRPMIATKLIVNHSPSLGAKKRSQVRAQVLQLEMAAASVVDADQIRGLANKAAQRVGQLGRFHKTAAAHLKSRIATVRDTLTADSRVAITGERAAHWEHLEGENPWSY

SEQ ID NO: 3736 - protein, 336 aa, unidentified
  source 1..336: note = Related to NZ_CP094240.1; note = Comamonas sp.
MSLSLSKPIYKAKPIRSLASLAKALGLDEKRLKELALKADTLWRAVKPEPGSTRQTFDAYEPLKRVHERIKRSIFSKVSFPAYLHGSLKGCDYVTNAALHKGQQILICEDVKSFFPSVQSVYVRDVWAGLFGFSSEVADILTALTTKDGALPQGGITSSYLANLVLWRKEPLLQAKLAARGITYSRYVDDMSMSSKTLLDKETQSWVIAQVYGMLAFHGLKASRKKHDVFSASKPMIATKLIVNQKPALPKAKRSNIRAQVKQLELASQSSIPLEELKILANKASQRVGLLGRFHETEANALRLRIKAVRASFTSTEEVRVTGAKLEDGHESSTIS

SEQ ID NO: 3737 - protein, 329 aa, unidentified
  source 1..329: note = Related to JADMKA010000068.1; note = Vitreoscilla sp.
MSLAALARALRLSVGELHALAERADQSYRTVKPEPGSTRQTFDALGQLKTVHRRIKEVVFVNVYFPEYLQGSLKGRDYVTNALLHTNKQLLVCEDVKKFFPSVTAALVEDVWHGFFRFAPEVAKLLTRLTTKSGHLPQGAITSSYIANLVMWRHEPLLQAKFAARGITYSRYVDDMAMSWSCHVDKETQTWVIAQVYGMLAQHGLKAGRAKHEVFSASEPMIATKLIVNRKPSLSAKKRSQVRSQVYQLERAEEDGTETMSVDALAIKASQRVGQLGRFHVTQAAHLRERVKAVRSRLSVEANAAISMPTETPTTPSPEDLSDAPAPWE

SEQ ID NO: 3738 - protein, 342 aa, unidentified
  source 1..342: note = Related to JAIUOW010000007.1; note = Proteobacteria bacterium
MALYLSKPSYRCKPVRSIAALARALNFEEQALRVVAENADQRYRTVAPPPGSSRQTFDALGQLKEIHRRIKTTFFDRVKFPDYLHGSLKGCDYVTNAQLHTKKQLLICEDVKKFFPSVTSEKVEDVWCAFFGFAPEVAHLLASLTTKQGALPQGAVTSSYLANLVLWRDEPLLHAKLAARGITYSRYVDDIAMSFSIRPSKETQTWVIAQVYGMLRKNGLTAGRSKHEIFSASEPMIATKLIVNSKPSLSQKKRSQVRAQVRQLEMAQSSGLDSEMVRVLAEQAAQKVGQLGRFHPTQAARLKGRVKAVRLGLPIESFSSRVTNSTGVSNPSPSEDLRLPWE

SEQ ID NO: 3739 - protein, 345 aa, unidentified
  source 1..345: note = Related to JACDFR010000086.1; note = Ramlibacter sp.
MSLTPHKATYSKEPLRTVKSLCAMLRLEEQALRDLAAHAPALYRRVKPKPGSKRETFDALPRLKVIHKRIKTQVLERVRFPSYLTGSVKGRDYKENAAKHAGQRVVICEDVKGFFPSVTAEMVCDIWQGIFGCSSDVAQLLTQLTTKDGALPQGAIPSSYLANLVLWRTEPLVHAKLDAQGITYSRYVDDITMSSPRRLSVAQKQAAIGMVYGMLSEAGLRAGREKHDVFNGSKPMIVTKLVVNEKPSLTKKKRSAVRAAVFQFQQTLALGEPTADTVITLNKLAQRVGQLGRFHPREAAVLKLRLQATRAFIDKAQPQTLTTGLLPDARLTTPPEGAPAPWDDL

SEQ ID NO: 3740 - protein, 339 aa, unidentified
  source 1..339: note = Related to SEBG01000114.1; note = Cytophagaceae bacterium
MSLFLRKPSYPCKPINSLRSLAAALRVTEDELLSVANIADTLYRKVKLKPGSDRQTFDATPRLKRLHARIKSVILAKVIFPDYLTGSLKGRDYKTNASLHINKSVLITEDVKGFFGSVSDVRVNDVWRHFFRFDASVAETLTLLTTRRGALPQGAISSSYLANLAMWSDEPLLHAKLAARGIIYSRYVDDMCMSSNTPLSIAEKTRTIEDVYGMLMKNGLSARRDKHDITPATGRMLVTKLVVNRKPALPPEQRSRIRAMVFQAEQMARNEADPKLSIAALNKAANKVGQLGRFHCNLSKPLKARLALARAPLPHPLAEPRFTGPDTGSTGDAPGVPWE

SEQ ID NO: 3741 - protein, 335 aa, unidentified
  source 1..335: note = Related to NZ_CP046508.1; note = Variovorax sp.
MSLNLRKPTYPFRPIGSLAALANTLKVSESELVHIAKNAGSLYRAVQLKPGSTRQVFDAKPPLKPIHSRIKEFILSEVHFPSYLTGSLKGRDYKANAEIHAGQAVVICEDVKGFFNSVSETCVFDIWRHFFLFGTAVSQVLTSLTTKDGALVQGAIPSSYLANLALWRDEALLHAKLEAQGIRYSRYVDDIVMSSSTPLEPSRKTELIASVYGMLRRNGLSARRDKHEIAPATKQMVTTKLVVNRRAALPPARRANARTAVFQAEMLVANHGVEAAQAVIAKAAGRVGQLARFHPNLAAPLQERLARLRKQAATRKSLPTMEPSETPTPPPEKDS

SEQ ID NO: 3742 - protein, 352 aa, unidentified
  source 1..352: note = Related to JABMJG010000016.1; note = Variovorax sp.
MSLILNKPSYPFNPIWTNEKLAKALRTELAELEAIAIVADRSYRPVRMDPGSTREVFSAKPRLKAIQRRIKEAILQRVRFPEYLTGSVKGRDYVTNAKLHTGARILICEDVSKFFPSVSAERVWDIWRHFFGFGDDVAHLLTKLTTKAGTLPQGAGTSSYLANLVLWRDEPYLQAKLAKHGLTYSRYVDDMAMSSKLDITPVEQERIIADVYGMLRRNGLSAKRKKHEIFSSSQRMIVTKVIVNTKPSWSKARRSAVRTQVHELEKRVVAEDVGAELHKFADRTSNLVGQLGRFHVREAGLLRARVRKAREVMNRATRIHFTISPTTGAHQSSRLVDVPPWEMKCRRAVKSS

SEQ ID NO: 3743 - protein, 341 aa, unidentified
  source 1..341: note = Related to JACHLK010000013.1; note = Acidovorax soli
MSLILSKPIYPCDPVWTLEKLGEALRIDLAELQAVAAVANRSYTKKLVKKDREVFSARPRLKLIQNRIKMAFLHRVIFPEYLTGSLRGCDYVTNAKIHTNARILICEDVQQFFPSVGSEKVKDIWLNFFGFSEGVAELLTKLTTKAGAVPQGASTSSYLANLVLWRTEPLLQAKLADHGITYSRYVDDMSISSEFQLEPAELERIIADVYGMLRKNGLSAKRKKHEIFRESQRMVVTKVIVNKKASLSKDRRSAIRTQVHVLESRIAAGENSIELSKFLDQTSHKVGQLGRFHKNDYRDLLPRVRAAREALRINPPPFITGDNDRWPEAAPPHAPWELGGI

SEQ ID NO: 3744 - protein, 348 aa, unidentified
  source 1..348: note = Related to AP024684.1; note = Stenotrophomonas pavanii
MSQLQPPPRYRHNPIHSVAALSRVLGYSVETLKHVAGTSSSRYRLAKPILKEDGSFRRPFDALYPLKDIQIRIKQRILTAVIFPAYLTGSLKGQDQVRNAKLHQGASITVCEDIKSFFPSTTSEVIFDIWRGFFGFSEDVSNLLTLLTTKDDLLPQGAVTSSHLANLVFWRREHALYLGLASQGVRYSRYVDDITLSSRLPVTHDDLARHISLVYGMIRSTGHRAHRGKQEIQRAHRGMRATKLLVNRRAALGTAERQATRAAVFALERSFAVTGGVLCPALIKELNSVSGRVSRLARLHANEGQALRARLTKLRNEVGKSHRVRNDFSQVEVIGVEPAPPETGEGMQ

SEQ ID NO: 3745 - protein, 321 aa, unidentified
  source 1..321: note = Related to NZ_JAJITE010000118.1; note = Xanthomonas sp.
MSQLQPPPQYSHKPIHSIAALSRVLGYSIDTLSHVAEVSSSRYRLAKPVVKADGSTRQPFDALFPLKNIQIRIKQRILTAVSFPAYLTGSLKGQDQVRNASLHQGASITVCEDIKSFFPNTTSEIIFDIWRGFFGFSENVSNILTLLTTKDGVLPQGAVTSSHLANLVFWRQEHSLYVRLASEGVSYSRYVDDITLSSLLPLNSNELARHISLVYGMIRSTGHHAHRGKQEIQRAHRGMRATKLLVNRRPALSTAERHAIRAAVYSLERSLAAAEGVLCSSLAKELNSASGRVARLTRLHRSEGLALRERLLRIRNQLDNS

SEQ ID NO: 3746 - protein, 327 aa, unidentified
  source 1..327: note = Related to JADUKZ010000003.1; note = Stenotrophomonas maltophilia
MTQPPPRYPLRAIVRLDKLALVLGVSLDLLLAVSKDASSRYRLAKLIVKPDGSTRQPLDAKVPLKGIQRRIKERILEKVVFPDYLTGSLKGRDARANARLHVGASIVLSEDIANFFPSTKDTLVFKIWRQFFGFAPDVAEILTSLTTKDGELPQGACTSSYLANLAFWREEHRLYEVFRAQGIAYSRYVDDVSVSSKRRLSNEELSACIKNVYGMMGRSGFRPRRKKQEIQRANSPMLVTKLLANRRPAISVKERQAIRASLYQLEQSVAAKAGDDLSSKLESIAGRVNRLCQMHPVEGERLKVRVRVLRGQIGMGASEVCGPVTGQ

SEQ ID NO: 3747 - protein, 318 aa, unidentified
  source 1..318: note = Related to JADUKS010000015.1; note = Stenotrophomonas maltophilia
MSRVPPPSYPHGSIQSLAALSRTLGVPADKLLQIAKDADNSYRLAKPIVKADGSVRRPVDARVKLKGVQVRIKERILDQVRFPDYLTGSLKGKDAVANARLHVGASVVVCEDVAGFFPATSSPAVLGIWRGFFGFSTEVSELLTQLTTLNGALPEGAVTSSHLANLAFWREEHALYEELHREGIRYSRYVDDVSVSSVNQLSRQELAACISRVYTMMGRNGYRPKRAKQQIQWANGPVLVTKLQTNTRVALTKKERHAIRGAVHGLERMALAGPSDELLRRLSSVSGQVARLRRLHPNEGQMLKSRLDALRRLLTAAV

SEQ ID NO: 3748 - protein, 339 aa, unidentified
  source 1..339: note = Related to SCRF01000118.1; note = Rhodanobacter sp.
MNHTAAQPKYTSSPVRSLAALSRSLGLSVAELQRIGDAASSLYRDAKPIIKVDGSIRRTFDAFPVLKNIHRRLQTQFFQRVVFPDYLTGSLKGRDARRNAALHTGAAIVVTEDIKNFFPSTDAKVVYSIWANFFRFAPEVARLLTALTVKDGALPQGAITSSYLANLAFWDREWRLYENLRDKGISYSRYVDDVTFSSKEKLSNERIGCCIAGVYGLMAAKGLKAKRSKHEIRRGNGRMLTTKLMVNTRPALMTRERQNIRAAVHQLEVLSRWNSTDSVSFKSEFSRVSGRVGRLSQLHPMEGAALRARLATLRAGLYANQQLGRQLSQFAGVTLDCVI

SEQ ID NO: 3749 - protein, 320 aa, unidentified
  source 1..320: note = Related to NZ_MWQO01000072.1; note = Metallibacterium scheffleri
MNPKAAQPKYTFSPVRSLASLSRSLGVSVVDLQRIGDTAGGLYRDGKPIIKADGSIRRTFDALPLLKSVHRRIQARFFQRVVFPDYITGSLKGRDARRNAVLHAGAAIVVTEDIKNFFPSTDAKVVYSIWVSFFRFAPEVAQLLTMLTIKDGALPQGAITSSYLANLAFWDREWRLYENLRDRGISYSRYVDDVTCSSKEQLNNEKIGSCIAEVYGLMASKGFQAKRSKHEIRRGNGPMLTTKLMINARPALLTRERQNIRTAVHQLEVLSKNSTDPVRLKSEINRVSGRVGRLSQFHPIEGAALRARLTTLRVGLDLNQ

SEQ ID NO: 3750 - protein, 327 aa, unidentified
  source 1..327: note = Related to NZ_QRBF01000008.1; note = Dyella psychrodurans
MVQLASRPNYKYSPVQSCASLSKVLAVSPSALKALAANSNNLYRLANPILKPDGSVRQPYDALYPLKLVHERLKLRVFAHVSFPDYLTGSLKGKDAIKNASFHAGAKIVVCEDIKDFFPSVTADVVYSIWQGFFNFAPEVSRLLTSLCTKDGSLPQGAITSSYLANLVFWKQEWRLYEDLKSRGIVYSRYVDDVTVSSREGLDKEQLSECIGKVYGLMAANGLRPKRKKQEIQRAHAPMRATKLMVNKRAALSLGERKAIRAAVHQLELEVAQVNMPKELMAKLNSVSGRVARLAQLHVVQGNELKNRIRALRVRIKLLTTLALHDK

SEQ ID NO: 3751 - protein, 326 aa, unidentified
  source 1..326: note = Related to RYZR01000007.1; note = Dyella dinghuensis
MTPDASKPSYRCSPIRSLDSLSRALGVSLETLNRLASRADDSYRLAKAIVKPDGTIRQPFDAQPPLKAIHRRLQKRIFDNVRFPDYLTGSLKGKDARWNAALHTGAKIVVTEDIKNFFPSVTANIVYSIWAGFFRFEGNVAQLLTLLCTKDGMLPQGAIPSSYLANLAFWEQEWKLVANFRAAGITYSRYVDDVTLSSRESLDKPQLTRCISNVYSFMAAQGFRPKRTKQEIRRAHAPMIATKLMVNRRPALLVQERQGIRSAVYQLEREEMRGCDPKEIKAKIDSVAGRVGRLTQLHPTDGHALKLRIAALRRKLASISAVPSAN

SEQ ID NO: 3752 - protein, 326 aa, unidentified
  source 1..326: note = Related to JACJFT010000001.1; note = Luteimonas sp.
MKNPPKRPEYPHRPIGSLDALSAALQISRIELEHVASVTDSQYRLAKPIVKADGSIRQPYDALPLLKNVQRRIQARLLAPVQFPTYLTGSIKGRDARRNAAIHAGAKVVVCEDVASFFPSTSRLLVESIWTGFFGFSPEVAQMLAVLTTKNGSLPQGAVTSSYLANLAFWKKEPILQQQLELNGIAYSRYVDDITISSRRALLNPELSWCIAQIYGMMRGAGMQAKRGKQEIWRGDGRMLATKLVVNRRPALPPNDRKAIRTAVFQLEARFAAGDVEDTFATELNRVAGRVVRLAQFHPVIGAALKGRIASLRQQLSDGQTSAIAP

SEQ ID NO: 3753 - protein, 331 aa, unidentified
  source 1..331: note = Related to CAJPFU010000489.1; note = Anaerolineales bacterium
MNPPQLKPKYDLKSIRDISALSLSLSMPEELLINVAAQADSLYRKAKPIIKPDGSLRQPFDALPPLKSIQRRIKDRILKRVEFPEYLTGSLSGRDYRTNAAMHVGAAIVICEDIEKFFPATSRERVLDIWRNFFCFSEDMANLLTSLTTNDGSLPEGAITSSYLANLAFWNQEPRLQAKLAQKNIVYSRYVDDISVSSKQFMPKEEQTALIAQVYGMLKRHGYKAKRRKHEIFTSGRRMLTTKLMVNRKPALQPKDRQNIRAAVHALEQRIASGESGAEIKTELNRVTSRVGRLGTLHATEAIPLKLRLRNVRQSLQAAILQHTPLIGEPE

SEQ ID NO: 3754 - protein, 320 aa, unidentified
  source 1..320: note = Related to MGXC01000124.1; note = Gallionellales bacterium RIFCSPLOWO2_12_FULL_59_22
MTPPLLKPKYDLKPIRDISALALSLGMPEKLLIDVAAQADTLYRKAKPIVKPDGSIRRPFDALPPLKPIQRRIKDRILKRVEFPEYLTGSLAGRDYRTNAAMHAGAKIVICEDVEGFFPSTKRERVMDIWLNFFRFSEDVANLLTSLTTKEGELPQGAITSSYLANLAFWNQEPRLQAKLAKREVVYSRYVDDIAVSSKQTLTKEEQTALIAQIYGMLKRQGYKAKRRKHETFTSGRRMLTTKLMVNRKPALQTKERQNIRAAVHALEQRIASGERGLGIKTELNRATSRVGRLGTLHPTEAKPLKLRLSHVRHLTNNRM

SEQ ID NO: 3755 - protein, 337 aa, unidentified
  source 1..337: note = Related to JAKJPO010000009.1; note = Lysobacter sp.
MSDPQRRPRYPHQRIQSVASLSAALNVPEGELAAIAKIASSQYRKAKPITKADGSVRQPWDALPPLKRVQKQIQAKLLRRVEYPYYLTGSLPGKSPRENASLHTKPAIIITEDIARFFPTTRAELVHGVWAGLFGFSEEVAGILTALTTKDGFLPEGAPTSSYLANLVFWDCEPRIVDQLAQLDATYSRYVDDVTVSSSKALTPVEIARCMAIVYGMFGSRGYKAKRRKHEIVRANAPMRVTKLVVNKRPALPKADRKAVRAAVYKLEGIVNSGQPLPDDIQTLLNSASGRVSRLGQFHPTQAAPLKARIATIRERLAHLNDSLALTGHGQKTPSKS

SEQ ID NO: 3756 - protein, 339 aa, unidentified
  source 1..339: note = Related to MTHB01000236.1; note = Caballeronia sordidicola
MSFRYNANPIRSLAVLAIALDVTEYELLRLSNRADDLYRKAKPIRKPDGSFRQPYDALPQLKHVHRRIKERLLVNVHFPAYLTGSLPGKSPKANASFHVGAKIVICEDVQKFFPSTRATLVHDIWMGFFGFSQDVATILTKLTTRFGALPEGAITSSYLANLVFWRLEPGLHEQLSIRGIAYSRYVDDICVSSKEFLPDIDKSAAISEIYTMLGRLAYTAKRKKHEIQTSGHQMFATKLMVNRRVAIPHSERHNLKSAVFQLEGKFKHGARDVAFFEELSRTTNRVGRLGQFHMQEATKLKERLKKLRMRLDSEPVVITPSVQTAATIMSAAKAEAPWD

SEQ ID NO: 3757 - protein, 349 aa, unidentified
  source 1..349: note = Related to NZ_PUIP01000011.1; note = Massilia phosphatilytica
MKKPPNSDKSIPYYPCEPIHSIAALEMALGIPERWLKRIAAAANQSYRLAAEEIKKDGSKRQTFDAYPRLKYAQRRIKDRILSRVEYPDYLNGSLKGRSPRKNAEAHVGAKITIGEDIANFFPTISSTLVKAMWCGLFGFSEEVANLLTLLTVKDDGVPQGAVTSSYLANLVFWAREPQLYKQFQRRGYQYTRYVDDISVSCKRRITDSEKSEIISSVYAMLRSAGVQPKRQKHEVHTAGARIVTTKLVHNVRVALPKEMRRGIRTSVFQLEARAAFGEHDEALHKELLTVSSRVGLLNSFHPSEGAPLKARLKKLRKMIEDAAQGLQRTQDVGRQAVGISNSEPAPWD

SEQ ID NO: 3758 - protein, 324 aa, unidentified
  source 1..324: note = Related to JACYUQ010000006.1; note = Oxalobacteraceae bacterium
MKKSLKIDGLAPSYPHEPIYGIAALSRALGVREMRLQRVAQMANDLYRLASEETKLDGSKRQTYDAQPLLKAIQKRIKDRILVRVICPPYLNGSLKRRSTRTNAEPHVGARIVFDEDIANFFPSIRPEIVKRMWLGLFGFSNDVSTLLTLLTVKDQGVPQGAVTSSYLANFVFWAHEPSLVRRFAAQRLAYTRFVDDISVSSKAVVAPQAKSLVISEIYGMLSRHGLEPKRAKHKISTRRDRMTTTKLVINERVSLPKERRRNLRAAVHKLEQRAAFDQYDESLLKEINKVAVKVGQLKGYHVAEGTQLKERLRSIRSRVLLSL

SEQ ID NO: 3759 - protein, 344 aa, unidentified
  source 1..344: note = Related to CP037993.1; note = Herbaspirillum huttiense
MMSEFPNYPHQRIGTLDALARVLAVPKDHLLTVASRAEVLYRIAAQEQKADGSIRQTFDAKPKLKEIQRNIKERLLQKVKFPPYLQGSLKGRSPRLNAESHKGAHLSISEDIQNFFPSVGRDHVMSIWRDFFRFSDEVSELLTALTVKDDGIPQGAITSSYMANLVFWDYEPRLVEQLAAMGLTYTRYVDDVIVSSRHHLTKEVQSLVVAKIYGMLGRYSLRPKRAKHEVSTRSKRMTATKLVINKRVALPKETRQNIRAQVFAIERRVLDGDRGADLVKALASASSRVGRLASMHPTMGQGLKARLKVVRTTLASESPPEAFQVAVASRVPQSVEEDFVPPWV

SEQ ID NO: 3760 - protein, 330 aa, unidentified
  source 1..330: note = Related to NZ_JPXI01000042.1; note = Massilia sp.
MKKTTIEPGLAPLYLHSAIRGLAALSKALGVRQNVLEKLALSAETLYRVARSEVKSDGSIRQTYDALPRLKAVQIRIKERLLQRVIFPSYLHGSLRERSPRTNAATHIRAKITFAEDISNFFPSASRALVHRVWKDLFGFSEDVAALLTTLTTKDGGLPQGAVTSSYLANLIFWDYEPDLVKTLALRGLRYSRYVDDITVSSRLGIKASDKTYVISQIYGMLLHHGFTPKRKKHEITSAAKSMRTTKLVHHTRVSLPITERKKTRAAVYALELRVSAGESGPGVMKELASVSTRVGRLGSFHKTQAMALKKRLDVVRATLNTFEASPTVS

SEQ ID NO: 3761 - protein, 336 aa, unidentified
  source 1..336: note = Related to NZ_LR890523.1; note = Burkholderia cepacia
MDRPIYKHRPVQTISALARALRISESLLLGIAGRATDLYIGPKPKPKKNGGIRYVFDTKPPLKSLLRRINGTFFKHTQFPKYLTGSLSGRDFVANVEIHRDARNAVTEDIAQFFDCISAECVYRIWKDFFHFGDEVAELLTKLTTKDGRVFQGTPTSSYLANLAFWDRECALVEKLKARGIRYSRYVDDITISTVSPLAKGDKRWAISQIYAMIGTAGFKPQRSKHGSFSASSPIRIMGLNANRAPTLPKQERSAIRAQVYQLEQRVAQADQSDDLRAALSAAIGKVGRLKRLHPSEGTALRLRLDAIRRTLDAQPVVTHATIPIQVSDEAASTPF

SEQ ID NO: 3762 - protein, 336 aa, unidentified
  source 1..336: note = Related to JAHPOI010000008.1; note = Burkholderia multivorans
MDRPVYKHRPVQTISSLARALRVSESLLLAIGERSADLYIGPKPKPKKNGGIRYVFDTKPPLKSLLRRINATFFKHTHFPKYLTGSLSGRDFVANVEIHKDARNAVTEDIAQFFDCISADSVYRIWKDFFHFSDEVAALLTKLTTKDGRVFQGTPTSSYLANLAFWDREFALVEKLKARGIRYSRYVDDITISTTSALTEENKRWAISQIYAMIGAAGFKPQRSKHGSFSASHAIRIMGLNANRSPTLPKQERSAIRAQVYQLEQQIVQANSGPELRAAVSSAISKVGRLKRFHPREAEALRIRLNAIRQILDARPVVTNASVPVEVTEDVGAAPF

SEQ ID NO: 3763 - protein, 336 aa, unidentified
  source 1..336: note = Related to NZ_BAYD01000021.1; note = Paraburkholderia oxyphila
MDHPIYKHRPVQTISSLARALRISESLLLGIAGRATDLYIGPKPKPKKNGGIRYVFDTKPPLKSLLRRINATFFKHTQFPKYLTGSLSGRDFVANVEIHRDARNAVTEDIAQFFDCISADCVYRIWKDFFHFGDEVAALLTKLTTKDGRVFQGTPTSSYLANLAFWDREFALVEKLKARGIRYSRYVDDITISTVSTLAEGDKRWAISQIYAMIGAAGFKPQRSKHGSFSANSPIRIMGLNANRAPTLPKQERSAIRAQVYQLEQRVAQADQSVDLSAALSAAIGKVGRLKRLHPSEGAALRLRLDAIRRTLDAQPVVTHATTPIQASNEVDTAPF

SEQ ID NO: 3764 - protein, 337 aa, unidentified
  source 1..337: note = Related to CP049132.1; note = Ralstonia mannitolilytica
MDRPTYPHERIQSIQSLCCALGLSEPTLRAIASRAPNLYIGPKPKPKKNGGIRYVFDTKSPLKPLLKKINSVFFRRVVFPQYLTGSLSGRDFVANVDVHRNSRQAITEDIAQFFDCITADHVYRIWRDFFAFGEDVADLLTRLTTKNGRVYQGTPTSSYLANLAFWDREPILVEKLATRNIRYSRYVDDITMSSVGVLEADDKSWAIAQAYAMIGANGFKPQRTKHAAFEGGSPIRIMGLNANRHPTLPKQERAQIRALVFQLEQSLARGDTGAVFRSRLNTASGKVGRLKRLHSREGEALRLRLNKIRRVLDVLPLVTCPTTPPGERVQGEDAAPF

SEQ ID NO: 3765 - protein, 314 aa, unidentified
  source 1..314: note = Related to JAIENU010000130.1; note = Burkholderiales bacterium
MLRSIIQRAHNLYIGPKPQVKKNGGVRYVFDTKPPLKPLLKKINSIFFRRTHFPPYLTGSIAGRDFIANVEVHKGARVVITEDIAQFFDCITEQHVYRIWREFFRFSDEIADLLTHLMTKDGRVFQGTPTSSYLANLAFWDFEPQLVNRLAARGIRYSRYVDDISISTTNDLSDSEKRWVVAQIYAMIGRGGFKPQRSKHQYLSSARPITIMGLNANSSRAPTITRRERSRIRALIFQLEQRFASGETGPEFRQSLSHAIGKVGRLKRLHKVEGAALRTRLDTIQAALDALPVKTKASAKFESPPADAIDDHPF

SEQ ID NO: 3766 - protein, 336 aa, unidentified
  source 1..336: note = Related to NZ_CP083589.1; note = Herbaspirillum frisingense
MTKGPAYRYAPILSIQALCRALGCNEPFLRSLAERASGMYIGPKPMQKKSGGIRFVYDTKHPLKDVLKKVNRVFFKKTHYPTYLTGSLDGRDYSTNAGIHAGATGAITEDISQFFPSITADMVYEIWTKLFRFGHEPAMLLTALTTKDGVVFQGTPTGSYIANLVFWSTEHIVVEKLQSLNIRYSRYVDDVTLSKASTLSLDEKTWAISQIYSMIGAQGFKPKREKHGILSGKGAIKIMGLNANAKVSLPRKERSLIRAKVHALEKRFESGEIDFSFRTELNKVSGVVGKMSRFHKHEASQLRGRINVIRRSIELIPIITIGSQYPRTVLPQDVQN

SEQ ID NO: 3767 - protein, 381 aa, unidentified
  source 1..381: note = Related to JAFKGG010000183.1; note = Burkholderiales bacterium
ALGHRPFYELIEQLLRNRRFNNLRCGLAFAWHTDSSSSWYASNTKVLTGSHDPIQSVGSLCRALAIAEPLLCSIAERVPNLYIGPTRKPKKSGNGFRDVYDTRLPLKPLLKRINKVFFERVVFPDYLHGSIRSCDFISNARMHEGSVTVITEDIKGFFDHITEEHAYAIWRRFFGFGEVPSELLTKLVTNGGRVYQGSPTSSYLANLVFWDIEPRMVETLGVRGLRYSRFVDDVTMSHPTSIGTEEKTWAIAQVYAMLGSHGFKPARQKHAIFNGSASRTIMRVNVNEHLTITPAERRQVRAMVHQLEQRVRSGENTSEVRQLLSSAIGKIGRIQRLHPSYAEKLRVQARGIQLTLDEMPFSTESQASFIASQADEGDSPF

SEQ ID NO: 3768 - protein, 313 aa, unidentified
  source 1..313: note = Related to nan
MQYLSYTKENRIQNISSLCLALKIKQDDLLEIANNVQNYYKPPYFIEKKNGGQRCIIDTVDPLKPLLKSINKVFFKNVYFPDYLTGSISGRDYISNVKIHRNSKNIITEDITSFFDNITESHVYDIWRRFFRFSDSVAQILTQLTTKDGKIHQGVPTSSYLANLSLWRHEQHFVNDLKKKGFVYSRYVDDMTISSSNVISREDKTWVISHLIGMLSANTLRIKRSKHAVLTSNKPMNIMGLNINGSKPTTPKKDRDIIRATLHRFDKHPASFSVEDLRSLQGKIINIRRMHVSKGEKFLKQFKETLHKNHITI

SEQ ID NO: 3769 - protein, 313 aa, unidentified
  source 1..313: note = Related to JAHUZX010000055.1; note = Hydrogenophaga sp.
MYFVAKTVLKDDGTERTLYDTRQPLKTVLHRINAHFLRQVVYPEYLTGGVPGKDYTDSVKIHVGARTVVKEDISKFYPSVSFDVVRDIWGRFFGFADEVAELLAMLTTRDGHLEQGAPTSGYLANLALWDVESKLITKLDSIGVTRYSRHVDDITLSSAEHLSSQRIDWVVRAVSAALATKGLLVHTGKHEVMQADGQIKILKLVGNAKPSLPPKERSRVRALVHNFCQRVDAGGSQEELEQLLPRVRGQAYKVKRFHLRSGGQLVERVAQAASLLEDRRSKSPPRISHIGSHLDDSDWLSEHPPVGGAPWEL

SEQ ID NO: 3770 - protein, 348 aa, unidentified
  source 1..348: note = Related to NZ_JSZO01000019.1; note = Ralstonia sp.
MNAPRYRHHRVQSIESLRHPLGMGPSELLALAKRASHLYRIAKTVPKDDGTLRVLYDTREPLKAVLGRINEHFLRRVIYPDYLTGGVPRKDYTDSVKIHVGAKSVIKEDISKFYPSVSFDVVREIWSGFFGFADEVSDLLTMLTTRDGYLEQGAPTSGYLANLALWDIESQLIAQIASAGATRYSRHVDDITISSPEHLSTSRVDWIVRMVAGALASKGLRVNASKHEVMQAGGQIKILKLVGNAKPSLPPKERSRVRALVHTFCLRVESGESPEELALLLPRVRGQAHKVKRFHRRAGERLVEQVNQAAQLLKNQTAEAQPVKQPTPNLVFDEAIAGQQPPESDPPW

SEQ ID NO: 3771 - protein, 323 aa, unidentified
  source 1..323: note = Related to NZ_CP017751.1; note = Cupriavidus sp.
MNEAKYLRRRVRSIEALRHPLGMGPRDLQRLALRASSLYFVATTMPKADGTLRVLYDTRKPLKSVLQRINEHFLRKVVYPPYLTGGVPGKDYTDSVKIHAGAKTVITEDISKFYPSVGLEVVRNIWSGLFGFSDEVADLLAALTTRDGHLEQGAPTSGYLANLALWDVEPALINRLTAMGVSRYSRHVDDITLSSLEPLGTSRVDWVVRTVTRTLASKGLQIHPGKHQVMDAGEQIKVLKLVGNIKASLTPEERSRVRALVHNYCKRVESGDGLEELRALLPSIRGQAHKVKRFHPRVGARLVAEVEQAAQQLQHRMVTWIKS

SEQ ID NO: 3772 - protein, 352 aa, Achromobacter sp.
  source 1..352: note = Related to PYAL01000004.1; note = Achromobacter aloeverae
MTAPRYPHDRIQSIGSLRHPLGMDARELTALAKRASRLYFVAKTIPKNDGTQRVLYDTAKPLKPVLQRINDNFLRRVIYPHYLTGGVPGKDYTDSVKIHIGAKSVIKEDISKFYPSVTFDVVCDIWSGFFGFSHEVADLLALLTTRDGHLEQGAPTSGYLANLALWDVESSLIAKLASIGVTRYSRHVDDITLSSQEHLSAARVDWVVRTVAAALARKGLLVHAGKHEVMHAGGQIEVLKLIGNTKPSLPPKERSRVRALVNNFCRRVESGDSVEELQSLLPRIRGQAYKVKRFHRRKGEQLIEQIDRVAKILRARAGEAQPNIDKLQRDMVDSYSANESFGRQSAVVDPPW

SEQ ID NO: 3773 - protein, 302 aa, unidentified
  source 1..302: note = Related to NZ_JACHHM010000015.1; note = Parapusillimonas granuli
MEPNELLRLAKRASRMYFVAKTVPKDDGTQRILYDTRKPLKTVLHRINEHFLRRVIYPDYLTGGVPGKDYTDSVKIHVHAESVIKEDISKFYPSVSFDVVYDIWSSFFSFSNEVAELLTMLTTRDGHLEQGAPTSGYLANLALWDIEAPLVAKLASIGVTRYSRHVDDITLSSPDHLSASRVDWVVRTVATALASKSLLVHPGKHEVMHAGRRAIEVLKLVGNTKPSLPSKERSRVRALVHTFCRRVEAGDSGEELERLLPRVRGQAYKVKRFHQRIGEQLVLQVDQAAKLLRDSPSDVGSR

SEQ ID NO: 3774 - protein, 310 aa, Achromobacter sp.
  source 1..310: note = Related to JAKLXU010000051.1; note = Achromobacter xylosoxidans
MYFVAKRIPKEDGTIRVLFDTRQPLKAVLQRINSQFLRKVHYPPYLTGGVPGKDYVSSTRLHAHATLVIKEDIRTFFPSVHADVVLDIWERFFGFSTDVAQLLTLLTTRDGHLEQGAPTSGYLANLALWDVEARVVSQLARECELTGYSRHVDDICVSSPTPISASQKARAVSLIFGMLASKNLAPKRAKHITMHGGQQIRILKLVANRKPSLSAIEQSRIRAAVHQFCRRAANLGDPTSLRAELPKIRGLAHHLKRFHPRKGAVMLAAIDTVARALNSTDVAQSDVAPTVSTFSGPVATNAPDSQAPWD

SEQ ID NO: 3775 - protein, 318 aa, unidentified
  source 1..318: note = Related to CABVQR010000004.1; note = Burkholderia contaminans
MSSASYPHARIQSVESLRHPLGMGPVGLRRLAKRASDMYFVAHRIPKDDGSERIVYDTREPLKSVLRRINQHILRRVVYPDYLTGGVPGKDYKSNVEIHVGAATVVKEDISSFFPSVSEVLVFDIWHRFFGFSTDVAEVLTALTTRDGHLEQGAPTSGYLANLALWDVEPNLVHRLAEEGFTAYSRHVDDIVLSSNEELEGGEIAWAVSQIYGTLRKKGLQAKRAKHEVMRLNRPIVILKLIGNEKASLPARERSRVRAVVHRFCTNIESGVDIALLEADLPSVRGLVHKVKRFHPTEGNKLVAQVEQAVQLMRASNG

SEQ ID NO: 3776 - protein, 340 aa, unidentified
  source 1..340: note = Related to VIFK01000111.1; note = Spiribacter salinus
MVGNDPLVPRYPHRPIGSIDALARHLGVSRRELERLTRAAPRLYRANPLPKKGGGFRWTYDARPPLKRLHAAIKEKLLQPVEYPSYLQGSIRDPDTPREPLTNADLHAGNYLFIQEDVAGFFGSIGPSVVNDMWRRFFAFPADVSEILTNLTTLKGLVPEGARPSSYIANLALWDVEPQLVRELQGRGFVYSRYVDDVVISAPRNLSHEEKTEVVGRLYGMFAAKGLRAKRQKHSIAKKGQAAGKGRGVTVTGYSVAGGRAAVSKAERNRVRSAVRQIEVEARTRGTSPELQARFQSASSRVDRIARAGSAQGVRLRQRLAELKPSVFPKSNRRDIYGGG

SEQ ID NO: 3777 - protein, 315 aa, unidentified
  source 1..315: note = Related to PAQT01000005.1; note = Xanthomonadales bacterium
MRAHYPKQPIGSISALSRALDVEEDLLTHIGANVSTFYRPGPPQPKKDGTLRITHNAAPELKGIHRKINKRLLQEVQYPDYLHGSIRVINDPRSIKTNAALHTNQKTILCEDVAGFFDATTPALVRKVWQHLFCFPPTVAELLTKLCTHDGFLPQGWRCSSYLANLVLWEDEDRLVRNLRCRGFTYSRYVDDMTISAPRFLSRADKSWVVQSLISTLARNGYRLKRGKHEILKAAGTMKVNGQIVNGKRPTLSTKYRNNVRWNVYALQKMHALDASSEEYRSRWESCSGKAIRVASYHERTGQKLLDQLSAIAPQ

SEQ ID NO: 3778 - protein, 335 aa, unidentified
  source 1..335: note = Related to CP013360.1; note = Burkholderia thailandensis
MKSLQNKPCYKNAPIKNVGALARTLRLTEPQLIQLARNASHMYRRVPVPKKDGTTRHTWDAQKQLKEVHGIINSRIFHRTTFPLFLQGGIHDPLYPRDYVRNADIHVDPSILVTLDIADFFPSTSDSAVMGIWSDFFRFPPAVAKLLTMLTTKDGFLPQGARTSSYLANLAFFRSEHDLVACLERQGWRYSRLVDDITISKQRRASDDELTQVNTTLFAFVNRHGYSVKRSKHDVQRRNARMSVNGLVVNKKVSLPKSQRRSIASVLHRTNAAIDVGEGHTMPVNRVRGQVAMVKRMHPELGEKMLARLKQSISAAESRPAIELNDCETVPLDER

SEQ ID NO: 3779 - protein, 319 aa, unidentified
  source 1..319: note = Related to NZ_CP047386.1; note = Pandoraea fibrosis
MTEPQLLQLARNASRMYRKVPVPKKDGSTRYTWDAQKQLKEVHGHINSRIFHRTMFPLFLQGGIRDRLHPRDYVRNAEIHVDPTILVTLDIADFFPSTSDSAVMDIWSKFFRFSPAVAKLLTMLTTKDGFLPQGARTSSYLANLVFFSDEHDLVARLERQGWRYSRLVDDITISKQQRVNSDEVTETNRMLFAFVNRHGYSVKRPKHDVQRSNARTSVNGLVVNKKVSLPKPQRRSISSLLHRTNLAISIGEESTMPVSRVRGQAAMVKRMHPELGEKMLERLKQSLSVGARRPAVMPDDQEVSPPIRRQTKRKNSPGT

SEQ ID NO: 3780 - protein, 338 aa, unidentified
  source 1..338: note = Related to JAHPLT010000004.1; note = Burkholderia gladioli
MKSPLNKPFYKNAPIKSVGALAQTLQLTERQLLQLARNASRMYRKVPIPKKDGTTRYTWDAQKQLKEVHGLINSRIFHRTTFPLFLQGGIRDQLYPRDYVRNADIHVDATTLVTLDIADFFPSTSDSAVMDIWSTFFRFPPVVAALLTMLTTKDGFLPQGAKTSSYLANLAFFRDEHDLVTRLQKQGWRYSRLVDDITISNQRRVSNDEVAAVNRTLFAFVNRHGYSVKRPKHDIQRCDARMSVNNLVVNKKVSLPKSQRRSIASLLHRTSEAIFVGEECAIPINKVRGQIAMVKRMHPELGEKMLARLKQSISAVENRPTIVLDDQEAVSSTSDAQL

SEQ ID NO: 3781 - protein, 323 aa, unidentified
  source 1..323: note = Related to NZ_FNCJ01000045.1; note = Paraburkholderia phenazinium
MSSRPNKPSYNFAPIKDVRTLALALGLAERQLNRLAVNAGNMYRRKPIAKKDGTERVTWDAHKQLKEVQGRINQLFFHKVLFPLYLQGSIRDKAYPRDYVRNAEIHAGACVAVTLDIADFFPSTRAELVQDIWRDFFRFAPPVAEVLTRLTTKDGFLPQGARTSSYLANLVFWQREHCLVETLEKRGWRYSRLVDDITISKATDTSQAELTDINRIAIGCFQGYGYSVKRSKHKVLRRNHRITVNSLVVNVHPALPKDERRRIGAQVHQVKEALTSGTQADVPSVASTRGKIAKVVRLHPELGSRLSDKLRQAIPLDTEGSPE

SEQ ID NO: 3782 - protein, 325 aa, unidentified
  source 1..325: note = Related to UFTG01000001.1; note = Bordetella avium
MSRPNRPLYKGDEIASSDALAEVLGLTSPQLHQLAANASKMYRENPQRKKDGSLRMTWDAHPQLKKAQKQINLRIFGRILFPLYLQGSIRDRAYPRDYARNANIHSGAAVTIAIDIQDFFPSITPDQVLSAWLGVCHFPWQVAELLTRLTTKDSFLPQGAPTSSYLANLVLWENEHELVRTLQTRGWHYSRLTDDITLSKKAPVEKDEITRTTCTAIGFIQRNGFTVKRSKLKVMKRNVPMTVNNLVINEHPALPKAERRQIRAQLHQAKLALASGALVDAQAINSARGKVGKVVRFHPQLGAKMKGELDQELDSWTVRQLNDEG

SEQ ID NO: 3783 - protein, 354 aa, unidentified
  source 1..354: note = Related to MGYT01000040.1; note = Gammaproteobacteria bacterium RIFCSPLOWO2_02_FULL_61_13
MHPNLLKPFYSHGPIQNLDTLAEVLEISCKQLCRLARKANQMYRLVPQQKKDGSVRKTYDADHALKRVQHLIKTRILSKVRYPLYLQGGIRDPENPRDYARNAAIHAGQACVINEDIADFYPSTTSHQVRDIWKHFFRFPAGVADCLTRLTTRRGFLPQGAKTSSYLANLVFWRTEYELVRHLAAKGLRYSRLADDITGSSSKPLTRGQKSEVISAVYSFIKRDGFSPKYRKHAIFERNEAMLVNNLVVNAHPALPVRERQAVRCLVHRASNTLNAGNGTVSNVPLAHIKGKIGKVKRFHARAGRRLAATLQAALTSVQKLDGSGAHHRGRVDRDHRNARRYDGHLHAPAPAGS

SEQ ID NO: 3784 - protein, 319 aa, unidentified
  source 1..319: note = Related to nan
MNRLCFRGRPIASIEALASTLHVSPRYLWWVIERTDRLYRPMKPIIKPDGSVRQTYNPAAPLKDVQRRINRNIFSRVEFPIYLQGGIRDRKTPRHCVANAQLHTNAAIVINEDIAGFFPSISRQQVQDVWQHFFRFPLAIAETLTALTTYNGALPQGAPTSSYLANLVLWRQEPELVTNLAARGIRYSRYVDDITLSSKRFLNNHLKADAVRQVRRLCNGNGFRMKGRKERIETSGKPMRVNNLQINHGVTLPKKERARIRAAVRVCEVYPAESRDSSEYQKLLNSTLGRVSRLRQLHPKEGADLMRRLTIMRGASRSK

SEQ ID NO: 3785 - protein, 319 aa, unidentified
  source 1..319: note = Related to nan
MNRPRFKGRPIGSIEALARALYVSLRQLHWAIGRADALYRPMKPITKPDGSVRQTYNPAAPLKEIQRSINRNIFSRVKFPIYLQGGIRDRNNPRHCIANAKLHCGATIVFNEDIFSFFPSITRRQVQDVWQNLFRFPPEIAEALTILTTYQGILPQGAPTSSYLANLVLWRQEPELVTNLAARGIRYSRYVDDITLSSRRFICNHQKAEVIQQVRRLCNGNGFRMKGCKERIETSGKPMCVNNLQINHGVTLPKKERARIRAAVRACEVYHSESRDSSEYQKLLNSTLGRVSRLRQLHPKEGTDLMRRLTIMTEVSRSK

SEQ ID NO: 3786 - protein, 315 aa, unidentified
  source 1..315: note = Related to nan
MNQPCFKDKPIASTAALARALHIPHRHLTWATNRADRLYRALQPMVKPDGSIRQVFNPARPLKDIQRRINRHIFGRVDFPFYLQGGIRDRKNPRHCLANAKLHSDAKIVINEDISGFFPSITKRQVQNIWQHFFRFPPDIAIILTKLTIHDGQLPQGAPTSSYLANLALWEHEPPTVEALFIKGIRYSRYIDDITLSSTYFQNDHSKTAMIRKVRSMCNRNKYEVKRSKHRIESSGQPMRINNLQINNGISLPKRERACIRAAVHSCEKHIEEERTANEYHVLFNSTVGRVNHLRQFHRHEGKRLLKRLDACAPL

SEQ ID NO: 3787 - protein, 302 aa, unidentified
  source 1..302: note = Related to JAIEPW010000014.1; note = Bryobacteraceae bacterium
MENAADSLYRPVMVKKKDGTRRECFDAKPPLKAMQARIQNMIMKKVIYPGYLTGGLADPKTPRDYVRNAEAHTGARLMVNEDVAKFFPSTTHEVVYDIWRFVFRFPKEVARTLTRLTTRCGELPQGAKTSSYLANLVFWAHEPRLVQWLHNAGFRYTRYIDDITLSSTADKTREELGQAIGRVASMLRRHGLRFKRSKHHIAYAGERMEVTGLTVGERSVGLSRKRKSMIRASVRQCEWAAKKGIFDDAMQKSAASLVGQYTRLHRNKGKALKRRLAALEVSRKLPAIEPVVSAVGIEPTTR

SEQ ID NO: 3788 - protein, 373 aa, Pseudomonas sp.
  source 1..373: note = Related to JABFMR010000045.1; note = Pseudomonas corrugata
MDAPIYPFKPIHSIRALALALGESEQLLERLATRADQMYRHVPQEKKVKPGKPPEMRDTYDAHEPLKRVQRKLVDRILSKATFPPYLHGGIKDRKSPRSIHSNAAVHAGARFVILQDIRNFYPSILKRHVDALFRGLFGFGASVAALLSSICTREGSTPQGASTSGYIANLVFWDVEPKIVKGLLGRGFQYTRFADDITISCGRKPSSDELTNIVSTITGMLAAKGCHQKRTKLHLRVRGQGIKADGAIFQPVTVTGLSVFNSSPGLTKLERRRIRSAVREFEVMSESTNNWSDLESTYHRAMGRVGRLLACGHPDGAMLKERLNLVMRSYQAPLLERYQQAIVANSNTETSSLAAPPILEYSSEQDGPLPWQ

SEQ ID NO: 3789 - protein, 356 aa, Pseudomonas sp.
  source 1..356: note = Related to SUQH01000001.1; note = Pseudomonas koreensis
MDAPTYPFKPIHSLRVLALALGESEQLLERLAARADRMYRHVPQEKKVKPGKPPETRDTYDAHEPLKRVQRKIVDRILCNATFPQYLHGGIRDRKSPRSIHSNAAIHAGARFVILQDIKNFYPSISIKHVDALFRGLFGFGAGVSVLLSSICTREGCTPQGASTSGYIANLVFWDVEPKVVNDLLGRGFRYSRFADDVTISSGHEPSSDDLTNIISTITGMLAAKGCHQKRTKLHIRVRGQGIEADDATFQPITVTGLSVFNSSPGLTKLERKRIRSAVRELEVMSESTSDWTVLEPKYHRAMGRVGRLLACGHPDGEALKARLNVAKRSCQIPLLERYQQAISESLAKAVEVDVE

SEQ ID NO: 3790 - protein, 374 aa, Pseudomonas sp.
  source 1..374: note = Related to NZ_CP066306.1; note = Pseudomonas putida
MKAPLYPHKPIHSIRALALALGESEALLERLAARADRMYRHVPQEKKVKPGQPPETRDTYDAHEPLKRIQRKLVDRVLSKAIFPTYLHGGIRDCKSPRSIHSNAAVHAGARFVILQDIRNFYPSISKSHVHAMFRGLFGFGAGVAELLSSLCTRSGSTPQGASTSGYIANLVFWDVEPKVVSDLSGKGFQYSRFADDITISCTREPEADELTGIVSAITGMLASKGCHQKRSKLHVRIRGQALKSEGTTFQPITVTGLSIFNASPGLTKSERKRIRSAVRELELSSETTSNWVELEPMYHRAMGRVGRLLACAHPDGESLKVRLNLIKRSYEKPLLERYQQEIVEQSAREINNVSCARTLPSQPTEPVDSPPWE

SEQ ID NO: 3791 - protein, 360 aa, Pseudomonas sp.
  source 1..360: note = Related to NZ_AUEA01000002.1; note = Pseudomonas cremoricolorata
MKSLALALGESEQLLERLAARADRMYRHVPQQKKVKPGMPPETRDTYDAHEPLKRVQRKLVDRLLSKAVFPAYLHGGIKDRQSPRSIHSNAAVHAGSKYLVLQDIQNFYPSISMQQVDALFRQLFGFSTPVATLLSSICTREGSTPQGASTSGYIANLLFWDVEPKIVEDLMGRGFQYSRFADDITVSCRHEPSSDELSDIVSTITGMLASKGCRQKRAKLHIRVRGQGIKADDATFQPVTVTGLSVFNPTPGLTKSERKCIRSAVRELELMSEAGSRWLDLEPVYNRAMGRVGRLIACGHPDGKAFKGRLNAVKLSHQTPLLDRYQLAATGVAESATPPVGVGLREPYSAERDGPLPWD

SEQ ID NO: 3792 - protein, 348 aa, Pseudomonas sp.
  source 1..348: note = Related to CP068034.2; note = Pseudomonas syringae
MEAPIYPFRPIHSTQALALALGESEHLLERLAVRADRMYRHVPQKKKGRPGETRDTYDAHEPLKRVQRKLVDRVLSKAIFPAYLHGGIRDLKSPRSIHSNAAVHAGARFVILQDIRNFYPSISKIQVDALFRGLFGFGASVAALLSSICTRDSCVPQGASSSGYIANLVFWDVEPKVVKDLQDRGFQYSRFADDITISSGQEPSTEEISTIVSTITGMLASKGCRQKRTKLHMRIRGQGIKSNDATFQPVTVTGLSVFNSAPGLTKLERKRIRSAVRELELLRELTSDWADLEPKYHRAMGRVGRLLACGHPDGVALKSRLNVVKRSYQKSLLERYQQSENASPNSDS

SEQ ID NO: 3793 - protein, 348 aa, Pseudomonas sp.
  source 1..348: note = Related to JAFIBJ010000001.1
MEAPIYPFKPIYSAQSLALALGESEHLLERLAVRADRMYRHVPQKKKGKPGETRDTYDAYEPLKRVQRKLVDRVLSKAIFPAYLHGGIRDLKSPRSIHSNAAVHAGARFVILQDIRNFYPSISKIQVDTLFRGLFGFAAGVSALLASICTRGESTPQGASTSGYIANLIFWDVEPKIVKSLTDRGFQYSRFADDITISCIREPSSEELSDIVSTITGMLASKGCHQKRSKLHMRVRGQGIRADDATFLPVTVTGLSVFNGTPSLTKLERKRIRSAVKELEVISGSMPEWAALEPMYHRAMGRVGRLLACGHPDGEALKARLNVIKRSYQTPLLERYQQTLNAEYEGLN

SEQ ID NO: 3794 - protein, 350 aa, Pseudomonas sp.
  source 1..350: note = Related to NZ_JABWQV010000038.1; note = Pseudomonas tehranensis
MDAPTYPFKPIHSIQALALALDESERLLERLAIRADRMYRHVPQEKKGKRRDTYDAHEPLKRVQRKLVDRVLSKAIFPAYLHGGIRDRKSPRSIHSNASVHAGARYVILQDIRNFYPSILKSQVDDLFRGLFGFGASVSALLSLICTRDGCAPQGASTSGYIANLIFWNVEPKIVQDFLAQGFQYSRFADDITISCSREPTSEELSGIVSTVTGMLAAKGCHQKRTKLHMRVRGQGIKGDDATFTPLTVTGLSVFNGAPSLTKLERKRIRSAVKELEVMSESTPGWAVLEPKYHRAMGRVGRLLACGHPDGEALKARLNVVKRSCQIPLHERYQQAISECLAKAVEVDVG

SEQ ID NO: 3795 - protein, 336 aa, Pseudomonas sp.
  source 1..336: note = Related to NZ_CP027732.1
MDAPTYPLKPIHSIQALALALGESERLLERLAARADRMYRHVPQEKKGKKRDTYDAHEPLKRVQRKLVDRILSRAIFPRYLHGGIRDIKTPRSILSNAAPHAGAKYVILQDIKNFYPSISVDQVEALFRGLFGFGVPVSALLSSICTREGSTPQGASTSGYIANLIFWDVEPKIVRSLLDDGFQYSRFADDITISSGRKPSSDELSFIVSTVTGMLASKGCHQKRAKLHMRVRGQGIKEDDQTFKPLTVTGLSVYNSAPGLTKLERKRIRSAVRELEIASESVRDWNVLEPMYHRAMGRVGRLLACRHPDGEALKARLNTLKHSHQKPLLERYQQV

SEQ ID NO: 3796 - protein, 370 aa, Pseudomonas sp.
  source 1..370: note = Related to NZ_UWCS01000683.1; note = Pseudomonas viridiflava
MDAPTYPFKPIYSLRALALALGEDERLLERVAARADRMYRHVPQEKKGTKGEIRHTYDAHEPLKRVQRKVVDRILAKAKFPLYLHGGIRDVSSPRSILSNAMVHAGARYVVLQDIENFFPSISTHQVFRIYRDLFGFGEPVSMLLASISTREGSTPQGASTSGYLANLLFWDVEPKVVNELFIRDFRYSRFADDITISSERKPTPQELADIISTITGMLASKGCRQKRKKLHVRVRGQGVKVAEGDYEALTVTGLSVFNSTPGLTKLERKRIRSAVRELEILASSTPSWSTIEPRYHQVMGRVGRLLACGHPDGEALKIRLNSVKRLCQVPLLERYRLGLSDDKDVLELACSSASGVAPSLGVNEPLPWE

SEQ ID NO: 3797 - protein, 342 aa, Pseudomonas sp.
  source 1..342: note = Related to JAHRDY010000001.1; note = Pseudomonas viridiflava
MEYPLYPHRPIHNLNSLALLLGEPLSLLIKLARNSDKLYRKVPQVKKDGTTRETFDASEPLKSIQRKVVDRLLVKVLFPNYLHGGIRDINSPRSVYSNVKTHVGARSIILQDIKNFFPSITLERVFSVFKGLMGFSDAVSNVLAHLVTRYGAVPQGASTSSYIANLVFWDVEPRLVAWIRNQKMAYSRFADDITISSFDMISDDLKTEVVRRVTGMLAAKGFAQKRQKLHVLKRGQAITKANQSEVAVITGLSVAGPRPGVTKEERKKIRSAVKEFETLALMNPDSDRLKELYNRAMGRIGRLLACGQSDGFALKQRMNIAFEKTKKSIFVKHAFIENTVPD

SEQ ID NO: 3798 - protein, 343 aa, Pseudomonas sp.
  source 1..343: note = Related to NZ_AZRW02000052.1
MDSPLYPYKSIHNIKSLALLLGETVPLLNKLAEDSHKMYRRVPQVKKDGSERETFDAHEPLKSVQRKIVDRLLAKVSYPDYLHGGIRDSNYPRSIYSNVKSHSGARNLVLQDIKNFFPSITIDKVLSIFKGMMGFGDEVAVMLTRLVTKGGIVPQGASTSSYIANLVFWNVEPRLVVWIRALGMSYSRFADDISISSKNIILPDQKTEIVRRVTGMLAAKGFLQKRQKMHVLKKGQTITTAKKPEPVVVTGLSVAGPRPGVTKEERKKIRSAVREFEILAEAGADLIKLRELYNRAMGRVGRLLACGQSDGLALKNRLNLAMRQCNKPLLEKYEKGEVGGISI

SEQ ID NO: 3799 - protein, 348 aa, Pseudomonas sp.
  source 1..348: note = Related to NZ_CP016849.1
MDKPRYSQKPIFNIESLALRLGESPMLLNNLARNSHRLYRTVPQQKKDGSVRETFDAHQPLKAIQRKIVDRIFSGVIFPDYLHGGIRDVNSPRSIYSNVACHAGARVVLMQDIKNFFPSITEDKVLGVFKGVLGFGDDVSSLLVKLTTRRGVVPQGASTSSYLANLVFWDVEPRLVTWVKANNLSYSRFADDITISSKGDVRDELKTDVIRKVTGMLASKGFYQKRQKMHVLKKGQVIVTKGGVEPFVITGLAVSGPNPGVAKFERKKIRAAVKEFEDLIGSGVFVSDVENKYNSAMGRVGRLIACGQSDGIILKERLNAARLKASVPLLEKYLAANIIPVVQAKVEE

SEQ ID NO: 3800 - protein, 347 aa, Pseudomonas sp.
  source 1..347: note = Related to NZ_CP027722.1; note = Pseudomonas chlororaphis
MTTARYTRKPVYSLKTLGLMLGESPELLLRLGASSSGFYREVLQQKKDKSVRVTFDAFQPLKRVQRKIVDRLLIHVSYPSYLHGGIRDVDSPRSPLSNARAHLGAKSIALQDITNFFPSISRDKVRNIFTGLFGFGSGVAELLSLLVTKDGFVPQGASTSSYLANLVFWDVEPRLVSWIHSQNLIYTRFADDITISSKVLVSDEQWTEIISKVTGMLATKGFKQKRTKLHVLKKGQALTKGNKPEPLVITGLGISGSSTGVVKAERHKIRAAVRQFEAAIESGSSFDEVAHLYHSAMGRVGRMLACGQPSGFEFKKRLNEAKRLGQISLIDKYIAETSAVSDEEVRG

SEQ ID NO: 3801 - protein, 346 aa, Pseudomonas sp.
  source 1..346: note = Related to NZ_AP014637.1
MDAILYHCRPIYSLKSLALALGESVEFLGWLACQADSLYRPVQLVKKDGTPRYAYDARADLKKVQRKIVDRILARVVYPKYLHGGIKDADFRRSIYSNANLHTGAKSYIVQDISNFFPSISFAKVYDVFSLFFNFGHVVAHLLTRLVTRAGVVPQGASTSSYLANLVFWDVEPEVVLGLKEKGFCYSRFADDITVSSPSALSADEKTEIVTKVTGMLARKGFKQKRSKMHVLKKGQAIALSNGKYEPALITGLSISGPKPVITKKERNRIRGLVKNYQALIDMGRPDSELEKVFHKVMGQVGRIIACGQAEGAELKKTLNEARRLSKKSIFERHDSLINASESSQA

SEQ ID NO: 3802 - protein, 371 aa, Pseudomonas sp.
  source 1..371: note = Related to NZ_LT629782.1; note = Pseudomonas orientalis
MDAPFYPHSSINSIKALARALGEPAERLLALAQRSSRLYRYVPQTKKDGITPRHTYDAHEPLKTIQRKIVDRVLSKVTYPEYLHGGIRDPKLPRSIYSNARIHIGAKTVILQDIADFFPSITTEHIQRLFVGLFRFSADVASLLASLVTREGQVPQGASTSSYLANLVFWDIEPALVTRFKAQGMAYSRFADDITVSSKTRIASAATTQVIASVTWMLGQKGCLQKRSKLHVRKRGQALITGEKAEAVTVTGLVVNGPIPALPKKARLAIRSAVKQLEDRVRGNSGQLSAEDDKEVRRVMGRIGRLIACGHPEGPRLKARVRVLLARTPLFKRYAAGVEIQPLVVADTPLGLNAVANTLPHGQRELPWYTE

SEQ ID NO: 3803 - protein, 373 aa, Pseudomonas sp.
  source 1..373: note = Related to CP074410.1; note = Pseudomonas syringae
MDAPFYPHSPIHSVKALARALGEPAERLLALAQRSSRLYRYVPQTKKDGVTPRHTYDAHEPLKTIQRKIVDRMLCKVIYPEYLHGGIKDAKLPRSIYSNARVHIGAKTVVLQDIADFFPSITTEHIHRVFVGLFRFSPVVATLLASLVTREGQVPQGASTSSYLANLVFWDVEPALVKRFAAQEMAYSRFADDITVSSKTHISPIATTQIIASVTWMLGQKGCLQKRSKLHVRKRGQALITGDKADAVTVTGLVVNGSIPALPKQARLAIRAAVKQLEDRVEGNSGQLSAEDEKEVRRVMGRIGRLIACGHPEGQRLKARVRAVLTKETLFKRYTADPEFHPHVVAATSEKRGVPVSSIGSIKPLRDPPWNKE

SEQ ID NO: 3804 - protein, 371 aa, Pseudomonas sp.
  source 1..371: note = Related to CP077084.1; note = Pseudomonas tritici
MDAPFYPHSPIHSISALARALGEPVERLIALAHRSSRLYRYVPQTKKDGITPRHTYDAHEPLKTIQRKIVDRILSKVAFPGYLHGGIRDPKLPRSIYSNARVHTGAKTVILQDIADFFPSITNEHIHRLFVGLFRFSADVATLLADLVTREGQVPQGASTSSYLANLVFWDIEPALVTRFKAQGLAYSRFADDITVSSKTRIDQATTSQVIASVTWMLGQKGCLQKRSKLHVRKRGQALITSDKADAVTVTGLVVNGPIPALPKKHRMAIRAAVKQLEDRFEGNSGQLSADDEKEARRVMGRIGRLIACGHPEGQRLKARVRVLLMRAPLMERYADTEFQVQMVAETTADLDVAASSLQIDLPVDLPWKVG

SEQ ID NO: 3805 - protein, 362 aa, Pseudomonas fluorescens
  source 1..362: note = Related to MOBU01000006.1
MDAPLYPHSPIHSINALARALGEPAERLLALAQRTSRLYRYVAQTKKDRITPRHTYDAHEPLKTIQRKIVDRMLRKVVYPRYLHGGIRDRKLPRSIYSNARVHTGAKTVILQDISDFFPSITTEHIQRLFVGLFRFSADVASLLANLVTREGQVPQGASTSSYLANLVFWDIEPALVTRFEAQGLAYSRFADDITVSSRSPISAAVTTQVIASVTWMLSQKGCLQKRSKLHVRKRGQALLSGESAEAVTVTGLVVDKPIPGLPKKVRLAIRAAVKQLEDRVKGDLRQLRAEDEKEARRLMGRIGRLIACGHPEGQRLKARVRVLLTRAPLLESYAADADHQPRLPAAKLPSSYPDTPTISDQ

SEQ ID NO: 3806 - protein, 373 aa, Pseudomonas sp.
  source 1..373: note = Related to MOAT01000002.1; note = Pseudomonas protegens
MDVPFYPHNPIHSVKALARALGEPVERLLALAQRSSRLYRYVPQTKKDGITPRHTYDAHEPLKTIQRKIVDRMLCKVTYPGYLHGGIKDAKYPRSIYSNARVHTGAKTVILQDIADFFPSITTEHIHRIFVGLFSFSAEVATLLANLVTRDGQVPQGASTSSYLANLVFWDIEPALVIRFKAQGLEYSRFADDITVSSKARISPAATTQIIASVTWMLGQKGCFQKRSKLHVRKRGQALITGEKAEAITVTGLVVDKPIPALPKKARLAIRAAVKQLEDRVHGYPGQLSIEDEKEVRRVMGRIGRLIACGHPEGQRLKTRVRALLTRAPLLERYVADAEFQPQMVAATSGELSVMAASALPIDLPLDLPWEAG

SEQ ID NO: 3807 - protein, 384 aa, Pseudomonas sp.
  source 1..384: note = Related to JAJSRK010000022.1; note = Pseudomonas putida
MEAPLYPHSPIYSVKALARALDEPFERLVALAKRSSRLYRYVPQFKKDGITPRHTYDAYEPLKTIQRKIVDRILSKVNYPRYLHGGIKDAKQPRSIYSNARVHAGAKTVILQDIADFFPTITTEHIRLIFTGLFRFSEDVGALLAALVTREGQVPQGASTSSYLANLVFWDIEPALVARFKAQGLEFSRFADDITVSSKSNLRDAVTAQIISSVTWMLGQKGCQQKRSKMHVRKRGQALLRTEKAEAVTVTGLVVDRPTLSLPKKERMAIRAAVKQLELRVVGHQGQFSEEDDREIRRVMGRIGRLIACGHPDGQRLKSRVRALLMAAPLLDRYMGSDEVPVVMLASTDELVSTESAAVEDLDLPWDVNELSLACKQRSQGSET

SEQ ID NO: 3808 - protein, 353 aa, Pseudomonas sp.
  source 1..353: note = Related to JADLJL010000006.1; note = Pseudomonas guariconensis
MEVLRYPYSPIHSLNALARALDEPAERLVAIAKRSSRLYRYVPQKKKDGITPRHTYDAHEPLKSIQRKIVDRMLTKVSYPDYLQGGIKDARNPRSIYANARVHAGSKVVILQDIADFFPSITVAHVREVFSKLFGFSHDVAQLLANLVTREGQVPQGASTSSYLANLVFWDIEPALIERLKAKGLRYSRFADDITVSSKAEITQDSVTQIIGSVTWMLGQKGCRPKRSKLHVRKRGQALISDEKINAVTVTGLVIDRSFPGLPKKERMAIRAAVKQLEDSACEWPEGPPAEEKKAIQRLMGRIGRLIACGHPDGQRLKARVRTVTRLVPLIERYTPNVVESVTLNQTAQDPAQ

SEQ ID NO: 3809 - protein, 345 aa, Pseudomonas sp.
  source 1..345: note = Related to JABWRM010000011.1
MDALHYPHSPIYSVSALARALGEPTERLIALAKRGSRLYRYVPQTKKDGKTPRHTYDAHEPLKTIQRKIVDRILSKISYPCYLQGGIKDVHAPRSIYANARVHAGSKSIILQDIADFFPSITVAHVRQVFSKLLGFSDEVSELLADLVTREGQVPQGASTSSYLANLVFWDIEPALAERFNAKGLRYSRFADDITVSSKTDMPQEVATLVIGSVTWMLGQKGCRPKRSKLHVRKRGQALISGDKVDAVTITGLVVDGSSPSLPKKERMAIRTAVKQLEDSARDWVGGPPLEMQKDIQRLMGRIGRLIACGHPEGLRLKARVRLVTRRGPPLEQHTQIAGNIEVHS

SEQ ID NO: 3810 - protein, 371 aa, Pseudomonas sp.
  source 1..371: note = Related to AP015029.1; note = Pseudomonas putida
MEAPLYPHRPIYSLKALSLALAEPEALLVAIAKRSSNLYRYVPQKKRDGSPRDTFDAFEPLKAIQRKIVDRILIKVKYPVYLHGGIRDVAQPRSIYSNARSHAGSKSIILQDIKNFFPSITTAHVKEIFSGFFGFSSEVSSLLAALTTRAGQVPQGASTSSYLANLVFWNVEPALVKQLGSEGLAYSRFADDITVSSKSEILPEAKSRIISAVTWMLSQKGCQQKRSKLHIRRRGHSLLEVSEPGAVTVTGLTVDRASPGIPKDERRLIRAMVRRIELQAAAEPGPLSIDLEREVRRLMGKVGRLIACGHPDGLRFKARLRTLLVRVPVLERYADTLPINEIEALTSNSDVQDGGIFIPPWEIETPTTDRV

SEQ ID NO: 3811 - protein, 375 aa, Pseudomonas sp.
  source 1..375: note = Related to NZ_KZ987399.1; note = Pseudomonas putida
MDAPLYPHRPIYSLKALSLALAEPEALLVAIAKRSSNLYRYVPQKKRDGSRRDTFDAYEPLKAIQRKIVDRILTKVKYPAYLHGGIRDAVQPRSIYSNARSHAGSKSIILQDIKNFFPSITTAHVEEIFSGLFGFSNEVSSLLAALTTRAGQVPQGASTSSYLANLVFWDVEPTLVKQLSSEGLAYSRFADDITVSSKSEIPPIAKSRVISAVTWMLSQKGCQQKRSKLHIRRRGQSLIQVNEPGAVTVTGLTVDKVKPGIPKDERRLIRAMVKRIEIQAAAEPGPLSIDLERECRKLMGKVGRLIACGHPDGLRFKARLRALLVRLPVLERYTEASPDHENGVVVRGTADQYSSEYGDVIIPSWDIDVPSAHGV

SEQ ID NO: 3812 - protein, 349 aa, Pseudomonas sp.
  source 1..349: note = Related to BMDE01000009.1; note = Pseudomonas fluvialis
MDAPRYPCKSIHSLKALSLALGEPVELLLSLAKRSSNLYRHVPQTKKDGSVRHTYDAHEPLKKVQRKIVDKFLARVRYPDYLHGGIKDPNSRRSIYSNARIHGKAKTILLQDIKDFFPSIGVQHVQQIFSGLFGFSDEVAQVLALLTTRHGVVPQGASTSGYLANLVFWDTEPALVARLHARGLKYSRFADDITISAMTTLERSALTGLVAAVTDMLAKKGCQQKRTKLHIRKRGQSLLAKPKVEAGYEPLTVTGLSVFNEAPGLPKAERKAIRAAVKQAEDQASQGASWAQLEPTFRSVMGRVGRLIACGHPDGERYKLRLKALKTRCQVPLLDRYAAAATGADVPVV

SEQ ID NO: 3813 - protein, 328 aa, unidentified
  source 1..328: note = Related to PARA01000024.1; note = Pseudomonadales bacterium
MDAPRYPYKPIYSLKALSLALGEPVELLKSLAKRSSSLYRHVPQTKKDGSVRDTYDAHQPLKAIQRKIVDKFLARVRYPDYLHGGIKDPSSPRSIYSNALTHGKAKTILLQDIKDFFPSIRVQHVEHIFTGLFGFSEEVAQLLALLTTRNGVIPQGASTSGYLANLVFWDIEPTLVSRLNLRGLKYSRFADDITISAMMPLDGLVLTELVGAVTVMLAKKGCQQKRSKLHVRKRGQTIQAKAGFEALTITGLSVFNAAPSLTKAERKAIRAAVKQVEDQATQGGSWGQLEPTFRSVMGRVGRLIACGHPDGERYKQRLKSVQEHCYKK

SEQ ID NO: 3814 - protein, 348 aa, Pseudomonas sp.
  source 1..348: note = Related to NZ_MUJK01000005.1; note = Pseudomonas laurylsulfativorans
MDAPLYPFKPIYSLKALSLTLGEPAELLESLAKRSSNLYRHVPQTKKDGTPRDTYDAYEPLKAIQRKIVDRLLARVRFPGYLHGGIKDPVKRRSIYSNAHIHGRAQCVVLQDIKDFFPSIKTQHVQQLFVGLFGFSETVAGILALLTTRHGVVPQGASSSGYIANLVFWDIEPALVAKLNTQGLNYSRFADDITITSTKPLDSSALTSIVSAVTNMLAQKGCYQKRSKLHIRKRGQTVLSKNGFEPLTVTGLTIFNAVPGIPKAERKAIRSAVKQLEDQATQGMTWSELEPLVRRVMGRVGRLIACAHPEGDRLKQRLHALKARSQVALLDRYAAALQDATVTGQIPG

SEQ ID NO: 3815 - protein, 300 aa, Pseudomonas sp.
  source 1..300: note = Related to FOAR01000004.1; note = Pseudomonas agarici
MIGLISFWGQEMDAPLYPFKPIYSLKALSLTLGESVELLESLAMCSSNLYRYVPQEKKDGTPRDTYDAFQPLKSIQRKIVDRLLARVRFPAYLHGGIKDPVNRRSIYSNAKVHGNAKFVLLQDIKDFFPSIKVQHVQQIFERLFGFSEEVSKLLALLTTRNGVVPQGASSSGYLANLVFWDVEPMLVARLEAQGLNYSRFADDITISSLTPLNSVMLTKLVSAVTGMLAEKGCYQKRSKLHVRRRGQTLKMKVIDEFVPLTVTGLTIFNQIPGIPKAERKAIRAAVKQLEDQATQGRTWT

SEQ ID NO: 3816 - protein, 342 aa, Pseudomonas sp.
  source 1..342: note = Related to WIGH01000001.1; note = Pseudomonas stutzeri
MNSALLYLDKHKMDFPSYPCSPIYSLNALSRLLGEPLDVLTRIALKSDSLYRHVPQRKKDGTPRPTYDAHEPLKKIQKKIASRILNRIIYPQYLHGGVKDLKSPRSIYTNCAPHLGKNLIILMDIENFYPSISREHVFSIFNKCLGFSSDVSLLLSTLLTRNNQVPQGACTSSHLANLVFWDLESTTFSYLEENEFTYTRFADDITISTDANKDKKQTGEAVSKVIAMLARKGCRLKRTKFHIRRRGQAIVKDEKLTPITVTGLSPFNKHTLAITQRERNKIRSSVKKIEIRAHAGESWKDLAPSYNRAMGRVGRLISCRHPEGDRLKRRLQMLKTYFEAAV

SEQ ID NO: 3817 - protein, 327 aa, unidentified
  source 1..327: note = Related to nan
MELPKYPNAPIYSINSLSRMLSEPPSALQKLSAKADTLYRSVPQKKKDGSPRETFDAYEPLKSIQKKIALRLLNKTKYPSYLHGGVRDPSSPRSIYSNSRPHLGSCHIILLDIKDFYPSITKSHVTNIFQNFFGFSSDVSDTLSRLLTKDGRVPQGACTSSHLANLIFWDVEPQLVHDLQANGFNYTRFADDITISSASNRDNKTTGEVVSKVISMLKSKNCHLKRSKFHIRSRGQSITGKDGEKFPLTITGLSIYNKSKPSISQHDRNNIRSSVKEIEVKTHEGATWSEIAPLYNRAMGRVGRLISCGHPEGTRLKNRLRMVKNCF

SEQ ID NO: 3818 - protein, 356 aa, Pseudomonas sp.
  source 1..356: note = Related to NZ_CP089067.2; note = Pseudomonas aeruginosa
MDAPYYPCKPIYSLRALSLFLGEPAETLLRLSKNADHMYRLVPQKKKDGSLRETFDAYESLKRVQKKLVSRMFGRVRFPAYLHGGIRDFNSPRSIFSNAGVHAGAKTVVLQDIEDFFPSIRFEYVYSIYQGFFGFEHSVAEVLARLTTKHGCVPQGACTSSYIANLVFWDVEPIVYRALAEKGVRYTRFADDMTISSAIELSNDDIGDVISRIVSMLRSKGCRQKRSKLNVRRRGQGLKKAEGFESLTVTGLTVSNFHGVGITQKERNKIRSSVKEIEIKAHMDMPWSDLEVLYQRAMGRVGRLLACKHPEGERLKNRLNTVKSFYDVSNVRETKVVMGDKFVVLDASGDVPPWVG

SEQ ID NO: 3819 - protein, 343 aa, unidentified
  source 1..343: note = Related to NC_007963.1; note = Chromohalobacter salexigens
MEHTYYPHHPINSLKALNRALGIDEDEIFHALSNISYKEVPIKKKDGAIRVTYDATSALKVVQKKVTSNIFHRVNFPHYIHGCIRDTKTPRNIYTNAYPHAGCKQVILCDIKDFFPSIKAKTVFFIFRHCLGFSPNVSQRLTDLCTYNGTLPQGASTSSYIANLAFWDVEPLLVKKLESLGLTYTRFADDITISAKKSISKSLKTQVLHEVRRTIRKRGCSLKKNKTIVLKRSQVIIGKDKETQETTRNPITVTSLSIHHSSVTISKVERRKVRAFVDKLSKTEFNRVSYHEWCRRYSSAMGRVSRLISCGHKEGEPLKQRLKALKDEHKKFHQRSSNVSGRK

SEQ ID NO: 3820 - protein, 343 aa, unidentified
  source 1..343: note = Related to NZ_CP022134.1; note = Halomonas sp.
MDKIQYPHSPINSLKALHRALRVDESVMSNALQNINYKEVPLKKKDGTTRITYDAAPALKAVQKKITSQIFHKITFPYYIHGCIRDANNPRSIYTNASPHAGKKNIILCDIKDFFPSIKEKTVFFIFRECLSFSPEVSQKLTELCTYNGTLPQGASTSSYIANLAFWDIEPLLVEKLSSFGFTYTRFADDITMSTDKPISTTLKTQALHEVRRAIRKRNCSLKKRKTMVLKRGQVIKGIDEKKQKPTDSPITVTSLSIHHKNLAISKQERRKVRACVYNLEKTNMEEISYQEWCRRYSSAMGKVSRIITCGHKEGEPLKQRLKKLKDVHKRHHLRSSKVSGRK

SEQ ID NO: 3821 - protein, 320 aa, unidentified
  source 1..320: note = Related to JAHCLU010000015.1; note = Halomonas sp.
MRSRCELTSTYPHNAIIDPEHLALLLNTPPEKLKDIANVASGSYRPVPQMKKDGTPRMTYDAYPELKRIQHQIVKKILRKVRFPRYLHGGIRDTDFPRDHVSNAALHTGATILVLDDIADFYPSLDRQLVFTTWLRFFGFSPEVSELLTNLTTRHGVVPQGARTSSYLANLAFWDKEAQLVEDLGNIGLTYSRFVDDVTYSSHRQILNSTIGNARAKVYRMLASKGCRPKRSKSHVCRKGQKLEVTGLVTAGSSPTIDKDERKRIRSAVHNLEKAVGKEGMTPENRKKWDSAKGRVGRLVRLKHPESRKLSQRLDAIRQG

SEQ ID NO: 3822 - protein, 318 aa, unidentified
  source 1..318: note = Related to JACCDF010000013.1; note = Halomonas salicampi
MRSICKLTPTYPHNAIIDPQHLALLLNTPLESLKATAKIASGSYRPVPQTKRDGSPRMTYDAYPELKRIQHQIVKKILRKVRFPRYLQGGIRDTEFPRDHVSNAALHTGASILVLDDIADFYPSLESQLVFTIWLRFFGFSPDVSELLTKLTTRHCVVPQGARTSSYLANLAFWDKEAKLVEDLGNMGLTYSRFVDDVSYSSHHQVSNSTIGEARAKVYRMLASKGCRPKRSKSQVCRKGQKLKVTGLVAAGNYPAVGKAERKRIRSAVHNLEKAVGRDGMTPENLKAWNSAKGRVGMLFRLEHLEARSLSQRLDTLL

SEQ ID NO: 3823 - protein, 330 aa, unidentified
  source 1..330: note = Related to VOGA01000005.1; note = Halomonas sp.
MFVSSELTPFYPHNPIVDPEHLARLLNTPLPKLEAIAESASSSYRPVPQKKKDGSPRMTYDAYPALKRVQHQIVQKTLHKVRFPRYLHGGIKDTEFPRDHVSNAALHTGAAILILDDIADFYPSLDRKLVFSVWLRFFRFSPEVAALLTKLTTRKGSIPQGAKTSSYLANLAFWDREAQLVEDLKAMGLTYSRFVDDVTYSSRCRIPDSAVGEARAKVYRMLTSKGCRPKRSKSQVSRKGRKLEVTGLITAGRSPAISKDERNRIRSAVRHLEKAVNEEGMTPENRKAWDSAKGRVGRLVRLKHAEGRRLSQRLDALLQAAPLAHRVDNQ

SEQ ID NO: 3824 - protein, 321 aa, unidentified
  source 1..321: note = Related to NC_020888.1; note = Thalassolituus oleivorans
MKATPPLYLHASIGSINSLSLLLGVSPDSLKSIGDAAQKMYREVPQKKKDGSLRMTYDAHPSLKKIQDKISKLILKKVVYPDYLQGGLPKKDQVSNAAKHSKAIILIQDDIEDFYPSLSDTTVRGVWQQFFKFSPEVAKLLTSLTTLNGKVPQGAKTSSYLANLAFWDCEHLLVQKLLDKDLTYTRFADDIIVSTRAIISNSEIAVVRASIYNMLALKSCKPKRSKSRVCRKGTRLSVTGLNTSLKSPMVNKQERRKIRALLHNLEVSVSLNGYTAENVAAWESIRGKVVRLKRLRHKEALGFDERLHLLKSRLFSSSSVL

SEQ ID NO: 3825 - protein, 332 aa, unidentified
  source 1..332: note = Related to RCHN01000010.1; note = Ketobacter sp.
MLRDRYLIIKIPSIANTSSLASLLEITEKELFYIADNVHEFYKPGKIMRKKNGDPRPTHDAKPVLKQIHARIKNRILKQVVYPYYMLGGISDLESPRSCKTHAQIHSGKKILISEDIANFYPNTSYEVVKKIWKYHFKFGDEVSELLTKLTTFNGELPQGWKASGYIANLALIDKEPELVRILEEKGLSYSRFIDDITVSSPFYLTSNDKQFIISNIYAMLFSCGYKPKRIKHEIVSREMPMSVTSLNVNTKKPTIPSKERKIIRALVYQLECAYPDDGRSIRFYKLWLSVYGKVNRVKSFHAEEGSKLQIRMRQIKPPKHFFSNKKLLSTS

SEQ ID NO: 3826 - protein, 320 aa, unidentified
  source 1..320: note = Related to DACUBM010000007.1; note = Legionella pneumophila
MPRNRYPQPSIPPIANITSLASLLSVNVTDLLYIADNINLFYKPGKILQKKNGEHRYTHDAKRTLKLIHQHIKNRILKKIEYPYFMLGGISDPQNPRSCKAHAQIHCNKKILINEDILDFYPTTSYELVKRVWKHQFNFSDTVAEILTKITTYSGQLPQGWKTSSYIANLALLPIEAHLVELLENKGYSYSRFIDDITVSSPTFISPQEKKSIISNIYGMLFKCGYKPKRTKHEIVSNKEKMIVTSLNVNTETPTLSKQERNNIRAMVYQLEKLFSIQGNTQAYIQKWHSLYGKVNRLKSFHKKNGEQLQERMKLIKPLK

SEQ ID NO: 3827 - protein, 320 aa, unidentified
  source 1..320: note = Related to NZ_LEAU01000005.1; note = Legionella pneumophila
MRKIRYPIANIQPIAKISSLARLLSVREADLLNIIDNIESFHRPGKLLKKKNGDPRPTHDAKSELKIIHARINNRILKKVQFPYYLQGGIADKSYPRSCKEHAQTHSGMKIIICEDIADFYPSTSYITVLKIWKHFFNFSNEVAEILTRLTTYQGALPQGWKTSSYIANLTFWHCEPELVKIIEEKGLSYSRYIDDITVGSRLHISNNGKEFVISSVYGMLFSNGYKPKREKQEIVSSEKPMIVTSLNVNSQKPTIPKKFRNNVRAMVYQLEKSFISIGNSIEYDKKWRSVNGSVCRVKSFHLSEGAKLQERMRQIKPIK

SEQ ID NO: 3828 - protein, 321 aa, unidentified
  source 1..321: note = Related to LVCQ01000131.1; note = Piscirickettsiaceae bacterium NZ-RLO1
MSIKIYTPEPKIQYISKISSLARILSVNSNDLLNISNNTQKFYKQGKLISKKNGEKRVTHDAKPNLKNIHEIIKNRLLKTVNYPFYLHGGIADPSIKRSCLSHAKTHINSHIIFQEDIANFFPNTDKNTIKKTWKYLFNFSDEIAEILSNLTTHENMLPQGWKTSGYLANLVFWEKEAQLVSNLEKKNLSYSRFIDDIVVSSPCRINNNNKNFIISSIYNMLYHYGYEPKRSKHKISTRKDPMSITGLNINPKFKSLTISKSERNEARLAVYNLEKNYNRIEKEDYIRLWNSASGIIARISLFHKKEAKTLREKINKVKLL

SEQ ID NO: 3829 - protein, 322 aa, unidentified
  source 1..322: note = Related to JADGCO010000009.1; note = Magnetococcales bacterium
MSTNNFPIINIPSFSNPASLASLLSVSEQDLFRITSSVDNLYKPGKILQKKNGELRRTHDAKKPLKDLHEIIKNRILKKVVYPYYLLGGIADPFKPRNCTNNALIHSGKKILIAEDIENFFPSSSSDIVFNIWKLCFKFSPKIADILTKLTTYQNQLPQGWKTSGYLANLVFWDNEPDLVRDFEKRGYSYSRFIDDIAISSNQFINDNQKSYIISRIYSMLRLKGYKPKRTKHEIQTQIKSMHLTGLGINRKRPTVPRNRRNNVRLLVYNLEKRHRHEGDTHQYREDWISVSGKVGHIRSFHNNEWEKLKFRLNKIKPNDKV

SEQ ID NO: 3830 - protein, 320 aa, unidentified
  source 1..320: note = Related to VXTZ01000022.1; note = Candidatus Dadabacteria bacterium
MPRDRHPVINISPIAKVSSLASLLSIKESDLLYIAANVDRFHRPGKELKKRNGEPRQTHDAEQRLKIIHGRINNRILKKVDYPYYLQGGIADKKRSRGCRANAIIHSRKKLIITEDIKDFFPCTSKRIVKGIWQYCFRFHPEIADILTRLTIYQNQLPQGWKTSSYLANLVFWDKEPDLVSLLEQRGYSYSRYMDDITVSSGHYINNHQKNYIISKVYEMLFSKGFAPKRSKHEIVSQSQRMDITGLVVNRKNPTVLKSKRRGVRVGVFKLEELPINNRSDADYRECWEHLSGLVSYISAYHPKEGKKLRARLRNIKPNR

SEQ ID NO: 3831 - protein, 335 aa, unidentified
  source 1..335: note = Related to NC_019902.2; note = Thioalkalivibrio nitratireducens
MAPESNKTCSKVGPIAHVKALASILSTTPSELIALSENVPSLWKPGKVLRKKDGTPRPTHDARKALKVVHERIKNRLLRQVDYPGYLLGGISDKLTTRDYSRHAALHAKKKILISEDIQDFFPSTTAEVVQEIWQRLFNFHPDVAELLTRLTIYEGALPQGWKTSGYLANLALWRREPDFVARLHRQGLAYSRFMDDVTVSAPYPLSKTQLTNIISGIYGMLASGEFAPKRAKHKIATGRSRMEVTGLNVNAAKPSMPKKRRDQIRAQVYQCEQGYKRDPRSPEYLTQWRNASGKVGTMKRFNPGEAKSLRTRPALYPQVAQTSRYGAVSFDFIS

SEQ ID NO: 3832 - protein, 332 aa, unidentified
  source 1..332: note = Related to JAICBS010000011.1; note = Candidatus Thiodiazotropha sp. (ex. Lucinisca nassula)
MALENNKACSKVGSIARIEALASVLSTTPAELLELSENIHSLWKPGKILRKKDGKPRHTHDARKPLKVIHERIKNRLLKQVDYPHYILGGISDKQTTRDYSRHAALHSKKKILISEDIRDFFPSTTSDVVLNIWLRFFNFHPEVAALLTKLTTHEGVLPQGWKTSGYLANLALWDREPDFVTQLHRQGLVYSRFMDDVTVSAPYPISKTQVTNIISGIYGMLASRDYKPKRSKHKISTGRHRMEVTGLNVNATRPSMPKLRRNQIRAQVFQCEQLFKQNARSPEYLAQWRNASGNVGTMKRFNPSEAKGLRARLTAVKPCAPRRDCTRGFPC

SEQ ID NO: 3833 - protein, 321 aa, unidentified
  source 1..321: note = Related to NZ_SMSC01000017.1; note = Candidatus Thiosymbion oneisti
MEHQDRKAYSKVGPIGCIDALASMLSISAKDLLTVSKSVESFWIPGKTLRKKSGEPRLTSNAKEPLKGLHEKIKNRLLKRVCYPYYLLGGISDSMMPRDYKCHAAIHSGKNILISEDIKDFFSSTKTDVVHSIWQCLFHTSPDVASVLTSLTTYNDCLPQGWKTSGYLANLAFWDLEPDLVERLEKRGFSYSRFIDDITVSSRCRIGASKKSFVISEIYRMLSLRGYSPKRAKHRIATNDNRMGVTGLNVNKNTSSMPKEKRKIIRAMVHRCENHYMQDRTSEGYRKSWERTSGKVSTLTRFHETEGNKLRKRLQTVKPIR

SEQ ID NO: 3834 - protein, 341 aa, unidentified
  source 1..341: note = Related to PJBX01000118.1; note = Psychrobacter sp.
MGFHPLPQVTPIANISSLANLLEITVEDLEYVLANKDRYWCPGKKLTKPNGEVRHTHNAKPRLKAIHQKILDKLLKKVFYPIYMQGGVADLLNPRSCRTHAAFHCNKSIVISEDIKSFFPNCDYKNIRSIWQGFFCMAPEIAEILTQLTTYQNELPQGWKTSGYLAQLIFYDIEPKLVEELDRQQVAYSRYIDDITISSSRLLTDRQKTDIISKIYSMVFHKAHHPNRKKQTIFSPSVNGVGKTVTGLTVNSKKPTINNDKRKKLRSDIHKLSLRFHTDKNLYSYDKDWRSITSKVGHIKTSHPRQWKKFRQEMNAIKPTFKRKKKTNTKKAVFKGTIDGK

SEQ ID NO: 3835 - protein, 321 aa, unidentified
  source 1..321: note = Related to BQJL01000324.1; note = marine bacterium B5-7
MSSKDLAPRVGSISNIARVSSLARILGTTDDRLLYIAGNIDKYWKPGKKLPKSDGSIRITNDANDVLKNIHERINRNLLKPCFYPRYLNGSLPGRSIRKNAEFHLRSMVLVNEDIENFYPSARFRQIKGIWKYFFKCSDEVAVILTKLTTYKGSLPQGWKPSSYLANLLFWDTEYILVEKLQAAGFSYSRLMDDITVSSRKPYTPEKLSVLISDLNLFLHSKEFKLKRSKHSIKPSYTRQTVNNQIVNGSKVTVPRERRKLIRALVHSLEIDYSYGAVFSDKYKTKWKSASQRVGGLKHGHLSERNSLRQRLQNIKPRIRF

SEQ ID NO: 3836 - protein, 302 aa, unidentified
  source 1..302: note = Related to JABDOQ010000026.1; note = Woeseiaceae bacterium
MAKHLGLPTEHLIEIAQNSASHWRQGPDLVKPDGSIRKTNSATQQLKDVHTRVKFKILRKTFYPDYLYGSLPKTLEQGVRNHIANAELHAGQRLIISADIKGYFPSVDPVVVHGIWQGFYPFAHDVAEVLTKLSTYKNEMPQGWGPSSYLAQLVFYDTEHDVVEYLQSQGFQYSRLTDDITLSTNRSLKKSEITDAIRTLNRMLNRKGTNINRSKTRVDSPKRQQSVNKINVSVRGMTLSQKYRKAVRAKVHNVVTNPELFGDKLHRELQSAKGKISYLGKFHEADAKKLKSRIRNFELSTK

SEQ ID NO: 3837 - protein, 324 aa, unidentified
  source 1..324: note = Related to JAEUQA010000033.1; note = Chromatiales bacterium
MRLSQLSPRYARRRIQRVESLAKLLGTSPTDLAALAANSAHYWIPGRTKTKSDGTKRHTSNALEPLKSIHKAIKNKILRATSYPHYLMGGLPSDEEAGCIRHCEENAKRHSGQRIVVTEDIKSFYPSITASRIHDIWQGFYRFSPEVAELLTKLTTYRGVVPQGWVPSSYLANLALWDCEPGLVAHLERQGLTYTRWIDDITISSKTFVAPACKTAIVTAVYGMLRSANFSPARTKHRIRTRGQNQRVMNLNVSGKRPTVPRQRLAELRATVRNLLRDAGSLSAADYTSKRDRIEGQIGSISRMHPRLAERLRNQLASVRRPAN

SEQ ID NO: 3838 - protein, 307 aa, unidentified
  source 1..307: note = Related to NZ_AP018005.1; note = Candidatus Rickettsiella viridis
MSIVLSSFYPYKPISRLDSLAKVLSVDVSALEKIASLASSYYRENKLKNNRITYTVLSPLKEIQEKIKKNLLDKVVWAYYLHSYIKKRNTKTNATAHLFKKALFNKDIKKYFDNCKEKHIYNVWSKFFNFTDNVASILTKLTIRNGELPQGSCTSPSLSNLIFWKDEPRLVSEFNKIGLAYTRYADDISVSSKNKKLDKVYIIGKIYGMFSKNGFKPAREKHKIYNSSEKMVVNGQTVNSKNVTLDKKYILKVRSYIYKLEKRINTLTKSEFDIDYQSILGKINYIKQYNKKGLGLESRLNKLLDIF

SEQ ID NO: 3839 - protein, 319 aa, Proteus sp.
  source 1..319: note = Related to NZ_QEXA01000001.1; note = Proteus faecis
MKPHYLNKPISSISSLAKCLQTTVDELQNLSTNADKYFFLANRVQKEDGSYRDTYDVRQRLKIIHDKITKNILKKVYYPDYLQGSLAKKDHISNAEIHSGKKVIIKGDISNFFPSISKDIIYQIWIEFFNFSKEVAELLSRLTTFNGKMVQGCKTSSYLANLVLWSREYKFVNLLKSQGFTYTRYVDDVHVSSERIMHKSEKTKIISRIYNLFASINVRPNRKKQEIMPRNQQQIVHKLNVDKSTPNMPKQKRNEIRKLVFICGKAFEDNNITLSEYTKNYNTVMGKVNYLRRLHPKCGNLLLSNLRSISPLKRMKIIS

SEQ ID NO: 3840 - protein, 316 aa, unidentified
  source 1..316: note = Related to WLTV01000024.1; note = Providencia stuartii
MKPRYLNKPISSIFSLAKSLQTTVEELQYLSANADKYFFLASKVQKDDGSYREIYDVSQKLKNIHDKITKNILKKVYYPDYLQGSLSKKDHISNAEIHTRKKVIVKGDISNFFPSIGKNIVYQVWVVFFNFSKEVAELLSNLITFNGRMVQGCKTSSYLANLVLWSRESKLVESLKLQGFTYTRYVDDVHVSAKRIMSKSEKTRIIKGIYNLFASINVRPNRKKQEIMPRNLQQTIHKLNVNKSMPSMPKQKRNDIRQLVFLCGKAFGDNRLAINEYTKMYNSVMGNVNYLRRIHPEEGGRLLSKLKSITPSNRFI

SEQ ID NO: 3841 - protein, 318 aa, unidentified
  source 1..318: note = Related to CP076623.1; note = Morganella morganii
MIVYPYKPISSLKSLSIVLCISEQELHYIYMNSDSYYFLTKDIIKNDGSHRLTYDVKSKLKTIHDKITKLILKKVNYPDYLQGSLSGKDFISNAKNHSKKRIIISEDITNFFPSISKEIIYQTFSKLFNFSPIVCDILSKLVTYKGYLVQGCKTSSYLCNLVLWNREKALVDNFKKKGFTYTRYVDDIHISSNSFINNDEKEYIIKKVYNLMRSINVKPNRKKHKIMTNDNSQSVHGVIVNKKAAFSKEYRNEIRGLVFNCQKKFKLSINEKEYTKFYQSVLGKVNLLKRLNENEAKKHLNTLSKIKPIHFKEKEKHD

SEQ ID NO: 3842 - protein, 314 aa, unidentified
  source 1..314: note = Related to NZ_RCWD01000007.1; note = Photorhabdus hainanensis
MMKFSYQNKPISSIDSLAKALSISVDELFYLYNNSDKFYYVAKIEPKPDGSFRKTYDVKTRLKKIHEKINTNILKCVKYPDYLQGSLKERDFLSDANKHTNKKIIIKEDVSNFFPSISKKIVYQVWAIFFNFTHEVSEMLSELITYKGFVVQGCKTSSYICNLILWNREEKLVNEFKKRGFIYTRYVDDIHVSSCNIIKKENKRYIINNIYKLMYSVGVRPNREKHSVMPKSDVQTVHNVNVDKAIPSFPKQKRNKIRLGVYNCEKLYDIEKHTEKYRKLYFRVLGQINMMKRLHEKEAHKLIQRLRKIRPENI

SEQ ID NO: 3843 - protein, 314 aa, unidentified
  source 1..314: note = Related to NZ_LZGX01000010.1; note = Gilliamella apicola
MIPKYLFKPVADLDLLAKILGITKQELDDLYHSSDSFFFLHERKQKSDGSYRDTYNVKKRLKIIHGKISKEFLKKVNYPDYLQGSLKDKDFLTNAKNHLGQKILITEDITNFFPSISKKIVFEVWVGFFKFSKEVSEYLAELITFEGYLVQGGKTSSYICNLIFWSRESELVDYLAKKGYKYTRYVDDITVSANKIITLKEKTDIIRRIYSLLKSVGAKPNRIKHQIMPRNKRQIIHNLNVNQNKPSMTKKKKNMIKAAVFECEKKFQTDPNSKEYLKLFNKTMGRVNHMKRIHPKIGDVLQKKLKLIKPQDKF

SEQ ID NO: 3844 - protein, 321 aa, unidentified
  source 1..321: note = Related to nan
MSEHSSFRYPYKPIASLEKLAICLNITLEELNYLQENADSFYFLTTREQKKDGSFRECYDVKKRLKDIHEKISIKFLKLIEYPEYLQGGIKKRDYISNASQHTCSFDLIEEDISNFYPSISREIIYQVWVGFFCFSHEVADCLSKLVTFQGYLVQGSKVSGLLCNLILWNRETKLVMNLKRQGLTYTRYVDDVTVSCDRYLSNKEKQQIIRKIYALFYTVGAKPNRRKHKIERKGTRQTVNNLNVTSENPTLPKEQRNKIRAAVFECEKIFRIGNSSLIQYKELFESTKGRVNQLKRFHKKQANSLLKRLEEIHPNKFKAT

SEQ ID NO: 3845 - protein, 321 aa, unidentified
  source 1..321: note = Related to RBKF01000628.1; note = Neisseria sp.
MNDCTSFNYPGKPIASLEKLALLLGISLEDLIYLQKNADSFYFLVKREEKKNGCFRECYDVRERLKNIHEKNFVRLLKVISYPEYLQGGIKKRDYISNANQHTRSHTIINEDISNFYPSISRKIIYQVWVGFFHFSPEVADCLSQLVTFQGKLVQGSKVSGLLCNLILWNREDKLVMSLKSRGLTYTRYVDDITVSSNRYLSNREKQQIIREIYTLFYTVGAKPNRSKHKIAYKGTKQTVNNLNVTSEKPTLPKEKRNEIRAAVFECEKKFQEGSSSIVEYKKIFESTKGRVNQLKRFHKKQANDLLQRLEKIHPNSFKAA

SEQ ID NO: 3846 - protein, 320 aa, unidentified
  source 1..320: note = Related to CP060414.1; note = Neisseria musculi
MNKPVSFCYPHKPIASLEKLAIYLGITLEELLYLRQYSNSFYFLHERKEKADGTFRDTYNVRDRLKNVHEKIAKKFFTILDYPEYLQGGICKRSSITNAKQHIGMNILIKEDISNFFPSISKKIVHQVWTGFFHFSHDVADCLAELVTYQGYLVQGSKVSGFLCNLIWWQREADLVAEFQKQGLVYTRFVDDVTVSTKRNLSNAEKKKIISKIYSLFHSVDAKANRKKQKIMHKGHQQTVNNMNVSIGKPTLPKEKRKEIRTIVFKCELTFQNKEIHITAYEKLFNSAKGKVFYLKQFHTVQAEQLLQRLNKIQPKFFNS

SEQ ID NO: 3847 - protein, 311 aa, unidentified
  source 1..311: note = Related to LR733345.1; note = Enhydrobacter sp.
MAEFAYPHRPIASLEKLAIVLDTTVAELDFLSQNANNFYFKVKSIQKADASYRDTYDVRDRLKTIHAKIVKNFLRIIDYPDYIQGGVPHRDYLSNTAMHTAKQVVISEDITNFFSSVSCTIIYQVWSRFFKFAPVVCECLTNLVTYQGFLVQGAKTSGYLCNLIFWNREQFLVDTLASQGFTYSRFVDDISISSPKVITSEHKTEVIAKTYGMLQSCGVKPNRKKHHIMSKGSSQKVHRVNVVSNKPTFDKKERNAIRAAVHECEMNFSKSKSSSEYEKLFNTTMGRVQKIKRLHIEEANKLLARLQKIKP

SEQ ID NO: 3848 - protein, 313 aa, unidentified
  source 1..313: note = Related to CP011374.1; note = Moraxella bovoculi
MDNNAFHYPYKPIANLKSLALSLDITLERLLFLQKNSDNFFFLQGRVKKEDGSFRETYDVKEELKKVHAKIVKNFFNVLKFPSYLHGGIKKRDYITNAKQHLQPKTIISEDIKNFFPSITKNLVYQIWSNFFKFSHEVAECLAEITTFKGSLVQGSKVSGYIGNLVLWQREPKLVEEFGKKGWIYTRFVDDITISSKRILSNKEKSEIISKVYGLLASINVKPNRKKHSIMKNGKDRQKVTQINVSTQRLTLSKKERNSIRSEVYFCEKFYKNYNKEEYKKLYNSIKGKVYNLRRFHQDEADKLLNKLNKIPP

SEQ ID NO: 3849 - protein, 316 aa, unidentified
  source 1..316: note = Related to CP063120.1; note = Haemophilus parainfluenzae
MSNPIYPHKPIGSLEVLANVLGIRDIDELLLIKKHSDNFFFVASVIKKRDGTLRNTYDIKHKLKSIHRKIKNVFLKKIYYPEYLQGSLAKRDYLTNANIHTNSKCIITEDIKNFFPSISKDIVVSIWKNIFHFPHDVSETLAELITYKGFLVQGSPVSSYIANLALWYKEPELVNTLSQKGFIYTRYVDDISVSSKRPITKKEKTRIIRQIHTMLSSIGVELNRKKHKIMPRNNRQEIHRVNVNTNAPTLPKKEREKIESAVYQCEIMYKSSPKSSEYKTLFNATQGRVNMLSRLHSPLATRLKCRLEKIKPIKNT

SEQ ID NO: 3850 - protein, 315 aa, unidentified
  source 1..315: note = Related to NZ_CP063124.1; note = Haemophilus parainfluenzae
MDILTKVLGLKDTNQLKELKENSDSFFFIAKKEKKRDGTIRITYDVKSELKLVHKKITRKLLKKVNYPDYLKGSLPKRDYLDNADAHTSSKCIITEDIKNFFPSIRKDIVISIWKNIFHFPHDVAETLAELITYKGCLVQGGTASSYIANLALWYKEPALVKELHDQGFRYTRYVDDISVSSKTIITPKEKTKIIRKIHIMLSSIGVKLNRKKHKIMPRNESQKIHRINVNTNNPTLPKNERRKIGSAVYQCEQMFNSSSNSQEYENLFNSTLGRVNMLSRLHDSLAAKLKCRLEKIKPIKKTTMSQASSLVPRS

SEQ ID NO: 3851 - protein, 312 aa, unidentified
  source 1..312: note = Related to CP097335.1; note = Mannheimia haemolytica
MNKPNYPYEPIGSISTLARVLGLETQKLQNLYDNSDDFFFVTKKKLKSDGSFRITYDVKAELKSVHRKIAKELFKKVFYPEYLQGGIARRDYIGNANIHIDSKCIITEDMKNFFPSISKEIVIDVWKNVFHFPPDVSEILAELITYKGYLVQGCVASGYICNLVLWNREAKLVVKLKNRGFIYSRYVDDISVSSKRIFTTKEKTEIIKDIHSMVTSIGVKLNRKKHEIMPRNNRQKIHRLNVNSYQASMPKSEREKIKAAVYQCEKLYITEPSSEKYKSLFNSTQGRVNSLSRLHKDHGDKLNLRLMKIKPY

SEQ ID NO: 3852 - protein, 313 aa, Pasteurella sp.
  source 1..313: note = Related to NZ_CP076656.1
MNSPTYPNSPIGSPAILARVLGIDPNILLSLKKNSNSFFFQAKTEEKSDGTLRITYDVKEPLKTIHRRIAERLLKKVTYPLYLQGSLPKRDYLGNAAIHTNSTCIISQDVKNFFPSISKNTVVQVWKNVFKFPEDISEILAELITYEGFLVQGCITSSYICNLVLWNRESKLVDELKEKGFTYTRYVDDITVSSKRIFTLEEKKEIIKSIHSMLKSISVKLNRRKHKIMPRNSQQQVHRVNVNSDRTTMPKSEREKIKAAVHQCEELYKTLAETEEYKKLFNQTLGRVVHLSRLHERQGKKLKQKLSKIYPRK

SEQ ID NO: 3853 - protein, 329 aa, unidentified
  source 1..329: note = Related to NZ_CP018028.1; note = Alteromonas mediterranea
MNKLSYPHAPIGELDKLAKALNIELSELQTITDKSDSLFFQTKEIIKNDGSSRFTYDARPTLKVIHGKVCEAFLKRVNYPDYLQGSIKRRDYLTDARKHAGSKVLISEDITNFFPSISKKVVHEMWVGVFGFSNVVAECLAELVTLNGFVVQGAKTSSYICNLVLWNREERLVNSLKTRGLIYTRYVDDVTVSSKRLISLNEKSKIINSIYSLFRSIGAKPNRNKHKIMPRNTQQEVHGVNVNKNQPTMPKEKRKKIRAAVHRCEITYKQTPDSIEYCALFNSVMGKVNTLGRMHTSEADKLRLRLSQVKPVSAQSLNKPLVSNTGLIT

SEQ ID NO: 3854 - protein, 314 aa, unidentified
  source 1..314: note = Related to NZ_AULT01000052.1; note = Oceanospirillum beijerinckii
MRKPNYPHAPIGDLDKLALALHVSKKGLQTVTAQSNDLFFLTRKIKKEDGSYRLTYDAKPSLKSLHGKICEAFLKRVEYPDYLQGSIRKRDYLTDARSHVGSKVLISEDITNFFPSISKKTVHEMWVGVFGFSNIVAECLAELVTMNGDVVQGAKTSSYICNLVLWNREAQLVSQLRKKGLVYTRYVDDITVSSRRSLSKSEKSRIISSIYSMFRSIGAKPNRRKHKIMPRNTQQDVHGVNVNKDRPTMPMEKRNQIRAAVHRCEIAFNGRPSSSEYVSLFNSVMGKVNTMGRMHRSEAGKLKARLLQVKPVIT

SEQ ID NO: 3855 - protein, 314 aa, unidentified
  source 1..314: note = Related to NZ_WBOM01000002.1; note = Nitrincola alkalilacustris
MNQPRYPFAPIGDLEKLSLALGVKLLELYDLKARSNELFFQTRDIVKPDGSHRITYDVRAPLKLVHGKICEVFLRRVEYPEYLQGSIKKRDYLTDANKHVRSKVLISEDITNFFPCISKKVIHEVWVGVFGFSNEVSDFLAELVTLDGFVVQGSKTSSYLCNLVLWSREAQLVKRLKMKGLVYTRYVDDITVSSKRILNNKEKSDIINSIYAMFRSVGAKPNRRKHKIMPRSAQQEVHGVNVNRQQATMPKYKRNQIRAAVHECEIIFDSDSSSETYISTFNSAMGRVNTLGRMHKVEAEKLKVRLEAVKPILV

SEQ ID NO: 3856 - protein, 314 aa, Vibrio parahaemolyticus
  source 1..314: note = Related to CP006005.1
MNLPVYPHASVANLSSLALALGLSLKELHELASTSDDYYFLTRKIEKPDGSLRLTYDAQPILKAIHGKISEVFLKRVDYPRFLQGSIKKRDYISDAKQHVSSKMLISEDITNFFPSISKKVVHEVWVGVFGFSNEVADLLAELVTYQGYVVQGSKTSSYICNLVLWKREAELVSKLEAKGFTYTRYVDDVTVSTKRIVSKAEKSEIINSIYSLFRSVGAKPNRKKHKVMPRNNRQEVHGVNVNKTAPTMPKKARDQIRAAVHQCELAFGDDPTTSEYQSAYSSAMGRVNTMGRMHEKEARDLRARLAAVKPVTN

SEQ ID NO: 3857 - protein, 314 aa, unidentified
  source 1..314: note = Related to SGPH01000013.1; note = Pseudoalteromonas sp.
MTPKYPHDPIAHVDSLCLSLGVTQSKLKEIQRKSDTYFFVTKEIVKKDNTIRQTFDVKPELKRIHERICSAFLKKVEYPAYLQGSIKKRDYLSNCALHTGQKLVISEDVTNFFPSISSLVVHQMWVGVFKFSNEIATILTDLVCFNGWLVQGAKPSSFICNLILWNRESKLVEELNQRGLKYTRYVDDITVSSPTNLSKSSITEILSNIYGMLASVNAKPNRKKHQVMPNGKRQNVHRVNVNHSTPTLPKKERSKIKAAVYQCEKDFAIKVSKDEYELLYNQTLGRVNNLKRMHPKMGEELLARLRKIKPCNRS

SEQ ID NO: 3858 - protein, 312 aa, unidentified
  source 1..312: note = Related to NZ_CP023398.1; note = Pseudoalteromonas spongiae
MTPQYPHEPIANLNTLCLALGLTASKLKYLQTNSDSYFFITKEIVKPDQSIRQTFDVKPELKRIHERICSAFLRKVDYPNYLQGSIKKRDYLSNCALHTNKKLVISEDVTNFFPSISSKIVHEMWVGVFKFSNEIASILTDLVCFKGWLVQGAKPSSFICNLILWNREARLVLKLNSMGLTYTRYVDDITVSSSMNLSKSLITEILSDIYGMLGSVNAKPNRKKHKLMPNGSRQNVHRVNVNTDIPTLPKKERNKVKAAVHECSLKFKADNSSIEYKSLYNSTLGRVNNLARMHPKLGKELRTKLIRFKPII

SEQ ID NO: 3859 - protein, 333 aa, unidentified
  source 1..333: note = Related to NC_015572.1; note = Methylomonas methanica
MLIKPTYLHKPIGSIESLAKSLGLSKEDLIELASNSNEYFFIAKKVEKPDKSIRLTYDVKPRLKQIHEKICCNLLKKVNYPDYIQGGVRGKSYLSNCQNHTHKKIVIKEDVSNFFPSISKKIIHEVWAGFFHFPSDVSELLSELVTFNGYLVQGGKASGFLCNLVLYDRESKLVEEFSKKGFKYTRFVDDITISCLRNITKDEQTYIIRKTYGLLKSIEVNPNKRKHKIMSNGVQQQLHGVNLNTNKPTLPKAERKKIEAAVFQCEKAHSENSNSIQYIKQFNSAMGRVNTMKRMHPKAGQALLERLCKIKPQINSRTFEQKHRLEIFRNLVN

SEQ ID NO: 3860 - protein, 312 aa, unidentified
  source 1..312: note = Related to NZ_AXWP01000102.1; note = Psychromonas arctica
MIPLYPHKPIASLNSLAKALGTTSDTLSNLTANSDKYFYLTKVINKPDGSVRNTYDVKPELKKFHERINTFFLKQVKYPNFLHGSLKGKDYISNTKEHTNKKVVISTDVSNFFPSISKKTIHEVWVGVFNFSHTVADCLSELVTHKGFLVQGSKVSSYLANLVLWGRESKLVCFFNKKGYVYTRYVDDITISCDRNLTKIEIADITSQVYAMLKSIDVAPNRKKYAVMTNGNSQSVHRLNVNRSVPTMSKSERAKIKSAVFECESKAAENRGTHEYIKLYNQTMGRVNSMKRLHSDLGDKLISRLKCVKPTP

SEQ ID NO: 3861 - protein, 312 aa, Vibrio sp.
  source 1..312: note = Related to DACQHB010000005.1; note = Vibrio vulnificus
MKPTYPHQPVAKLDSLALALGLTHSELIELASVANSMYFVTRVIEKPDGSKRITHDVKARLKRVHERINSVFLKQVSYPSYLQGSLKGRDYLSNTKQHINKHIIISEDISNFYPSISNKVVHEVWVGCFGFSNEVASCLTALVTHNGHLVQGGKTSSYISNLVLWSRESKLVEELKRKGMTYTRYVDDVTVSSPRPLSKSEITNAISSVYGLFKTINVKPNRTKHEVMSKGKRQTVHRVNVSAGRPTFSKKERSKIKTAVFQCEQLFPKASTTQEYLSMYRSALGRVNTLARLHKKEADSLKERLKAIQPFM

SEQ ID NO: 3862 - protein, 318 aa, unidentified
  source 1..318: note = Related to MSCC01000004.1; note = Photobacterium aquimaris
MTLTPKYNFKTIGSINALARLLQIPLNRVIYLSNNASDFYRVARVEQKKTGGQRITYDAYKTLKVIHRKIQTQIFKKVIYPQYMHGSISGRSYITNIKNHTKSKIVICEDISNFFPTIKAEQVEKMFIRLFHYPKNVAKTLTNLVTLNGSVPQGGICSSYIANLVMWEKESILVARLAREELTYTRYVDDITVSAKSYMSKPKVSEVIALIYGMLRYYGLEPNKKKHEVLGNGTYQTVHRVGVNGRRPSFGHDEKQLIRSAVHNLHILFVDKQCTYENYLKVFSSVSSKVGKLKQLNEYQGKKYRTLLNTIKLSIKDN

SEQ ID NO: 3863 - protein, 321 aa, unidentified
  source 1..321: note = Related to JABSQS010000004.1; note = Moritella sp.
MTLTPKYTLSPIGSINALARLLQLPLNRVQYLAKNSSDLYRIARIEQKKSGGKRVTYDAYKELKSVHRKLQHQIFKKVIYPQFMQGSISGRSYITNVKLHTKSKLVICEDISNFFPTIQAEKVENMFMRLFHFPQDVAKTLTSLVTLNGSIPQGGICSSYIANLVMWEKESVLVLRLNNAKLTYTRYVDDITVSSKNYINKQEISDVIASIYGMLQHYGFKPNRSKHDVLGNGSHQTVHRVGVNGKRASFGKEEKKKVRSAVHNLINLFSDGQCSYEHYLKIFSSVSSRVGKIQQLNEYQGKKYRESLNAIKPSIKRFYHG

SEQ ID NO: 3864 - protein, 321 aa, unidentified
  source 1..321: note = Related to NZ_VKGK01000009.1; note = Shewanella hanedai
MTLTPEYKLKSIGSIDALAFLLDLPLNRVQYLANNASDLYRVARIEQKKSGGQRVTYDAYKVLKAIHRKLQHQIFKKVIYPQYMQGSISGRSYITNVRYHTKCKIVICEDISNFFPTIQAVQVEKMFMRLFRFPLEVAKTLTNLVTLNGSVPQGGICSSYIANLVMWEKESILVSRLLTVKLTYTRYVDDITVSSKSYMTKQEISEVIASIYGMLRYYGVEPNKSKHEVLGNGSHQAVHRVGVNGNRPSFGKEEKKKIRSAVHNLSTLFSDDKCTYEAYLREFSSVSSQVGKLQQLNEYQGKRYRGDLNTMKPSIKRFNLG

SEQ ID NO: 3865 - protein, 302 aa, Vibrio sp.
  source 1..302: note = Related to NZ_CP046798.1; note = Vibrio furnissii
MLQLPVPRIRYLAQNASDFYRVARIKTKANGDKRITYDAYRSLKDLHKTLKVRLFQNVSYPDYIQGAISGRSYIGNVKKHTKSTIIICEDITNFFPTIRESDVEKMFMRLFHFPKEVASILTGLVTLNGTVPQGGVCSSYVANLVMWERESALVSLLQAKNLTYTRYVDDITVSSKYYIEKVEIGNVIASIYGMLKHFGVKPNKAKHEVLSNGMHQKVHRVGVNGKRPSFGKEEKKRVRSAVYNLEALFKDNTCSYDEYLKAFNSASALVAKLKQLNEHQGQKYRESLNLLKPSAKRVELSN

SEQ ID NO: 3866 - protein, 325 aa, unidentified
  source 1..325: note = Related to JQED01000042.1; note = Colwellia psychrerythraea
MNQTPEYPHLSIGSINSLARLLRLPVNRVKYLATNSSDFFRVARIEEKKSGGQRITYDAFKCLKDVHRRLKVQIFQRVIYPSYLQGSLKGCSYITNVKNHTKSKIVICEDISNYFPSIKSPLIEKMFIRLFSFPEDVARILTQLVTLNGLLPQGGVCSSYIANLIMWEKEVLLVGSFEKRGLTYTRYVDDITVSSKAHLTKSEISEVISSIYGMMKHYGIKPNLKKHQVLGDGSHQKVHNVGVNGRRPSFGKEEKKRVRSAVHKLKLLFDSPDCTYEDYLAAFGRASSLVGKLKQLNEQQATKHRGELNKIKPSFRNASNSNLVE

SEQ ID NO: 3867 - protein, 325 aa, unidentified
  source 1..325: note = Related to SYUS01000035.1; note = Enterovibrio norvegicus
MTLIPRYTSLSLGSINALARLLQLPINRVSHLAENSSSYYRVAKITEKKNGDKRVTYDAFKVLKDVHRKLKNQLFNKVIYPDYLQGSLRGRSYLSNVKKHTKSKLLICEDITNFFPSISAAQVEKMFMRLFSFPKCVAEILTKLVTLNGCVPQGGVCSSYIANLVMWNKEAVLVEKLISDGLRYTRYVDDITVSSRRYVTKEKISKVIALIYGMLGHYGVKPNRAKHEVLGNGSHQTVHRVGVNGSQPSFGKDEKKRIRSAVHKLDTMFHDNNCSYADYLKAFGSVSSKVGKLKQLNEHQATKFRGQLNVIRPSVKRLKLDMDNS

SEQ ID NO: 3868 - protein, 319 aa, unidentified
  source 1..319: note = Related to WTCN01000233.1; note = Methyloprofundus sp.
MNSAFYNGKPIASIAALSSALNVPEDILIDMSHNANKYYKKNRPEIKSNGKERIHYSVSESLKAIHQRIKVILFQNVTYPEYLQGSIRDTKKTRDYISDARMHSGKRMLISEDVSDFFPSIKYDQVLKLWMYFFNFPKKIATTLTDLTTYKGFLPQGSKTSSYVANLIFWQYEPALYNKLKAQGITYSRYVDDTTLSFDRYVSDKELGQIISSIFGMMCQVNIKPNREKQDIKSRKNNTTVHNLNVTKKSPTIPKKKKNNLRMAVFNCIKHSDLHGRKSETYKKMYRSTITRVGQLGRLHPNQSQKLKDKLAPYKPFNS

SEQ ID NO: 3869 - protein, 312 aa, unidentified
  source 1..312: note = Related to NZ_JHYQ01000015.1; note = Thiothrix lacustris
MSAYYPHKPIASIESLAKTLDVTEAELLEVAQNSDSLFFVAKCVKKENGKVRVTYDARPALKNIHDRIKIALFRVVKYPFYLQGGISGRDYISNTKIHAGKKFLITEDVSNFFPSIQDSVVKKMWLYFFHFSPEVADVLTKLTTHNGFVPQGAKTSGYIANLILWDKEPVLVEYLRKKGMSYSRLVDDITISCDYKPSKKLLASMISDVYGMLLSKDVKPNRGKHKIMTQGEKQRIHNLNVDKGRPSLPKSKRADIRAAVFQCEEMAKYGRKTEEYNKLFNSTVGRVATMKRLHPTQATILRNRLDMIKPKK

SEQ ID NO: 3870 - protein, 379 aa, Vibrio parahaemolyticus
  source 1..379: note = Related to ABEZCS010000006.1
MNLRPKYTQKPIGSIEALANLLNLTLHDLDKLIQSSNDDYIVADKIEKDDGSIRVTYKAKPKLRTALDSIKSRVFDKVEHPDYITAGQIGKSYVDNAQAHINSRMLMSEDIRNFFPSISVKEVNRIFQHFFCFPPKVSNALSELSTKEGFLVQGSPLSGEIANLIFYRDEPELVKFCQDQGLRYTRYYDDIHISSDEKDFYELIPHLKSEIYRIFGKSGVKPHRAKKKSHFSTCSSRLSVHDVTVNSKKTNPSQKRISKVRQLLFTYEYMVDNNCDIEDIIKKYRSIHGHINTLQQQGYSQAGKLKEHLSLITCRISESEAKKYARKYRKVKSKKELTQFSSKVSILKRISGRVAMVINSEKKCANDKIKKKLSRNSSM

SEQ ID NO: 3871 - protein, 379 aa, unidentified
  source 1..379: note = Related to NZ_SODO01000025.1; note = Oceanimonas baumannii
MNLQPKYTQKPVGSIKALANLLNLTLNELEELIQSSNNDYIIASKIEKADGSLRVTYKAKQKLRIALDTIKSRIFDKVKHPDYIAAGQLGKSYTNNAKAHINSKMLMSEDIKNFFPSISTKEVNRIFQHFFCFPPEVSNALSELSTKDGFLVQGSPLSGEIANLIFYQDEPELVEYCQSQELRYTRYYDDIHISSDKKEFHELIPHLKSKIYRIFGKHGVRPHRSKKKSHFSTCSSRLSVHDVTVNSKKTNPSHERISKVRQLLFTYEYMVDNNSNIEDIIKKHRSIRGHINTLQQQDYSQVNRLKEQLSFITRKINESEAKKYARKYRKVKSKKELTQFSSKVCILKKISVRVAMVINSEKKAADDKIKRKLSRNSVS

SEQ ID NO: 3872 - protein, 351 aa, Vibrio sp.
  source 1..351: note = Related to RBZH01000046.1; note = Vibrio vulnificus
MHLRVERVYIVANKIEKDDGSLRVTYKAKPKLRVVLDSIKSRIFDKVEHPDYITAGQIGKSYIDNAKVHINSRMLMSEDIRNFFPSISIKEVNRIFQHFFCFPPKVSNALSELSTKEGYLVQGSPLSGEIANLVFYRDEPELVKYCQDQGLRYTRYYDDIHISSDKKEFNELIPHLKSEIYRIFGKSGVKPHRSKKKSHFSSCSSRLSVHDVTVNSKKTNPSHKRISQVRKLLFTYEHMVDNNFNIEDIIKKYRSILGHINTLQQQGYSKAGKLKEQLSLITCRISESEAKKYARKYRKVKSKKELTQFSSKVYILKRISGRVAMVINSEKNLQMIKLRKSYLVIQIYNQH

SEQ ID NO: 3873 - protein, 379 aa, Vibrio sp.
  source 1..379: note = Related to NZ_AP024087.1; note = Vibrio nigripulchritudo
MRNLSPVYKQKPISSIDALCRLLQVEQRDLLSLAEKSNSHYLKKTVEKSGSKPRVTYKASPELRPILDSLKDRVFSCVSFPAYIAAGQLGKSYVANAESHIGAKMLMSEDIKDFFPSITQSQVENVYKHFFKFAPNVSLLLSELCTKDGKLVQGSPLSGYLANLVFFREEHSIVASCIEHGLHYTRYYDDIHISSCQLFYEEVHDLKQLLYGMMGRVGVSPHRSPKKCNIKLSNTRLYVHDVTINSHKTSPSRKRVSTVRNLLFNFNNCVSSGCDIETLVKHYRSILGHINTLQQQGYGKSKTLKKELREAVHHIDEKSAKKYARGYRKVKNSKEFKAFSLKASILKRISGRVASVINAEHDTAKKKLERNRASRKPTS

SEQ ID NO: 3874 - protein, 376 aa, unidentified
  source 1..376: note = Related to WOBG01000017.1; note = Aliivibrio fischeri
MCNLSPIYNLKPIGSIEALCRVLQIEQSLLFSIAKNSNAHYFKKTIKKNNGKPRITYKASPQLRNILDKLKHRVFSHIVFPSYISAGQLGKSYVDNANSHTGAKMLMSEDIKDFFPSITQLQIQQVYKHFFKFTPEVSLLLSELCTKDGKLVQGSPLSGYLANLVFFKEEHTIVDLCIKNGLHYTRYYDDIHISSHTPFFEEVSELKQQLYGMMGRVGVSPHRSQKKCNIKLSNTRLDVHDITINSHKTSPSKKRVSRVRNLLFQFQKSVSLNDDIEGIINQYRSILGHINTLQQQGYLKSKALKKELSNIALCINEKNAKKYARGYRKVKNDKELKAFSAKVSILKRINGKVASVINAEQDAAKRKLKNRQSKSN

SEQ ID NO: 3875 - protein, 371 aa, unidentified
  source 1..371: note = Related to ASZI01000003.1; note = Osedax symbiont Rs2
MVTNLQFKYTNKPISSYESLSKTLSISIQEIHDIESKSNDFYTISKKIKKPDGSLRVTYKVHPRLRCVLDLLKKRVFDSVEAPEYILAGQKNRSYILNAKTHTESQMLLCEDIKSFFPSIHKKFVKKIFQHFFFFSPDISESLAEISTLNNYLVQGSPLSGEIANLIFFDLEPALVERLKKYNLRYTRYYDDIYISSKEHNFYEHTEEIKRQIYRMFNTVNLKPNRKKNKISKQSSRISVHNITVNSSKISPSKERLSMVRKKIYIFKCSIENNIDIQDLIGQYKSLQGHISTLKTQEYTKHKITKRELELLISKIDERLAKKYSRKFRSVKTKENFNKLANSSNLLTKISPRVTGVYKDEKMKAKKRLWK

SEQ ID NO: 3876 - protein, 383 aa, unidentified
  source 1..383: note = Related to NZ_JAESDJ010000001.1; note = Alteromonas lipotrueae
MVSEANTVENFQCRQSQIGSIKALAKTLSLIESELIDLAECSDQYYKVSKEIPKSDGSVRRTYSVSYPLKKVLIRIRSRIISNVDYPDYILAGRLGRSYLDNANKHKSSAMILSEDITRFFDSIKQEYVEQIFKYFFHFPPDVAKTLSQLCTLDGYLVQGSPLSGDIANLIFNEKEPNVVKLAAELGLKYSRYYDDIYVSSLTNNFDAHIGTLRTAIYGMFASVEVKPNKSPQKSRVMRSSHRMDVHDVTVNSHKLSPSKKRTSKVRLSVDRLRKMVAEDAAISDILKVYRSTFGQLITLKSQGSPKYVKMRSELDQIMKSIEPAKARKFARKFRNIKTEADFKSFAQKISVLKRISPSVAGVINAESKSAKLKIKFKQATTH

SEQ ID NO: 3877 - protein, 378 aa, unidentified
  source 1..378: note = Related to DNJR01000290.1; note = Alteromonas macleodii
MVSETDPVNDFQCKQSQVGSIRTLAKTLSLTEPELVRLAKHSDKYYNVSKEIPKSDGSVRLTYSVSYPLKKVLIRIRNRIISNVNYPDYILAGRQGKSYLDNAKKHKSSTMILSEDITRFFDSIKQEYVEQLFKYFFRFPPDVSQTLSQLCTLDGSLVQGSPISGDIANLIFHEKEPSVVRLAASLGLKYSRYYDDIYVSSATTNFDSHVGTMRTAIYGMFASVEVKPNKSPQKSRVMRSSKRMDVHDVTVNSHKLSPSKKRTSEVRLRIDRLRKMVADNAEMADILKFYRSTFGKLITLKSQGSPKYAKMRSELDGVMKSIEPAKARKFARKFRKIKNQSEFSSFAQRISILKRISPSVAGVINAESAIAKFKIEAK

SEQ ID NO: 3878 - protein, 374 aa, unidentified
  source 1..374: note = Related to JAGJEH010000010.1; note = Pseudoalteromonas luteoviolacea
MERFNFFYTQKQIGSLSVLAKTLSITVNELNRLRANSDSYYQIAKRVVKADGSERITYDVKYPLKTILQKLRSRVIKNVQLPKYILAGRKGKSYLDNAMEHMSTKMIQSEDISNFFDSIKSKYVINVFKYLFKFPNDVAEALTDLCTFKGHLVQGSPVSGDIANLIFYHKEPQLVQAIESLGLKYTRYYDDIYVSSKEGNFYQHVSFLKAQIYGMFSSIQVKPNRSLSKSRVMRNSSRIDVHDVTVNSHKLSPSRKRVSNVRAQINKLKNSVNSRGCLSETISLFKSTLGQVNTLKAQGSPKAKDMLKNILDALKGIDEAQAKKYCRKARKVKELRQLNKLAQNLSVLKKVSPTIAGVANAELKQARERIKKKQ

SEQ ID NO: 3879 - protein, 371 aa, unidentified
  source 1..371: note = Related to NZ_MODU01000004.1; note = Alteromonas sp.
MSSQIEYPQAGIASIDSLASALRIPSSELVALANNTSNLYRKSEQIEKDDGSKRITYDALPPLKIVLSNFRKRIIDKVLLPEYISAGKKGKSYIDNAEVHAGSKGLLSEDIKNFFPQVSFKSVFEAFKYLYKMSPEVAEVAALLCTKDGYLVQGSPVSGSLANIIFYAKEPFLVDRLKLLGFRYTRYYDDVHISHKTDDFSRDIGELRTKVYGIFISQGLQPHRTAKKSNYANSSRRMSVHGIVINNEKIKPNPKKVSDTRAMLFKFERLLETDYTIDSVVSLYRSIRGKIQTLKAQGSTKSEAYLTTLNSLMRKVDEAKAKKFVRKVRKVKTIKEYNKLSSKLSVLKKINVKVTRVVKIECDLAKKSLKA

SEQ ID NO: 3880 - protein, 370 aa, unidentified
  source 1..370: note = Related to CP015750.1; note = Pectobacterium wasabiae
MHKNWSYSNRPLANIESLLKMLETNEERLAYVLKNKKNYFKTVPVLRKGKKRTTYKVVGELLKIHELIKQHVFSKISLPEYITGGRRGVSYLDDCISHCNKSIIIQEDIKDFFPSIKEELIAKAFQYYMNFSPEVSSLIAKLSTLEGSLVQGTKLSTDIANLIFLEEEALISAEVGKLGGNYTRYVDDITISFESEVNNEDISKIKTMILSMALKSGVRLNRQKSKVLRNGHSKIVHGVKVIKELRPTQKRKDSIRMCLFNLKKKVIEKESIMDILALYFKIRGLINTLKQQGDKNHAEYIKQANQLVAAVDKKDAIKSIRKMRKVKDVKKLRSFYSKLKPLGNISKTISVILDSEYKTCKCKFNNKSIE

SEQ ID NO: 3881 - protein, 366 aa, unidentified
  source 1..366: note = Related to NZ_CP065946.1; note = Pectobacterium parmentieri
MHKNWNYSNRPLANLESLFKILETKEERLGYILKNKMVYFKKVPVIRKEKKRTTYKVIGELSKIHDLIKQRIFSKITLPEYVTGGRRGISYIDDCMSHCDKSIIIQEDIKDFFPSITEELIAKAFQYYMNFSPEVSSLIANLSTLEGSLVQGTKLSTDIANLIFLEEEVLISEEVAKLGGNYTRYVDDITISFESEVNNEDISKIKTMILSMAIKSGVRLNKKKSRVLRNGQCKIVHGVKVIKELRPTQKRKNNIRMYLFNLRKKVFDKENVMDVLSFYFKIRGLINTLKQQGDINHAKYLKEANQLVADIDKKDAIKSIRAMRKVKDIKKIRALYSKLKPLGNISKSISAILDAEYKSCKYKFNN

SEQ ID NO: 3882 - protein, 367 aa, unidentified
  source 1..367: note = Related to NZ_APMV01000009.1; note = Dickeya zeae
MHKNWTYSDRPLANLESLFKLLETKQERLTYILKNKKIYFKKVPVIRKGKKRTTYKVTGELSRIHELIKQRIFSKITLPEYITGGRRGISYIDDCISHCDKSIIIQEDVKDFFPSITEGLIAKAFQYYMNFSPEVSSLIANLSTLEGSLVQGTKLSTDIANLIFLEEEIFISEEVTKLGGNYTRYVDDITISFESEVNNKDISKIKTMIFSMAIKSGVRLNKKKSRILRNGQSKVVHGVKVIKELRPTQKRKSDIRMCLFNLRKKILDKENIMDILSFYFKIRGLINTLKQQGDAKHTEYLNEVNHILTGIDKKDAIKSIRAMRKLREVKKLRVFYSKLKPLGRVSENVSTILDVEYRACKSKLNKI

SEQ ID NO: 3883 - protein, 331 aa, unidentified
  source 1..331: note = Related to JAAZOJ010000541.1; note = Candidatus Methanofastidiosa archaeon
METNPIYKGKQISTIQDLSEILNVEVNRIKHILYRANSFYIENPQPKDDGTMRMTYIIKPPLQQIQERIKDNIFSCVEFPHYLMGGIRDEANPRDHIRNAKIHSGKKWLISLDIKNYFPSIKNEYVYFMWRKFFGFSDEVSRVLTRLTTYNGFLPQGSKTSSGIANLLLWDKEPHFVDSLNKQDFVYTRFVDDITISSTKLVEKEMVSKIIVDMKHLLRQYDLKLKGKKTKFQTRSQKMTVNKVTVNGKKPTISSEERNNIRLEVHLFEKKADNTKNWNEIDHDYYSLMGKLNYIKKVHSAYAEKLISRLEIKREEFYSKNYEKDGNGCRL

SEQ ID NO: 3884 - protein, 311 aa, unidentified
  source 1..311: note = Related to JACKCF010000001.1; note = Anaerolineaceae bacterium
MDKPQYKKKPIGYVDSLAKALSAERDHLIRVANDADSFYRLHKRIEKPDGTFREIYDARYPLKLFQRRINRKLISRVDFPQYLHAVKHRSHITAASKHNIPLLLLNLDISNFFPSISSELVFDIWRLFFRFPKHVSQMLTKLTTYNGFLPQGAPTSPGLANLAFWDIESKLVEGMNAKGFVYTRFVDDVTISSERKVQMDELAPIIASIFGMFRNRGVKANRNKIHISTSGHEMLVHNLNINSGVPTIPKRERGRIRAAVKDCEITYTEIIQTEVYKKLWHSTLGRVNYLNHFHPTEAQKYHQRLQAVRPS

SEQ ID NO: 3885 - protein, 313 aa, unidentified
  source 1..313: note = Related to JACDGI010000160.1; note = Anaerolineae bacterium
MDKPQYQKKPIAHIDSLAKLLSVDTNKLVNLADQADSFYYLSERIEKPDGSFRDVYGVRDELKILQQQIVNKIYSNVRFPNYLYGSIKGTNHIMDAYVHAHAQLLVKMDISNFFPTLTSKNIFNIWKRFFNFSEPVAKILTKLTTFNNFLPQGAPTSPGLANLAFWDIESAIVDRLQRNGFTYTRFVDDVTVSSKSRTEMHKLNTIFKSVFGMFRSKGVKANRKKTNISTSGYRMAVHNLNINSGTPTISTKKRSQIRSAVRGCEKSYQDQKQSEDYKKLWESAIGRVNYLSQFHPTQAQALHKRLQAVLPVS

SEQ ID NO: 3886 - protein, 343 aa, unidentified
  source 1..343: note = Related to NZ_KE383931.1; note = Oceanobacter kriegii
MSQNHLSKSLQTPLLAPKFSGTRISSVESLSFVLKTPIDELVSIADTSESYYRIHKEIEKPDGSIRKIYSVREPLKGIQRKINSLILKKCKYPEYLTGSLPNCTHIKNINFHVGQKTIISIDATNFFPSINASDVMNLWAEFFNFESQTSTLLTQLCSFQGGLAQGAPTSSYISNLVFWDVEPLIVQEFHRKGYIYSRYVDDICISKSSRTTKEEKTWAIKTAQKVFISKGLSIKSRKTKIMEKGSRQEVNKKTIHNGKVNASKADKDKIRAEIHNLKIRIDKNLLPDIPYEKRYLSIRGKILYLEKFNKTAAQKLQNQLDELVAYIKSKGVIWRSPKNKYIP

SEQ ID NO: 3887 - protein, 341 aa, unidentified
  source 1..341: note = Related to JADLCU010000112.1; note = Trueperaceae bacterium
MAELEYPFAPIGSLNALARHLGLSRWYLDGAIAKAGPRAYRVRKVTPSDARGVPDKVEYAPAPWLKELQRTINRRLLKAVEMPAYVIGGVPGRRIEDAIQRHACSQALLSFDVRRFYESTSAAEVRKVFMRLLRFPPELTDALLALTTVRGHLPRGAPTSSYLANLVLFDVEPELVDFLSGLQPRALRYSRWVDDINISSPWPIDERLAGEVKDRVSTMLRRHGLSINWTKYRENLRTKSVVVHHVRIEGSRFSVAGSKRRNVRAAVHNLELASQKRPLSASELSELTRQRSRVEFIRPFHPREMEPLRIKLQAIKEKQPGRSKSKDGPDWRSTVWGCTKT

SEQ ID NO: 3888 - protein, 335 aa, unidentified
  source 1..335: note = Related to MGHL01000006.1; note = Candidatus Woesebacteria bacterium RIFCSPLOWO2_01_FULL_44_14
MSTKKQSPELRPLVSLSYLEYLLGTKRDRLQKIATSAGSYYQPFDIHKKGTDKWRHIDNPQHPLKTLQKRILKNILNRNIRRLPDGMTGGISGRSIVENAKIHIGKECIGVIDIKNCFPSTNYHQINQVWIDHFGCGYKTANLLTKLTTFQHRLPQGAPTSPLLCNFALAPVFGEIKAVADSAGLDITIFIDDITVSGSKKSITDSIEPIIKILVKHGYAVRKRKVKVITSNYSQKVTGIPVNRKLSIGRGHIQQIRNLILETASLKGYIPSNDYCKIQGKISFAKSVSKTQGVKLGKFAEKMLVHPLMQVGVKKDEASRDCKRFSDNHKYTERN

SEQ ID NO: 3889 - protein, 326 aa, unidentified
  source 1..326: note = Related to PFRF01000009.1; note = Candidatus Levybacteria bacterium CG_4_9_14_0_2_um_filter_35_21
MNNSLISLKKLEFTLCTSRDELRRIADRVGRLYEPYDLHKKGTDKWRHIDNPHDELKKLQRIINKNVLKKNISLLPERMTGGITGKSIIDNAKNHVGKEYILIVDIKNCFPNTDQLKILHVWRTYFGCGNTTARILTQLTTFQARLPQGAPTSSLLCNFALLPIFRKIDHYASLNNLSFSIFVDDITISGRKADVIKSIKPIIKILKEHDYAVKKKKIKIFASGYSQRTTGINVNKKLSVGRRKLNEIRKLIIESAKLKGYLPSTLINKITGDINFTKQVSPNDGKKLKELANKLLIAPIKIVKSESDCNTRTCNDFKRNHKYILD

SEQ ID NO: 3890 - protein, 325 aa, unidentified
  source 1..325: note = Related to DMZH01000002.1; note = Candidatus Woesebacteria bacterium
MSTLQKTKIKSVAELSQTLKVGVKEFVKTAKNANLFYRPFDLSKKGSEKWRHIDNPTGKLKIIQKAINKQILRDLMFQLPPNIMGGIENKSILENAKVHVGQEMVVTIDIKNCFPKTKNEVIFTIWKNLLGFEPNSARLLTQLTTTKGHLPQGSPASPSLSNLALLPISKEILNYSKKHHLNFTIYVDDITLSGKKSSALDSISPVVKIIQKYGYAIRNKKVKKMPSYKTQTTTGIQLNSEISIGKQKIDEIRKEIINLAKLQKPYITKKSIFSKIDYVKKISPEKGQKLLEFANMILEEDIDYIAVDPEKDEKRDCNGKACLAK

SEQ ID NO: 3891 - protein, 341 aa, unidentified
  source 1..341: note = Related to MGFX01000001.1; note = Candidatus Woesebacteria bacterium RBG_16_42_24
MSGHEHQLNIPSPFPILSVNKLAFILRTKPNELKKLSENAGNYYTPFDRKQIKDNGKVKWRHIDNPAPKLKKIQQKINRVLLKAKVESLPTGMTGGIKGRSIFTNAAQHLNQKAVVTIDLKDCFPRTSNKRIFRVWRNHLGTSECVANILTKLTTFQRRLPQGSPTSSSLCNLALFPLFKKTKRYCQKEKFNLTLYVDDITISGQTIPIRLAIGRIINFIQEEGYAVRRNKIKIMTASVQQKTTGLIVNKQLSVSAKAREEIRKEIFILSRQEMFSSKRMRSLWGKINYIKKVSPKQGGKLASLAHTLLLDTLASHSYENVTSEKEVTRECKNTRRHKYSL

SEQ ID NO: 3892 - protein, 335 aa, unidentified
  source 1..335: note = Related to JADZCA010000099.1; note = Planctomycetes bacterium
MSLARPQIVSWNLIRQVTGFSADELRSVAERAGGLYESRDRLAHKAKKPKWRHIDDPVPELKRIQRALVRGLLRPIPLPAFFCGSVSGRSPVDAIKPHVGRPSILALDLRDFFPRTSHKRVYRAWTRVVGCSPEIAGVLTQLTTLHRRLPQGAPSSPPLANLAFLEIGLAIESACRNAGLRVTFFVDDILISGDQPGTVLDEIIDLLQQSGYGVKRSKMEFMGPRERHAALGAVFNRFISYGRGPFAIIRQRILALIDSAEVTPSQIRSLTGAAHYVRFLNKNQGDKLLALIVQLRPTVEDGPREPKAQWETCRGGNKCKAKPRGSRPLVTTTGS

SEQ ID NO: 3893 - protein, 348 aa, unidentified
  source 1..348: note = Related to JADZDC010000110.1; note = Candidatus Eisenbacteria bacterium
MTQSPAADPGLVPLVSMRRLEQLLGRSREDLIRLAEHAGRYYAPFDEFKPNRAEPRHIDRPVGELKLVQERIQTSILRHIPLPPTMLGGVKRCSIRDNAQYHLGSPLVVTIDLRDCFPRTHDLAVYSAFCRVLGASEKIARLLTKLTTYQHRVPQGAPTSSLLVNWVLLPLHDAIQTIAQGADCRCTFWVDDITVSGPAALDVVEPIVMAIQRHGYSIRHRKLHLMPACRPQEVTGVLVNRHPAARREYRTELRATILQLSSEVEVSARKLERIKGRISHVRHLHPRHGESLDQLLERTMMGRRVDELGACPPKEVRTRVRCNHVRRHRAGRRASARSRADTGGIAGE

SEQ ID NO: 3894 - protein, 357 aa, unidentified
  source 1..357: note = Related to NZ_JMCB01000022.1; note = Hyalangium minutum
MSEATARTFYSKAGLGFHLKRDWSTLESLAEHAGAHYRSFDEWMGNKWRHFDVPSKRLADVQREIARFLKARVKFPDTMLGGLKGGSPKKNAEAHRGQGLVFKLDIRDCFPSIGHRRVFRMFREQLKFSDPISNLLTKLTTFQNRLPQGSPASSVIANLVLMELHESIQLECEALGLKCTFFVDDITLSGERVREVIAPVVRLVQRHGFSMRPCKVRLLAAHREKLSVTGVLVNRRRLSVGRTRKNKLRARIHQLSRGERVTDSDLRSIQSSVVQVKHISNHQGETLERLVQEKLPKRGVQTPKERAKKIRRVCKCTHKHRHKRNEESVTATHQPASSVAAGLPRQHFVHTLEAGLR

SEQ ID NO: 3895 - protein, 320 aa, unidentified
  source 1..320: note = Related to JAIOJS010000141.1; note = Thermoanaerobaculia bacterium
MMLSAKPLVSRRELSFRLAFPRDRLESVAERAGRYYRPFDREKKPGAKKWRHIDNPIEPLKWVQKRIGRGILKSVDFPAELTGGLSGRSLVDNARPHIGQPTLVCLDLDSFFPHVNHDRVYDALRRHLGCSGEIANLLTKLTTFQKRLPQGSPASTFLANLVLIDIVEELRAIARDRHLALSCYIDDLTFSGIGAEEAIGDVVAVLKAHHLKISREKLSIAHEHEARSVTGIGVSRRLTKPRDKMLEARDFINSLAASETVSERDLARARGIVAHVGQVNKSQAAYLARRLARLPPAGDDAPQEVEKTKTRRCSSFLRPH

SEQ ID NO: 3896 - protein, 325 aa, unidentified
  source 1..325: note = Related to RFGL01000253.1; note = Acidobacteria bacterium
MINSYSDLSPLVSIRRLERLLGFDRQAIQWIANRAGRYYRPFDVRRVGTRKWRHIDNPQGKLKTIQKRILTNILKTVNFPAAILGGIAGASIKENARVHLGQPILVVIDIKDFFPNITHRKAYSAYKTCLGCSAKIAGLLTKLTTFQRRIPQGAPTSTLLANMSVLTLHDELKELADNLGLRVTFWVDDIAFSGPNADKIIGAAVEIISRHGFAVSSKKIRVMGRGSRQEVTGVPINRKISAGRKYIEELRNSILDFKRTGITAHEFASLRSKISHVRWLCPSQGIKLEEFAKEQLSDLVLSIGCKAAKNEYRKCEDWSRHRREP

SEQ ID NO: 3897 - protein, 327 aa, unidentified
  source 1..327: note = Related to JACQZW010000093.1; note = Acidobacteria bacterium
MAGTAPPAESIFPIKSLRRLERLLCVPREELRFLADAAEHHYRPFDRFRPRADGTVKVRHIDNPVDRLKSVQARINSRLLRTVPFPATMIGGVRRRGPRDGASLHCASPDLVTLDLSNCYPRTTNRQVFAVFRNTLGCSEEVARLLTRLTTRQGHLPQGAPTSGLLSNLCLLDLHQTIAGLAASRGLAFSQYVDDFALSGPGARNALGDILPMFFGHASARLNRSKLRCCGRGSRQEVTGICVNRRTMSARGPKYEALRNRVRSFDPNASDAGTERQAILGAIAHVRSINQLQADSVVRLAERCGLRRDGCRDTPDSVRPVGRAAGD

SEQ ID NO: 3898 - protein, 323 aa, unidentified
  source 1..323: note = Related to JAHJDO010000130.1; note = unidentified bacterium
MSRRKIESLLGEKIEYLEHVASKVGNYYKPFDIYTPGKKPRHIDNPNSDLKKIQKKIKSRVLETVILPETMMGGIKDKSHKDNALRHIDKKVVITLDLKSYFPKTNNRNIYDVFINVFGCNRETAHLFTKLTSYQRRLPQGAPSSTLLANMCVLPMHNDLQELFNRNDITWTFYIDDIAFSGDNADKVIDEAIKIIQNHGQGVSCKKKKIMYANNRQMVTKLCVNRKVGIKKEKINKIREDIINLSWQPNIDNRKLQAIKGSINYVKSICAVRGQSLDNLYKKMLPAKTGLIGKKPKIKTTSCKCSKKHREYVKGVRNISNKE

SEQ ID NO: 3899 - protein, 309 aa, unidentified
  source 1..309: note = Related to CP011806.1; note = Acidobacteria bacterium Mor1
MKSLNQDDNVKLRSMRRLESLLGRSRKDIKRIAENSGRYYRPFPKRQGDKVRTIDNPTGELKQIQKRIQERILTDFELPESMLGGVKGRSIKLNAKLHCGAPTVVHLDLVKCFPRISNKVVYKAFVEHLGCTPRIAGLLTQLTTYRRRLPQGSPASTMLANICLLRMHNELRDVAQTNGSMLSFFVDDIGLSGNRPEVLIEQMIGIVRNHGHSVSHRKRKIMRSHEPQTLTGLSLNRRPLVPRTRRAQVRKQIYHWASQGNCTDELQRIRGAVNFVRWVSEHQGEALERTLSRAQSSTSAESDRSRQGC

SEQ ID NO: 3900 - protein, 303 aa, unidentified
  source 1..303: note = Related to JADFXX010000012.1; note = Candidatus Omnitrophica bacterium
MTSSEQQKSSPNPFPLESPNKFAWIIRVKPHELQEVAAVAESLYNPYFEKKKGKKPRLIHNPSDRLKIIQKKINTWILQKYPFPDFIVGGIKGKALEDHFKLHLRKDIVVTLDIKNCFPSITNKHIYDVFKDKLGALSDTARLATLLTAYKGQLPVGAPTSPLLANLVLLPVLIEIKKLVNSHGFEMSQFIDDSAFSGKRLPVELVSEVCKMMARAGFTISHKKTLVMPKSDSQTVTKRIVNQTPGIPRKEMNRIRSAVNELKNTPKNDPLYGKRLASVKGRVISIRKFYPQVAEKFLQEIGG

SEQ ID NO: 3901 - protein, 312 aa, unidentified
  source 1..312: note = Related to NZ_QICN01000006.1; note = Sinimarinibacterium flocculans
MVAAPILSIRDLAARVGTPIERMTEIADDIDSHYRPTALYDEKRGRSRMLNVPRKELKALQQRIHRVILDPIELSACVHGAVSGRSPRTNAEQHLGKPCVICVDVKSFFDSVRHYVVYRMFRNDLGFGRDVARLLTRLTTYDSQLPQGAPTSPAIANLVLAFQVDKPLEAAAASLDLTYTRFVDDIAISGGDPRPLINVAAKLLSARRLKVHRATGRGRLKPKLKIMSGGVQQKITGLVVNSASAPTIPRRYRDQVRAAIHQLREMQSGASFNRSVDSIRGRIAHVRRLHPSGAARLAGELARVIENRRECG

SEQ ID NO: 3902 - protein, 307 aa, unidentified
  source 1..307: note = Related to SCTY01000068.1; note = Betaproteobacteria bacterium
MILVQPILSVRDLAARLGIEAGYLREVGRDIESHYKIQPLKQGAKVRMLAIPQAELKMIQRRINRAILAKVPLAKAVYGGVAGGSPRKNAAEHANQRCVITMDVKHFFPNVRHYMVYRMFRSELGFGRDVASILTRLTTYRSYLPQGAPTSTAVANLLLAAPVDVPMSAEAERQGVRYSRFVDDIAISGENPRPLINKVAKLLSSRRLPVHRRKINGPSKLRIAPSGVAQRITGLIVNAQNGLSVPRERRDKVRAAIYALRRAPKHELKKAVASIRGKITHIAQFNAAAAKRLNTYLDGTLRQRLDG

SEQ ID NO: 3903 - protein, 312 aa, unidentified
  source 1..312: note = Related to JABWMJ010000023.1; note = Schlegelella koreensis
MNEPILSLQKLAWRLGVPVNRLRQLADEISRDHREHYNAFALKTGKDKIRQIRPPKEELKAIQRKIVKRVLAPIGLAPTAHGGVPGRSQRSNAELHLGQARVVTVDVKNFFDRVQHRRIYRMFRNEHGFGADVSRLLTRLITLRGSLPQGAPTSPAAANLFLRRAVDEKLGSTLAKLPVTYSRFIDDLTFSGPDPRSLITTVAHLLSECGLTVKKSKVKIAPRHCPQKVTGLLVNSATGGRLTIPRAQREAVRAAIHQLPRLAIRKEWDKQVRSIRGRIAHVERYHPGDGARLRKCLRVALDGQQPKSDAPL

SEQ ID NO: 3904 - protein, 301 aa, unidentified
  source 1..301: note = Related to JADYYY010000015.1; note = Acidobacteria bacterium
MRSPVDHYSDAWLSFELRHPVDRLRLLAGMVPEDLYSVRRVEINRKVRDISNPCDELKAVQRSIRERLLLPIPLSPIVYSDVPGHSAAQNAERHLHQANVGSADIRDCYNSMTNAMVFRVFRHTLRLGDSLADLLTGLTTSRGHLPHGAPTSGALANLILSPIDVELERIAVELDLKITRYVDNIDFSGQRTRHAFLPIVALIQSLGFAVKRRKVFNASRQRVQIVTGRTVSGRVLRLPRAKRANVRANVHEVLCRRRDGLPIQDKQINRLRGRLNYLRTQGHPKEARDLATRLAAVGINI

SEQ ID NO: 3905 - protein, 300 aa, unidentified
  source 1..300: note = Related to MEKY01000029.1; note = Acidobacteria bacterium RIFCSPLOWO2_12_FULL_59_11
MRMPVEHYSERWLSFTLSHPRERLRVLASTAERLYKSGWRDVKGKQRYITEPFEELKIVQRAIREHLLLPIPLSSIVYSDVPGRSATMNAVQHVNQPNVASIDIRDCYPSMTNAMVFRVFRGPVGLGDNLAHTLTRLTTLSGHLPQGTPTSGALANLILSPVDVILEQIAEGLRLVVTRYVDNIDFSGVRSREAILPTIVALQAAGFSVRHKKVMNAGYRRAHVVTGNLVDGCRLRLPHRKRANVRAAVYEIVQRYEDGLPIATKAMNRLRGRLQHLRTQGHPRDAERLAAQLVAAGIAI

SEQ ID NO: 3906 - protein, 304 aa, unidentified
  source 1..304: note = Related to JACKCN010000006.1; note = Candidatus Delongbacteria bacterium
MPYNVKSIKSLAKLLDVDVEELVRIEQNPEKYYEPFEKKRGEKSRSIDNPTGELAALQIRIKKFLLCDVDVFRPIATGGVKGHSTKTSALLHTNKDCVATVDVKSFFPCVTNNKVYKVFCNLGYSPPVSRMLTRITTYKGHLPQGSATSTIIANLALYNFDEYLYNQSLRLGCDCIRFVDDIIISGSYGKVTELVSLVFPALHRMRFSVHRAKKLKIMKSNKRQEVLGLTVNRAVGVTKSYVEEVRTQIACVEKCSVTSCVYLKLVGKIQYIGTTKPIIAGNLMRKLRNSLMRPEKECLASIEQ

SEQ ID NO: 3907 - protein, 337 aa, unidentified
  source 1..337: note = Related to JAIQGL010000020.1; note = Acidobacteriia bacterium
MTVDLPEKNIDLAAAPKLDLLSIRELEFKLGLERGYLRTLAAHAGGHYNPFVKPEKVFPFQRRFKNKKKRIIDNPDEQLRDVQKRIYRRLLRPESLPDYIYGGVTNKCIQDNVNRHLGARMLVTVDIANFFPSVTNEYIYWLWNHVLRCSSEISILLTKLTSFERHLPQGAATSTPLANILICTIDKQIRSECERMGITYSTWVDDLAFSGDDPRRIIPVVIGALRKSGLRLSRKKITIMGPATRKVLNGIVLGKKLGVTREVRSRIRAGIHRLKTGAVPIQDQPKYMRSLIARIRQAETINSSQIQKLRSQLAAVLRDRSIALTERQQFLKQLGCA

SEQ ID NO: 3908 - protein, 318 aa, unidentified
  source 1..318: note = Related to JADJOS010000001.1; note = Acidobacteria bacterium
MSIPQLSIVSVNDLAQRLRIDPKKLRHIAAHAGDYYKPFKQRKKPKPFAKKSKPAKVREIDNPSELLKTIQRRICDNLLCGVPWPEHVFGGIKERNTVKNAKLHLGNEKLVTIDIRSYFPSISNKVIYDIWFRFLGCGSEVSAMLTQLTTFRRRLPQGAPTSTALANLVLISIDGELVEFCRQNSITYTTWVDDLAFSGENAELALEKAISSLRRAGLRVARNKVKVMRGSKPQILMNQTLNNSMGVNKIYRSNVRSAINKLVTHPPLNLKEQFASINSKIRYVDTINKNQARALTKNLNSTLNRIKNSSLSPYTKAI

SEQ ID NO: 3909 - protein, 302 aa, unidentified
  source 1..302: note = Related to QHXL01000591.1; note = Acidobacteria bacterium
MNRNGRNQLRLNIGSLDVLGYALGLSPEDPFIKISNPAPFAADPIEPKQRKIDNPILITKEIQKRINRSLLRPLHLPGHICGGVKGKTLLDNIIPHLNARVIVTADIKGFFPSITTFQVYAIWSRLLGCSPEIAAILTRLTTFERRLPQGAPTSSTLANLILFSFDQPIRSFCAQHGITYTTWVDDLIFSGAESRSVINVAVAALREGGFSLPHKKLKIMTAGKRMRVTGVLLGKKPGVIRRYARDTRAGIYRLTKGDLAEPKVDRYVKSIRGRIAHINRLNPNVARSLDHQFQLALKRAVS

SEQ ID NO: 3910 - protein, 329 aa, unidentified
  source 1..329: note = Related to FNSD01000001.1; note = Terriglobus roseus
MTLQRNKRLPLDQLPLRSLRELEHLLGASREALLRLAEWEANYSPFEQAKPLKPHAKKPQTKKLRKIDNPGVELKKIQRRILSRLLLPLNLPNFLFGAVPKRSVREHAAAHLGATTIVKMDIKSYYPNLTNEHVYKVWHEILCCSAPVSKILTKLTTCDFHLPQGAPTSPTLANLFLASIYGPIIQDCVAKDIVATVWVDDLTFSGERSRDVMELVRQTLACNGLRDSRKKRVILTGKSSKLVTGARLGREELRACKLKVREIRAGIHNLKRGKVTTRGRSKDVQSLLGKVGFVRSLCPSDAIPLEKQLRSINVSIPSQAGLTSRSAKG

SEQ ID NO: 3911 - protein, 320 aa, unidentified
  source 1..320: note = Related to NZ_CP042596.1; note = Granulicella sp.
MDLPQTKPIVGSLSDLEHRLGIKRGDLAVLLQCRAGLYRPFKIPKKQHPYPGKLRRLKASEPVKYRQIDDPVKQLKDIQRRILATVLSRVELPAYMFGAVSGRTLLGHAKEHVPNQSSIVVRMDISSYYPNITCEHVYYVWNVVLGCPPPIARLLTELTTFDWHLPQGAPTSPAIANIFLASIYAPICLASEQAGLTITTWVDDLIFSGVAAHTVMETVRATLAAHGFKMAPDKREIFGPKDQKNITGTRLGRFEVRVTHKKMSELRAAIFRLAIGALEPGELEKYRRNLSARIAHIATIHKGDAAKVRRHAIKSSVILK

SEQ ID NO: 3912 - protein, 324 aa, unidentified
  source 1..324: note = Related to SOIB01000190.1; note = Candidatus Stahlbacteria bacterium
MMIMKKKNKHKLITISDLALHLGISEGYLQDILSELYSEDTKLYRSWDKIKPNGETRPMDAPRDKLKFIQKRINGRILQRTQISKIATGGVRGRKLKDNLIPHLRQQMVANFDLKRFFPNITNKQVYEIFILIGVSPDVARVLTRLTTFKNRIPQGAPTSSMLANLVAGYGGSHCLDGRIENLCAINNFNLRRWVDDISISGPNYIKKFEPTIEKIIFESGFIPNRDKTAFISKNNAQIITGHLVNEKANVVKQERRRIRAILHKCKTSGLDGYSKNRIDHLKRSLRGKIAHISSINPRSGNKLLDKFNSIEWSSLINEMTNSA

SEQ ID NO: 3913 - protein, 332 aa, unidentified
  source 1..332: note = Related to JAAYAY010000168.1; note = Planctomycetaceae bacterium
MLRIRQVKHLARRLKFPTRVLEKIAEAPELWCEELVLLDPAKPTKPRNVLNVRGQLRQLQSRMLRSILLPVLPVSQFSHGSTRQRHIKSNIEPHLRSTFAFTTDIADFYPSVSHNRVYRLFAKTLECSPDVARVCTKLCTYDHHLALGLITSPILADQTMHQIDRRIGLACWKAKLVYTRYVDDLTISGGYDLAKSGFANLVQGILEEHGFAVNPDKHRFGRLEEGTTITKIRVNRGHPDVRRQYVTELERQIEDAHRLAVDEQFDGPYYTEGQIWGRIQFVSWVNPGRQRALVRKFRAVPWNKVKEVAECRGLVCLKKVLSKRILASPGTV

SEQ ID NO: 3914 - protein, 327 aa, unidentified
  source 1..327: note = Related to JABMRQ010001902.1; note = Planctomycetes bacterium
MLNIQQVKHLAHRLGVSVKHLEEVAESPEGYCEELVLLDPAKPEKPRDVLDVRGPLRKMQLQLLREVLLPKLPISAHSHGGVRGRHIKSNVTPHLDSTFVFGTDISDFYPGIKHNRVYRLFTQQFGCAPDVARICTKLCTYQYHLALGLITSPILADQVMGPIDERIGTACRKAKLVYTRYVDDLTISGPFDLHENKSGIAGLVQRILNDHGFATNPSKNSFGRLADGVPITKIRVKRGHLDVRGEYVKELERQLADAASLANGGDFDGPYYTESQIRGRVQFVCWVNPGRKRELMRHFHVVPWDKVGQEAVRRGLVATKKVLMKRT

SEQ ID NO: 3915 - protein, 337 aa, unidentified
  source 1..337: note = Related to NZ_CP063458.1; note = Proposed Humisphaera borealis
MLNLKTPKNLAYRLGVSLSVLRDVADRPDDWIETLLLNDPTRPNKQREVLNVKGKLKQIQTRLLRVVLLPVLNVSPYSHGGISGRNIKTNASCHLNANYLFSADISNFYPSIGHRRVYQLFSKRLNCSPDVSRLCTKLTTYDYKLALGLPTSPILADQLFHPIDARIAGACRSMGLSYSRFVDDIAISGSFDLSPESCGVSALLERIVTGNGFELQLEKSRFGRLSEDEMTITQLRVRNGRLDVREQYVLELERQLADAGELSNDRHFDGPFYTESQVRGRVQFVGWINRDRKRQLLQRFREVNWTQAMAVGRSRGLVVQKKTLIRMQKSDLDSTET

SEQ ID NO: 3916 - protein, 331 aa, unidentified
  source 1..331: note = Related to NZ_AP021861.1; note = Lacipirellula parvula
MLKIRQVKHLASALSTTPAEMAAVLKSPADFYEELELRDPSRPDKPRIVVNVTGALRALQSKLYRRILLPKLSQSAHSHGGVSGRSIKTNVEPHLGSKFVFKTDIANFYPSIHFRRVYKLFVEDFECSPDVASVCTKISTYRHHLALGLICSPMLADQVLRRVDRRIGGACAGLGLVYTRYVDDVAISGPFNIETSGLPRLVEDILAKDGFKANADKHLFGSLAEDLSITSLREVRGHLDVRREYLDELERQIDDAASLARDGEFIGPYFTSEQILGRVRFVCWVNPGRRRSLISRFRTVKWKKARKVAKRRGYEVTRKTLTKLPRREEPS

SEQ ID NO: 3917 - protein, 330 aa, unidentified
  source 1..330: note = Related to PABB01000067.1; note = Planctomycetaceae bacterium
MLRIRQTKHLLETLGVSSDELSAILANPSDYYEELLLTDPQKPHKPRAVVNVTGRLRTLQSRLYRRVLLTKLCPSIHSHGGVRGRSIKTNAEPHLGSAFVFRTDISDFYPSIHFRRVYRLFAERLECSPDVARICTKICTYRHHLALGLICSPILADQVLARVDRRLGGACAKENLTYTRYVDDIAISGPFDFEKSGFANLVQRILATDGFKVNPQKHVFGSLAKDCTITNLREVRGHLDVRHEYVEELQRQLADASSLAQDREFEGPYYTFGQILGRVRFVCWVNPGRRRDLMLRLRSVNWRTVKAIARKRGYEVSKKTLSKRDGPLAQ

SEQ ID NO: 3918 - protein, 330 aa, unidentified
  source 1..330: note = Related to NZ_JAHPZK010000007.1; note = Paludisphaera sp.
MLNVRSERCLADILGVTVHALKVDLGRLNRDVREFQLIDPARPDKVREVIQIVGAWRRHLDRLMERLLLPRITPSIHNHGGVKGRSIFTNASAHAENVYVYTADVRDFFPSIHHRRVYRLFFGRFGCSPDVASICTRLCTHNYHLAVGLPSSPLLADQAMREVDERIHGACQSAGLTYTRFVDDLTISGGFDFAGSGFLKLLPRILEKHGFRLNPRKIEIGRLDDGPQVTKLWVNRGRPDVAREFIQRLMEQMEDAERLANGGDFVGPYFTPDQIYGRVCFVRSIRWGRGRDLMRRYRSVQWSKVEAEAGRLGLVAERKRLIPKPKEEAG

SEQ ID NO: 3919 - protein, 334 aa, unidentified
  source 1..334: note = Related to PBQK01000137.1; note = Gimesia sp.
MLHIGYDKLLARMLGTTRAELNDILDNADEYFDELSLFNPEKPDKPRDVISVRGKLRTFQAKFYRKVLLRKLSVSPHSHGGVKGRNIKTNAKPHLNSRYIYKIDLQDFFPSIKQPRIYRLFNSKFACSPPVAKLCTRLCTYEHHLALGLITSPILADQIMQSVDTRIGSMCDNAKLEYTRFVDDLTISGPFDFEESGIPDLINQILLESGLTPNPKKYVYGKIDNGISITGIRKNQEGKIDVEEEYALKVEEQLEASKSLELGNWPDLSCLYHTPAQIRGRIDHIKWINESRGKKLLNIYKKINWSRVDEEARKLKLVVSKKRLTKKTKTLLVD

SEQ ID NO: 3920 - protein, 337 aa, unidentified
  source 1..337: note = Related to NZ_WRPR01000072.1; note = Candidatus Laterigemmans baculatus
MLNLWRLDQLCRLLKTDPEKLASALESPSKFIKELLLCDPAGEKRPRRVIDVSGDLRLVQERFYRRVLLQRLWPSHNSHGGIRGRSIKSNVIAHAGSRFAFKSDIRNFYPSIHRRRVYRLFADRLHCSADVARACTALTTFNHHLALGLVSSPILADQILCPIDNRIAEACKSIGVVYTRFVDDITLSARYDLRRSNVASIVRKILGDHGFEIHPGKEAFGRLEDLAITGIRMRDSKLDVTREYADRLDQQLKDAKSLADGAHFDGPFQTFNQLRGKVQFVGWVNPGRKAYLMRRLFSIGREKYRREAINRGLVASKTGLMSLDPTPAAQLRVFTPG

SEQ ID NO: 3921 - protein, 343 aa, unidentified
  source 1..343: note = Related to LECT01000054.1; note = Rhodopirellula sp.
MSSIGMDAKLFSLHRPRQVADRLGLDESWLLRLSEELRTAEGRSNYIREFTLFDPRPGKKPRDIISVRGDLRLAQRRLHQRLLSHSIEPTPYSHGGVRGRSIKTNAGQHARNRFVYLTDIANFYPSIHSSRINDFFKSNGCLPAVARLLTSLTTLDYHLALGLITSPILAEAIIQPVDRRIAVACDRQGLVYSRYVDDICISSKHSLHGSGIDATVRTILRQSGFKVRVSKDRFIRVDEGCAVTGVRIHRGRLSVTPSYIGELETDLSSALSFARGGHHTGLFFTKEQLWGRVQFVRWINPGRAKPLIRLFRQIPWRRYRVAASQSGLIAAKAFFAERKSYVL

SEQ ID NO: 3922 - protein, 332 aa, unidentified
  source 1..332: note = Related to JAJTEK010000018.1; note = Pirellula sp.
MQNPATRSKYINEFTIVDPREDRKPRDVISIRGDFRTVQRRIYQRILSQVIKPGPSSHGGIRGKSIKSNAEAHLGNVYAYQTDIANFFPSIHRDRVRSVLQNYVGSRDVAELLAQLVTLDDHLALGLVTSPILAEAVIQPVDTRISGACRKMGLTYSRFVDDICISGSFPIDKSCIPRMVRGILQNNGFKIRPEKDRFVSLSTDLFSLTGIEIRKNRLRVPQRYINDLVHDLESANAIAMGCEHPVTLYYTREQIVGRIQFVRWVNKGQSSILVKKFKKINWRLHSKQALLRGLIVLKPRSVDRSSGAVSDGTVVGESTPLQSKKRSIKSVD

SEQ ID NO: 3923 - protein, 328 aa, unidentified
  source 1..328: note = Related to JAAYCR010000064.1; note = Phycisphaerae bacterium
MESSNLQAMNCKTLRIRTIPHLANQLGIHENGLIDVAENTERYYRDFKRNVKGKDRDLVMSINPLAMLQRRILDRILHRLPISDYAYGAIKGRSILDNAKKHSNSLFIAKFDVKSFYPSVRYQKIYDFFMGQECAPDVSRILTLLTTRKYSLPLGTSTSPMLADQVIQPLDKRICGMAAKAGLKYTRYVDDITISGSYPVEQFTDLVIEIIRQNGFKVKQSKIDVYAPGDGKERIICGVRVQNGKVSASTDYIKTLRGELLKAIQQSQHRDISGDFDTRNQYRGRIGFVMWLDRPEGLKLLSLYRKVKWRHLEWILYERNKSPQKTSL

SEQ ID NO: 3924 - protein, 322 aa, unidentified
  source 1..322: note = Related to JAFGPY010000231.1; note = Planctomycetes bacterium
MEPDSPSSDGLRIQRIEHLASQLGFPVDRLVDCAEHAGDFYHDFKRNVKGKDRDLTMARPPLSVLQRRILDRILCRLPVSEHAFGAIKGRSIRDNAVAHARAPFVAKLDIRDFYPSIRYQKIYDFFMAQGCSPDVARTLTLLTTRNYSLPLGTSTSPFLADQVVHPIDTRIGGLAKAKGLRYTRYVDDVTLSGPFDLEQLAKQIVTIIRQAGFAIKRTKMEFYRPDDGKERIITGVRVQDGKVSAPSNYIELLKRDLVLARKASLHEVVHQDFDTRDQFRGKIGYVMWLDPKAGRKLIRLYRKVKWSHFEYATSRRKSMAKV

SEQ ID NO: 3925 - protein, 319 aa, unidentified
  source 1..319: note = Related to JAFGTU010000518.1; note = Sedimentisphaerales bacterium
MIKRIVDKLRIVEVKHLSMHLGSTPVELAHVCSSISRHPSQYYRWWNKCFPNGKTRPMVEVRGRLREILDRLNDLLQHVCLPEYVNGGVPGRSVLSNAMPHLNKPMLMKTDLANHFPRVSPGRVYAMFRKQQECSPEVARILTRLTTQSGGLPQGSPTSVAVSNLVTLGLSRRLRRFAEARGAVLTQYVDDYIFSGGKRLAGCKEKIISIVKQEGFKANEAKTVSVPADKEQIVTGIRVNGSQMDAPSSKVADVRKAIRRLRCELEVTGSVPTKRIKSIEGKISYIAAYNRGTGKYLRRQLDHIKTPGVRIAGREEIAG

SEQ ID NO: 3926 - protein, 314 aa, unidentified
  source 1..314: note = Related to JADHYA010000193.1; note = Phycisphaerae bacterium
MKRRIYNLRIRDVQHLAKLLSTTPQELHALCDTVASHPKRYYVQWSKPTKKGKIRPMVKIHGRLRAILDQLKSLLHTIALPSHVHGGVPKRSTYTNAIPHLGKPMLLRIDLQNHFPSVSHHKVYAMFRNEQGCTPDVARLLTRLTTLNGGLPQGSPTSTIISNLVTLHLSKRLRGFAQSRGAGCTQYVDDYTFSGERRLAKHSGRIVSIVAQEGFKANPTKTIAVPADCEQVTTGIRVNGKQADVPTSNLKDIRSDLNSLDKQIALGSKSSEKIIKRIEGKIRYVRRWNPGAAKSLTRKLTRITLKPATSASTV

SEQ ID NO: 3927 - protein, 321 aa, unidentified
  source 1..321: note = Related to NZ_JAKWBK010000001.1; note = Niabella hibiscisoli
MAFHQGTTMVCNNLDNYQENGLSPINFMISTKAALYNTLKFTEKHIWYIIKNIAKHYKEKEVDKTKYGKPQLDKNGSIRKRNLRIPTYPLDRIQKTIHEFITAQSAFPDYMYGSIRGRNHIQNAFRHCNNVYFLKVDLKNFFPNISHRQVYGSLVKFGLPHDIARIVTPLTTVEGKLPQGAPTSCIIANLVLQNVARRLHDFARTNNLTFTCYLDDLTFSSKEDFRALNEKILNIIKEEGFFPSPKKISYRKISCEITGIIVKNNTLDLIHEMKREALTNLHIYHYYMSFLKQRDSLFNLSYPNTFSNAFLGAPRNITSPQ

SEQ ID NO: 3928 - protein, 306 aa, unidentified
  source 1..306: note = Related to JAFLBK010000001.1; note = Chitinophagales bacterium
MIKSVHNLYSFLGLTPGELDSITSRITENYYQRSRPKIKYGEFQRDDSGNIKYRDLLIPSYLLKSRQQRIARLLSGITLPVYMFGSIKERSNIQNARQHLNHQYFFTLDLKKFFPNINHRQVNMMLCENGFSFSVSRILTQLTTYQASLPQGAPSSPVIANLVFMPTGNRLNELAKMNNIIFTTFLDDLTFSSDHCFKKRIPEIIKIVKQGGFYPAYDKMHYRKGYSEVTGLFVKGDRLELPYSMNKKTRENHHIKSYKEQVRKYNSVRPCLIKHCKKDLRLFEANKKGHRLVTLAPLQNLPTGGL

SEQ ID NO: 3929 - protein, 303 aa, unidentified
  source 1..303: note = Related to JADKIE010000002.1; note = Chitinophagaceae bacterium
MPQKEMINTLTHLAFELKFKLPEIESIINNIDKFYYEKVEIKPDKFGNPKLKNGVIQKRVLNPSITRLKLLQKNIQRNILLKLEMPDYAFGAVKGKDNVQNAKQHQGKKYIFTTDLKSFFPSINHKRVFEMFRSFNFSPTVARVLTQLTTFKGRLPQGAPTSPTVANLVFVKTGKKLLEFAKENKLTFTSFVDDLTFSAPTDFKSKAQFIIETLQADGFKISHNKTNYKTKMPVVTGVVVKNNKLSLTDNFKIKLNNTEDSTPERIKGLQQYAAKVAKTNSSPLLTAIRQPLTGGLALLGQTW

SEQ ID NO: 3930 - protein, 311 aa, unidentified
  source 1..311: note = Related to JADJTY010000010.1; note = Chitinophagaceae bacterium
MNSSQFKKNEFKKLCATIGFKPAQVEELISKLDTYYKEWVEQKTDKKTGDFKRYKDGTIKQRTIRPSLKELKVIQTNIKTRILAPIALPNSVHGGVKKRSNISNAKPHQGNKYQFTTDLQEFYPNIDFKRVYNTFIGLKFSPHYAHWLTKLTTWKYELPQGTPTSTHIANLVFLETDIKLIDLCNKNGITYTRYVDDLTFSSQQDFRHLLNDILQIVTSGGFKLSYRKTKYSDNQTITGINVFLNKIDAPEKIIEKANAEKNTKFNTKPFTNYLNNIRKTNRAKRKPATNKSIAAIGAGRKPNHQQCISKL

SEQ ID NO: 3931 - protein, 300 aa, unidentified
  source 1..300: note = Related to DMPU01000444.1; note = Chryseobacterium sp.
MNSSQFKINEFKKICSIVCFKPNEVENIAKNLDKYYKEWIEKKLDKKTGLPKKYLDGTEKQRTIRPSQKELKLIQSRIKNKILVPIKLPAEIHGGVKGCSNITNAKPHQGNKYVFTTDLQEFYPNITSQRVYDTFCKLKFSPHFSHWLTNLTTWKYELPQGTPTSTHIANLVFLDTDIKLIELCNANNITYTRYVDDLTFSSQQDFKHLLNPILDIVTSGNFKLSYRKTQYKGKQTITGVDVFLNKIDAPEKIIQKSKIEVDTKADLKPYTIYLNNIRKTNSLRKSLPPTLGLAKVGRTE

SEQ ID NO: 3932 - protein, 316 aa, unidentified
  source 1..316: note = Related to NZ_QPMM01000003.1; note = Chitinophaga silvatica
MIKSLRHLEAVIGYKLKDIDAVLDNLHKYYNSFSRTKKSGKKRDIDSSENILRDLHNRINDRIFSQISLPYHVTGSVKYRSAVLNAKYHSGKKYHFQTDLVGYFQFVSNRLVYSTLVSFGFSADVASYITKITTYKGHVPQGVPTSPFLCNVVGLRILDGEILEFCKSRSIIYTRYIDDLTFSSDVDIKDFIPDILQIINNKNFLYSHRKTIYKAGDIVVTGVLTTCNGLKMPERLIEKMSNEVDIIKRKGYENFANQIQRIHKLGTLNAIVDRQRELVFPGRLKDRKKKNASSAVLDLVSLENKKLEIEREINLY

SEQ ID NO: 3933 - protein, 302 aa, unidentified
  source 1..302: note = Related to JAFDXL010000007.1; note = Bacteroidetes bacterium
MIKSKKIFSLVLGYELKTIDNIIECLEDEQKRGKYYNPYKVKKSGGKFRVIAPSRGELKKIQARIHENIFSHIQLPFYVTGSLKRRSGVINGKIHSGKKYHFQTDLVNFFGFVSYRNVLKALKMLGFSHDVAFYITKLTTYDGHLPQGVCTSPFLANLVGLNIDDAMLDFCKSRNITYSRYVDDLTFSSQSDFKDELKIFLSGIIAQGFIYSYRKTKYKIGSIDVTGTKVTNEGIKGTDKQYGRALLIDTKSSSFKGLVGHLEYVEEINDKFNLTTYRNENIFLRFPTRLFPYMNFKKKESK

SEQ ID NO: 3934 - protein, 312 aa, unidentified
  source 1..312: note = Related to JACPSJ010000001.1; note = Candidatus Kerfeldbacteria bacterium
MGGFDYASSLRLDGLAAALGVTVSFLEKLQIYPGAYYDDFAKKKDGGLRKIVKVDWPVRRLQERLHHNVFGKIKLPDFVECQSGRSSIDHALRHKNQTQIITFDIESYFPSITYRRVRQTLAFFGFNQLVSAVIARITIRDGSLPQGTPTSTDIANFVGTFLDRRLLGLCEKHNWVYSRYVDDVAISGFKNMGWAKKLINKIIISEGFRISTKQGGLSVTMVKDVPLVTGVRINKTFIQAPKEYYRSVRQKIYLWQKFGYESAYPGFSKKQSISKLHGKVHYLMYLDKVSKRFNGQGYQLFKQFQKLHKDPA

SEQ ID NO: 3935 - protein, 305 aa, unidentified
  source 1..305: note = Related to WODC01000002.1; note = Pseudodesulfovibrio alkaliphilus
MSLPSSLTKWTPSLVTPPDPLCPIVGIKSPKSLARILGYPLSQLEELCGNIESNYHKKEITKKNGAVRVLSVPSGALRKVQTAILRQLQKHPLHPAAYGAVQRRCHIDNAKRHAAAPYVYCLDFSSFFPSISSNRIYKLLAEQLGCSPPVSNILTKLTTYKYKLPTGSPTSPVLTNILCFPLDNRLNSLACDYGLTYTRFIDDLTFSGRRIPEGFIRKTKEIITSFGLLLNDEKEELFTPYKGKLVTGINVNTNKVRVSRYYKKSVRAQKHQFGLFKDYMTDSEKSKEESRIDGKEQYIRLVQRR

SEQ ID NO: 3936 - protein, 302 aa, unidentified
  source 1..302: note = Related to nan
MSHLHFPINTVSELSTLLSMPIRDLWRLAKNTDKSYFTWKEPKSSGGFRSLCTPDSRLKEVQKKLHKLVFSKIIHSRFSHYGLKKKSNVTNASEHYGNDVIFAFDLKSFFPSIRPERVRKALIDEVGCPAPLASLITKLVTLNYQLPQGAPTSTDIANIVTFRLQRRLYSLAKQWGIKKFTIYADDITFSGNNIPHGFMKLAKKVVREEGYKIHPEKGGVFDKSGNQIITGINITHGLTVGKMNKIWRAERHQNFLQYLKGQLPTTEFDSSEKRFNSRIVYSNFIKKSGLKVADNYLSSAYK

SEQ ID NO: 3937 - protein, 466 aa, unidentified
  source 1..466: note = Related to AMFJ01036084.1; note = bacterium (gcode 4)
MEKWCILPNNLIQKLNKDDVIVASLTRFCKCSTDELFAVLKNRSKENRWWWYGYTQYTKNNGKKIRTISVPRKNLKKIQEAIKDRLDQIPVSLASTAWKIGDSAEKNIELHKHNLYLLSMDIKNAYPSITTHRVYKNLQWALPLKYRCPQLITDEDKDIFIRTITHLCVHDNQLPQWASTSGQIQNIVFSSLDIQIEKKIPELVWSHMVYSRYADDMAISFPHFSTLEILKEKMEKYIQTLKKHRERRSILLDEFSKDTFIVTDNFEQKYLQKKIEDIKELMKWSWLPDEEIYKHIGTLDAYKKNIKYSTWRISDIHDEILKVIWWEWRKINNIKTNMRTPQSDREREINGITLDEEGNKWLNKRKRAQYLKIFNHLIKHSQNDLKGFTFYREKFNTLENFDICSSTITQIIDGIYHRIARIYGTGRIPKPLHEAYQKAKHKRSSHEIYLTYLPNNSDTNNEELLF

SEQ ID NO: 3938 - protein, 321 aa, unidentified
  source 1..321: note = Related to JAGCVL010000005.1; note = Candidatus Saccharibacteria bacterium
MRNNEIRTLKRLCSLLHLKEEYILDLASRANSCYYSYDKKSRKKDGTAKIRHIDSPNIELKNIQKKIDSAIIKPYVNLLPDYIHGARTGKSIVTNATNHAGYEAILSLDIENCFPSITSKRIYYIFRNTIHCSDKVASVLTTLTTKDGVLPQGCPTSASLCNLVLVQMIEKLSEIDGSLDYNISHYIDDIFYSGRYCDLQKIRKPAMTEIGKNGFRPNTKKTLLVKNGRPMKVTGITVNTKVSAGRRRIRKIQRKILKITEKDKAEYDIVLKNRKRNNNSKIKACKIEKLFGEISNVISINKEQGYKLKKKIEAKLNDLIT

SEQ ID NO: 3939 - protein, 326 aa, unidentified
  source 1..326: note = Related to JAHBWW010000006.1; note = Phycisphaeraceae bacterium
MRQEPPTIRRPLEPRVVTIQQLAALVNLPVNQLDRFVLEAPKLYSSFEVPKPNGKTRTIRPPARPLRDLQRMLLEVLQECVRYPRWLMGGVPKRSIFDHAKPHVGWKMVATFDVKAFFPSTRSAMIRPVLERIGISDAAADAVLRLVIKDDELPQGSPTSGFLANLTLEPADRRIDALCRRHGLNFTRYVDDMAISGNTDLTKFQGAIVEAVKESGYEVAPEKIHYMDRSKTQLITKLRVNDKIRPTREFIAEVKADIWECLNVGAAVVAIERGVQLHRLKSSLTGKVSHIRSADREAGEKLKGMLYGVDWNQQLHTKFDVPSLTA

SEQ ID NO: 3940 - protein, 317 aa, unidentified
  source 1..317: note = Related to JACKHF010000001.1; note = Phycisphaeraceae bacterium
MRAEPPVVRYNRSLQISTLDQVAGWVGVELSPLSDTINRASTMYSCFEIKKPNGGSRTIRPPNKVLRTLQHNILRELQSMVRYPRWMMGGIPRRSIFLHAGPHVAKRMVATFDVKSFYPSTNSCLVRSVLERLGFSGEALDAMVQILIKDDELPQGGPASGLIANLALEPADRRIDAICRKHDLRFTRYVDDIAISGEHDLRVYQGAIIDAIGLCGYEVAPDKIKFMGKEQCQVITKLVVNEQLRPSKSFIFEVKAKIRECLANGAFVVAVEHGISVPQLKSKLNGKVSHIKQADQRLGKSLQRKLNGVNWSRQLPD

SEQ ID NO: 3941 - protein, 318 aa, unidentified
  source 1..318: note = Related to JAHBXR010000005.1; note = Pirellulales bacterium
MNMLSQHTMQQNDWPPPISTRERLARTLNVSPVVIGEFVAEPARWYSQFTVPKPSGGNRIIQPPKKPLRRVQRALLRLLYSRLQVPPYLHGGVPKRSILTHARSHLGRKMVATLDVKNFFPSTQQKFVQPIFEMAGIVDEALTDALAITMLAEGLPQGAPTSSLLANLAFVPVDKAVIALCRSRNLSFSRYVDDIALSGNVDFRELKGPLIDRIHAAEYEIAEHKVRFMPASERQVVTGLVVNQKLRPTAEFVATLKSDIRVCLGHGVDFLADSEGISTRGMRMRLSGRAAHIAAADPKLGKRIRGMLCGVKWTTASR

SEQ ID NO: 3942 - protein, 319 aa, unidentified
  source 1..319: note = Related to NZ_CP036270.1; note = Symmachiella dynata
MPIQLHATRKAANLVSNLDGLGKLLGFPVVRLNAVIECPSRHYSSFDVPKKNGGVRTIEPPHRPLREIQRSLLNRLYRRIKIPKHIHGGVPRRSIFTFARPHVGKSMVATLDIKDFFPSVGPSHLEPVFFQLGFRGEALNAVVSLTMLRDCLPQGAPTSCLLANLSFSNADASFNAVCRKRNLLYGRFVDDIAISGNVDFGELRGTFLGIIEAKDFQAAEDKIHFYAQSQRQIVTGLVLNEKLRPTREYVASLKQRIHNCRTFGPTFIANSDGLTVRKLKNSLTSSARFVGQSDPKLGKKLRGLLCSVAWGASTNRFSD

SEQ ID NO: 3943 - protein, 348 aa, unidentified
  source 1..348: note = Related to JAGQOA010000100.1; note = Planctomycetes bacterium
MSYRHLLKPGARRAEALVDVDGLARACGQDATRLRRLRENLPSAYGRIERPKPKGGFRIIRPPRQDLKEVQRGLLDWLETRFTAKPWMHGGVAQRSIISHAQPHCGKAMVAVLDVRDFFGSVRRERLAALLTAAGLEGEALETLLDLVTLDDTLPQGAPTSCLLANLAFFPADQRFRRVSAKRGLVYTRYLDDLALSGDEDFKELRGPLVEALTLEGFQVAAEKVAFMGRHEPQVVTGLVVNDRLRPTRAFREALIAEINDCQIEGLGARSDRLGTNPQRLRARLLGQIRHLARFDPAPARRLERRLRSAPGGRATQSSRARRRTSKASSSSSAYLAQESSEPPSRRA

SEQ ID NO: 3944 - protein, 327 aa, unidentified
  source 1..327: note = Related to nan
MHYELLRRRPAQDALADVSDLARALLLPRKGLCELAENTESHYIEIRIPKRHGGLRRIHAPDPSLKKAQRAVLRLLEDRMVPKSWMHGGVTGRSIVTHAAPHCGRCWVAVLDLADFFPSVRRSRVQAILEAAGFTGDALKVLLALTTLGGALPQGAPTSSHLANLALFPLDRRLRSLARRWGLTYSRYLDDIALSGKRPLRPLKGPLHDAVIREGFRPSPSKTAFMGRHEPQVVTGLLVNDRLRPVKSYRRALVEEVEACRQDGPKVRAALQGISVARYRSRILGRIRHWARFDAEKAERLERRFRHLPRPGAAARETDGREKVGLR

SEQ ID NO: 3945 - protein, 302 aa, unidentified
  source 1..302: note = Related to JACKGY010000008.1; note = Planctomycetes bacterium
MWRVLNDDFAHWSPRRLAELLGRDLDRLVQLTEGTAGRYRAIRLPKRGGGHRELAVPEPELKALQHDLMVLLDRALEAPPWVLGGRRGRSFVDHAARHQGRSWLLTVDVADFFGRIGPALVAPVLREFGLPEASITLIVALAFRHGALPQGAPSSPLLANLAMAPIDLRLRRLARRRGLAFSRYFDDLAFSGDRDFGELRGPIAALLRQAGLPLAEHKTRYTGRDRPQVVTGLVVNDRLRPTRSFRGELEEELRLLQGGALPRPRLEARVEGRLHHLARFDRREADRLRRRYGRALPSSSSS

SEQ ID NO: 3946 - protein, 310 aa, unidentified
  source 1..310: note = Related to MFNO01000025.1; note = Candidatus Levybacteria bacterium RIFCSPHIGHO2_01_FULL_38_26
MLKIVPLKLNSIAEIENILGFSFDKIKKIVENKNNFYSKVSIVIKGKMRILDIPNSSLKIIQGKLAHYFGENVVWPYYVQGGVRNRSVKTNARQHSGKKFVLNLDIKDFFPSITTKMVKNSLMELGLNQKVSTLISELSTYENRVPQGSPSSTYVANMFFLKIDKLINNFCKKHSLIYTRFVDDLTISGKNNIFPYKGTIIQYIARNRLIVSEKKTTIRSSSEKQIVTKLVVNDKIRPDKKYILTLKKDIRETWKGNEGIRKVALKNNITMPKVKGNLWGRTNYIRQFDKKIGREVRALLVKSNFVDVSS

SEQ ID NO: 3947 - protein, 323 aa, unidentified
  source 1..323: note = Related to MHGR01000114.1; note = Omnitrophica WOR_2 bacterium RIFCSPHIGHO2_02_FULL_52_10
MKLLKFLFDITLNLTIHPHKSLKPHQIQTEQDVARLANQEVSALQEIISNKEEHYGFFRQEKKDGTLRDIHPPRKKLKLIQRKIKKFFDHFPWPRYVQGGIRKRSILSNARLHCGKKMVAWLDIRKFFPSTNPSMVLESLEKIGIGKAASKLIVELGTYKNALPQGSPASVSLANLVFLDADDRFELFCKKHRLIYSRYIDDISISGDIDFRPHKGQFLKFIEQKGYVVAKDKIDFIGRDRPQIVNNLVVNDKVRPNKDFINDLKNDIRCCWTEEGMELLAADFGLLPRELQRSLWGRINFTKQFDPKLYKDLKAIMIGAFFK

SEQ ID NO: 3948 - protein, 313 aa, unidentified
  source 1..313: note = Related to JAAZNU010000228.1; note = Veillonellaceae bacterium
MPEKRTEGIKQITQECVATLESILKNKSALYYEFKIPKKSGESRVITPSKPPLKNIQHRINKYFARKQFPACVHGYVRNRNVLTNAQSHVGKKWVITIDLKDFFPSCDTIKISQAFLNIFSNDQTINLLTELVTFNNQLPQGTPTSPIISNLVLHNLDQEFVRLSKKHGFTYTRYADDLTLSTNGKNPHDFLKAFTDIITSNGFKINPDKLKVMPCSARQIVTGFVVNKYDGNGFLKPTKKYISDFKILIRNCYQLNMFQQIAADQGKTVPKLKRSIEGKILYIKHANPALAREISNLRYPLKPSATEITVNI

SEQ ID NO: 3949 - protein, 383 aa, unidentified
  source 1..383: note = Related to JADJQZ010000001.1; note = Candidatus Obscuribacter sp.
MTHQDSKLTIDDIGNKLGVTPQFLLEAASAASTQYELFDLPKKSGGTRTICSPKNELKRLQRTILEELLHTFAMPDYVHGCVKGRSIVTNAKPHTNKPLVLTIDIKDFFGSINPEQINRIFRISFNCDDKSAEVLTALTTYGTFLPQGAPTSPALANIAALPLDAAILDICEQSGLQFSYTRYVDDITISGDNRLALMLASFYKTVSAHGFTASPGKLRVGRPSNRQKVTGIIVNKKMAPPKKLIRKIRQQLYYCEKFGIEDHCRKEGIEEQEFLNQINGMLGFIRLTQPTTADLFKIKLTTLQGYTFVSVDESVLLILKHAVEEEKHVNFVYHGSTRKVAPVEVFIDDEGMKFMRGYQTVPEQKWERYMIPDIQSLRLSENA

SEQ ID NO: 3950 - protein, 383 aa, unidentified
  source 1..383: note = Related to JADKJY010000001.1; note = Candidatus Obscuribacter sp.
MTHQKSKLTIDDIGKRLGLTPQFLFEAAKTAETQYELFDLPKKSGGARTICTPKGELKRVQRAILEELLQQFEMPEFVHGCVKGRSIVTNAKPHVDKPLVLKIDIKDFFGSIKPARVLEIYKDIFDCDEKSAEALTALTTYGNFLPQGAPTSPALANLVALPLDRTLLDICEQSGLQYDYTRYVDDITISGDSRLGQLLAAFYKAIQHHGFIASPGKLKVSRPCNRQKVTGIIVNKKMAPPKKLIRKIRQQLYYCEKFGLEDHCQKEGIEEEEFLDRINGMLGFIRLTQPVTADLFKSKLTRLQKFELVDQDESILLLLKLAVEEERHVIFSYHEATRKVAPVEIFIDDDGFKFMRGYQTMPEPKWERYLIPDIRSLRIFEKL

SEQ ID NO: 3951 - protein, 404 aa, unidentified
  source 1..404: note = Related to JAFEAT010000019.1; note = Cyanobacteria bacterium SZAS-4
MTSNLSLTLTDLCDELELPSQFVLDLANSAEDEKRYHSYKRLKKSGGARYINASVGSLKRLQRSIHERILSRHKMPEHLHGGIKGRSIVTNAAAHVGKKLVINIDLTDFFSTIKVAVVKQIYMRDLHFDDETATVLAQVSTFKGALPTGAPTSSALANLAGLVVDDAVISTLTKKIERTEFGYSRYVDDITISGDDRIVEILPDIFEAVKSAGFTCNDKKTRILRRSTRQWVTGVVVNRKLNPPKNIVRKIRQYLYYMHRWGVEEHCETHGINPYRFMRQITGYIAYVRLTQPELADEFLRSLKPHLARFHQVDEESAPSTLNILKVMIDKEEIAHFLYDREDRAVNHPSYEPVAVSVAPESLDVDDDGTLTMRGFELAPKQRWGIYHLESISALSDKPLTDVT

SEQ ID NO: 3952 - protein, 438 aa, unidentified
  source 1..438: note = Related to MEZY01000015.1; note = Candidatus Berkelbacteria bacterium RIFOXYA2_FULL_43_10
MHSLALEAVIADLGKENCRAALTLLAEMVGVERQAILDCLELLNRHGEVEDGERVVAYTSFYRPKKSGGKRLIIAPVEPIKDLLRKVKDEILCRSSLPRFVHGYRTRRSWLTNARVHFDAGAVYAINLDIKDCFPSTKIQLVRRVYWQTTGRMLRDEGIPEEVARAAVEILTALSTLKYGRSKVPVLPVGSPTSPALVNLVLTPACIRIARALKRLPGEYAFSIYGDDLTVSSREPLPPEVKMIVLREWQRLGYRANPGKTRVMRRDGSGTPIEVTGLILGRDRILLPDDWLQRTELMLIAYAGSPKYPGDKAKRGLQSRVSMVRKLYGVEMPGRVGNCLKSLIAQAKSNLVMRERLAELLRGKMPEVVEGSEEAPEPAMEQAVEQDRDWRTEYGPVPQSMDARGQLFWDFDDDSPGGADDPFVPEHGQLEQGEWEGE

SEQ ID NO: 3953 - protein, 310 aa, unidentified
  source 1..310: note = Related to JAIESO010000413.1; note = Burkholderiaceae bacterium
MNSKQAMKWADIRPILQSSEGLSRHLSVSEDTLFRLSRTASRLYTRREIEKGRILNLPSGELKRIQSLIHKKILLFAPYHASIHGYRKGRSQRSAAEPHQDKPMLLKGDIQKYFPSISPDAVLKAFRQLGISYQVSKLLVDLCTHEGQLPQGAPTSPLISNLIWSRPARRIRGFADQHGFDHTIFGDDVFISGACRAKKFKNLLKRIIREEGLSVSERKTQALPCTTRQVVLGLVVNKNLGVDKDVRRDIRQVIHNYVSKGFSDPLGSNLRAAKTSLAGRIAHIKHINPSQGQKLQREFKRINWEEGASV

SEQ ID NO: 3954 - protein, 301 aa, unidentified
  source 1..301: note = Related to MSXM01000005.1; note = Nitrospira sp.
MKWGEVRAHLQSIDSLARYLGVGKDTLFRLCRTSSRCYVRGEEPKDSGGVREFYKPRGELKEIQRLIHKSILLFAPSHEAIHGYRKKRNQRTAAMPHLKKDMLVKADIKTFFPSVKPKQVYDAFMGIGLPHCVADMLTKLCTHADQLPQGAPTSPMVANLLWLRPARRIQGVADKHGFGHTILGDDVFLSGKKRAAKYKSFLKRVISEEGFRANDRKTIAVSHNGPQTVAGLSVNQKVNVPKAYRKALRNEIYRYALSGEDENGLARQKGRASLEGKIAYVKQFNSLQGAKLQQKLAAGRK

SEQ ID NO: 3955 - protein, 302 aa, unidentified
  source 1..302: note = Related to WIAI01000061.1; note = Nitrospira sp.
MFDSRLATVEELSVLIGVPSGELIYFATAIEKNYRRKVEHKPDGDTRIFFVPSPGLKKIQKCIHRRFLRKLPVHESIHSYRRRRDTISNASVHVGKQILAKLDIKKFFPSILPQRVYRVFLSRGCSPSVASLLTKLTTFENQLPQGPPTSPGIANQVLTPLAKRLKGVCDQHNLTLSIFADDIFVSGSEHVPQVNNLLKRIVESEGFTFNLRKTEMRWPGEKKIVTGISVTARINIEKGYYRKVRALVHHAANHGYMHLFPGVTPLSAKDKLQGMIRYISRLNASKGHQLQIKSLQIADATK

SEQ ID NO: 3956 - protein, 332 aa, unidentified
  source 1..332: note = Related to PHGD01000001.1; note = Nitrospira sp.
MRSNNCFSKSKVFVWPIWARSLDNHVQDGIPLADLTDLSDLARKLSVTETDLQAIAQTHSLYYRRKDKVKPDGRRRTFYIPHGDLKKIQGAIAKKLLAPLPLHRAIHSYRKGKSTLTNARVHLGSPFMVKLDIEDYFPSISRDHVFKLLGRLEFSGPIARMLAVLTTFKNQLPQGAPTSQAIANLVFDEIIKKRIAPLCEAHNLEVTVYGDDLTISGSKRIVGLKRLLETIIKEEGFKVSTKPSKNQLLREHDQKMVTGYVLRGDKLDVPKSRYREVRAIIHNCLKNGGASQFDCDVKTAKLRLRGKIEYIRKVNPLRGGKLMRDFERISWM

SEQ ID NO: 3957 - protein, 303 aa, unidentified
  source 1..303: note = Related to JAGRAM010000124.1; note = Bdellovibrionales bacterium
MSLKVPPSSIPSLGQTLGLPDGALEACIRDLPGLVSRCPKRKPSGSMRRVYAPRDPLHDIQQRILHKLLRPIEHSSELHGSVVGRNPKTNVTPHVGAFVSISMDITDFYPSISKARVNRIWIDLGYSRRVAQALTHLTTFDQHLAQGFPPSSDIANIVLEQDLLPRLRPLCSQHHLTLTMYQDDLTISGGARLRSLGNLIQRILLQSGYPVNVDKTRISNPGQRHMSTGLVYNTKPNIPKERYRALRGELHRCLTNGVITEAVDRPIWQYKHHLASRIEHVRYHNPSRANNLQIVFDRIDWGI

SEQ ID NO: 3958 - protein, 329 aa, unidentified
  source 1..329: note = Related to LJVD01000036.1; note = candidate division Zixibacteria bacterium SM1_73
MKCTKIIINQTNKEEGILRINTIDELAERLGHSPGELKRIANTKIRYYKVNEKIKPSGKLRTLYEPMGPLSKILKLIKERLLDGIELPECMHGYRTGRDYISNACVHVGKNIICKLDIKNFFPSIHHGRVFNILMDLGCSKQVAKLLTRLVTCDNHTPQGFNTSPTLSNIVVSNLARRLQGLCNHYRLTLTIYSDDITISGNIEQKKFEGLFYKELLPIIEEIIKQEGFSLNFGKIKLVKRRDSQKVTGIIVNKKPNIPKQKRRELLSTIKEYQMNGVSISHDSDLLKVKQSLRGKIANAQRVNRSFGQLLLREFEKIDWSRRVSFSSN

SEQ ID NO: 3959 - protein, 511 aa, unidentified
  source 1..511: note = Related to JACNLI010000952.1; note = unidentified bacterium
MLKNTLNIQSIEELAEKLDESPEYFKSISKRIPKLYYSPTKRKKPKGGVRKTNEPINKLKSLQSKILRNILESVPLNSCIHGYRKNHSPLTNAKPHVGKKFLLKLDIKDFFPSIHYKRVEKLFSDLGCSLEVSRMLTQLTTFQHYLPQGAPTSPYISNLIPANVDKQLQKICRRNNLPPHKRYGDDITISGNKNFSKLIPEIENTIKQNGFKISKKEFLTPKDRKVVTGLIVNTKVNVPKEKVRKVCAIIHNCIKYGPDSQNREGKPNFKDSLRGHVEYIRSINPPLGDKLMQEFNKIEWNSPEKITISSVSIENNEVVEIFVDGATSPNPGPSAIGWIAFRKENKLEEYFEYIGCTTNNIAEYTAVIRALEAAQSKWPQEKIIIRSDSELVVNQVNGSWNINQQYLADLCKQVKKSGKDTEWQLLWVSRKENLAHKLSMRGLYEEKIKARASGLAVRKSSPGIYKVESASGHGMYDVTLAPDSCTCLFFQKRKCVCKHIFAARIAGKADN

SEQ ID NO: 3960 - protein, 327 aa, unidentified
  source 1..327: note = Related to JAKLQW010000066.1; note = Candidatus Omnitrophica bacterium
MDGKISEFAGSALYSLTYKIGYNEEKLRYILSHFREQYYKRKELDKKGKKRIISSPSKNLLKLQRLILAYISKKTLFPETFHGYKKKRSNLTNARCHLNKRVITKLDIKDFFPSVHFKKVLALFGSLGFNEQESKILSRLTTADYCLPHGFSTSPTLAALMLINLDKRLKTLFMKIGLDYTYTFFSDDITISGNKGIKTLKKLICKIFRQEGFIVNESKIKEQNFWEKQEVTGISVNEKLNVPYDYRHNLRAIVHNCITLGPRTQIDRFNSEFCLDRKLDLSLSKFRERIFGKINYIKPINRELYNQLLAYFNKINWRTNNPVSVLV

SEQ ID NO: 3961 - protein, 319 aa, unidentified
  source 1..319: note = Related to MHGQ01000042.1; note = Omnitrophica WOR_2 bacterium RIFCSPHIGHO2_02_FULL_50_17
MCAVNERNYFDTPSIQSVAEKLRLSANALHEVLDKFHTHYRKKSETKSGKTRTYHCPFPVLRDIQKRINKYILKAIPLPSSMHGYVAKRSILTNATVHLGKKNIANVDIKSFFPSIHYQRVQRIFRQIGFNEGETLVLTRLTTADCCVPHGFPTSPRLANLVLINADKRLRDLFGQQKINHTFYSDDITISGNKNLRQLLQPIRTIFRQEGFRIHRKESSPQKPYFKRQKITGLLVNNKRLNLPREDIRSLEAIIHNCLVKGPSSQIAEFEAHFGPPKRELSTVQKFKERVLGKLNNVRRVNCDQYKKLKKDFDRIDWN

SEQ ID NO: 3962 - protein, 300 aa, unidentified
  source 1..300: note = Related to DPTL01000176.1; note = Elusimicrobia bacterium
MCEQSIITNLKTVEDIAFTIGVDEFQLREISQNIPLHYKQIYIRTSPTKIRKISKPNEKLKAIQKLVNKRILQRIPLPDSVHSRKKRSILTNAEQHVGKEVIVSLDIKDFFPSISSLRVNQLFKKIGYNSEASAVLTRLTTLDGCLPQGAPTSPSIANLIITDMDKRFETLCAEQEFTYTRYTDDITISGDQYVRKFLPLFCKIVRQSGFLVNEKIKVEPRSRRQETTGIVVNVRPNIPKEKHRKISAIIHRCKTFGPSSVTNEDLSKFRERLLGHISYMSHINPTLGRRLLNDFNHIAW

SEQ ID NO: 3963 - protein, 303 aa, unidentified
  source 1..303: note = Related to JAFNKF010000236.1; note = Candidatus Brocadiales bacterium
MSLVVIGSDFHSPEELVEFLGLDYSEIQHILQTLSYQYRPLLIPKAEDEWRKLLAPKRELKHTQRVVLDMLLDDVPFPDSIHGYRKGRSILTNAEPHIQQELVINIDIENFFPSVHPERVKRNFLMLGYRDPVAKFLVRLCTFNHQLPQGAPTSPALANLAISRTMLALEKFCKKRGINFTGYSDDLTFSGPQAIEKHIETLMSIIRENGFRVNKNEIKIQPSSQLQEVTGLVVNDKVNLNKSLKKKVRAMLHTARTNGPESLHRDNKPYRKDQLLGLILHTKNVDQKLGEKHLKEFYEIDWE

SEQ ID NO: 3964 - protein, 305 aa, unidentified
  source 1..305: note = Related to JAENIR010000027.1; note = Parcubacteria group bacterium
MKKIITHKNLCKDIKTTDDFCRILSLEKSFVQKHIRLCPLLYVEIPLKKKDGTPRPIRAPKDKLKIIQRAILKNILSDIKLPPCCYGFSKNKSIIENAKVHSKNDFLLNLDIQDFFPSVHYKKVQQIFLDVGLNDQIAGILCSLTTYEYRLPQGAPTSPFLASFALSNLDYRLMQLAKSNYLTYTRYFDDISFSGNKRVVVLEKDIMRIIKEGGYVVKIKKRKLFTKKEVKEVNGILITDKKLSLKNTDELFNYVSDINKYGLSKLQTDNPEKERQSIKGKIAFLKQIDETVTHSIETIFNKINW

SEQ ID NO: 3965 - protein, 304 aa, unidentified
  source 1..304: note = Related to MHWC01000010.1; note = Candidatus Zambryskibacteria bacterium RIFCSPLOWO2_01_FULL_42_41
MIIRNLSKRVETIDDFCHLILLDKLYLQKLVRLCPLHYIEIPFKKKDGTPRPIRAPKEKLKIIQRVILDNLLSCIKLPPCCYGFSKGKSIIENAKAHLRGDYLLNLDIKDFFPSVHYTKVEKIFLGMGLDRDFTNILCNLTTHEYKLPQGAPTSPKLASVVLHNLDYRLLKLAQSNHLTYTRYFDDISFSGNKRIITLEKDILRIIREEGYSVHTSKDKKKLFAKNETKEINGILLKDKKLSLKNIDELFSYVENINRHGLSRLITDNPEKERQSIAGKISFLRQIDPERSHKLKVLYDFIEWL

SEQ ID NO: 3966 - protein, 336 aa, unidentified
  source 1..336: note = Related to LBPL01000006.1; note = Parcubacteria group bacterium GW2011_GWC1_34_10
MDQEIDFDSHEDLPVLPPHSSPFCWRCFVFMKKILQIQKSKSSIDTREKLISFLGLKKEKFEECFKVIPLLYELTPILKKNNAGYRKLSIPKQELRDIQRCVLDKIFTDIKLPSCVYGFSSGKSIVENAKYHSKNDYLLNLDIKDFFPSVHFERVRQIFKDLGFNDSVSEILCILTTYNHELPQGAPTSPLLASLALNNLDKRLMKLASLNHILYSRYFDDISFSGSKRILDIEETIKQIIRSENYRINSKRYLYGKGEAKEINGISISSGKLFLKNTDDLMGYLEDLKNFGVSKLRSDNPEKERKSLIGKISFLKEVDIEKGVEAKNLLETIKWL

SEQ ID NO: 3967 - protein, 307 aa, unidentified
  source 1..307: note = Related to MHNL01000005.1; note = Candidatus Ryanbacteria bacterium RIFCSPHIGHO2_01_FULL_48_27
MKKIYPQTFSRFKDLRIELLPNLFGVRDMEFYRVSSNAHFLYRPIEIKKKSGGVRQIYAPSGRLKFLQRRILSKLLEKVRLPPFVFGGVKGKSIINNASCHLGSKYLLNLDIENFFPSVNWQLVRKLFIDLGCDSSVADVLTRFTTLDYRLPQGAPTSPYILNLVLSNLDRRFFLLACSNRLTYSRYFDDITISGGKRLIGLEESFLEILRQEGFTINLKKKYLYGPSEDKKVTGLVLKSGGRMELVSMSGLLKYLNELITEGLSNLDGINLEKEKQTLLGKIEFVKSIDKVDGQNLNTLFNKIKWV

SEQ ID NO: 3968 - protein, 379 aa, unidentified
  source 1..379: note = Related to QMZE01000001.1; note = Archaeoglobales archaeon
MTHGFSNTEVVMIKTPDIPEDMPFLIDDCTLAFFLGFNTRILWYAITRKDELYTRLTIPKKSGGSRVIHAPDKVMKLFGKRILERLLNPLQKQLGDHVTAYREGRSTQMAVEQHVPECPICDTAPPGTEHDCPHRGTYFNLDLKNFFPSTRRVWIRQYFKQVIGYSHYVSDLLASLVTVYAFTDSSGYQFSGVPQGNPASGAICNLVADWMLDTPMLALIDDLNKEQGLEGEYAWKYTRYADDLAFTCGKRFSYYKRMAILNKLMNVCTRSGYAVNHTKTRIWDGRHRKALLGAVFNTHTNIPRDQYISVRSLTYNCWKHGFESQCSRAGKDSEEELRWWLLGRINYMEQIHSGKGQQLKSVYNAAVQKYDKNKTHPTA

SEQ ID NO: 3969 - protein, 385 aa, unidentified
  source 1..385: note = Related to QNCB01000002.1; note = Planctomycetes bacterium
MTYGFTESTFETITVPDTEFLLLDDCTLAFFIGFRNKTMWHLLQNKSDQYKVFHIPKSNGKKRIIHAPSPLMKVFLHRLHARLLLPLQEQLGDHVTAYRPSRSIVDAVSRHIPACDICDTAPKGQTPQQHTCPKQGVYIKMDLKNFFPSTRRAWIRHYFQSIGYSFHVSGLLANLMTVPIKNSKGIDDDKYRGTPRQQFFHGTPQGAPTSGAICNLVANHRFDQRILEYFNDRNKREGLESPWDWRYSRYADDLTITCGQDIPAAEKKEIAKDVTQIVESSGYKINRAKTRIASAFYRRKMLGIVMNQKPNIEYNEYLRIRAIVHNCMVSGIETQHERAGMTTPEELLQYLRGKVSFIRQVHSDKGDKLKAELDVAIDNWKAHDK

SEQ ID NO: 3970 - protein, 346 aa, unidentified
  source 1..346: note = Related to PFIR01000325.1; note = Armatimonadetes bacterium CG_4_8_14_3_um_filter_58_9
MPSYRETRVDIVEFPLEVPYELPHAIDDMSLAFHLGIRNSTMWWMIHDKKKMYKVFKLPKRGRPGRYRNIQNPIDVLKNVQKNILSRFLSAVPVMAHIGAYVPGRSCRDTAAQHVGKGVIVSLDIQDFFPSMRRSMVKQCLHRKIGYGYRVASLLAELMTYTNFVPQGAPTSGLIANLVAHDRFDRQILRDLKELDPQWTYTRYSDDIDLSHPEVQEPDRLTAIIALVRDAVESAGFKLNQRKTKVEPHWKRQKVLGMVVNERVNIPRYEYMRTRSIIHNCLVDGFDNQFERAGMNSASGLKSHLRGKLAFFRQVDPIKAQRLKDQFDLACQMHADVQDNEVRFDS

SEQ ID NO: 3971 - protein, 345 aa, unidentified
  source 1..345: note = Related to NZCM01000006.1; note = Pseudomonadales bacterium
MSSYKETELSYIDLPSDSCLQTTWPWLLDDFALALQLGIRCKTLWFCITTKDKQYKRFTIPKRTGGRRPIHAPEPVIKWIQQQIHERILKPFPILDCVGAYVEGKRCADSAQVHVGAGVRIGMDLKDFFPSHGRARIRNFFKRHYGYNHQVASLLADLCTVREGAHHYAPQGSPASPMLCNMMAQETLDREIMRVLGPHGWAYTRYSDDLSLSHKDDLPSKEVNQAIKQVTKISKESGYRINLKKTKVQRRWRRQQMLGIVTNEKLNISRPLYRQYRAILHNCLHQGVEVNALRFGWDPPESFISHLEGKISYFASISETRGGKLKTMLHEVKRALEEENAQTHP

SEQ ID NO: 3972 - protein, 372 aa, unidentified
  source 1..372: note = Related to PCRT01000055.1; note = Candidatus Moranbacteria bacterium CG23_combo_of_CG06-09_8_20_14_all_41_28
MELNQLQQQLSSQNPVYPQLSLYPVASPLFTIQTNRQLALKLKMKFANRLTYVGMNKLNHYSTLSIRKRGAAGKYRTLYNPDQPMRLIQFKILKEILEQVQVPDYLYAFEKGRSIPAMAQKHVGKKVIVSVDLKDYFQSIKQYHLNQVFKHLGFGEKPALLLSELCTYKSFVPQGALTSPKLSNIITTYTFGPLIKEYCEERGYTLTIYADDITISSDSLIDDMGSDTVHSLISYLKETVGRFGFRVNSEKTKVMKYYQRQYVCGAVVNSKVNLQKSERNTLRAIIHNCEINGIEAEASKTQITEDEFISAMNGRLNWFNQLNPQAGSHFINQFKEIYGRSTANVRNSQDVRVEELVSQGVNNVEVQQAQTA

SEQ ID NO: 3973 - protein, 421 aa, unidentified
  source 1..421: note = Related to nan
MIKKIIERFLSIFKREGTTSEKELPETEHKPELHTNLPSINPIKTSHKSSVTQNLLKERLKEDNILLLGHLVSKDEGKSNLKIPGIPNFNTISDVLEYFEKEYKIKKSKLANFASFSSKTNQFYIERKILQKSSKIGNKARYIYIPKPFVKFVQKVILKDILEKVETPPQLVGFTKNKSIKDAVVSHVKKDVVLILDIEKFFQNTTAKKVFNIFKNIGYSREVSLFLTALTTTKVKVENKKGFKGKRALPTGSPTSPYLSKLALIDFVAELNELIKKWQNMPIKDVDFSVYADNIIISFNTENKEKRKEISKGIIENLQELLKKHGYKLNKEKTKILTKKKKVLGLVINEKINIDRNYYRKLRAEIHNLWKNKQRFGESSFQIDEKLIQKIRGKLNYLKLINPSKYNSLFIKYSTHLEELF

SEQ ID NO: 3974 - protein, 389 aa, unidentified
  source 1..389: note = Related to nan
MLKNIFNYIKKILKLENKNKTKSVYLSGLKIKTTDNLKTNPLEYFKSEERKLLEVNSSINPDIPYFPSIKEILKYFNDNYKVLPKMLINFALFNTKTSDFYIEKRIITKNKERYIYIPKNFTKKIQKIIKKDILDKLTFPEEICGYIKNKNIKLAVEKHVKKDILILIDIKNFFPGIGRIKVRKAFENLGYPSDVAAFLTALTTTKIKYQEDNKIKTKCALPIGSPTSPTIANLIITNINNQIKNYFKTLQNDNNISSIDHTIYADNIIISFNTSLKGQDLKNITNKIIIELKKIIAKNKLKINDSKIRVLKKRKIVLGLSINQKININKKYYKNLRAEIHNLSFNKNKLTKEKIETLKGKLSYLNFINPNKYNNLYKKYHTRLSEIFQ

SEQ ID NO: 3975 - protein, 1018 aa, unidentified
  source 1..1018: note = Related to WJKO01000099.1; note = Candidatus Lokiarchaeota archaeon
MNSINYSTKYKFVDDNLFLIAKINPKTKKQCLVFQQIDKESRNVIFSRQLTCIHTAVTRISIADYESMINDDSERKKFNNNLLNIISTENLEPIDLELDEKYFAFKSWVQGIAESGLSAILIQDEIERMALINNPISIFLSSCLIKAEPDFIDDYLALIKQSCKNKDIWNKGNENRDNWHRSSLIASVDRIITIIKELDETELLVETVYKLIKFYITESLPTCVINFILEKFDFNILGDLLAELEYDWIVKIYNDSQLEERNRDLIFSFRIETDSEFVNDYLEVIKKEANIKIKRDNSGKEDDRGENPSLKKKVKKIIYVINHIKKEQSRRELSYKFFKLYFTESLPLQVMILIFENINSYTLSNILDNLENDWIKKILNDYIQSIKIKCKNNYEQRESDKIYESWNKQSLRYSISIILTFIERMENPKKRSEVLYSVFKFYFTECLPVYVLNYIFKTVKKKFLREVLSDLERNWVITAYNTPDLKKEHKFLIFSFLIATDSEFLNDYLKVIKLCNSGKDHNRENVSSLKKSVKKFIRVINDIENYRIKKKLLYKLLDLYFTESLPSYILRLIFDTMNKKNHSNILDLMQNMPNNWIVAIHNIEDFYNKKCLFNQFCRKHDLSDLLFIQDYSIWNSTMSHRWRVFDVLKHIDREEINKKARKNNIDSFFIRNCITKVKSKKNTIEELVKHKTKVPKIGSIYEFCVLANYNPKKLKRWLAPQISLHKSYIEKKIPKRKGGYRTLHIPYPKLKRIQVWIKEEILDKLPALQCATGFIKNKSTKNNAKPHCQKKLIIKMDLMDFFPSIKFWQIYRIFRSLRYIHEISIVLTYLCTVPLAKHITHKGNQKEYFLETSFRFLPQGAPTSPGLSNLVLIEADKELQNLTKSLNMSYTRYADDLTFSVNDSEFKIRPFIQKVFNIVRKHHFWVNKKKIKILRPYMQQRVTGLVVNKEVHIPRSYYMRIRGILHKLENYGSEMPLEERKTLKNMVSGMIAYMHSIQPRKAEKMINWYNRIKINVSK

SEQ ID NO: 3976 - protein, 452 aa, unidentified
  source 1..452: note = Related to JAAFKL010000269.1; note = Candidatus Heimdallarchaeota archaeon
MIAKKKVKKSKIEKLPVRVKKMLNIGLWSYEVQVPDDQTLERLHLLDRDIIKRKKDIHIPETGKKQIYRQAEKQYDKHSSKKRSERKKLAPIRQIKKKEDWEEFKKVNFVHLGTSVSNWLNLRVENTDKLNKVGLPSISDSHQLAKLLGISIAQIKYFAYHRKSSQVNHYVDFYIPKGKRGRRLISRPKKELENIQSIIKKEILDKISFSDAVFGFIPGKSHINNAQEHVKRDFIINIDIQDFFPSTNFYKVRSIFRNLGYSGEISSVLALLTTKQDTRSITIGEDQYHTFTENRYLPQGACTSPTLSNLALVKVDNQLIKRSIELGYKYSRYVDDLTFSINKPISKIKTLLYMVRKTLEYHGYEANPHKTKILGKNNSQNITGLVINSGESNVPRYWRRRLRAAVHQFQYIKDDEIKSIELVRLLGCINYLKISHSRLAQNYFELVTKYYQ

SEQ ID NO: 3977 - protein, 334 aa, unidentified
  source 1..334: note = Related to JAAYWD010000064.1; note = Thermotogaceae bacterium
MKLNDFNDVSCVLGEELKMLTYLKKLKNRLYTSYYIKKRNGKREINTYLYKRRLSDLEDDIPQLHGYELAKLSRASEKLEEIHRKIDSRILDEIELPECVNGFKKGESIKKAVQPHVGNDYVACLDIHNFFPSVKSDYVLEGLQSCGIGADAAWLIARLVSYKGHLPQGAVTSPKASNIAFMKVDKQILELSRSKGITYTRYADDLVFSANFELKDFVEEAIQLVTNAGYTINSQKIKFYGPKEPHYILGIIANSKLNMPRDKRRNLEAAIHNYVDKHLVPAGVNEIRYKKTLLGKAAYMLSINPNLGRLQKLVMKLREFDPNGIEFERIYLGD

SEQ ID NO: 3978 - protein, 343 aa, unidentified
  source 1..343: note = Related to NZ_AP014509.1; note = Thermotoga caldifontis
MNAEAVALEIQEPLKKLTYLEKIRNRLYVEYYISKRSGGKREICVYLCDSKEAQARLKNKLRTLKKNDAELEKLVRAAQELKTVHRKLKELLDRIPLPDCVFGFRKNESIVTCARKHVGKKYVISLDIKDFFPSVTSDMVLRQLKREGFEDTGAWLIARLVAFKGVLPQGAITSPAASNVAFKPYDEKLQKYFEERGFVYTRYADDVTVSTDQEVTDEMIQQIVEETSQIIAPFKWNAKKIKIYGPNEPHYVLGLIVNAKPNVPKQKRRLIRAMVHNFVRKHALPQGEDPIRYKRKLMGKLAYCLFVNPHIESLLELYEELRKFDPNRVSEWKSLYVSEEEGE

SEQ ID NO: 3979 - protein, 320 aa, unidentified
  source 1..320: note = Related to nan
MQKIGYANRLNLPRKLLTYLEKIRSRLYADYYLRKKDGSKREIAVYVCDSRIASQLDEKLVEYSKVLKLVHRRIKNLLDETIDLPDCVFGFKKNCSTKIAASKHVGKKYIFSVDIKDFFPSITSDMVQQALMNEGVEQNDAWLIARLVAYKGRLPQGAITSPTVSNVVFKPKDLQILKLCERYGLTYTRYADDLTFSTNDEINWVEFTDELEKILQPEYRINTKKLKIYGPKQAHYVLGLIVNRKVNTPKSYRRTLRAAVYNYLNGKVPYGVDPVKYKATLKAKLGYALYINEIPSLRRLYEQLKRFDPNEVKNWEHIVV

SEQ ID NO: 3980 - protein, 307 aa, Vibrio parahaemolyticus
  source 1..307: note = Related to KK081893.1
MRLIKQLAQELNKSEIEVSHFLLNAPKKYKVYTIPKRTSGHRTIAQPSRELKEYQRKYLELQQLPIHDVAMAYRQGVSIKQNAIAHKNNPYLLKMDLENFFNSISNILFWEVWESIQPLPSKQDKKVLEQLLFWCPSKITGGALILSIGAPSSPLVSNFFMYLFDCALSEKCGEKNITYTRYADDLTFSTKSEGVLFDIPKLVEELLHEKFGNHIKINRKKTKFSSKAHNRHVTGITLSNDGKLSLGRSRKRYIKHLVHQIQVGCLSDEDILHLKGLLAFAEHIEPTFLQALKKKYSVELITQIIKG

SEQ ID NO: 3981 - protein, 307 aa, Aeromonas sp.
  source 1..307: note = Related to NZ_JTBG02000005.1; note = Aeromonas caviae
MGLIKQLAQNLCKSEAEVAHFLLNAPKMYKVYTIPKRTSGHRTIAQPSKELKEYQRKYLELQQLPIHEAAMAYREGIGIKQNAIAHKNNPYLLKLDLENFFNSISNLLFWEVWKSIQPLPSSKDQKALEQLLFWCPSKITGGRLVLSIGAPSSPLVSNFFMYQFDCTISEICRHKNIVYTRYADDLTFSTKIKGILFDMPNIVKDHLSLHFGDAININKKKTKFSSKAHNRHVTGITLNNDGKLSLGRERKRYIKHLVHQVKLGCLENEDKQHLVGLLAFVKHIEPMFLESLKNKYSVELITKIIEG

SEQ ID NO: 3982 - protein, 310 aa, Vibrio sp.
  source 1..310: note = Related to AAXMWT010000001.1; note = Vibrio vulnificus
MSLIKQLAQKLNKSEIEVSHFLLNAPKKYKVYTIPKRTSGHRTIAQPSKELKKYQRKYLELQQLPIHEAAMAYREGISIKQNAIAHKNNPYLLKLDLENFFNSISNSLFWKVWKSIKPLPPRQDQRALEQLLFWCPSKTTGGSLVLSIGAPSSPLVSNFFMYHFDFDISEICRKKGITYTRYADDLTFSTKNKEILFELPQIVKEHLEEHFENSIKINKKKTRFSSKAHNRHVTGITLNNDGKLSLGRKRKRYIKHLVHQVQIGCLSDEDRLHLKGLLAFAKHIEPMFLQSLKKKYSVDLITQIIEDSNG

SEQ ID NO: 3983 - protein, 307 aa, unidentified
  source 1..307: note = Related to PZOH01000095.1; note = Photobacterium damselae
MSLIKQLAQKLNKSEVEVSRFLSNAPKKYKVYTIPKRTSGHRTIAQPSKELKEYQRIYLEVQQFPLHKAAMAYREGISIKQNAMAHKSNPYLLKMDLENFFNSISNNLFWNVWEKIKPLPLPQEQLIIEKLLFWCPSKTTGGSLILSIGAPSSPLISNFIMYQFDTVINQMCVNKNITYTRYADDLTFSTKGKGELFDIPKVVEEYLFEIFGNAIKINKKKTAFSSKAHNRHVTGITLNNNGNVSLGRQRKRYIKHLVHQFKLGCLSEEDRLHLRGLLSFSKHIEPMFLQSLKKKYSVELIDQIIRG

SEQ ID NO: 3984 - protein, 310 aa, Vibrio sp.
  source 1..310: note = Related to NZ_RSFA01000069.1; note = Vibrio pectenicida
MTLIEQLALELKKSEDEVARFLLSAPKRYKVYTIPKRTSGHRVIAQPSKELKEYQRKYLELQQLPIHDSAMAYRKGMSIKQNAIAHKNNPYLLKLDLENFFNSISDKLFWKVWESILPLPSDQDKQTLENLLFWCPSKTTGGALVLSIGAPSSPLVSNFFMYQFDCTLSKLCVEKEIMYTRYADDLTFSTKHKDSLFTLPELIKEKLAVLFGSAIRINRKKTRFSSRAHNRHVTGITISNDGSLSLGRERKRYIKHLVYQVKLNKLDAEDRQHLRGLIAFAKHVEPVFVQSLKRKYSAELITQIVEESNG

SEQ ID NO: 3985 - protein, 310 aa, unidentified
  source 1..310: note = Related to WMCU01000006.1; note = Photobacterium phosphoreum
MTLIEQLALELKKSEEEVNRFLLSAPKKYKVYTIPKRTSGHRVIAQPSKELKMYQRKFLELQNLPIHSSAMAYREGLSIKQNAIAHKNNPYLLKLDLENFFNSISNKLFWNVWESIQPLPSEQDMRTLEKLLFWCPSKTTGGTLILSIGAPSSPLISNFFMYQFDCILSGLCFEKGIVYTRYADDLTFSTKYKNILFDLPILIKEKLSDLFGSSIRINRKKTKFSSKAHNRHVTGITINNEGCISIGRERKRYIKHLIHQSQLNRLDADDRQHLRGLIAFAKHIEPMFFQSLKRKYSAEIITQIVEESNG

SEQ ID NO: 3986 - protein, 307 aa, unidentified
  source 1..307: note = Related to WOBA01000001.1; note = Aliivibrio fischeri
MSLIKQLAFSLKKNEDEVIRFLLNAPKKYKVYTIPKRTSGHRVIAQPSKELKIYQREYLELQQLPIHDTAIAYREGISIKENAIAHKDNQYLLKLDLENFFNSISNHLFWEIWESIIPLPLKSDKQILDNLLFWCPSKKTGGNLVLSIGAPTSPLISNFFMYKFDSIVSKACLEKNITYTRYADDLTFSTNYKDTLFEVPLFIKKQLTALFGNSIRINRKKTKFSSKAHNRHITGITINNDGKLSLGRKRKRYIKHLIHQFQLNTLGKEDKLHLKGLMSFAKHIEPIFIQSLVKKYSFELITKIMEE

SEQ ID NO: 3987 - protein, 310 aa, Vibrio sp.
  source 1..310: note = Related to NZ_CP051108.1; note = Vibrio fluvialis
MTLVERLALELKKSEGEITHFLQSAPKRYKVYTIPKRTSGHRVIAQPSKELKEYQRKFLEIQQLPIHGSAMAYRKGISIKQNAIAHKNNPYLLKLDLENFFNSISDKLFWEVWGAILPLPSNQDKQTLENLLFWCPSKITGGALVLSIGAPSSPLISNFFMYQFDCALSEFCAEKKITYTRYADDLTFSTKNKDTLFVLPEFVKEKLSELFGSSIRINRKKTKFSSRAHNRHVTGITISNNGNLSLGRERKRYIKHLVHQVKLSKLNSEDRQHLRGLIAFAKYIEPVFIESLKRKYSEDLITQIIEEPND

SEQ ID NO: 3988 - protein, 310 aa, unidentified
  source 1..310: note = Related to NZ_MUFR01000019.1; note = Salinivibrio costicola
MTLIERLALELKKSEDEITHFLQSAPKRYKVYTIPKRTSGHRVIAQPSKELKEYQRKFLEIQNLPIHESAMAYRKGVSIKHNAIAHKNNPYLLKMDLENFFNSISDKIFWKTWESILPLPSSQDKKTLENLLFWCPSKKTEGALVLSIGAPSSPLVSNFFMYQFDCAVSNFCSEKEIVYTRYADDLTFSTKHKDSLFFAPSMVKENLRELFGGTIRINRKKTRFSSRAHNRHVTGITIANNGSLSLGRERKRYIKHLVHQAQLNKLDIESRQHLRGLIAFAKHVEPVFLKSLKRKYTSELITQIIEESNG

SEQ ID NO: 3989 - protein, 314 aa, unidentified
  source 1..314: note = Related to JAKRFY010000043.1; note = Pseudoalteromonas sp.
MELEMTLIEQLALKLKKSEDQVAHFLLSAPKRYKVYTIPKRTSGHRVIAQPSKELKEYQRKYLELQKLPIHDSATAYRKGTGIKQNAFAHKNNPYLLKLDLENFFNSISNKLFWEVWESILPLPPEHDKQALERLLFWCPSKTTGGALVLSIGAPSSPLISNFFMYQFDCALSKLCVEKEIMYTRYADDLTFSTKHKDSLFALPELVKEKLVEHFGSAIRINRKKTRFSSKAHNRHVTGITISNNGNLSLGRERKRYIKHLVHQVQLNKLDAEDRQHLRGLIAFSKHVEPLFVQSLKRKYSAELITQIVEESND

SEQ ID NO: 3990 - protein, 310 aa, unidentified
  source 1..310: note = Related to NZ_FLRB01000014.1; note = Marinomonas gallaica
MTLIRKLALELEKSEDEVANFLLNAPKRYKVYTIPKRTSGHRVIAQPSKELKEYQRKYLGFQKLPIHDSALAYRKGISIKQNALAHKNNPYLLKLDLENFFNSISDKLFWKVWASLLPLPSSQDRQTLKNLLFWCPSKKTGGPLVLSIGAPSSPLISNFFMYKFDSIMSKFCSEREIVYTRYADDLTFSTKHKGSLFQLPEVVKEMLSELFGGAIRINRKKTRFSSKAHNRHVTGITINNNGDISIGRKQKRYIKYLVHQVELNRAGREDIEHLRGLIAFASHIEPMFIQSLKKKYTTEIISKIIEGQNG

SEQ ID NO: 3991 - protein, 310 aa, unidentified
  source 1..310: note = Related to JABSRB010000040.1; note = Oceanospirillaceae bacterium
MSLVKQLSLGLNRSEEEVSRFLLNAPKKYKVYTIPKRTSGHRVIAQPSKELKRYQRQYLEIQKLPIHHSAMAYRQGISIKENAAAHQKSRYLLKLDFENFFNSISSHVFWKVWESIHPLPSELDRQTLEKLLFWCPSKKSGGPLVLSIGAPSSPLVSNFFMYHFDCHLSQICLEKEIVYTRYADDLTFSTNHKDILFDLPLLVKEQLVTLFGGTIRINRKKTRFSSKAHNRHVTGITINNNGKLSLGRERKRYIKHLVHQVKLKKSDKEDRLHLRGLLAFAKHIEPLFMQSLIKKYSAELILKIVEEPND

SEQ ID NO: 3992 - protein, 310 aa, Pseudomonas sp.
  source 1..310: note = Related to NZ_JAEIOI010000003.1; note = Pseudomonas anguilliseptica
MTVVEQLALVLKKSPTDVTLFLNNAPKKYKVYTIPKRTSGHRVIAQPSKELKIYQRKFLELQDLPIHESAMAYRKGLSIKNNANAHKNNRYLLKLDLENFFNSISSELFWKVWGSILPRPPETDKRTLENLLFWCPSKTTGGRLILSIGAPSSPLVSNFFMYKFDGAVQVLCAEREIKYTRYADDLTFSTNQKNTLFELPRLIEIQLMTLFGSEIRVNRKKTKFSSTAHNRHVTGITISNDQKLSLGRSRKRYIKHLVHQYILNKLDPEHTQHLRGLLSFAKHVEPSFLHSLAKKYSTELIVKIVESRDE

SEQ ID NO: 3993 - protein, 310 aa, Pseudomonas sp.
  source 1..310: note = Related to NZ_FRBQ01000002.1; note = Pseudomonas punonensis
MSLIEKLASALKKSEAEVLIFLKNAPKKYKVYTIPKRTSGHRVIAQPSKELKEYQRKYLELQDFPIHNSAIAYRKNFSIKDNANAHKKNRYLLKLDLENFFNSISNHLFWRVWESILPMPPEADKRILENLLFWCPSKTIGGRLILSIGAPSSPLISNFFMYKFDDAIYEICMEREIKYTRYADDLTFSTNRKNILFELPHLVETLLFSLFGSAIRINKKKTKFSSTGHNRHVTGITISNNQKLSLGRDRKRYIKHLVHHYMLEKLSNEDTQHLRGLLSFAKHVEPLFLHSLENKYSTGLIHKIVEGRDD

SEQ ID NO: 3994 - protein, 307 aa, Pseudomonas sp.
  source 1..307: note = Related to NZ_JACKQK010000005.1
MSVIEKLALALEKSEAKVIAFLRNAPNKYKIYTIPKRTSGHRIIAQPSKELKLYQRKFLMLQKLPVHKSAMAYRNGLSIKDNAELHKRNRYLLKMDFENFFNSISSELFWSVWKNTIGTPTDLDKYTLERLLFWRPSKNTAGRLILSVGAPSSPMVSNFLMYKFDCLVHEICASKEITYTRYADDLTFSTCHKDVLFEVPALIEANLEHLYDGALRINKRKTKFSSMAHNRHVTGVTINNKASLSLGRSRKRYIKHLTHQFVLDKLSSDDRLHLRGLIAFAKHIEPTFFQSLVKKYTAESISKIIED

SEQ ID NO: 3995 - protein, 310 aa, unidentified
  source 1..310: note = Related to NZ_FRDS01000164.1; note = Moritella viscosa
MSFIKQLAQKLNKSESEIEHFLVSAPKRYKVYTIPKRTSGHRVIAQPSKELKTYQRAFLDIQSLPIHNAATAYRTGLSIKENALAHKNNQYLLKLDLENFFNSISSRLFWKVWQSILPKLASEDKTLMENLLFWCPSKATGGPLVLSIGAPSSPLISNFFMYHFDIAISQFCSENKISYTRYADDLTFSTNQKDLLFSVPTFVGEQLKNLFGNGIKINRKKTSFSSKAHNRHVTGITINNEGKLSLGRERKRYIKHLVHQYQLNKLNQEDIFHLKGLLAFAKHIEPKFINTLKSKHSDELITRIFEEQND

SEQ ID NO: 3996 - protein, 310 aa, unidentified
  source 1..310: note = Related to NZ_WEIA01000002.1; note = Pseudoalteromonas maricaloris
MELIKKLATKLNKSESEVIRFLASAPLKYKVYTIPKRTSGHRVIAQPSRELKEYQRAFISLYRLNIHDAAMAYREGLSIKDNAKLHCKNRYLLKIDLESFFNSITSELFWTIWQQHYEMPNNDEKVLMERLLFWSPSKSSTGKLVLSIGAPSSPLLSNFFMYQFDELVTQHCESLEIKYTRYADDLTFSTKAKNVLFDMPRYISDTLTNLFGSALIINRRKTAFSSKAHNRHVTGITIDNESDLSLGREKKRYIKHLVHQYRLNKLDKENVFHLKGLLAFAKHIEPKFITSLEIKYSAEVITQIFEERNG

SEQ ID NO: 3997 - protein, 310 aa, unidentified
  source 1..310: note = Related to JAERPS020000004.1; note = Rheinheimera sp.
MEFIATLAAKLSKSEPEVVSFLASAPLKYKVYTIPKRTSGHRVIAQPSRELKEYQRTFLSIYKLKIHSAAMAYREGLSIKDNAQAHCKNRYLLKIDLKNFFNSISNELFWNVWQQHYTLPAKREKVLMERLLFWSPSKSSKGKLILSIGAPSSPLISNFFMYQFDELVTQQCETLNITYTRYADDLTFSTNEKDILFDIPKAVTEFLTLLFGNSMIINRRKTVFSSMAHNRHITGITINNKSELSLGRERKRYIKHLVHHYQTKQIDQETILQLKGLLAFSSHIEPDFIKRLEAKYSSAVISQIFEEQNG

SEQ ID NO: 3998 - protein, 310 aa, unidentified
  source 1..310: note = Related to NHNK02000003.1; note = Marinomonas agarivorans
MSLIKKLAKKLEKSEAEVATFLANAPLKYKVYKIPKRTSGHRVIAQPSKELKKYQRAFISLFKLTIHNSAMAYREKRSIKDNANKHKHNPYLLKLDLENFFNSISSELFWKVWQAHYPIPQTEDKVFMEKLLFWSPSKSVYGKLILSIGAPTSPLLSNFFMYQFDHIIHDLCVHREIIYTRYADDLTFSTKHKGALFNMPDLVTEQLRKCFGEAININRRKTAFSSKGHNRHITGITIDNNDNLSLGRERKRYIKHLINEYKFNKLGKEDINHLKGLLAYAKHIEPSLMTRLEHKYSTELMTQLFEENYE

SEQ ID NO: 3999 - protein, 310 aa, unidentified
  source 1..310: note = Related to JAESQF010000097.1; note = Oleispira sp.
MSFLEELASVLQKSEAEVEGFLEGAPKKYRTYKIPKRTSGFRTIAQPSKELKEYQRAFLKIQSLPIHNAAKAYRKNLSIKDNATVHKSSRYFLSMDLENFFNSISSDLFWRVYSRHFDSFSGQDKRVMESLLFWSPGKSNKQGLVLSVGAPSSPLLSNFFMYTFDLIMSNYCDETNILYTRYADDFTFSTNDKNILFSVPEVVKGFLEKCFGRGINVNKRKTVFSSKAHNRHVTGITINNNGDLSLGRERKRYIKHLIFQYSINKLEEGMLQHLQGLLAFSNHIEPMFIFTLNEKYTKELMLRISEERHV

SEQ ID NO: 4000 - protein, 310 aa, unidentified
  source 1..310: note = Related to NZ_AULO01000011.1; note = Marinospirillum minutulum
MSFLRVLASKVNKTETEVIQYLANAPLKYKVYTIPKRTSGNRVIAQPTKELKEYQRAFLQIKSFPVHQVATAYCLGLSIKDNALSHKANSYLLKMDLKNFFNSINNNLFWKIWAVNKKLPEAKDKELIEKLLFWSPSKSLQGKLILSVGAPSSPLLSNFIMYSFDEHLFKACNKLNVTYTRYADDLTFSTNKKDILFKVPNLVAEQLRFEFGSSIIVNRKKTKFSSKAHNRHVTGITLNNNQAISLGRKRKRYIKHLVHQLLLNKLTVDDINHLKGLLAFAKHIEPTFILSLEKKYSLAKITHIFEAENE

SEQ ID NO: 4001 - protein, 310 aa, unidentified
  source 1..310: note = Related to NZ_RPGH01000128.1; note = Candidatus Enterovibrio escacola
MEIVRSLAQKLNITEQEVSSFLASAPLKYKVYKIPKRTSGFRIIAQPSKKLKEYQRAFIELFPLACHQAAYAYREGISIKDNALIHKKSKYLLKIDLENFFNSITNELFWDIWQKNSVLPDLNEKVLLERLLFWSPDKKISSRLILSVGAPSSPSLSNFFMYDFDESLSRYCLEKKIRYTRYADDLTFSTYEKGILFEIPDFVSHILRQLFGDKLSINRRKTIFSSKAHNRHVTGVTLSNEESLSIGRQRKRYIKHLVHQYLLNKLDQDDVSHLKGLLAFAKHIEPDFLDRLKAKYSDKTISQILGERNG

SEQ ID NO: 4002 - protein, 310 aa, Chromobacterium sp.
  source 1..310: note = Related to JAHDTB010000015.1; note = Chromobacterium subtsugae
MGIIESLAGKLDKSPSAVKKFLASASLKYRVYTIPKRTHGYRLIAHPSKELKKYQRAFLELMPLAIHPCAMAYRKGLSIKDNALAHVDKKYLLKLDLENFFNSIDPNIFWKVYHLHEEVCEPSSLGERLLIDQLLFWCPSKRKGGKLVLSVGAPSSPMVSNFCMLFFDVVISKYCKINHISYTRYADDLTFSTNEKGALFKIPELVRDTLFSEFGNRVVLNNAKTKFSSRAHNRHVTGVTLSNSDTISVGRERKRYIKHLVHEYQLGRMNYEEILHLKGLLSHVSHIEPVFINSLAKKYGPDVLKRIHKE

SEQ ID NO: 4003 - protein, 313 aa, unidentified
  source 1..313: note = Related to NZ_CP019697.1; note = Paenalcaligenes hominis
MGIVKQLASELDKSEAEIMAFLSRAPLYYKVYKIPKRTHGERTIAQPTPELKNLQRTFLLLNPLPMHSAAMAYRSGLSIKDNANAHKRNSYLLKLDLNSFFNSITPAIFWAEWDKFFDPLDSNEKTLIERLLFWSPSKSLSGSLMLSVGAPSSPAVSNFVMHGFDTKLDQLSRNKGVVYTRYADDLTFSTRNQGVLMGMPELVTDLLVECFGAALTVNRSKTIFSSKAHNRHVTGITLTNEAKLSLGRKRKRYIKHLVHQFTLQQLGLEDVNYLRGLLSFAKHIEPDFIYALEKKYGAAALIAIYEVNDGGSK

SEQ ID NO: 4004 - protein, 310 aa, unidentified
  source 1..310: note = Related to CP065725.1; note = Oligella ureolytica
MAIVSFLATHLDIPEDQVESIVQRAPLLYKVYKIPKRSFGTRTIAQPTPELKKLQRAFLLTKPLPVHSAAMAYQPGLSIKKNALHHLHNKYLLKLDLLNFFNSITPDILWQEWKQHFEIPPPKEKKHIENLLFWAPQRKPNTHLMLSVGAPSSPNLSNFILYRFDERLQNLCKKLNITYTRYADDLTFSTNTRYALFSIPEQVAMLLNELFTGRININKRKTIFTSKAHNRHVTGVGLSSENKLSLGRAKKRYLKHLVHQFTLSLLADEEISHLQGWLAHAKHIEPTFIESLTNKYGQDIIHKIFETNHD

SEQ ID NO: 4005 - protein, 349 aa, Aeromonas sp.
  source 1..349: note = Related to NZ_CP083625.1; note = Aeromonas enteropelogenes
MVAIVSPPNLVPRLGGETIASSSKELSPRAKSWAFLWTVLMGVIEQLASALGKKDEDVIDFLVTAPRKYKVYTIPKRSVGHRLIAQPSQELKIYQKKYIELNPLPVHDTAMAYRQGLSIKENAKAHQKNSYLLKMDLENFFNSITTDVFWQEWLAFYPQPSDVDSIILERLLFWAPNKKLDGKLILSIGAPSSPALSNFIMHRFDEAVVNNCVAIGVKYTRYADDLTFSSNTKDILFTLPGLIENILMMLFNGAIRVNKRKTIFSSKAHNRHVTGVTISNDNNISLGRERKRYIKHLVYQYMNGKLEKDQVNHLQGLLSFAKHIEPNFITSLNIKYTHKIIHSIMSDKQ

SEQ ID NO: 4006 - protein, 310 aa, unidentified
  source 1..310: note = Related to FO818637.1; note = Xenorhabdus bovienii
MTVLFGLVKTLGISEREAITFLSDAPKKYKVYSIPKRSSGHRIIAQPSKRLKEYQTAFLKCCLLPVHPSAMAYRQGLSIKDNANYHKDNQYLLKMDLENFFNSITPNILWESWNKKELFIDDNDRKILQRLLFWCPSKKNSGKLVLSIGAPTSPAVSNSFLYNFDEELYNFCLKYQIAYTRYADDLTFSTNQTGVLFTVHEMVKKLLIKHFDRQITLNHGKTIFSSKAHNRHITGVTITNDGKLSIGRQKKRYIKHLVYQFELGVLSIEDICYLQGLLAFAKHIEPLFIPRLVQKYSKETLKNIFDIGSS

SEQ ID NO: 4007 - protein, 356 aa, unidentified
  source 1..356: note = Related to CACVAY010000001.1; note = Thiotrichaceae bacterium
MFSHSKLVSLLLPPLECKNIAVFSKEPMSKLVTSLGFLSRALKMKTILEFASRTEQSPDQVMRYLKSASKKYKVYSILKRTHGRRIIAQPAKELKQYQNIFLDTHSLPVHSCAYAYKKGVSIKENAQQHVENNYLLKMDLENFFNSITPDILWNQWEDHFGWKFQSIEKVLLEQTLFWSTSKKLNRGKLVLSVGAPSSPALSNLCMYSFDRELQEICQTYGVSYTRYADDLTFSTQLKGRLIKFPDYVENLLNKHFSKKILINNRKTVFTSKAHNRHVTGITLANNGVISLGRKRKRYIKHLMHQFILGNIDDEERMHLRGLLAFSNHIEPSFISTLRNKYGNDVVQRVSEVINEK

SEQ ID NO: 4008 - protein, 307 aa, Vibrio sp.
  source 1..307: note = Related to AAXMUQ010000002.1; note = Vibrio alginolyticus
MKIISQLAKYLNKPEDSIEDILLIGPERYKLYYIPKRTHGVRLIAQPSRELKEYQRAFLSFYKFPIHDCAMAYREGISIKDNAIAHKNNSYLLKLDLENFFNSINPIIFWDVWQKLELSNLSANEKKWIENLLFWNLHGDLVLSVGAPSSPTISNFCMYIFDSILTYHCNNIGITYTRYADDLTFSTNEERVLFKIPSVVETMLYDCFEGKLCLNKGKTAFSSKAHNRHVTGITLTNEGKISLGRSRKRYIKHKIHQFSLGKLDNYDIMHLKGLLSFARHIEPKFYDSLLNKYSKELVLSIFEANYE

SEQ ID NO: 4009 - protein, 307 aa, Vibrio sp.
  source 1..307: note = Related to NZ_CP022741.1
MSIISLLAQTLKKPEYVIEDILFIAPIRYKIYYIPKRTHGFRQIAQPSKELKECQRAFLRFCNLPTHNCAMAYREGLSIKNNAIAHKNQAYLLKLDLENFFNSITPNIFWHTWELTGAELPTKDNQQWIEKLLFWNLEDKLVLSVGAPSSPSVSNFCMLIFDQILQDQCQNLGIKYTRYADDLTFSTNEKDILFKIPESVENILSKCFNGNLRLNKGKTIFSSKAHNRHVTGITITNSGEISLGRSKKRYIKHKIHQFSLDLLNNHEVMHLKGLMAYARHIEPSFHESLIIKYSKEIIERIFEVPNE

SEQ ID NO: 4010 - protein, 320 aa, Chromobacterium sp.
  source 1..320: note = Related to NZ_MUKV01000069.1; note = Chromobacterium haemolyticum
MAQDSHLGPFPLGKLMGIIYQLAEKLEMSELTVKKYLANAPNKYKVYKIPKRTYGFRIIAQPAKELKKFQRAFLDVFDLPVHNSALAYRKSISIKDNAILHCKNAYLLKMDLENFFNSITPDLFWKEWNKTLKILPRTEAQWLELLLFWRPSKKRNGKLILSIGAPSSPHISNFCLFNFDIIMSTKCEALGITYSRYADDLTFSTNKKNILFTIPKFVDSILTASFDGKLTINKNKTVFSSKAHNRHVTGITITNDGNISIGREKKRIIKHLVHNYKIGTLPPEEIDYLKGLLAFSGHIDPTFIDSLKKNIQQRLSKKYI

SEQ ID NO: 4011 - protein, 313 aa, unidentified
  source 1..313: note = Related to PBYJ01000041.1; note = Oceanospirillaceae bacterium
MSVIEKLALTLDKEQREVERFLVNAPNKYKVYSIPKRTHGSRVIAQPSKELKTYQRAFIDLYEKYLPIHDNSFSYRKGVGIKQNADVHKKNPYLLKMDLESFFNSIVPSMLWEEWERSIGNTPNAREKMWIERLLFWNPSKRSGGKLILSIGAPSSPMISNFVMHSLDKVLSVECSEKGVSYTRYADDMTFSTRNKDTLFIFPELVSNIIKSLFGNRISINRSKTVYSSKAHNRHVTGVTLTNEGRLSLGRDRKRYIKHLVFEFREKRLDIDTFNHLKGLIAFAKYIEPDFIIRLEKKYSTRLIKKVMDGDYD

SEQ ID NO: 4012 - protein, 313 aa, unidentified
  source 1..313: note = Related to NZ_FTMN01000018.1; note = Marinobacterium stanieri
MSVLEKLAITLGKEQAEVESFLLNAPNKYKVYSIPKRTHGNRIIAQPSRELKKYQRAFIDLYEVYFPVHKNAFSYKKGIGIKQNAEVHKNNPYLLKMDLENFFNSIVPNMFWEEWERSIGDTPNKNEIKWIERILFWSPSKKSNGKMVLSIGAPSSPLISNFVMHSFDKILTSECEKKGVSYTRYADDMTFSTKNKNTLFSLPETVSNVIRGVFGNRVSINRSKTVYSSKAHNRHVTGVTLTNEGKVSLGRDRKRYIKHLIFEYQKNNLDAEKFNHLRGLIAFARYIEPCFIDRLENKYSARLVKKVMDGDYE

SEQ ID NO: 4013 - protein, 310 aa, unidentified
  source 1..310: note = Related to NZ_WHZZ01000002.1; note = Photorhabdus khanii
MSVINRLATSLHQNELEVRAYLENASGKYKVYRIPKRTTGFRIIAQPAKMLKEYQRAFLQLYRFPIHDCAMAYQKGKSIRDNALMHAHNPYLLKTDLEDFFNSITPDIFWQCVEQTSVNVSLFLPEDRRYVDQILFWKPTKRSTRLMLSVGAPSSPIISNFCLHEFDQLIHEICRNLDIVYTRYADDLTFSCNVRDVLGSLPSMIETLLNKLFKKKLRLNRGKTIFSSMAHNRHVTGVTLNNKGKLSLGRERKRFIKHLINQYRYGLIDESDKAYLVGLLAFASHIEPEFIIRMNNKYSTELMDRLRRQQ

SEQ ID NO: 4014 - protein, 310 aa, unidentified
  source 1..310: note = Related to NZ_JAFBFW010000005.1; note = Pantoea coffeiphila
MSLINRLATSLQQSELKVNAYLEGASGKYKVYRIPKRTTGFRIIAQPAKALKDYQRAFLQLYRFPIHECAMAYQKGKSIRDNALAHARNPYLLKTDLEDFFNSITPDIFWQCVERSSSSELQFQLADRRYVDQVLFWKPTKRSTRLMLSVGAPSSPVISNFCLYEFDTLINEYCRELDIIYTRYADDLTFSCNTREVLKSVPAIIETLLNKIFSKKLRLNRGKTIFSSMAHNRHVTGVTLNNEGRLSLGRERKRFIKHLINQYRYGMIDESDKAYLVGLLAFASHIEPDFILRMNDKYSYELMDRLRRQQ

SEQ ID NO: 4015 - protein, 310 aa, unidentified
  source 1..310: note = Related to NZ_LMLK01000022.1; note = Erwinia sp.
MSVINGLAGLLNQSELDVVLYLQSASRKYKVYKIPKRTTGFRIIAQPAKALKDYQRAFLQLYRLPVHKCAMAYQKGKSVRDNALVHAQNSFLLKTDLEDFFNSITPDIFWESIERSPSDTPQISAEDKGYVEHLLFWQPAKRSKRLILSVGAPSSPVVSNFCLYEFDNLISEFCLPLNIAYTRYADDLTFSCNTRDVLGVLPLIIEKLLNKLYRRKLRLNRAKTVFSSMAHNRHVTGVTINNEGELSLGRERKRFIKHLINQYRYDMIDEADKAYLVGLLAFAKHIEPEFILRMNRKYTTELMERIRRQQ

SEQ ID NO: 4016 - protein, 310 aa, unidentified
  source 1..310: note = Related to CP063241.1; note = Pectobacterium brasiliense
MSFINKLGVNFNQSPLELKVFLENAPSKYKVYKIAKRTGGFRIIAQPVKALKVYQRAFLQLYNFPVHGSAMAYQEGKSIRDNALMHARNPYLLKTDLEDFFNSITPDIFWKCVELSSADAPQFSVEDRRYVEKILFWQPAKRSKRLMLSVGAPSSPVISNFCLLEFDKLISHECRELGIVYTRYADDLTFSSRIPGVLSPLPAMIEQLLKKLYKSKLRLNRSKTIFSSMAHNRHVTGVTLNNEGGLSLGRERKRYIKHLINQYKYDAIDESDKAYLIGLLAFASHIEPAFILRMNDKYSTELMDRLRSQQ

SEQ ID NO: 4017 - protein, 308 aa, unidentified
  source 1..308: note = Related to DAFWUX010000006.1; note = Klebsiella variicola
MSVINDLGRCLNQSDLVVKAFLENAPSKYKVYRIPKRTTGFRIIAQPAKELKRYQRAFMGTYRFPVHECAMAYQEGKSIRDNALAHAHNPYLLKTDLEDFFNSITPAIFWQCIESCPVDAPQFQDEDRRYVERLLFWQPAKRNKRLMLSVGAPSSPIISNFCLLELDRFLCEECERLGVSYTRYADDLTFSTSLPGVLSAIPALIESLLKRLFNSKLRLNRNKTLFSSRAHNRHVTGVTLNNEGELSLGRARKRFIKHLIHRYDKLDEADKAYLVGLLAFASHIEPEFIIRMNAKYSTEVIDRIRRQQ

SEQ ID NO: 4018 - protein, 310 aa, Citrobacter sp.
  source 1..310: note = Related to UFVV01000001.1; note = Citrobacter koseri
MSVISELAMLLNQNEQDLRAFLKNASSKYKVYKIPKRTLGFRIIAQPAKALKECQRAFIQRYPLPVHACALAYREGKSIRDNAFIHAQNSYLLKTDLEDFFNSITPEIFWQCVDASHDGAPVFDGSDRVDIERILFWQPAKRSQRLILSVGAPSSPAISNFCLYDFDRLLSESCQTMGVAYSRYADDLTFSCSMPNVLRTLPAIIEALLNRLFNRRLRLNRGKTVFSSKAHNRHVTGVTLSNEGLLSLGRERKRYIKHLINQYRYDLLDEEDKAYLVGLLAFASHIEPEFILRMNAKYSSELMDRIRRHK

SEQ ID NO: 4019 - protein, 311 aa, unidentified
  source 1..311: note = Related to NSCM01000023.1; note = Photorhabdus bodei
MSVISGLATLLHQSESDVRLFLENAPRKYKVYRIPKRTTGFRIIAQPAKRLKEFQRAFMQLYLFPVHESSMAYRKGKSIRDNASAHANNQYLLKTDLEDFFNSITPAIFWRCIEMSSEQAPQFLTQDKPYVERILFWQPVKRSKSRLMLSVGAPSSPAISNFCLYEFDRQMNEECQNLGITYTRYADDLTFSCNIQDLLRTVPAIIEALLNKLFKNALRMNHGKTVFSSKAHNRHVTGITLNNEGKLSLGRERKRFIKHLINQYKYGLLDDADKAYLIGLLAFASHIEPEFITRMNEKYSNELIERIRRQR

SEQ ID NO: 4020 - protein, 310 aa, unidentified
  source 1..310: note = Related to NZ_JXSK01000003.1; note = Photorhabdus luminescens
MSIINGLATVLHRSEADVRSFLENAPRKYKVYRIPKRTTGFRIIAQPAKELKALQRAFLQLYSFPVHETSMAYRKGKSIRDNALAHVNNPYLLKTDLEDFFNSITPDIFWRCIDTSSIETPKFSVQDRPYVERILFWQPVKKSKKRLMLSVGAPSSPDISNFCLYEFDRKLSEDCQNLGITYTRYADDLTFSCDMRDVLRTVPVMIEALLKKIFNKALKINHGKTVSSSKAHNRHVTGVTLSNEGNLSLGRERKRFIKHLINQYKYGLLDEADIAYLRGLLAFANHIEPDFIGRVNNKYSIELMERLRRP

SEQ ID NO: 4021 - protein, 311 aa, Citrobacter sp.
  source 1..311: note = Related to CP047307.1; note = Citrobacter freundii
MSVIRGLASVLRQSDSDISTFLATAPRKYKVYKIPKRTTGFRVIAQPTKGLKDIQRAFVQLYSFPVHDASMAYMKGKGIRDNAAAHAGNQYLLKADLEDFFNSITPAIFWRCIEMSSVQTPQFEPLDKIFIEKILFWQPIKRRKTKLILSVGAPSSPVISNFCMYEFDNRIHTACKKVEITYTRYADDLTFSSNIPDVLKAVPSTLEALLKNLFGSALRLNHSKTVFSSKAHNRHVTGVTINNEETLSLGRDRKRFIKHLINQYKYGLLDNEDKAYLTGLLAFANHIEPGFITRMNEKYSLELMERLRGQR

SEQ ID NO: 4022 - protein, 312 aa, unidentified
  source 1..312: note = Related to NZ_CP023467.1; note = Dickeya dadantii
MQIIKALAAILRQSESDVRLYLQNAPLKYKVYRIPKRTNGFRIIAQPAKALKEYQRALIQLYSFPVHDVAMAYRKGKSIRDNAIAHANNRYLLKTDLEDFFNSITPTVFWHCFEQCSVDTPQFSTQDKNYVEKILFWQPVKRSKHTLMLSVGAPSSPTVSNFCLYEFDRLLSDECLRLDIVYTRYADDLTFSTNTPNLLRLLPSFIQVLLTKLYKNALRLNHGKTVFSSKAYNRHVTGITLNNEGQLSLGRERKRFIKHLINQYKYGLLDEADIGYLCGLLAFVNHIEPEFIIKMNEKYTVSLISSIHRSNQ

SEQ ID NO: 4023 - protein, 312 aa, unidentified
  source 1..312: note = Related to NZ_DF820431.1; note = Serratia liquefaciens
MQVIKELAAILHQDESDIRLYLKHAPHKYKVYRIPKRTHGFRIIAQPAKVLKAYQRTLIQLYPFPVHDAAMAYRKGKSIRDNALAHADNRFLLKTDLEDFFNSITPEIFWRCIERCSVDAPQFSAQDKSYVEKILFWQPVKRSRHTLMLSVGAPSSPMVSNFCLYEFDRLLSDECQSTGIVYTRYADDLTFSTNTPNLLKLLPAFIQALLAKLYKNALRLNHGKTVFSSKAHNRHVTGITLNNEGQLSLGRERKRFIKHLINQYKYGLLDDVDTSYLRGLLAFANHIEPEFITRMNEKYTAALVGSIYRSKQ

SEQ ID NO: 4024 - protein, 314 aa, Aeromonas sp.
  source 1..314: note = Related to NZ_CDDH01000001.1; note = Aeromonas australiensis
MSVIKELATFLHQSEFDVSLFLQNAPRKYKVYRIPKRTSGFRIIAQPAKALKVYQRALMQLYTLPVHDAAMAYRKGKSIRDNALAHAQNQYLLKIDLENFFNSITPTLFWNCIDECLVNDPKFSSTQDRIYVEKILFWQPVRRSKKTLFLSVGAPSSPAVSNFCLYKFDHLLTEECQTLGIVYTRYADDLTFSTNIKDILKLLPALIQTLLKKLYNSALRLNNGKTVFSSKAHNRHVTGVTINNQGNLSLGRERKRFLKHLINQHKYGLLDDTELGYLRGLLAFANHIEPQFIMRMREKYTVDLISSITGAIND

SEQ ID NO: 4025 - protein, 311 aa, unidentified
  source 1..311: note = Related to JAGTSE010000026.1; note = Proteobacteria bacterium
MGIIKELSIFLHQDESDVSLYLQSAPRKYKVYRIPKRTNGFRVIAQPTKTLKEYQRAFVHAYPLPVHEAAMAYRVGRSIRDNAEAHTANQYLLKTDLEDFFNSITPAIFWRCIEQCSAEVPTFLHQDKIYIDRLLFWQPTKRSARTLMLSVGAPSSPAVSNFCLYEFDRLLSDECKRLDIVYTRYADDLTFSTNTKDLLKILPAFIQSLLKELYKNALRLNHGKTVFSSKAHNRHVTGVTINNEGKLSLGRERKRFMKHLINQYKYGLLDDADTNYLRGLLAFASHIEPEFITKMSKKYTDALIRRLYRSN

SEQ ID NO: 4026 - protein, 312 aa, Proteus sp.
  source 1..312: note = Related to CVRY01000004.1; note = Proteus penneri
MQMIKQLADSLQQDESDIKKFLQNGPRKYKVYRIPKRTTGFRIIAQPSKKLKEYQRYFIEFYPLPTHKAALAYRKGKSIRDNALAHVNQSYLLKMDFENFFNSITPAFFWHSLTSCTSSIPQFTDVEKSYVEKILFWQPIKRSKNTLMLSVGAPSSPVISNFCLYEFDRRLSQICEEYGVIYTRYADDLTFSTNIKNLLPKFPSIIHSLLQELFNGILKINHAKTVYSSKAHNRHVTGITLNNEGQLSLGREKKRFIKHMINQYKYNVLDDEDKNYLCGLLAFSLHIEPEFIVRLEKKYTSELIKKLTGKTL

SEQ ID NO: 4027 - protein, 341 aa, unidentified
  source 1..341: note = Related to NZ_WOBT01000016.1; note = Aliivibrio fischeri
KKYVHFAVSSKELSPRVLKLLGFFVERFMNLVQQLAKHLKKNESDVIRFLVDAPNKYRVYKIPKRSHGHRVIAQPTKELKEYQRAFISIFKFPVHHSAMAYCEGKSIKENALAHVENSYLLKTDFENFFNSITPAIFWQSIEHCRVDAPIFTAQERKLVEKLIFWCPSKEKNGKLVLSVGAPTSPTISNFCLYEFDNLISNACNAQQITYTRYADDLTFSTNKRDILCTIVSSIQQLLLTIFSHHIKLNYSKTAFSSRAHNRHVTGITISNESKLSLGRERKRYIKHLINQFKYNLLDDSDIRHLQGLLAFAQHIEPVFISRLKTKYTNELIQRIYEASHD

SEQ ID NO: 4028 - protein, 313 aa, Vibrio sp.
  source 1..313: note = Related to NZ_LT960611.1; note = Vibrio tapetis
MNLVKQLARHLRKSESEVIRFLVDAPSKYRVYKIPKRSHGHRVIAQPSKELKEYQRAFLAIYTFPVHPTAMAYCEGKSIRENALAHVQNNYLLKTDFENFFNSITPAIFWQSVGSCTVDTPMFTTQEKRLVEKLIFWCPSKTELGKLVLSVGAPTSPSISNFCLYEFDRFMTNVCSDQKITYTRYADDLTFSTNEKNTLNTIVPVIQQLLVEFFSYSLKLNHSKTAFSSRAHNRHVTGITLSNESRLSLGRERKRYIKHLINQFKYNLLDGSDIRHLQGLLAFAQHIEPVFISRLKTKYTSELIQRIYEASHD

SEQ ID NO: 4029 - protein, 312 aa, Vibrio sp.
  source 1..312: note = Related to BGNF01000084.1; note = Vibrio harveyi
MNLVHQLAKQLRKSELEVIRFLENAPNKYRVYKIPKRSHGHRIIAQPTKELKEYQRAFLSICNFPVHHSAMAYCEGKGIKENALAHVNHNYLLKIDFENFFNSITPTLFWQAIENAKCDIPAFTTQEKEIVEKIVFWCPSKLKHGKLVLSVGAPTSPIISNFCLNEFDRFISDICNDQKITYTRYADDLTFSTNTRDLLYTIIPSIQDLLALMFSHDLKLNHSKTVFSSRGHNRHVTGVTLSNDGTISLGRERKRYIKHLINQFKYNLLDEGDTRHLQGLLAFAQHIEPDFIRRLNAKYTIELMRSIKEANS

SEQ ID NO: 4030 - protein, 313 aa, Vibrio sp.
  source 1..313: note = Related to NZ_CP045070.1; note = Vibrio harveyi
MNLVKQLAQHLGKSEYEVSLFLVDAPNKYRVYKIPKRTYGHRVIAQPSKELKKYQRAFLDIYPFPVHSAAMAYCEGKSIKDNAQAHVQNDYLLKTDLENFFNSITPTIFWSCIESCSLDTPSFTTHEKKLVESLLFWCPSKTKNGKLVLSVGAPSSPTISNFCLYEFDRYLSTICNFQNITYTRYADDLTFSTKKKDILYTVIPSLQDLLVKLFSQSIRLNHSKTVFSSRAHNRHVTGVTLNNDRRLSLGRQRKRYIKHLVNQFKYDQLDEVDTRHLRGLLAFAKHIEPTFIKRLKDKYSSELIKRIYEARNE

SEQ ID NO: 4031 - protein, 319 aa, Vibrio sp.
  source 1..319: note = Related to NZ_CP009264.1; note = Vibrio coralliilyticus
MNLVSKLALYLEKSESEVIRFLSDAPNKYRVYKIPKRSHGHRIIAQPSKELKEYQRAFLELYEFPVHDSAMAYCKGKGIKENALAHSKNSYLLKTDLENFFNSITPPIFWQCMEKCASTVPQFTKQEKVLVEKLIFWCPSKDRNGKLVLSIGAPSSPAISNFCLYQFDDFMSDVCYDHKITYTRYADDLTFSTNEKDLLHTIINSIQYSLNYFFSNSLKLNHSKTVFSSRAHNRHVTGITINNHGRLSLGRERKRYIKHLVNQFKYNQLSESDIFHLQGLLSFARHIEPKFIFRLKDKYTNELVQRIYEAGNEQQNKKQ

SEQ ID NO: 4032 - protein, 340 aa, Vibrio sp.
  source 1..340: note = Related to NZ_CP027030.1; note = Vibrio vulnificus
MYEHFAVSSKELSPRAPLLLGFFVERKMNLVKRLAHHLGKSEPEVIHFLADAPNKYKVYKIPKRSYGHRVIAQPTRELKLYQKAFLELYSFPVHSSATAYCKGKSIKDNALSHVKNHYLLKTDLENFFNSITPNIFWKSIENDSIATPKFSTSEIALVERLIFWRPSKLQGGKLVLSVGAPSSPTISNFCLYQFDEYLSIICKEQNISYTRYADDLTFSTCDKDVLHTVIPLIQSLLDYFFASELKLNHSKTVFSSKAHNRHVTGITLNNEGKLSLGRERKRYIKHLVHSFKYGKLDNTEIRHLQGMLSFAKHIEPIFIDRLKEKYTDELIKIIYEAGHE

SEQ ID NO: 4033 - protein, 312 aa, unidentified
  source 1..312: note = Related to NZ_CP080413.1; note = Shewanella sp.
MDLVKNLANNLGKRESEVRRFLADAPNKYRVYKIPKRSYGHRVIAQPSKELKDYQRAFLQLYTFPVHRAAMAYCKGKSIKENAQAHASKKYLLKTDLENFFNSITPRIFWEVVRKNTDLMKVFTSQEVKLVEKLLFWCPSKTKSGKLILSVGAPTSPTISNFCMSEFDKQLSQLCKVKDIVYTRYADDLTFSTNEENLLFKIIPEIQSLLTKNFSFNIKLNHSKTVFSSKAHNRHVTGVTLSNNGKISLGRDRKRYIKHLIHQFKHNQLDTSEIHHLRGMLSFAKHIEPIFIKRLSIKYTDELIRNIYEAQL

SEQ ID NO: 4034 - protein, 313 aa, unidentified
  source 1..313: note = Related to NZ_LS483250.1; note = Moritella yayanosii
MSVIELLAKKLNKSESEVMSFLSDAPKKYRVYKITKRSHGYRVIAQPTKELKDYQRAFLTLYTFPLHESAIAYREGLSIKDNALVHVENQYLLKTDLENFFNSIPPSVFWDSLGSCSGVTPHFSVQDQQWVEKLLFWSPSKKSNGKLVLSVGAPSSPMISNFCLFEFDLSLSSLCKKQAISYTRYADDLTFSTDEKDVLYTMIPSVKNVLFNNFKDHLKVNNSKTVFSSRAHNRHITGVTLNNEGQLSIGRERKRYIKHLVHQFKYNELDSSDISYLQGLLSFAKHIEPVFIERLKIKYSNALIQCIYEANHE

SEQ ID NO: 4035 - protein, 309 aa, Vibrio sp.
  source 1..309: note = Related to DACQYM010000007.1; note = Vibrio vulnificus
MSFIERMAKELNKPQIEIEDFLFFAPNKYKVYSIPKRTHGFRTIAQPTKELKDYQRAFTSWVELPVHNCAMAYCQGRSIKDNAYAHKKNAYLLKLDLENFFNSITPDTFWRVWSSRWNLPNKNERQWVERLLFWNNKEKLVLSVGAPSSPLISNFCMVQFDKDLYLYCQSLGVTYTRYADDLTFSTNKRNILFSLPSDINQFLEKHFQSDLKINPSKTAFSSKAHNRHVTGITINNDGKLSLGRERKRYIKHKIHQFKLNVLDAYEIQHLKGLLSFAKHIEPTFIESLEKKYSKSLIEIIFEAKYDERK

SEQ ID NO: 4036 - protein, 306 aa, Vibrio sp.
  source 1..306: note = Related to PIFQ01000001.1; note = Vibrio splendidus
MTFIQRLAKELNKSRDEVEDFLFFSPEKYKVYRIPKRKHGFRVIAQPTKELKTYQRAFISLIQLPVHECAMAYCKEKSIKDNAAAHKNNKYLLKLDLENFFNSITPEIFWEVWASFTSLPSEEDRKWMEKLLFWDKQGKLVLSVGAPSSPLLSNFCMTNFDKELTSYCKKKDVSYTRYADDLTFSTNKRDALFSFPAVISEFLDKHFSSRLMINHSKTAFSSKAHNRHVTGITITNEGKLSLGRERKRYIKHKVHQFKIEKLDPYEIQHLKGLLAFAKHIEPKFIKSLNNKYSKLLIKKIFETNDD

SEQ ID NO: 4037 - protein, 305 aa, Enterobacter cloacae
  source 1..305: note = Related to JAKMJP010000001.1
MKLVGQLAHILSISEQDTLRLILNAPFKYRVYTIPKRTHGRRVIAQPTKVVKKLQKGFISLYNFPVHSRCMAYRKGLSIKHNAEMHLDNSYLLKMDLSDFFNSLTPKIFWNTWKEFWQLPDGLEQRLIESIIFWNNNSILTLSVGAPSSPAISNFCLYPFDEKLDKYCIEKGIAYTRYADDLTFSTKENNLLFILPSIVSGMLHDIFGGSLTINNKKTVFSSKAHNRHVTGITITNEGSASIGRERKRYIKHLLNKYKFNELNSNDINHLRGLLAFAFHIEPDLLTSLSNKYTHELLEKLKQEGE

SEQ ID NO: 4038 - protein, 305 aa, Enterobacter sp.
  source 1..305: note = Related to JAJCXF010000001.1
MELVAQLAHILSISEQDTLRLILNAPYKYRVYTIPKRTHGRRVIAQPTKAVKKLQKSFLHLYDFPVHSKCMAYRNGISIKDNAEKHLENPYLLKLDLSDFFNSLTPKIFWNTWQKFQQVPDALEQRLIENIVFWNNNSKLTLSVGAPSSPVISNFCLYFFDEKLEAYCLKEDIVFTRYADDLTFSTKKNNVLFNLPNIVSKYLNDIFDGALTLNNNKTVFSSKAHNRHVTGITITNEGNASIGRERKRYIKHLLHKYKLNHLNYNDINHLRGLLAFAFYIEPNFATTLSKKYTRELLEKLNEERG

SEQ ID NO: 4039 - protein, 313 aa, Vibrio sp.
  source 1..313: note = Related to JAKEUX010000006.1; note = Vibrio brasiliensis
MKIVSVLAGELVVSEQEILSILLGASKKYKVYPIPKRTHGIRLIAQPTKKVKVLQRAYVDMMNFPVHSNSVAYRKGYSIKDNAQFHASNPYLLKMDLSNFFNSITPKIFWGMWEKLWDLPEPLEKHLIENLLFWNIDKGSSISRLVLSVGAPSSPIISNFCLYEFDELMTKHCISRDIYYTRYADDMTFSTKKRNVLFDIPNFVKSLLYDVFGSSISVNYNKTVFSSKAHNRHVTGITLTNDGEISLGRERKRYIKHLVNEYRYNKLSSEDFNYLKGILSFSKHIEPKFVRSLINKYGEDVITSIFSGDLNET

SEQ ID NO: 4040 - protein, 305 aa, unidentified
  source 1..305: note = Related to NZ_CAKODS010000001.1; note = Kosakonia cowanii
MKIVMALAQQLKYSEPELLQLVLKAPYKYRVYTIPKRTHGRRTIAQPTKSVKELQREFLKYKVFPFHASSMAYRKGMSIKDNAASHSTNSFLLKMDLANFFNSLTPDVFWSVWADHWEPLSPLEHRLVENILFWDNKGKLMLSVGAPSSPTISNFCLFFFDVAITNYCSGIDVTYTRYADDLTFSCNTPGILSTIPAFISRILKDKYNGKISINHQKTIFSSKAHNRHVTGITITNDTKLSIGRYRKRYIKHLINQYKYKLLDSDSIYHLKGMISFANHIEPDFLISLKNKYSSKLINEIIGVHK

SEQ ID NO: 4041 - protein, 305 aa, Citrobacter sp.
  source 1..305: note = Related to JAASMA010000001.1; note = Citrobacter koseri
MKIVSVLAQQLKCSESDILKLILNAPYKYRVYSIPKRTHGRRIIAQPTKAVKELQRSYLKYKDFPFHINSMAYRKGFSIKDNAESHRLSAYLLKMDLANFFNSLTPDVFWDIWRQHWEPLQSLEHRLVENILFWDNSGKLMLSVGAPSSPAISNFCLYFFDNAVSEYCEKINVIYTRYADDLTFSCNDPNILPTLPEFISRVLKEKFSGKILVNHQKTIFSSKAHNRHVTGITITNDEKLSIGRYRKRYIKHLINQYKYNLLDAETIYHLKGMISFSNHIEPDFLNSLRKKYSSNLIDEIIEVNK

SEQ ID NO: 4042 - protein, 306 aa, Vibrio sp.
  source 1..306: note = Related to MCZP01000152.1; note = Vibrio breoganii
MELITSLARAIEKSEPDTLNLVLSAPYRYRRYTIPKRTHGRRLIAQPTKEIKAVQKAFVKIRTFPIHPAAMAYRKGVSIKDNAQAHKLNSYLLKMDLTDFFNSITPSVFWRVWEKVWPLPERLEMLLIERIIFWSNEDELMLSVGAPSSPVVSNFCMYFFDDYISTLCDQFDLVYTRYADDLTFSTNKTNLLFEMPSIVGAVLKTEFNDFLAINKSKTIYSSKAHNRHITGITITNNNELSIGREKKRYIKHLVHQHLVCKLSIEDSNHLRGLLSFVSHIEPTFIKSLKNKYSEETIDKLLRGSYE

SEQ ID NO: 4043 - protein, 313 aa, Vibrio parahaemolyticus
  source 1..313: note = Related to NZ_QPQH01000001.1
MNLITKLAKELETSEPNVLSTVASGPLKYKVYSIPKRTRGRRIIAHPSRELKQVQKAFLALYQFPIHSSAMAYKKGVSIKENAECHRLNKYLLKMDFENFFNSITPLLFWKVWSLNYPEPTFLEKRVIENILFWAPSISERDNLMLSVGAPSSPTISNFCLYQFDLIITKYCDDNEITYTRYADDITFSCNTPKGLSKIPKAVRKTLKNLYGTQIEINNQKTVFSSQAHNKHVTGITITPDGKLSIGRERKRYIKHLVHQYTLGALEQEDINHLRGLLSFAKHIEVSFFNSLITKYSADVMLQITRGNNEKNF

SEQ ID NO: 4044 - protein, 312 aa, Vibrio sp.
  source 1..312: note = Related to NZ_SZZR01000017.1; note = Vibrio gallaecicus
MNLLQRLSIELGVSESHILSITASGPLKYKVYSIPKRTHGRRIIAHPSKDLKKLQKSFIKLHNFPIHTNAMAYKEGVSIKDNASFHKSNKYLLKMDFENFFNSITPVLFWNVWNQHFPKSSYFDKKIIENILFWAPNIHERERLILSVGAPSSPMISNFCLFQFDSILTHYCIERSIFFTRYADDLTFSTDTPDLLKTLPGVISNLLRQLYEGQIEINNQKTVFSSQAHNKHVTGITITPEGKLSIGRSRKRYIKHLVHQYILNKLKSSDFNHLRGLLTFSMHIEPQFITSLENKYSTNIIENIVRGINEQN

SEQ ID NO: 4045 - protein, 321 aa, Vibrio sp.
  source 1..321: note = Related to BBSA01000008.1; note = Vibrio ishigakensis
MSVVSYLTNSCHCNSDDLFRLAINAPRRYKVYSIAKRTSGYRTIAHPSAELKKVQYQIISAFSEGNRPLAQLSIHSQAMAYKTGVGIKENAKMHSHNSYLLKMDFEQFFNSITPELFWRSYHALNPETTLSRTDKKLIDLFLFWAPNKYDLSRLVLSVGAPSSPLISNFCMYQFDELIHRFCHERKITYTRYADDITFSTNVPNVLFTVPKKVDELLKELFSGLIMINNQKTVFSSRAHNKHVTGVTITPQGGLSLGRNRKRYIRHLVHQFTLGRLATDDLNHLRGLLSFSQYIEPSFVLSLKKKYSIPIVDSISRGRYEC

SEQ ID NO: 4046 - protein, 312 aa, Vibrio sp.
  source 1..312: note = Related to MCXQ01000034.1; note = Vibrio lentus
MDLVKKLASEVGVTEREIKAFLYLAPRKYKVYTIPKRKSGVRVIAQPTSELKELQRKYVQMMDLPSHECSMAYKKGVGIKENAERHQGNTYLLKMDLENFFNSITPEVFWGTWSNFYAFPTSIEKLYLEKLLFWCPSKKNSNKLILSVGAPSSPAVSNFCMLVFDNVVSQYCISKQIVFTRYADDLTFSTQQKNALFEVPSLIQRVLSEIFGRKLTINHSKTTFSSMAHNRHITGITINNDGELSIGRDKKRYIKHLVNQFNYNKLDEQDLYHLRGLLAFAKYIEPNFINSLNKKYSSDVMNKLLRGGNEKI

SEQ ID NO: 4047 - protein, 312 aa, Vibrio sp.
  source 1..312: note = Related to NZ_CP025953.1; note = Vibrio campbellii
MDLVKKLASEVGVTEQEIKAFLHLAPRKYKVYTIPKRKSGVRVIAQPTSELKKLQRKFVKIVNFPTHECSMAYKKGVGIKQNAEIHQANTYLLKMDLENFFNSISPDIFWKVWSEFNPLPTSVDKLYIEKLLFWCPSKKNSNKLILSVGAPSSPNISNFCMSKFDDVVSKFCQDRNIIFTRYADDLTFSTKKRDVLFEVPSLVQHALSEEFGRRLTINHSKTTFSSMAHNRHITGITINNEGNLSIGRDKKRYIKHLVHQFKYNNLDEQDIYHLKGLLAFAKYIEPSFLGSLNEKYSFEVMKKIIRGDNEEV

SEQ ID NO: 4048 - protein, 303 aa, unidentified
  source 1..303: note = Related to NZ_LOFH01000001.1; note = Pseudoalteromonas sp.
MKLLSEKSNLTEDQISRILVNGSRKYKVYLIPKRSHGNRVIAHPAKKLKLLQKDFLKIVDFPYHECSMAYEKGTGIKKNAFAHSKNEFLLKMDLAEFFNSITPTIFWSAFSKYFNITPNHIDSYFVNNLIFWLKEGDKAVLSVGAPSSPKISNFCMFQFDEIVFQYCNESFITYTRYADDMTFSTNVREILFTIPSFVESLLFQLFGTAIAINYSKTVFSSKAHNRHVTGVTITNEGALSLGRKRKRYIKHLTHQFVTGVIDKENIAHLRGLLAFSNDIEPSFLSTLDRKYGPGITTKIMEIK

SEQ ID NO: 4049 - protein, 302 aa, Aeromonas hydrophila
  source 1..302: note = Related to CP000462.1
MDKKAIYIERFLVYAPRKYRVYKIPKRKHGSRVIAQPTAELKKLQRAFINRSKIPVHECAMAYKDGVSIKDNAQLHSTNTFFLSMDFENFFNSITPDLLWGVFNKFGKVISPNEKLWLSKLLFWCPSKKNSNKLILSVGAPSSPKVSNFCMYFFDEYISTYCQDRNITYSRYADDLSFSTNEKDILFQIPGVVKETLLKLFGRDITINNSKTVFSSKAHNRHVTGITITNEGELSLGREKKRYIKHLIFRFKNGLLDVSDVSYLRGILSFAFYIEPAFKTSMVKKYTKATIDSIFNGVDDGK

SEQ ID NO: 4050 - protein, 305 aa, Citrobacter sp.
  source 1..305: note = Related to DACSXM010000001.1; note = Citrobacter freundii
MFIATLAQKMGKNDREIREFLINAPEKYKVFTIPKRKHGYRIIAQPSRELKVYQRQLEDLISFPVHYRAMAYCKGRSIKINALHHVKNSYLLKLDLENFFNSITPDIFWKVWSKTWDLPCDEDRIYIEKLIFWRFQGTLRLSVGAPSSPLVSNFCMYYFDEKIEEICLNNKVSFTRYADDLTFSSNVKNILFEIPRLVQDTLENQFHTGFSINTSKTIFSSRAHNRHVTGITLDNTGKISLGRDRKRYIKHKVHHYTLNILDEDEINHLRGLIAFAKYIEPVFFHSLEAKYTANMMSKLLEGKDE

SEQ ID NO: 4051 - protein, 304 aa, unidentified
  source 1..304: note = Related to NZ_CP090245.1; note = Klebsiella oxytoca
MFTEAFARKMGRDELEITEFLMNAPDKYKVYAIPKRKQGYRIIAQPSRELKHYQRQLQDFIIFPKHKCAMAYRKGLSIKNNALSHVNNSYLLKLDLENFFNSITPDLFWSVWSRTWSLPSKEDQLFLEKLIFWRFQGSLILSVGAPSSPSISNFCMYYFDGEIEAICTKMKITYTRYADDLTFSSNVRNILFEIPVLIENILNEQFKGLLRLNSSKTIFSSKAHNRHVTGITLNNNGKISLGRDRKRYIKHKVHLYTLGMLDATELNHLKGMITFARFIEPAFFKSLETKYNSNVIFRLTQEKI

SEQ ID NO: 4052 - protein, 301 aa, unidentified
  source 1..301: note = Related to NZ_JABEBB010000004.1; note = Pantoea ananatis
MLLSALAQKMGISEDVAEQFLINAPEKYKVYSIPKRGIGFRLIAQPSKELKVYQKTLLNLIVLPINDTAKAYRLGESIKSNALIHSGNAYLLKMDLEDFFNSITPDVFWSVWQRFWELPDEYDMSVIESVTFWKKDNSLVLSIGAPSSPMISNFCLFFFDEEINKFCVKNNISYSRYADDLTFSTNIRNVLFSLPKLIAKVLKENFSGALKINRGKTIFSSKAHNRHVTGITLSNDGKISLGRARKRYIKHKIHHYKLGLLDFDEINHLKGLIAFSKFIEPLFFESLEIKYSKITLMKLME

SEQ ID NO: 4053 - protein, 310 aa, unidentified
  source 1..310: note = Related to JACGVM010000019.1; note = Colwellia sp.
MGVIDKLANKLNFTKKDVAFFLFDAPKKYKVYNIPKRSFGHRVIAQPSKELKEYQRTFLELYQFPHHANSMAYSSGKSIKDNAEVHRKQRYLLKMDLENFFNSITPEVFWNAWGKFKALPDDNDKEWIERLLFWQPRSTRSNDLKLSVGAPSSPSISNFCMYLFDEVVTEHCQKESVYYTRYADDLTFSTNKKDILSSIPSVIKTKLKECFDHRLVINQRKTKFSSKAHNRHVTGITISNDEKLSLGRERKRYIKHLVHQFQLNKLDQKDIRHLQGLIAFARHIEPMFISSLTKKYSETLIQRIIEAHNE

SEQ ID NO: 4054 - protein, 309 aa, unidentified
  source 1..309: note = Related to NZ_CP016181.1; note = Marinomonas primoryensis
MDTADFLSKLTNKSRSSIVDFLRLAPNKYRVYTIPKRSYGYRTIAHPTANLKFLQRTFSENFAFPTHAAAQAYISGKGIKSNATQHKNNCYLLKLDLEDFFNSIKPDLFWGVWDKAFQELPSPASKEMLEQLLFWRPSRRIGHTLVLSVGAPSSPAISNFCMYFFDVAITNICELLEVKYTRYADDLTFSTNQKNILFELPALIESTLKEEFSLQLNINKKKTKFSSKAHNRHVTGVTITNDSTLSLGRSRKRYIKHLVHRATLKQLNTDELNHLIGLLSFAHDIEPDFLTRLDAKYGDGSIQRIRSSI

SEQ ID NO: 4055 - protein, 312 aa, unidentified
  source 1..312: note = Related to MEIT01000084.1; note = Snodgrassella alvi
MREIIKYADSLEISVENLQIFLLNAPKMYKVYKILKRTHGYRVIAQPAKQLKEYQRKFIKIFSQYLVVHEYAMAYQKNKNIQQNAEIHKNNSYLLKMDFENFFNSITPALFWNEWENINPDIFDENEKNLFSRLLFWNPNRKRTQRENLILSIGAPSSPLISNFVMYRFDKLITQYCLDKNINYTRYADDLTFSTNIKNILYQIPVEVSKNLNLLFGNKLRINNSKTVFSSKAHNRHITGITITNNNKLSLGRERKRYIRALVHQYKYAQLEKADIQYLKGLLNFCKSIEVSFIHSLAQKYGNETLKNIMKE

SEQ ID NO: 4056 - protein, 312 aa, unidentified
  source 1..312: note = Related to MEIK01000040.1; note = Snodgrassella alvi
MQAFLKFAESLKISARELAIFLHNAPKMYKVYKIPKRTHGYRVIAQPTKQLKEYQRKFIEIFSTQMPVHEYAMAYQKNKNIQQNAIFHKDNSYLLKMDFENFFNSITPAILWNEWEKINPGVLNIIEKDFFSRLLFWNPNIKRKKQEKLILSIGAPSSPSVSNFVMYGFDDLITQYCNAREIKYTRYADDLTFSTNSKNILYPIPAEVDKTLKLLFGHNLRVNNGKTVFSSKAHNRHITGITITNNNKLSLGRNRKRYIRALVHQYQCAQLDKNDIQYLKGLLNFCKSVEIAFIKSLMRKYGEEIIENIMKE

SEQ ID NO: 4057 - protein, 312 aa, unidentified
  source 1..312: note = Related to CP091515.1; note = Snodgrassella alvi
MKNITKYAKSLDLSVENLQEFLLNAPKMYKVYKILKRTYGYRTIAQPTKQLKEYQRQFTNLFTQYLPVHDCAMAYQKNKNIQKNAEIHRNNSYLLKMDFENFFNSITPDLFWSEWESANSDMLDKDEKLLFSRLLFWDPNIKKTKQENLILSIGAPSSPLISNFVMYRFDELIKEYCVCIEVNYTRYADDLTFSTNKKNILYTIPAEVNKNLKNLFNNKLRVNNSKTIFSSKAHNRHITGITITNDNKLSLGRQRKRYIRALVHQYKYTQLEKDDIQYLKGLLNFCKSVEISFIHSLAHKYGYEVLKNIMKE

SEQ ID NO: 4058 - protein, 310 aa, Enterobacter cloacae
  source 1..310: note = Related to CP010512.1
MNIIHLLARSLNEDDITIKNYLAKAPLKYKVFAIPKRTHGHRIIAQPARELKRYQRAFINYIEFPIHDCASAYIKNRSIKNNAEHHKENSFLLKMDLENFFNSITPQIFWDAWRENFPLPDKEQMYYFERLLFWDVGNNELVLSVGAPSSPMVSNFCMYLFDSTIYSFCKSRSITYTRYADDLTFTTNLKSNLFDIPNEIQVILKNNFSDQIKINRSKTKFSSKAHNRHITGITITNDNKISIGRNRKRYIKHLIHQFSISKMEQSDLYHLKGLISFAMYIEPEFFNALTKKYGSSIINCIMSNNNGKNN

SEQ ID NO: 4059 - protein, 312 aa, Citrobacter sp.
  source 1..312: note = Related to DACSVK010000003.1; note = Citrobacter freundii
MEIIKNLSKHLNRTESHIKSYLIQAPNKYKIYTIPKRSHGVRVIAHPAKELKEIQYAFLSILKFPVHEAAMAYVPQKSIKTNAHAHKNNQFLLKMDFENFFNSITPNIFWYHWNNAFPVIDAEERFWIERIIFWNNKDLKSNLTLSVGAPTSPTISNFCMYSFDEEVTKYCREKDITYTRYADDLTFTSNTKGILFNLPKHIDKTLKKLFFSAININNKKTKFSSKAHNRHITGITITNDEKLSIGRKRKRYIKHLVHMYVLNLLDRNDFEHLKGLLSFVYDIEPTYIYRLEKKYTKFIIDNIKEGKYEQKH

SEQ ID NO: 4060 - protein, 314 aa, Acinetobacter sp.
  source 1..314: note = Related to JALGBR010000010.1
MSNIDVVKQLTKHYSKSPKELFVFFVDAPRKYKVYEIPKRTSGTRIIAQPTPELKDYQRFIISILKDHLPTHECSMAYIQGKDIKQNAQMHSKNSFFLKMDFIDFFTSITPTLFWHACERQELNFDWLDKELLEKVLFWRPSKYSKKLVLSIGAPSSPYISNFLMYSFDQELNNYCKQNGITYTRYADDLTFSTKKSKVLFDIPECVRKFLIKFYGQKIQINHFKTVFSSKKHNRHVTGLTITNDSSISIGRAKKRYIKHLVHRFVKENISVEDLNYLKGYLGFIQYVEPNFLYSLERKYTISIINKIRAGRGV

SEQ ID NO: 4061 - protein, 312 aa, Acinetobacter sp.
  source 1..312: note = Related to VYTC01000001.1; note = Acinetobacter junii
MSNIDVVKQLTEHYSESPKELFVFLVDAPRKYKVYEIPKRTSGTRTIAQPIPKLKEYQRFVISILKDYLPTHECSMAYLRGKDIKQNAQIHSKNSFFLKMDFMNFFNSITPTLFWHACERQEINFDWLDKELLEKILFWRPSRYSKKLVLSIGAPSSPYISNFLMYSFDQELSNYCNQNGISYTRYADDLTFSTNKSEILFNIPERVRKLLIILYGQKIQINQFKTAFSSKKHNRHVTGLTITNENSVSIGRAKKRYIKHLVHKSIEEEISVEGLNYLKGYLGFIQHVEPKFLMALERKYTEAVIKKIRLGC

SEQ ID NO: 4062 - protein, 312 aa, Acinetobacter sp.
  source 1..312: note = Related to KB851203.1; note = Acinetobacter seifertii
MSRVEILEKLKLKFNKTPLELFQFLDDAPRKYKVYEIPKRTSGTRIIAQPISELKDYQRFVISILQTDLLLHDCCMAYVKGKDIKKNAEAHSQNSFFLKMDFMDFFNSITPSLFWHACERQNIDFDWFDKELLEKILFWRPSKYSKKLVLSIGAPSSPFISNFLMYSFDNEISDFCRKNNITYTRYADDLTFSTSNALVLFSVPNFVKKVLLKIYGQKIQINQFKTVFSSRKHNRHVTGLTITNENSVSIGRAKKRYIKHLVHAFIEQKVDPQDLNYLKGYLAFIQYVEPKFLNSLEQKYTAAVIQEIRIGN

SEQ ID NO: 4063 - protein, 315 aa, Acinetobacter sp.
  source 1..315: note = Related to NZ_PYIX02000002.1; note = Acinetobacter sichuanensis
MSNIDVTQYLIEHHMEIHKSKEGFESFIKGASRKYRSYEIPKRTSGTRKIAQPMRQLKDYQRTIVTIFETTFLIHDCCMAYMKGRDIKTNALIHSGNSFFLKMDFTDFFNSITPKLFFEGCERQKIDLNWADKETLEKILFWCENKYSKELVLSIGAPSSPFISNFVMYSFDEVLNEYCKKNGITYTRYADDLTFSTSTSGILFSVPDIVRGTLLQFYGTKIQINQFKTAFSSKKHNRHVTGLTITNDNNISIGREKKRYIKHLVHNFIEEKITLEDLNYLRGYLGFIKYVEPSFLISLEQKYTQSVIQKIRLGN

SEQ ID NO: 4064 - protein, 312 aa, Acinetobacter sp.
  source 1..312: note = Related to LSZI01000016.1
MSRMDIAGHLTTHYSKTPQELFVYLVDAPKKYKVYEIPKRTSGTRTIAQPTPELKKYQSFVVSILKEYLPIHNCCMAYTDGRNIKQNAQIHSRNSFFLKMDLMDFFNSIIPKLLWEAFEREGVQLDWLDKEFLEKILFWKRSKYSKKLILSIGAPSSPFISNFLMYSFDKVLDEYCENNGITYTRYADDLTFSTKEKDVLFLIPDVVRETLVKFYGQKIKINHFKTAFSSKKYNRHVTGITITNSDEISIGRAKKRYIKHLVHKFVEERISLDDLNYLRGYLGFIKYVEPKFLISLEKKYTQNVIEKIRIGN

SEQ ID NO: 4065 - protein, 315 aa, Acinetobacter sp.
  source 1..315: note = Related to CP031984.1; note = Acinetobacter haemolyticus
MSKVDIIEYLMSKQVHNFDSKMDFFKFFGEAPKKYKRYEIPKRTSGTRTIAQPIRELKDYQRALIDLFQGYFPVHDSSMAYVKGKDIKRNAEIHSQNIYFLKMDFTDFFGSITPKIFWKACERAGIEFDWLEKEIIEKTFFWKPSKYSNKLVLSIGAPSSPFISNFIMFSFDCEIAQYCEEQGITYTRYADDMTFSTNTPNLLFSMSDTVRNVLIEFYGNTIKINHLKTVFSSKKHNRHVTGITITNDDELSIGRAKKRYIKHLVHKFIEEKISLEDLSYLRGYLGFIKYVEPNFLITLEKKYTQNVIQRIRVGN

SEQ ID NO: 4066 - protein, 315 aa, Acinetobacter sp.
  source 1..315: note = Related to NZ_VPEY01000001.1
MSKVDVIEYLMSQQIHNFDSKMDFFKFFDEAPKKYKRYEIPKRTSGTRTIAQPIRELKDYQRALIDLFQENFPIHASSMAYVKGKDIKKNAEVHSQNIYFLRMDFTDFFNSITPKIFWNACERAGIEFDWLEKEIIEKTIFWKPSKYSNNLVLSIGAPSSPFISNFIMYSFDNEIAKYCQERKISYTRYADDLTFSTKLPNVLLDLTRVIGNTLIGFFGNAIKINHLKTAFSSKKHNRHVTGITITNKDELSIGRAKKRYIKHLVHNFIEEKISPDDLNYLRGYLGFIKYVEPKFLASLEKKYTQNVIQKILLGS

SEQ ID NO: 4067 - protein, 315 aa, Acinetobacter sp.
  source 1..315: note = Related to CP018254.1; note = Acinetobacter baumannii
MKNLNILKSLEEKFSIPQHELQEFIKSSPRKYKVYQIPKRSSGTRTIAQPTAELKEYQRHLVSIFSPILPVHETSLAYIKGKSIKDNALIHCKNRYFLKMDFANFFNSITPNIFWNCWEESKNQNKINDLDKEILTNLIFWKPSKYQKNLVLSIGAPSSPLISNFCMYKFDIALSEICHKKNISYTRYADDLTFSTEYANILFDLPLIVSKILMDLYGGSLEINHLKTAFSSKKHNRHVTGITITNEGKISLSRKKKRYIKHLIHKFIFGSIEINELTYLKGYFSFIQHIEPDFLSRLKSKYSDETINLIRSMEL

SEQ ID NO: 4068 - protein, 313 aa, Acinetobacter sp.
  source 1..313: note = Related to DADATW010000032.1; note = Acinetobacter baumannii
MNNLNILKILEEKFDVPQHELLEFIKSSPRKYKVYQIPKRTSGTRTIAQPTAELKKYQRYLVSIFTPILPIHKNAFAYIQGKSIKDNALVHSSNSYFLKMDFSNFFNSITPNIFWNFFEETNVKFSGLDRILLSHLLFWKPSKYQQNLVLSIGAPSSPLISNFCMYKFDVVISEFCKNNNINYSRYADDLTFSTNIANSLYNLPLIVSKSLKELYGNSIEINPLKTSFSSKKHNRHITGITITNDGKLSLSRKKKRYIRHLIHKFMMKSIETNELQYLRGYFSFIQHVEPDFLSRLISKYSEETIRLIRLMEN

SEQ ID NO: 4069 - protein, 312 aa, Acinetobacter sp.
  source 1..312: note = Related to CP009256.1; note = Acinetobacter baumannii
MSILEHLISNTSYSRKDLLEFLENAPRKYKIYHIPKRTYGFRTIAQPIPELKNLQRITIKFLENELPIHNSAAAYIKGKSIKHNALSHCKNKYFLKLDFENFFNSINTTVFWKMWDSYTNVQVPTQDKTYIENLLFWRPSKTSKKLILSIGAPSSPFISNFCMYEFDQAVEEICLKHKVTYTRYADDLTFSTNTKGVLFDFPKYINSILLDVYDGQLRLNSLKTKFSSKAHNRHVTGVTITNDKKISLGRARKRYIKSLIFKYINSNIDLEDISKLKGLLSFSYSIEPTFILSLKSKYSAEVIDEIFEKTKS

SEQ ID NO: 4070 - protein, 312 aa, Acinetobacter sp.
  source 1..312: note = Related to NZ_CP090180.1; note = Acinetobacter johnsonii
MSILEHLVENSSYSSQELIEFLDNAPRKYKVFHIPKRTYGFRTIAQPIPELKDLQRIAIKYLENQLPVHKNAMAYLKGKGIKQNATKHCKNKYFLKLDFENFFNSVNTTVFWQMWSLYSEFQIPLQEQAIINNLLFWRPSKTSKKLVLSIGAPSSPFISNFCMFQFDEAITELCLIYDVTYTRYADDLTFSTNTKNVLFDFPKHVTTILLNIYQGQLRLNSLKTKFSSKAHNRHVTGITITNDKKISLGRSRKRYIKSLVYKYMASELDNENLAKLKGLLSFSYSIEPTFILALKLKYSAEIIDKLFEKTKP

SEQ ID NO: 4071 - protein, 308 aa, unidentified
  source 1..308: note = Related to NZ_GL883764.1; note = Parasutterella excrementihominis
MGIISRMAVRLNMSEPLLVSHLNGGARKYKLFFIPKKRGGKRAIAQPSKEIKFLQRVFLSAVHLPTSNFVYSYKQGKNIFQNASLHKGNKYFLKLDFDNFFNSITPRIFWEQWKLAFPEQNYLNAVDKICLEQLLFWQPSAYKSDLVLSVGAPSSPAISNFCLLSFDNEIHSYCYQRGITFSRYADDLTFSTNEPNVLYEVLPFVQELLTQKFNGAIRLNPSKTVFTSKKHLCKVTGLIITPEGKISIGRNNKRYIKHLTFEYLQGRLEEEDVMKLKGFLSFAKSIEPSFIHSLQKKYSPVLLSKLGI

SEQ ID NO: 4072 - protein, 309 aa, Acinetobacter sp.
  source 1..309: note = Related to NZ_CP083989.1; note = Acinetobacter guillouiae
MCLIDDLVTEFSKSKNEILEYSFVAPNKYKVYKIPKRKTGERVIAQPTKELKSFQRYIVNKKLNILPIHNCAFAYVKLKNIKENANQHKSNSYLLNMDLEDFFNSITPSLFWKVWGRILINLPDLEDRKLYENFLFWKPKKFSNKLILSIGAPSSPFISNFILYELDDFLFEFCKINSITYSRYADDLTFSTNIKDILFSIPNEVESKILELYEGAINLNTSKTYFSSKARNRHVTGLVLSNDGKISIGRSKKKFVKHLIFQYMLNRLNHEEILFLRGYLNFIKDVEPEYISILKRKYSDNLILRIMVD

SEQ ID NO: 4073 - protein, 312 aa, Acinetobacter sp.
  source 1..312: note = Related to KI530706.1; note = Acinetobacter gyllenbergii
MSLIDELAFEFNKSKEEIRTYLLQAPSKYKVYLIPKRKVGKRVIAQPTKDLKLIQRFILAKKLKHLPIHDAAFAYVKNKSIKNNAAVHLSNSYLLNLDLEDFFNSITPKLFWRVWKRTIDQVPEVEERRIYNQFLFWQPKKNSKKLILSIGAPSSPYISNFILYELDRYLTVFCKNNFISYSRYADDLTFSSNVRNSLFKVPKVVEDKLFDLYEGEINLNHSKTVFSSKAKNRHVTGLVLTNDGKISIGRAKKRFIKHLVYRFKIGELEQSSFQYVSGYLNFIQDVEPVFLESLKFKYTEEVVNKIMLGVWE

SEQ ID NO: 4074 - protein, 313 aa, Acinetobacter sp.
  source 1..313: note = Related to NZ_MABW01000006.1; note = Acinetobacter baumannii
MNLLDELAIKFNKSKDEIRTYSLKAPDKYKMYLIPKRKKGKRLIAQPTSELKLIQRYIVIHKLQKLPIHPCTYAYRKNISIKDNASVHVKNSYLLNLDLENFFNSITPRLFWKVWERTLNNLPDKEEQELYENLIFWRPRKSSHKMILSIGAPSSPYISNFILYELDSFLSSYCDEKSINYSRYADDLTFSTSKRNILFDIPNIVEGKIFELYNGLISLNDDKTTYSSKARNRHVTGLVLANDGKISIGRRKKRFIKSLIFKSINNELPLESISYLSGYLSYINDVEPSFIYSLERKYSYEVIHKIMGSKNEN

SEQ ID NO: 4075 - protein, 313 aa, Acinetobacter sp.
  source 1..313: note = Related to LWHP01000001.1; note = Acinetobacter pittii
MDLISRLEIKFSSLSRVDVRSYLSKAPDKYKVYPIPKRKGGTRVIAQPAKETKILQNFVIDEIFYNFPIHQAAMAYRKNHSIKMNASIHASQKYLLSMDFENFFHSITPQLFWDVYARLIQEPITFEDKNYYQNLFFWRPKKQSDKLLLSIGAPSSPFISNFVMYEFDTFIYDFCKSVGIKYTRYADDLTFSTNQKDILFEIPHLVAKKLDELYKNRININRNKTSFSSKAHNRHVTGIVLTNENKISLGRKKKRYIKHLVHEFKLGKLSIADKNYLCGFLNYANFIEPEFILSLENKYTKEIIALARRNINE

SEQ ID NO: 4076 - protein, 314 aa, Vibrio sp.
  source 1..314: note = Related to QJUD01000001.1; note = Vibrio furnissii
MDLKLYQYLESQNSNFTNLLRATPSKHYKVYKIPKKRLGFRTIAQPTPAVKVIQKQIVDYLIPKTSIHTSALAYVSGKGVKDNALQHVKSDYLLKVDLENFFNSITPKMLVKALKHQGINISQTDIMVLSQFLFWNITKKTNGKLVLSVGAPSSPFVSNLVMFAFDQRMSKLCRSTGITYTRYADDLTFSTTHKNILFQHLNEVRKVLKKEFGARLVLNESKTVFSSKAHNRHVTGVTLTNNNKISLGRDKKRYISSLIHKFKLGLLDQEDIYHLQGLISYAKHIEVRFLRNMSLKYGANVLDSIRKYSGEDDA

SEQ ID NO: 4077 - protein, 314 aa, Vibrio sp.
  source 1..314: note = Related to SYUN01000005.1; note = Vibrio kanaloae
MDLKLYQYLNERNLNFKSLLEATPSKHYKVYKIPKKRLGFRTIAQPTPAVKIIQKEIVDYLTPKVSIHTSATAYVPGRSVKDNALVHVKSNFLLKVDLENFFNNITPKMLFKSLKKQGIVVSGVDLIVLQQFLFWNISKKRSGKLALSVGAPSSPFVSNVVMLSFDERMTKLCRKSGINYSRYADDLTFSTTQKGLLFEHLFVVRKALKKEFGARLVLNESKTVFSSKAHNRHVTGITLTNNNKISLGRERKRYISALVHKFKLGLLDVEDTLHLQGLISYANHIEASFVQKMSIKYGDNVLTEIIKYSGENDV

SEQ ID NO: 4078 - protein, 319 aa, unidentified
  source 1..319: note = Related to PYNL01000004.1; note = Photobacterium kishitanii
MDLKELHLLQYVISKNMHTVSLLDDHPSLHYKVYKIPKKNIGFRTIAQPTAPLKKMQRDIVEYMTPRVCIHKNAMAYIEGVGIKNNALAHAKSTYLLKVDLENFFNSITPEMLFHSLKNQGFKINSIDWAYLKELLFWNIAKKKNKGKLVLSVGAPSSPLISNIIMYNFDVRMTSLCEKQNINYTRYADDLTFSTKDKNILFEHLKIIRKVLDNEFKGELVLNESKTIFSSKGHNRHVTGITLTNNNKISIGREKKRYISSLIHKFKYQKLNEDDIYHLQGLLSFASHIEKDFIYRMSKKYGIDTIKKIKLFSGDKNDQ

SEQ ID NO: 4079 - protein, 316 aa, unidentified
  source 1..316: note = Related to JABAIP010000015.1; note = Shewanella sp.
MDIKLYEQLNSTNIGFNELFLRSPSKHYKVYKIPKRTLGFRTIAQPTPAVKRIQKQIVSIISKNAKVHHCATAYVRGKGIKENANKHVCSEYILKVDLENFFNSVTPKMLFKALKKQKIVLSQIDEKVIEQFLFWNMSKKINGKLVLSVGAPSSPFISNLVMYSFDKKMEEYCSKESIVYTRYADDLTFSTKSKGILFTHLQFVRKMIAKEFSSKLMLNESKTVFSSKAHNRHVTGIVLTNNNKLSLGREKKRYISALIHKFKLGKLLIDDIYHLKGLLSHASHIERDFILKMSEKYGAEVVLEINKFSCGESNDG

SEQ ID NO: 4080 - protein, 312 aa, Vibrio sp.
  source 1..312: note = Related to CAOA01000025.1; note = Vibrio nigripulchritudo
MDLRLYRQLEQRNPNFIRLLNRYPSRHYKVYKIPKRTFGFRTIAQPTPNVKQVQKLVISLLSEKVNVHPCATAYVQGKSIKDNASYHVKSEYLLKVDLENFFNSITPKMLFKALKKQSISLTDQDMLVLEQCLFWNMSKKLNGKLVLSVGAPSSPYVSNVIMYSFDKRMSKICAKNNINYTRYADDLTFSTNTKGLLFGHLNEVRKLLKKEFGAKLTLNESKTVFSSKAHNRHITGVTITNNNKLSLGRDRKRYISALIHKFKHSQLSEDDIYHLKGLISHALHIESKFVHRMIKKYSKETLNSIRKYPSGA

SEQ ID NO: 4081 - protein, 312 aa, unidentified
  source 1..312: note = Related to NZ_FNXF01000018.1; note = Rheinheimera pacifica
MKSGIYGILKAEFCDFDAFLSSKPPLHYKVYKIPKRTIGFRTIAQPTPTLKKIQKTLVGLIEPHVKIHPNAAAYRIGKGVKENALSHVNSSYLLKVDLENFFNSITPHMLFKTLKQQHIEINDVDKYVLEQIFFWNRSRRKNGRLILSIGAPSSPFISNVIMSKFDNDISIICDKKGVSYTRYADDMTFSTKEKDVIFSVMADVRRLLRNNFSNKMNVNELKTIFSSKAHNRRVTGVTLTNDNKISIGRDKKRYISALTHKFKFGKLDISDIYHLKGLISYARHVDVGFIRKLQKKYGVTTLELINKYSSEG

SEQ ID NO: 4082 - protein, 315 aa, unidentified
  source 1..315: note = Related to NZ_AXWP01000001.1; note = Psychromonas arctica
MDLNLYQRLETDNCNLNKLLSSLPSTHYKVYKIPKRTIGFRTIAQPTSEIKDIQRKIIEILSPKVQLHPIATAYIKGQSIKSNALKHVNSEFLMKIDLENFFNSINPEMLMKALSKQKVEISSEDEKILRELLFWNRSKRINGKVVLSVGAPSSPFISNLIMYEFDSKLESMCTKRKVICTRYADDLTFSTCDKGELFSLLPEIRKLLYRTFGNRLVVNDSKTVFSSKKHNRHVTGITLTNSNRLSIGREKKRYISALIHKFKNKKLDEQDIMHLKGLLSYAVHIEDIFVHRMGKKYGYETLEAIKKFSLGECNE

SEQ ID NO: 4083 - protein, 313 aa, unidentified
  source 1..313: note = Related to JADYXL010000005.1; note = Pseudoalteromonas sp.
MHLELSDFLHKKIPEFDAFLQSRPSTHYKVFKIPKRKIGFRVIAQPTPQVKAVQSQIVSFLEKKSKIHPCSMAYQKGCSIKKNALAHSDSEFILKVDLENFFNSINPEMLFNALESQSIVISDDDKFILEECLFWNRSKKRTSKLILSVGAPSSPYLSNIVMYDFDRVIHKICINLNVNYTRYADDLTFSTKEKNVLSEMISKIREALKTFFTSKIIINESKTIFSSKAHNRHVTGITLTNNNKISVGREKRRYISALIHKFKNSLLDESDIYHLQGLFSFACHIEVDFKKRMKKKYGDDVVHNLIKYSSREN

SEQ ID NO: 4084 - protein, 320 aa, unidentified
  source 1..320: note = Related to CP015750.1; note = Pectobacterium wasabiae
MSIDIETTLKKAYPDFEILLKSRPATHYKVYKIPKRTIGYRIIAQPTPRVKAIQSDIIKILKEYVYIHDAATAYVDGRNILDNAKIHQNSVFLLKLDLVNFFNRITPEILFKALSRQGLHISDDNKNILRQFCFWNRSKRKNGALVLSVGAPSSPFISNVVMKSFDEELTSFCESNKINYSRYADDLTFSTNERDVLGLAHQKVKTTLSHFFGTRIIINNNKIVYSSKAHNRHVTGVTLTNDNKLSIGRERKRYISSLVFKFKEGKLSGDDINHLKGLIGFSFNIEPLFIGRLEKKYGKSTIKSIKKYSEGGVNGTDLTE

SEQ ID NO: 4085 - protein, 312 aa, unidentified
  source 1..312: note = Related to DAFWTN010000002.1; note = Klebsiella quasipneumoniae
MSIDIETTLQKAYPDFDELLKSRPATHYKVYKIPKRTIGYRIIAQPTSRVKAIQRNIIEILRQHAHIHDAATAYVDGKNILHNAKIHQNSVYLLKLDLVNFFNKITPEILFKALARQHLDISDEDKNILKQFCFWNRSKRKNGALVLSVGAPSSPFISNLVMNSFDEEISSFCKKNKISYTRYADDLTFSTNERDILGLAHQKVKTTLIRFFGTRLIINNNKVVYSSKAHNRHVTGVTLTNNNKLSIGRDRKRYITSLVFKFKEGKLSNVDINHLRGLISFAYNIEPTFIERLEKKYGDSTIKSIKKYSEGG

SEQ ID NO: 4086 - protein, 312 aa, unidentified
  source 1..312: note = Related to UGYN01000002.1; note = Serratia quinivorans
MSIDLESELTEKFADLQQLLKSRPSTHYKVYKIPKRTIGFRLIAQPTKKVKDVQRIIVENLSKIALVHDVATAYIKGRNILYNASLHQDSDYLLKLDLEDFFNSITPDFFFKELERQSISLSINDKFLIEQLCFWNRSKKRNGALVLSVGSPSSPFISNVVMYSFDKKLHGICLAEKINYSRYADDMTFSTKEKDSLKFIHNEVKGLLQEYFGNRILINQSKIVYSSKAHNRHITGITLTNNDKLSMGRDKKRYISSLVYKFKNGQLDFDDIQSLKGLIGYARSIEPVFLLRIQKKYGPSIIEEINKYSSEE

SEQ ID NO: 4087 - protein, 312 aa, unidentified
  source 1..312: note = Related to CP034474.1; note = Pantoea agglomerans
MIIDLKGELSEKVDDLQQLLKSRPSTHYKVYKIPKRSIGFRLIAQPTKKLKHIQKLIVDLLLNKVKVHKNATAYIKGKNISFNASIHKNSEYLLKLDLENFFNSIKPGMFFKELERQNIRLSNEDTAILEQFCFWNRSKRKNGALVLSVGAPSSPFISNVLMYTFDQELYEFCASKKIAYSRYADDMTFSTKEKNVLLSIHKHVDFLLIKYFSKNLRINDLKVVYSSKAHNRHVTGVTLTNDNEISIGRDKKRLISAMVYNFKNNSLGLDDTHTLQGLIGYAFSIEPDFIKRLQAKYGSTILEDINKNLLRT

SEQ ID NO: 4088 - protein, 314 aa, unidentified
  source 1..314: note = Related to JAGJEM010000002.1; note = Pseudoalteromonas luteoviolacea
MNYLLLKNVATDIKFFETLYSSPSNHYKVFKIPKRSIGFRIIAQPTKNVKDYQRKIVRVLEPLTAIHSAATAYKKNQGIKDNAFIHKNSEFLLKLDLVNFFNSITPEMFFNALNVQKIKYSENDRMAMSEYLFWNINERRADNKKLVLSVGAPSSPFISNFVMFAFDKKISQFCLANSINYSRYADDLTFSTKDKNVLFNVISEVQTTLKACFGHKLKINTSKTIFSSKAHNRHVTGITLTNNNQLSIGRERKRYISALVHKASLNMLPKEDIHHLQGLISFARHIEPTFIQRLERRYGKDIIHNIINTDLDKF

SEQ ID NO: 4089 - protein, 315 aa, unidentified
  source 1..315: note = Related to NZ_NBOE01000008.1; note = Colwellia polaris
MEFKIVQALIKEFPELKELVKKTPSTHYKVFKIPKRTIGFRTIAQPTSSLKDVQRKVVDLLLPHVKVHHAAKAYIKKCSIKDNAAVHLNSQYLLKLDFENFFNSITPIMLFKVLAEQGVSVSKSDSKILSEILFWNRSKKINAPLVLSIGAPSSPLISNIVMYSFDRKIEDICKALDINYSRYADDLTFSTNIKSVLFNLVDMVNEALQIEFEGEININSSKTVFSSKKHNRHVTGITLTNSNKLSIGRIRKRYISALVHKFKTNQLNDLTEINHLKGLLGFAYYIEPNFIVRLTKKYGSDIMIRIRKFNSEDLK

SEQ ID NO: 4090 - protein, 315 aa, Vibrio parahaemolyticus
  source 1..315: note = Related to NNIR01000014.1
MKLSVLSHISPEVFPVEFSHYLAKKPSGHYKVYKIPKRTFGFRVIAQPTPELKCIQRAIVEQMKPYVQIHSSAKAYINGINIKENASAHVESSYLLKLDLENFFNSLTPSMFLKALNYQEIELVNNDIEPLIELLFWNRTKKKSPNLVLSVGAPSSPFLSNFIMYEFDKIVTSYCTKSNINYSRYADDLTFSTSEKNLLFVIPKYIENTLRDLFDDRIKLNRSKTFFSSKAHNRHVTGITISNNNKLSLGRDRKRYIRALLHKFSIRSLDNEDDIEHLKGLIGFAKTVEPIFIDKMKNRYGEKVFIDLFRYSGGD

SEQ ID NO: 4091 - protein, 315 aa, unidentified
  source 1..315: note = Related to SEZJ01000011.1; note = Aliivibrio finisterrensis
MKLPILSRISSEVFPSEFSHYLAKLPSSHYKVYKIPKRTFGFRVIAQPTPELKCIQREIVKQIKPYVKIHNVAKAYVDGVNIKDNAYVHVKSNYLLKLDLENFFNSLTPSMFLSALNYQEIELVNKEVDPLIELLFWNRTKKKRPNLILSVGAPSSPFLSNFIMYEFDKIVMNHCMKLNINYSRYADDLTFSTSEKGVLCMIPKFIEKVLCDLHDGKIKLNYSKSVFSSKAHNRHVTGITLSNNNKLSLGRDRKRYIRALLHKFSTESLQYEDDINHLKGLIGFAKMVEPSFFEKMKTRYGSKVFVDLFRYGGEH

SEQ ID NO: 4092 - protein, 315 aa, Vibrio sp.
  source 1..315: note = Related to JAKEVQ010000003.1; note = Vibrio brasiliensis
MQVSILSRIPPEAFPNGLSQYLGEKPSSHYKVYKIPKRTFGFRVIAQPTPELKDIQRAITTQIKPFVQIHSSAKAYVEGVSIKDNAIVHVQSNYLLKLDLENFFNSLTPTMFLDALNYQNIRLVDGEVESLMELLFWNRTKKKTPNLILSVGAPSSPFLSNLIMYEFDTIVSSHSAKLNVNYSRYADDLTFSTSEKDVLFSFPQFIENVLNDLYDGRIKLNHSKSVFSSKAHNRHVTGITLSNNNKISLGRDKKRYIRSLLYKFSVQALQDEEDIKHLKGLIGFAKTVEPSFLERMKARYGISIFKDLFRYDGDD

SEQ ID NO: 4093 - protein, 315 aa, Vibrio sp.
  source 1..315: note = Related to PIZL01000016.1
MKLPILSRIPPDIFPKGFNDYLASNPSAHYKVYKIPKRTFGFRVIAQPTPELKNIQRSIINRIKPLVRIHNSAKAYVDNVGIKENASVHIKSNYLLKLDLENFFNSLTPPMLLNAIDYQNIELVDEEIYPLVELLFWNRTKKKTPNLVLSVGAPSSPFLSNLIMYEFDRIVTEYCGLNDVNYSRYADDLTFSTLNKGVLFNIPSFIEECLHELFKGKIKLNRSKTTFTSKAHNRHVTGITLANNNKISLGRERKRYIRALLHKFSTNSIKDKEDIEHLKGLIGFAKYIEPSFFDKMKVKYGEKLIFKLLKYDGIS

SEQ ID NO: 4094 - protein, 315 aa, unidentified
  source 1..315: note = Related to JAEFCD010000023.1; note = Alteromonas sp.
MQLSILSCFTPEDFETDLNQYLAEKPSHHYKVYKIPKRTIGFRVIAQPTPKLKSIQRKIVEKMMSYLVVHSAAKAYVKSCSIKDNALVHANSNFLLKLDLENFFNSLTPDMLKRAVQYQGFSIVEKEANALNELLFWNKSKKKKANLYLSVGAPSSPFLSNVIMFEFDEAVTKLCKQLGISYSRYADDLTFSTSVKNVLFEVPKIIEEILLQMFGGKLKLNYSKTRFSSKAHNRHVTGITLTNNNKLSLGRERKRYIRSLLHKFSNSLLSEDDINSLKGLISFAMNVEPAFIAKMKAHYGTALFDELNRYNCGNN

SEQ ID NO: 4095 - protein, 315 aa, Vibrio sp.
  source 1..315: note = Related to VTYC01000009.1
MQLSILSRISQEDFNSSLNQYLAESPSTHYKVYKIPKRSFGFRVIAQPTPQLKNIQRKIVGEIKGYMHVHSAAKAYVKDCSIKDNAIVHVNSNYLLKLDLENFFNSLTPAMLARALKYQGLSLLESEVAALNELLFWNRTKKKSPNLVLSVGAPSSPFLSNVIMYEFDEAVSKFCSESGLSYSRYADDLTFSTSIKDILFEVPKFIESILFQLFQGKLKLNYSKTTFSSKAHNRHVTGVTLTNNNKLSLGRERKRYIRAMLHKFSCEELCDYDVQALKGLISFALNIEPTFVDKMKGRYGAKLFDDLFKYNNGDN

SEQ ID NO: 4096 - protein, 317 aa, unidentified
  source 1..317: note = Related to WMDD01000002.1; note = Photobacterium carnosum
MKLSILSRISQEAFCSNLTQYLAKNPSKHYKTYKIPKRRFGFRIIAQPTPQLKLIQRKIVEMLKVHLKVHPAAKAYVKNCSIKDNAEVHVNSNYLLKLDLENFFNSLTPDMLAKSLFYQGVMFSENEVAGLNELLFWNRTKKKTPNLVLSVGAPSSPFLSNIIMYEFDDIVSARCSELQVSYSRYADDLTFSTLEKGILFDISELIESVLFELYQGRVKLNYSKTTFSSKAHNRHVTGITLTNNNKLSLGRERKRYIRALLHKFSNEALSDYDIQVLKGLIGFSRSIEPMFIEKMKIRYGIELFAKLYKQTNSNGDT

SEQ ID NO: 4097 - protein, 314 aa, unidentified
  source 1..314: note = Related to JADZHL010000041.1; note = Shewanella algae
MKLNIEKVLAEKNPNLNIGELLASIPSKHYKVYKIPKRTIGFRLIAQPTPKIKNIQRSIIAELAPLLKIHKSATAYIQGKSILDNARVHRASNYLLKLDLENFFNSITPDIFINSLKNQGIELSAKNSNLLIQLLFWNRSRKRNGNLVLSVGAPSSPFISNIIMYDFDKKLYQYCKSIGASYTRYADDLTFSAKEKSVLQRIPNEVKRLLFKEFSNEIRLNNSKTVFSSKAHNRHVTGITLSNNNKLSLGRDRKRYISALVHKFTLSLLDEDDILHLKGLIGLAKFIEPEFIERLESKYGNSFILNLNRYLIKD

SEQ ID NO: 4098 - protein, 318 aa, unidentified
  source 1..318: note = Related to PAZB01000040.1; note = Idiomarinaceae bacterium
MSLDLHSYLSQFDSDLDAFLLTRPSKHYKAYKIPKRKVGFRVIAQPTPKVKMLQRKLVKQLSTILDVHDAAYGYRVGRGIKQNAEKHVDSEYLLKMDISNFFNSLSPNVFFDAIHSQNIRLSKQDREILREICFWNRTKRSTGKLVLSVGAPSSPFITNVIMFSFDEKVSKYCEKIGVTYTRYADDLTFSSKEKNLLQKVREQIVRDLESLYSGVLVINEAKTIFSSKGNNRHVTGIVLTNNNRLSIGRRRKRYLSALVHKFKCNELDALDSRMLQGWLSQARHIEPSFYERLEVKYGKEILKQISSFNIEVEDEPGT

SEQ ID NO: 4099 - protein, 317 aa, unidentified
  source 1..317: note = Related to NZ_CP054160.2; note = Serratia fonticola
MKIEIPYQDIGISRIKLASTARRSPLKYKVYKIPKRRSGVRVIAQPTPEVKDLQRKLVDFLRTQLTVHSCATAYEPGKGIRENAQQHVNNPYLLKMDFSNFFNSITPEIFKNALLHDSVEIDDNTLMLLINIFFWCPGKKLSGKLVLSVGAPSSPFISNYVMKKFDQLLSVLCEQAGITYTRYADDMTFSTQRENVLFTLKEQIATLIVQSGYENITINESKTVFSSKAHNRHVTGVTLTNDNQLSVGRKNKRYASSLIFRFKLGELSTDETLMLKGLLAHYFHIEPEFKLSMQKKYGVEIISDIVNYQELINESDS

SEQ ID NO: 4100 - protein, 317 aa, unidentified
  source 1..317: note = Related to JADTXI010000006.1; note = Serratia ureilytica
MKIDIPYKDIGINEKKLFLTAHRIPLKYKVYKIPKRHSGVRIIAQPTPEVKEIQRKLVGFLRTRLRIHNCATAYEAGKGIKENALKHVKNQYLLKMDLANFFNSITPDIFQNALAHDSVELDETTWTTLVNVFFWAPGKKLTGKLVLSVGAPSSPFISNYIMKRFDEQVSDLCEKSGVTYTRYADDITFSTNQQNILFSLKENIGSLLQANGYKSININESKTVFSSKAHNRHVTGVTLTNDGKLSVGRDKKRYASSLIFRFRLAELCHDDILFLKGLLAHYFHIEPSFRFSMEKKYGKNIIHALMKYQGDVHEPDN

SEQ ID NO: 4101 - protein, 312 aa, unidentified
  source 1..312: note = Related to CP059036.1; note = Serratia marcescens
MQLERKLCESFNLTPLQLSVLSSKAPKKYRVYYIPKRTSGLRAIAQPTKELKNIQRFLASELDAYCPIHPAAMAYRNGKSIKDNAECHKNNPYLLKMDFQNFFNKIKPDIFFEKLNALDVKYDGKDKKHLRNFLFWKPGQKRSITHILSIGAPSSPFVSNFVMFDFDFEISKWCAEFDIVYTRYADDITFSTARKNILFSVPKIVKNILSKHASGITINEAKTIFTSKAHNRHVTGVTITNDGKLSIGRKKKKYLFSLVFKYSIGELTRDEIFYAKGLMSHCMHIEKNIISRMKNKYGADVINKFLKEGGDE

SEQ ID NO: 4102 - protein, 327 aa, unidentified
  source 1..327: note = Related to NZ_JACHAQ010000007.1; note = Pectobacterium brasiliense
MLAAISAASISEMNIMQLERKLCEKFELTPLRLSILSSKAPKKYRVYYIPKRNSGLRAIAQPTKELKDIQRFLISELEPYLPVHPSAMAYRKGVSIRDNAECHKNNPYLLKMDFQNFFNKIKPNVFFDKLNDFGFEYDYKDKIYLHNFLFWKPGQKRSITYVLSVGAPSSPFISNFVMFEFDMAVSKWCAEFNIIYTRYADDVTFSTSRRNILFSVPKMVKNMLAQYASGITINEAKTVFTSKAHNRHVTGVTITNDGKLSIGRKRKKHLFSLLFKYSMGELTKDEILYAKGLMSHCMHIEKNIIARLKMKYGSELINDFFKDGGDE

SEQ ID NO: 4103 - protein, 327 aa, unidentified
  source 1..327: note = Related to NZ_LR607333.1; note = Klebsiella aerogenes
MLAAIVAASIFEIDIMQLAKKLCEKFSLTPLKLSMLSTKAPKKYRVYYIPKRTSGFRAIAQPTKELKEIQRFLVSELEPILPIHSSAMAYRCGISIKNNAEKHKNNSFILKMDFQNFFNKIKPGIFFEKFNNLDIQCNSHDRYLLHNFLFWKPGQKRSVTHILSVGAPSSPFISNFVMFDFDSAISEWCAKFDIVYTRYADDITFSTSRKGILFSVPKIVKNMLAEYASGITLNEAKTIFTSKAHNRHVTGVTITTDGKLSIGRKKKKYLYSLVFKYTKGELTNEEILYAKGLMAYCIHIERNIITRLKKKYGSEVINQFLKETGDE

SEQ ID NO: 4104 - protein, 311 aa, unidentified
  source 1..311: note = Related to LGYX01000010.1; note = Pantoea sp.
MQIEKLLCEKHKVTTLQLSVIAAKAPKRYRVYYIPKRTTGFRVIAQPTKKIKEIQRTLVAYLKDFLPVHSSATAYQNNISIKDNANRHKRNDYLLKMDFQNFFNKVKPELFFAKLNKLDFNITRKDESLLRDFLFWKPGQKRSKTHILSVGAPSSPFISNFVMYEFDKAMHEFCVSMGVVYTRYADDITFSTSSKGMLFVIPRIVKALLAEHASGLTVNESKTVFSSKAHNRHITGVTITNEGKLSIGRKKKRHLSSLIFRYSLNELTEEEVLNAKGLLSYCIHIEPDFILRMKVKYGHDLINKFLAEGAR

SEQ ID NO: 4105 - protein, 314 aa, unidentified
  source 1..314: note = Related to JACHAS010000001.1; note = Pectobacterium polaris
MTVQIEKILCDHLDYPTYELTSIAIRAPKKYRVYYIPKRNGGLRVISQPTKQLKKIQRVLVAHLTNLLPVHSSAMAYRRGISIKHNAILHKENTFLLKMDFQNFFNKIKPDFFFSRLNSIDINLVANDAFLLKNFLFWKPGQKRSVTYILSVGAPSSPFISNFVMYEFDEAINEWCKNHGITYSRYADDITFSTNKKDLLFSVPKIVKSFLAKHTQGMTINEAKTVYSSKAHNRHVTGVTITSEGKLSVGRKRKKHLSSLLHKYSLNLLNPEEILRAKGLMSHCINIEKDFLLRMKKKYGKDIVDNFMREGNYD

SEQ ID NO: 4106 - protein, 310 aa, unidentified
  source 1..310: note = Related to PQJY01000001.1; note = Leclercia sp.
MQLTSKIIKKFNYERLAFEQLLNEAPKKYKVYYIPKRGAGFRVIAQPTKELKNVQRFIVSLLEPILPVHHKAMAYQLNKSIKDNAYLHKDNSYVLKMDFQNFFNKIKPDLFLTKIEASNLELESLDKFVLRNLLFWRPGTKRSITLILSIGAPSSPFISNFIMYDFDRNVDDWCLNHGVVYSRYADDITFSTNTKDLLVSVPKMVKKMLSEYVPGLTVNESKTIFTSKAHNRHVTGVTLTPEGKLSVGRERKRMLYAKMHQYYLGMLSTEDINKVRGLVTFANYIEGDFIFRLKKKYGNELIDRFLKEGC

SEQ ID NO: 4107 - protein, 311 aa, Escherichia coli
  source 1..311: note = Related to CP026641.1
MQLTSKIISKFNYNRLAFQLLLNEAPKKYKVYYIPKRGAGFRVIAQPTKELKNVQRFIVSLLQPKLPVHHKAMAYEYKKSIKDNALLHKDNNYILKMDFQNFFNKIKPDIFFSKLENTGLKLDSFDENTLRNLLFWRPGKKRSTTLILSVGAPSSPFISNFVMYDFDKSLDDWCRNNGITYSRYADDITFSTNIKDILCRVPKVVKKMLSLHVPGLSINESKTIFTSMAHNRHVTGVTLTPQGNLSIGRDRKRMLFAKIHKYSLGLLSSEEINKTKGMIAFANYLEGDFLLRLQKKYGCELITKFLMEGNK

SEQ ID NO: 4108 - protein, 311 aa, Enterobacter sp.
  source 1..311: note = Related to JAHEUL010000001.1; note = Enterobacter mori
MQLTSKIISKFNYSNLAFHLLLADAPKKYKVYYIPKRGSGFRMIAQPTKELKHVQRFLVSLLEPNLPVHYKAMAYQKNKSIKDNALLHKGNNYILKMDFQNFFNKIKPELFFSKLQNANITLESGDRAVLRNLLFWRPGTKRSMTLILSIGAPSSPFISNFVMYDFDRKIDDWCESNNIVYSRYADDITFSTNSKDLLSSVPKVVKKMLATNVPGLSINESKTIFTSMAHNRHVTGVTLTSDGKLSIGRDRKRMLYAKIHKYSLGLLSSEEINKVRGLISFADYLEEDFLLRLRKKYGHDLIDKFMKEGGL

SEQ ID NO: 4109 - protein, 309 aa, unidentified
  source 1..309: note = Related to LFJS01000012.1; note = Serratia marcescens
MTIRKELSKKLELPELQIVLFCINASKKYRVYSIPKRKVGRRIIAQPTKELKKYQRVLVEILQPYLKVHECAYAYKTDISIKDNAEQHRRNTYILKMDFQNFFNKIKPELFFSKVDSVSIKLSREDRSLLMDILFWKPGSKRSTALVLSVGAPSSPFISNFIMFDFDKAIFEYCKNIGVTYTRYADDLTFSTNKKDVLFGVPVVVKAALSALAPGMIINDSKTVFSSKAHNRHVTGVTISNEGELSLGRSKKRYISSLIHKYSLGTLPDSEIDYLRGLLSYAQHIEPMFLTRLKNKYGEKLINHIRSGA

SEQ ID NO: 4110 - protein, 312 aa, unidentified
  source 1..312: note = Related to JACYNT010000005.1; note = Pantoea agglomerans
MSISILLAKKLNITEHQLHSFCLNAPKKYKVYTIPKRSMGKRIIAQPTKTLKRVQREALGILLPFLEVHFSSYAYKKGLGIKDNAMLHKDNSYLLKMDFQNFFNKIKPDVFMAKLRNKIPDISYSDEELLKNVFFWKPGLKKSKTLILSIGAPSSPHISNFVMFEFDSEIESLCRGLGVVYTRYADDLTFSTNKKDVLFQLPKIIRGLLSTCMPSLTINDSKTVFSSKAHNRHVTGVTITNDGMLSLGRKKKRYLSSLIFKYSLNQINYEDFSHLRGMLGHAKYIEPAFVFRMKAKYGAELVDKIILGESYE

SEQ ID NO: 4111 - protein, 311 aa, unidentified
  source 1..311: note = Related to UHIX01000001.1; note = Yersinia enterocolitica
MSIYNQLCEKMKVDPADLDFFSHNAPKKYKVYSIPKRTVGHRLIAQPTSELKEYQRALVSILEKSLPIHESAYAYRKNIGIKQNALKHVANSYLLKMDFQNFFNKIKPEIFFSKLLKANIEISDDDRKILKNLLFWKPGLRRSVTLVLSVGAPSSPLITNFVMYYFDEHMTNWCKKNKISYTRYADDITFSTNTKSILFSVPSIVRTILKQEIPGMSINESKTIFSSKAHNRHVTGVTLTTDNKISLGRKKKKEISALLHRFTLKILPPEDISFLIGLLSHAKNIEPIFLSRMKSKYGEDTFYNLRGDYHV

SEQ ID NO: 4112 - protein, 311 aa, Escherichia coli
  source 1..311: note = Related to CP057778.1
MEILSAVSKELGVNVNELRRLSSVAPKKYKVYTIPKRQSGFRLIAQPTSEIKRIQREVVKILASKLIVHDAAKAYKVSIGIKDNAKIHMANSYLLKMDFQNFFNKIKPALLFDKLRSQGVVLSGEDKEFLEGILFWKPGKKRSITLVLSVGAPSSPFVSNFVMYDFDNYINNWCSVRNISYSRYADDITFSTDEKNILFEVPKVVRFALSLCAKGISLNESKTVFTSKAHNRHVTGVTLTVDGELSLGRQKKRMISSLLHKYTLGLLAKEDVISLKGFVGHALYIEPKFIARMKIKYGKEVIHALFSEEGM

SEQ ID NO: 4113 - protein, 315 aa, Vibrio sp.
  source 1..315: note = Related to CP003330.1; note = Vibrio cholerae
MNILTTLREQLLTNNVIMPQEFERLEVRGSHAYKVYSIPKRKAGRRTIAHPSSKLKICQRHLNAILNPLLKVHDSSYAYVKGRSIKDNALVHSHSAYVLKMDFQNFFNSITPTILRQCLIQNDILLSVNELEKLEQLIFWNPSKKRNGKLILSVGSPISPLISNAIMYPFDKIINDICTKHGINYTRYADDITFSTNIKNTLNKLPEIVEQLIIQTYAGRIIINKRKTVFSSKKHNRHVTGITLTNDSKISIGRSRKRYISSLVFKYINKNLDIDEINHMKGMLAFAYNIEPIYIHRLSHKYKVNIVEKILRGSN

SEQ ID NO: 4114 - protein, 315 aa, Vibrio sp.
  source 1..315: note = Related to JAHUGH010000003.1; note = Vibrio fluvialis
MNILTTLREQLLANNLLMPQEFEKLEAKGSHAYKVYSIPKRKAGRRTIAHPSKKLKICQRQLSHILSPLLNIHDSSYAYIKGRSIKDNALVHSHCDYLLKMDFHNFFNSITPSILRKCLVQNEILITEYDINKIEQLIFWNPSKKRYGKLILSVGSPISPLISNAIMYPFDKVISETCTKNGIRYTRYADDITFSTNRDNVLHNIPELVEHVLNKIYFGQIIINKRKTFFSSKKHNRHVTGITLTNDNKVSIGRSRKRYISSLVFRYINKNLDIDDINHMKGMLAFAYNIEPMFIHRLSHKYKVNIVEKILRGHD

SEQ ID NO: 4115 - protein, 315 aa, Vibrio parahaemolyticus
  source 1..315: note = Related to JACBSQ010000003.1
MKIVPILQQQLTKRKTVSDADFRKLLALGSHAYKVYTIPKRKAGHRLIAHPSKSLKECQRQLTSILELYLPVSDSSYAYMKGRSIKDNALVHVHSSYILKMDFQDFFNSITPEIFRQHLERNDIIISETEFKILEQLIFWNPSKRKYGKLILSVGSPISPFISNTIMYYFDEYINNLCSQLNINYSRYADDLTFSTNQKDILFSLPQFVSDILHKEFSGRIVINHRKTVFSSKGHNRHVTGVTITNQNKLSIGRKRKRYISSLVFNCINNNLSNEEIMHLKGLLAYCYNIEPMFIHRLSRKYKFNIIKNLVKKDD

SEQ ID NO: 4116 - protein, 329 aa, Vibrio sp.
  source 1..329: note = Related to AAXMKO010000002.1; note = Vibrio alginolyticus
MCLGCFYVGGKLKILPLLEQSLANNEVVSNSDFRKLQMLGSHAYKVYTIPKRKAGKRVIAHPSVKLKKCQSNLVSILELYLPVHDSSYAYVKGRSIKDNALVHAKSDYLLKMDFYDFFNSITPPLLSEHLDKVGLTVDLYELAKLNQLLFWNPSKKKHGKLILSVGAPSSPFISNTMMYFFDEKISKLCAKNNINYSRYADDLTFSSNKKGILFLLPDVVKKILKQEFKDKIVINDSKTIFSSKKHNRHVTGLTINNNGSISLGRKRKKYISSLVFEYLNNRLDEGEFYHLIGLLAFSYNVEPMFLHRLSRKYKVNVIDSILKKGRLNE

SEQ ID NO: 4117 - protein, 317 aa, Vibrio sp.
  source 1..317: note = Related to MCWW01000053.1; note = Vibrio cyclitrophicus
MKILSILELRLSEREKISYADFLKLQNLGSHAYRVYSIPKRKAGNRTIAHPSSKLKECQRQLVSILEMYLPVHESAYAYMKGRSIKDNALVHSKSAYLLKMDFQDFFNSITPETLERHMRKLGLTLPINEQKALEQLVFWNPSKRKYGKLILSVGSPISPFISNSVMFFFDQKMFDICTKHNINYSRYADDLTFSTNSKGLLFSIPELVKQAIKQEFNGELVINDSKTIFSSKAHNRHVTGITINNNGQISLGRQRKRYVSSLVYQYTKNELSEEEIDRLKGLLSFCHNVEPYFLSRLTRKYKLNIVDELLRKGTKK

SEQ ID NO: 4118 - protein, 314 aa, unidentified
  source 1..314: note = Related to JACAWH010000114.1; note = Aggregatibacter actinomycetemcomitans
MESKLFHTLCTNLNLSTSELMEFISNAPISYKVYSIPKKNGGRRTIAHPSKKLKKIQRELLVLLEKTLQIHQSAFAYIKGKNIINNAELHKNNKYLLKLDFYDFFNSISDVIFINYLDKIGLSLSELDSKLVSHIFFWNPNNKDKTHKKLILSVGSPSSPMISNAIMYFFDSEIKIHCDSMSIVYTRYADDLSISGNDKDKLKEITQFIRSRLYDLFNGKIILNDLKTILVSPGYNKFITGITLTPQGGLSIGRKRKKYIFGLIYKYIKNELKDDSISHIKGMLSFSYSIEPSFIRRLELKYGKDTIRRIINEK

SEQ ID NO: 4119 - protein, 314 aa, unidentified
  source 1..314: note = Related to NZ_QEPT01000001.1; note = Haemophilus parainfluenzae
MESKFFHTLCKKLNLSTSELMEFISNAPVSYKIYSIPKKNGGRRVIAHPAKKLKKIQRELLLLLEKDLKIHQSAFAYIKGKNIIQNAEPHKNNKYLLKLDFYDFFNSISDDIFINYLDKIGLVLNELDKELVKHIFFWNPNSKDKRHKKLILSVGSPSSPMISNAIMYFFDSEIKTYCDSISIVYTRYADDLSISGNDKDNLKDVIMFIRSKLYDLFNGRIILNDLKTTLISPGYNKFVTGITLTTQGGLSIGRKRKRYIFSLVYKYIKNELKEDAVLHMKGMISFSHLVEPSFIIRLESKYGKNIINRIINGK

SEQ ID NO: 4120 - protein, 318 aa, unidentified
  source 1..318: note = Related to CP069510.1; note = Haemophilus parahaemolyticus
MKSKRKFELFYKLHEGERFSSKLNELIALTPTAPISYKVYSIPKKKGGRRTIAHPTKKLKEIQKKLLELLQLQIHKSAYAYRKGRNIAQNAETHKENKFLLKLDFHDFFNSINNIIFTRHLDKIGIHYNEDDKWLINHIFFWNPNKKDNSHKKLILSVGAPSSPTISNAVMYFFDKEIEEYCESKSMKYSRYADDISISGNNKNELKTIIPVIREKLNELFNGRIILNELKTVIISPGYNKFITGITLTSQGSISIGRKRKRYIFSLVYKYKINELSKDLIPHLKGLLLFSKNIEPSFIVRLELKYGKEIIRRILDEK

SEQ ID NO: 4121 - protein, 345 aa, unidentified
  source 1..345: note = Related to NZ_CP060440.1; note = Serratia marcescens
MQSPAFVPCPGAAPFASFSKESYAQGLPWALQLEAMMLFSDRICDELGYSKRQLNSFLKNAPRKYRVYSIPKRTVGYRTIAHPSKKLKEIQRVCDALLQDILPVHHCAYAYKKGCSIKKNAMLHVSQSYLLKMDFSNFFNSITPDMFWSKVDGFKIGINKKERGKLTKAMFWQPNRHDSDKLKLSIGAPTSPLISNFVAYEFDCFLSEWCISQGIIYSRYADDLTFSTFNAGILFSVPRVVKAFLNKYFDGITINEAKTKFSSKKHNRHVTGITLTDDGRISLGRGEKRRIFHFVHVFSLGELDPDLLPKLRGKIVFYEHIQPGFIKRLSDKYTEELISSLLNGD

SEQ ID NO: 4122 - protein, 312 aa, Aeromonas sp.
  source 1..312: note = Related to JAEHHT010000028.1; note = Aeromonas veronii
MLLIEKIIKESKLSRPELTILSHKAPYMYKVYAIPKRRSGYRIIAHPAKPLKLIQRLILQLLEPSVKIHDNVHAYVKGRSIITNATVHKKNKYLLKMDINNFFNSIKPELFWSSLNKQDIMLPKIHQKTIERLIFWNPSKKKDGKLILSVGAPTSPFISNIVMFSFDSKLSSVCDKLGISYSRYADDLTFSTKKKNILFNLPHIVKILLQEEFSGAMTINEQKTVFSSKAHNRHVTGITITNDKQLSIGRARKKYIYHLIHQATLGNLDDERMNHLLGLISFCRSIDANFLDKIANKYGSSFVKDLIKRELK

SEQ ID NO: 4123 - protein, 316 aa, Vibrio parahaemolyticus
  source 1..316: note = Related to NNJO01000006.1
MLQRLYSKLQKKLEIPRYKIESFSSSAPNRYKVYTIPKRTSGRRVIAHPSRELKKYQRALVSILTPLLSVHKCSFAYKKGVSIKENALEHAKNSYLLKMDFNDFFNSIDPELFFLMNKSNGVEFSDSEKKLIQNLVFWNKTKSYEQKLVLSVGAPSSPFISNFVMFKFDELIEKFSKKNNITYTRYADDITFSTNKRNALFLIPEEVNNILREHYGYRITVNSTKTVFSSKAHNRHITGITINNEGQLSIGRDRKRMISSLIHKYSIKVLDISDFQYLQGLLSFASHVEPRFLDSMTRKYGHETITNIVKGDFYDS

SEQ ID NO: 4124 - protein, 314 aa, Vibrio sp.
  source 1..314: note = Related to PIFK01000090.1; note = Vibrio splendidus
MMFKLYFKLSKKLELSRSRIESFSKNAPNMYKVYTIPKRTSGRRVIAHPSRELKVYQRALVEILASSFEPHHCSFAYRKQLSIKENALVHSRNSYLLKMDFSEFFNSIEPDMLFSAAKVRNIGLSDAEKRLVENLVFWNKTKSHNTKLVLSVGAPSSPLISNFIMFEFDRLMYEFSKNNSIVYTRYADDITFSTNRKNTLFDVPNEVNRVLSKFYDYRISINSTKTVFSSKAHNRHITGVTITNDGKLSIGRSRKRMISSLIHQFTLKKIDSCDFSYLQGLLSFASHIEPSFIFSMKSKYGDEIITQIIKGDFS

SEQ ID NO: 4125 - protein, 328 aa, unidentified
  source 1..328: note = Related to NZ_LT897828.1; note = Salinivibrio costicola
MLQLSAAPFSLSRAMFKLYFKLAQKLDVSRRRIDTLASGAPNKYKVYTIPKRTSGLRVIAHPSREVKVYQRALIKILQDVLRVHHCSYAYKKKLSIKDNALRHASNRYLLKMDFNDFFNSITPEVFEDALNHVEVDFSEAETKLIKHLVFWNKNKSFPPHLVLSVGAPTSPLISNFIMYEFDKAMYDFCEENLITYTRYADDITFSTNVKDILFKVPNKVNKILEEKFNGAISINQSKTIFSSKAHNRHITGITITNQGSLSIGRSRKRMISSLIHKFMIGEIDYSDFKYLQGLLSFSSHIEPSFISSMRKKYGEGIIGQVIKGDFNE

SEQ ID NO: 4126 - protein, 320 aa, Proteus sp.
  source 1..320: note = Related to NZ_NBUT01000010.1; note = Proteus vulgaris
MLKIFLKLQNELASSKNDGVLPTRARIESFARRATNCYKVYSIPKRTSGVRVIAHPSKELKNYQRALISILEQQLEPHSASYAYQKGKSIKLNAQKHTKKKFLLKMDFNDFFNSITPQIFLTELRYRRIFLSKAEEKLLINLFFWNKTKSEDKKLVLSVGAPSSPMLSNFIMYRFDELVSKYAKENSIVYTRYADDLTFSTNIKNVLFSVPEYIKGILRDLYQHYITINDSKTIFTSMAHNRHVTGITITNNFELSIGRERKRLISAMIHKFKIGVLNEDDLCYLQGLLSFAINIEPNFINRLSRKYGKEIVHVIRKGGL

SEQ ID NO: 4127 - protein, 318 aa, unidentified
  source 1..318: note = Related to NZ_CP011025.1; note = Pseudoalteromonas arctica
MAQKLFSKLIDILPLVSASRSKIERFSLTAPNRYKVYSIPKRTSGRRIIAHPSKELKIYQRALLSSLEYLLDSHDSAYAYKKDRNIKANAKRHVRKKYLLKMDFNDFFNSITPDMLFTQFVKEEVIFSEAEKRLLKNLLFWNKTKSFDGKMVLSVGAPSSPSVSNFIMKEFDEFVYRYSKEKSIIYTRYADDLTFSTNKKDTLFDMPNFIKKVLGEVFEHKLTINESKTIYTSMAHNRHVTGVTLTNKSTLSIGREKKRLISLLVHKYKINEIDESDFNYLHGLLSFSHHIEPSFTKRLSKKYGSDILKNIIKGIYCE

SEQ ID NO: 4128 - protein, 310 aa, unidentified
  source 1..310: note = Related to NZ_CP080635.1; note = Shewanella putrefaciens
MRIKLFSNLQTKLNCSRKKIETFSEKAPYKYKVYTIPKRSSGLRVIAHPSKELKVYQRALLSVLGDHLISHKSSFAYKLNTGIKDNAYQHMHNSYLLKLDFSNFFNSIVPDMLLAALNFRGIEVSDAELRLLSNLLFWNKTKTSDNKLVLSVGAPSSPAISNFIMFRFDKVVFKYCKEKSIIYTRYADDLTFSTNIKDALFELPRYINGLLGSMFDHRIMLNERKTVFSSKAHNRHVTGITITNENNLSVGRARKRTVSSLVHKYSLNKLDQFEFEQLRGMLSFILHIEPHFLHRLEKKYGRSLLIKIRS

SEQ ID NO: 4129 - protein, 327 aa, unidentified
  source 1..327: note = Related to NZ_PYMJ01000011.1; note = Photobacterium frigidiphilum
MLLISLQEFSLTIRLYKAFEDELGVTRSRLMNFAKTAPKRYKVYTIPKRTSGYRVIAHPSKSLKKIQKFLAGFLADIFITHPNSFAYKKGVSIKDNASVHLGTKYLLKMDFSNFFNSITFDLLVSSCKECEVKISLAELRLLEGLLFWNKTKTINGDLVLSVGAPTSPLVSNFVMYKFDIFISDYCKINNINYSRYADDITFSTNDKNKLFGVTRVVKDILSEHYSNKITVNNVKTTFSSKAHNRHITGVTLTNDNKLSVGRERKRLISTLIHKYVINDIEKQDVTYLQGMLSFAIHVEPDFRGKMSKKYGSNVVTEILKLRVENDE

SEQ ID NO: 4130 - protein, 319 aa, Vibrio sp.
  source 1..319: note = Related to MCYX01000113.1; note = Vibrio splendidus
MTIRLYRAFEEDFGITRARLTTFAKTAPKKYKVYTIPKRSSGYRVIAHPSKSLKEKQKFLVAFLSDFFVSHSNSFAYKKGVGIKDNARMHLGTKYLLKMDFSDFFNSITVDLLALACDENGIKVSSAELKLLESLLFWNKTKTIRGSQNLVLSVGAPTSPLVSNFVMYKFDTLMSDYCSQNEINYSRYADDITFSTNKKNHLFQVTRVVKDILSDHYSNKITVNNIKTVFSSKAHNRHVTGITITNNNKLSVGRERKRLISTLIHKYTIGSIDIDDTVYLQGLLSFAIHVEPDFRVKMSNKYGFEVINTILKLRVENDK

SEQ ID NO: 4131 - protein, 316 aa, unidentified
  source 1..316: note = Related to ABIC01000002.1; note = Shewanella benthica
MKLKLYRALYESLSITRSSLNRFAESAPKKYRVYTIPKRTSGQRVIAHPSKQLKAVQKELVKILVFPLKSHETAYAYKKGLSIKDNAEQHLNTAYLLKMDFSDFFNSITPAVLFLICENNNIKWSDAEKRLLKNLLFWNKTKSFNGKLVLSVGAPSSPLISNFVMYDFDVKISDFCKKNKINYTRYADDITFSTNVKEILFEVPKLVKTLLNEIYNNLITINDLKTIFSSKRHNRHVTGVTISSENKLSIGRSRKRMISSLIHKFKINVISQEDTCYLQGLLAFSISVEPIFIERMKNKYTESVIHNILKIRVENE

SEQ ID NO: 4132 - protein, 313 aa, unidentified
  source 1..313: note = Related to NZ_WHZZ01000005.1; note = Photorhabdus khanii
MQLHLYKNITEMLSWSRSQITSFARNAPNKYKVYTIPKRSSGQRLIAHPSRKLKLLQRALVEILSNNLIPHECAFAYRNSISIKENAQYHLDNQYLLKMDFSDFFNSITPDILFSVCEIKEITLSEAEKWLLQRAFFWNKTKSHDGKLVLSVGAPSSPLISNFIMYPFDEAINLYCTQHSIYYTRYADDLTFSTKIKNTLFNIPDIVKWALKKHYASQISINEFKTVFSSKAHNRHITGITITNDNKLSVGRERKRMISSLIHKYKIGIVNEEEKTYLQGLLSFSFHIEPMFKIRMSKKYSPEIINEILKFRK

SEQ ID NO: 4133 - protein, 313 aa, unidentified
  source 1..313: note = Related to NHOK01000005.1; note = Yersinia frederiksenii
MQLHLYRSIIDKLSWSRSRITSFARNAPNKYKVYTIPKRSSGQRLIAHPSKNLKLIQKKWIEILSDIFVSHQSAFAYKDNMGIRENAQHHMKNQYLLKMDFTDFFNSITPEIFFSICLKKEIIMSNAEKWLLQQTLFWNKTKSYDGKLVLSVGAPSSPLVSNFVMFPFDEIISEYCNSHHIKYSRYADDLTFSTDEKNCLFTIPNLVKSALQKIYAYQISINEFKTIFSSKAHNRHITGITITNDNDLSIGRGRKRMISSLIHRYRIGVMDDIEKAHLQGFLAFSFYIEPLFKTRMIKKYSSEVITDILKFRK

SEQ ID NO: 4134 - protein, 380 aa, unidentified
  source 1..380: note = Related to NZ_WMDE01000055.1; note = Photobacterium carnosum
MSSRALRQTQIYWGTIPVAVKNFPRAGVRTSHPDRGKFSTASFSKGESPVLSFQYRHFYLRICTDMHQKLYSKLVDKLDSTRSTINSFSKNAPNKYKVYTIPKRTSGHRVIAHPSKELKKYQRALVSILSDILNIHPTSYAYRTGFSIKDNAYKHRKNQYLLKMDFSDFFNSIEPKLLFFVFDECEIHFSSSELRLLEKLLFWNKNKSVDAKLALSVGAPSSPLISNFIMCIFDEKINYFCEKNGITYTRYADDLTFSSNKKNILFNVPNIVKNLLKEEYKNLILVNDLKTCFSSKAHNRHITGVTINNDAELSIGRDRKRLISAMINNYKKGILLSEDFDYLRGILSFANNIEPDFISRMKRKYGKCILLKIKKGLPNE

SEQ ID NO: 4135 - protein, 315 aa, Vibrio sp.
  source 1..315: note = Related to JAKEUP010000008.1
MRQQLYSKLQIKLGRSRSSIKSFANNAPNKYKVYTIPKRTSGRRVIAHPSKLLKDYQRALTDILKPALTVHPAAFAYRTGFSIKDNAQMHKNHQYLLKMDFNDFFNSIDPELFEDILIRRGIRFSNAEMSLLTRLLFWNKTKSHDEKLVLSVGAPSSPLISNFVMSIFDAKMKLHCLKRQITYTRYADDLTFSTNKKDVLFNIPQLVKDTLTKDYSHKILINELKTIFASKAHNRHITGVTINNASELSIGRERKRLISALVHKYTVKQLDTDDIHYVQGLLSFAQNIEPHFVDRLSKKYGFDVLSKLIRDKGDE

SEQ ID NO: 4136 - protein, 314 aa, Vibrio parahaemolyticus
  source 1..314: note = Related to AAZQRX010000007.1
MHNKIFSKLQASTSRARSTIESFSRNAPNKYKVYSIPKRTSGSRTIAHPSKELKYYQRALAIILRPILTVHIRAYAYRTGLSIKDNAAIHAKNKYLLKMDFNDFFNSITPVMFFKICDKRKIKFSASEQRLLTRMLFWNKSRSANEKLVLSVGAPTSPLVSNFTMSLFDFLLHDECLSRGITYSRYADDITFSTNHKGILFDIPLYVKAVLAERYDYGITINESKTVFSSKAHNRHITGITINNEGKLSLGRERKRVISSLVHQFKLNKLAIEDFAYLQGLLAFAQHIEPAFIIRLKNKYGESTVSNINKGLNI

SEQ ID NO: 4137 - protein, 317 aa, Vibrio parahaemolyticus
  source 1..317: note = Related to CP066247.1
MHHKIYSKLQLKLKTSRSSIDNFALNSPNKYKVYTIPKRTAGFRVIAHPSRELKCYQRHLVEILTPHLKNHSSSIAYTKEKSIRENALIHVRNDYLLKMDFNDFFNSITPELFFHICRVQEVFFSQAEERLLTKLLFWSKSKSKDEHLVLSVGAPSSPLISNFTMYTFDELITSICHENGISYTRYADDITFSTNRKNILFSIPSLVKSILLNKYEYKITINDSKTVFSSKAHNRHVTGITLNNEGQLSLGRNRKRMLSSMIHKEKIGSLSLDDFTYMRGLISFAKHIEPAFIFRMRVKYGNETVDNIIKGVRNVTN

SEQ ID NO: 4138 - protein, 315 aa, Vibrio sp.
  source 1..315: note = Related to NZ_JAFNJW010000049.1; note = Vibrio crassostreae
MYQKLYSKLQNELKRSRSSIESFSKTAPNRYKVYTIPKRTSGHRVIAHPSRELKLFQKALNTLLLDTLKTHFCSVAYAKGLSIKDNALRHAGNSYLLKLDFNDFFNSIEPDLFFVICDLQEINFSNAEKRLLTQLCFWNKTKSNNTKLVLSVGAPSSPMISNFVMTVFDELMYKHCRVQGITYTRYADDLTFSTNKKNILFDIPTFVEAVLVAYYASKISINPEKTCYSSKKHNRHVTGITISNTGELSLGRERKRMISAMLHNFKVGRLDSDDYAYLQGLLSFARHIEPKFVDKFRKKYGDGLIDTITKGNFNE

SEQ ID NO: 4139 - protein, 320 aa, unidentified
  source 1..320: note = Related to JABCPW010000001.1; note = Serratia marcescens
MRLHLYAKLTEIQSRNRRQIDNFLYNAPNRYKVYSIPKRNGGERVIAQPSGELKDFQHNLINILESNFLIHSSAVAYKKGFGIKHNAAMHSGNPYLLKLDFTDFFNSITPELFFMACVWNRYDLSTAEKRVFTKGLFWNKAKSQSGRLSLSVGAPSSPLVSNIIMYLFDEEFSRRCEKRGIVYTRYADDLTFSTHHKNSLFSLPDEVRVFLNKNYHNRITLNERKTIFTSRAHNRHVTGVTLTTQGGLSVGRERKRFISSLIHKYTLGILEPDMAYYLQGLLSFAIYIEPEFRTRLSKKYSQETILELLKLRKEDGTENE

SEQ ID NO: 4140 - protein, 328 aa, unidentified
  source 1..328: note = Related to PEHA01000001.1; note = Serratia marcescens
MRLNLYAKLTEIQSRNRRQIDSFLFNAPNRYKVYSIPKRNGGERIIAHPSSELKSFQHSLIDILESNFLIHKSAVAYKKGWGIKHNAALHSNNPYILKLDFTDFFNSITPDLLLMACAWNGYTLSIAEERVLTKSLFWNKAKSQSGRLSLSVGAPSSPLISNIVMYLFDETFSSLCEQREIIYSRYADDLTFSTQHKNILFSLPDEVRTFLNKNYHNRITLNERKTVFTSRAHNRHITGITLTTKGTLSVGRERKRFISSLIHKYKLGLLEPEMTYYLQGLLSFAIYIEPEFRTRMSKKYSQEIILEIIKLRKEDGTYKKLKIYQTHI

SEQ ID NO: 4141 - protein, 320 aa, unidentified
  source 1..320: note = Related to AP021969.1; note = Raoultella ornithinolytica
MRLNLYAKLIEIQSRSRRAIDSFLYNAPNRYKVYSIPKRNGGERIIAHPSRELKTFQYDLIRILEPHFRIHTSAVAYKKGSGIKQNAAMHSHNPYILKMDFTDFFNSITPDLLFMACAWNECNLSAAEQRVLTKGLFWNKAKSQSGRLSLSVGAPSSPFISNIIMFLFDETFSRLCEQRGIVYSRYADDLTFSTHHKNILFTLPDEVRIFLNKNYHNRITLNERKTVFTSRAHNRHITGITLTTQGSLSVGRERKRFISSLIHKYTLGILEPEMTYYLQGLLSFAIHIEPEFKTRMINKYSTDAVMEIITLRKKDETYRT

SEQ ID NO: 4142 - protein, 321 aa, unidentified
  source 1..321: note = Related to CP019077.1; note = Klebsiella pneumoniae
MRLNLYAKLVKIQPRNRRQIDSFLFNAPNRYKVYTIPKRNGGERIIAHPSRELKTFQYGLITILETHFRIHESAVAYKKGLGIKQNATLHSNNPYILKMDFSDFFNSITPDLLFMACEWNDYELSSAEKRVLTKGLFWNKAKNQSGRLSLSVGAPSSPLISNVIMYLFDDSFTNFCQQREITYSRYADDLTFSTHHKNALFDLPNEVRHFLNKEYQNRITLNERKTVFTSRAHNRHITGVTLTTQGSLSIGRERKRFISSLIHKYKLGLLDPDTSYYLQGLLSFAIYIEPDFRVRMSKKYSTNTVTEIIKLRKEDEAYRKQ

SEQ ID NO: 4143 - protein, 321 aa, unidentified
  source 1..321: note = Related to CP023009.1; note = Lonsdalea britannica
MRLNLYAKLIEIQPRSRRQIDRFLANAPNKYKVYTIPKRDIGERIIAQPSRELKKFQHYIISILESLFEIHTSAIAYRKGTGIKQNANMHSANPYILKMDFSNFFNSITPDLFFLACKWNNYSLSAAEERLLTKALFWNKSKTQDGRLALSIGAPSSPLVSNIIMYLFDEEFNTLCKDNGIVYSRYADDLTFSTSHKNLLFSLPDKVRAFLFKHYNNRITLNERKTVFTSKAHNRHITGVTLTNEGTLSVGRERKRLISSLVHKYKLGLLEPDMVYYLQGLLSFASYIEPNFRFRLARKYSAETITKLIKLRKADGKFKKQ

SEQ ID NO: 4144 - protein, 320 aa, Proteus sp.
  source 1..320: note = Related to NZ_CP029133.1; note = Proteus mirabilis
MRLNLYTKLVKIQPRNRRQIDSFLYNAPNRYKVYSIPKRNGGERIIAHPSRELKNFQYNLIDILEPLLKIHPNALAYRKGLGIKKNASLHAQNSYILKLDFSDFFNSITPDLLFTACTKNEYELSSAEKRVLTKGLFWNKAKSQSARLSLSVGAPSSPLISNIIMYYFDETFTDICNQREIVYTRYADDLTFSTNKKNILFNLPDEIRFFLNKEYKNLITLNERKTVFTSRAHNRHITGITITTEGSLSVGRERKRLISSLIHRYTLDSLSPDMTYYLQGLLSFAIYIEPDFRDRMSKKYSSHIITKLIKLRKEDGTYCE

SEQ ID NO: 4145 - protein, 320 aa, Enterobacter sp.
  source 1..320: note = Related to NZ_RXRP01000001.1; note = Enterobacter asburiae
MHLNLYAKLDGVQSLTRKQIDSFLANAPDRYKVYSIPKRNGGERIIAHPAKRLKQFQYHIVDIMEEVCEIHPCAMAYSKGKSIKENALSHADNQYILKLDFSDFFNSITPEMLFKALTDNNLNVTKAEERALSKSLFWNKSKTVNSRLALSVGAPSSPLISNIVMYSFDAFFANFCKQHGMHFTRYADDLTFSTNIKGVLFRIPDMVRKYLNEYYKNNITLNERKTVFTSKAHNRRVTGITITPQGTLSLGRERKRLISVLIHKYTLGILESDTLSYLQGMLAFAFHIEPVFYESMKRKYSSETIYNLMPIRKKNVESTS

SEQ ID NO: 4146 - protein, 316 aa, unidentified
  source 1..316: note = Related to NZ_CP051652.1; note = Pectobacterium carotovorum
MKLHLYAKLTKDLDKSRSAVERYIYNAPMKYKVYTIPKRTSGQRVIAHPARKLKVFQRALIKVIEPHFNLHIKAMAYRNGIGIKHNAAIHQNNNYLLKLDFNDFFNSITPDLLFTHFLKKEILLSDAEKKLLTNTFFWNKPKKKDGKLVLSVGAPSSPFISNLILFPFDELIDDYCSKKNISYSRYADDLTFSTSEKNILFQLPSLVKRHLSSIYKNKITINEFKTVFSSKAHNRHVTGVTITNTGELSIGRERKRLISSLIHKFKIGELNLDLTRYLQGLLSFASDIEPSFKSRMELKYSLSTIEKIIEFRGENE

SEQ ID NO: 4147 - protein, 320 aa, unidentified
  source 1..320: note = Related to NZ_LR134116.1; note = Yersinia intermedia
MKLHLYAELTKKLNRSRNSVERFISNAPMKYKVYTIPKRTSGQRVIAHPAKKLKVLQRALVAVLQPHFSIHDKAMAYRKGLGIKQNATLHQKNDYLLKLDFNDFFNSITPEIFIKYCTQKEIELSDAEKKLLIKTFFWNKTKKTDGKLVLSVGAPSSPFLSNVLMFGFDEFIENYCSQKNISYSRYADDLTFSTSDKNVLFHIPKLVKTQLGLMFFNQITINEFKTVFSSKAHNRHVTGVTLNNNGELSIGRGRKRLISSLIHKFMHGELDIELTRHLQGLLSFASDIEPIFKSRMEIKYSHKLIESIVKFRGEHEQENQ

SEQ ID NO: 4148 - protein, 319 aa, Salmonella sp.
  source 1..319: note = Related to AAXBOI010000003.1; note = Salmonella enterica
MKLNLYAKLTDKLGRSRNTVERYISNGPMKYKVYTIPKRTSGQRVIAHPAKKLKVIQRALVSVLEPHLKIHHKAMAYRKGLGIKDNAVLHKENEYLLKLDFSDFFNSITPELFINYCMQNDITLSTAEKNLLIKTFFWNKTKKNDGKLVLSVGAPSSPFISNTIMYFFDEAIDKYCITKNITYSRYADDLTFSTPDKNVLFHIPTLVKKQLGIIFSNQITINAFKTIFSSKAHNRHVTGVTINNDGEISIGRERKRLISSLIHKFILGQLDIEHIRYLQGLLSFATDIEPKFKSRMISKYSNQVIENLIKFRGSDEQTN

SEQ ID NO: 4149 - protein, 316 aa, Enterobacter sp.
  source 1..316: note = Related to NZ_LRCR01000003.1
MKLHLFSNLVKETKFSRNAIERYIYNAPMKYKVYTIPKRSSGQRVIAHPAKKLKILQRALVSILMPFLNIHDRAMAYRKGIGIKHNATMHKNNEYILKIDFNDFFNSITPDMILERFSKNNIELSSAEKKLIIKCFFWNKTKRIDGKLVLSVGAPSSPFLSNVLMFDFDEFFSNYCKENSIVYSRYADDITFSSSKKNVLFIIPDLVKKQLAILFKNKITINEFKTIFSSKAHNRHVTGVTINNNGELSLGRERKRFISALIHKFTLKTLSLDQAQQLQGMISFASDIEPSFRLRMEKKYSEGIICKIVKFRGSYE

SEQ ID NO: 4150 - protein, 315 aa, Proteus sp.
  source 1..315: note = Related to JADSTR010000010.1; note = Proteus mirabilis
MSVHLYKRLSEAMATPRNTIDSYIRNAPMKYKVYTIPKRTSGQRVIAHPAIRLKKIQRALVVLLQEYMFIHQKAMAYKTGSSIKKNAELHRTNDYILKIDFNDFFNSITPDLFVNYCNNLGLKLTSAEMNALIKILFWNKSKKNDGKLVLSVGAPSSPFISNVILYSFDEIVDNYCNERNIVYSRYADDLSFSTKEKNILFSVPEFIKKQLNKLFSNAITINELKTTFSSKAHNRHITGVTIDNDGRLSIGRERKRYISSLIHKFSLKKLEFNDAKHLQGLFAFACNIEPRFKARMEKKYSKLIIDDLIKLKELL

SEQ ID NO: 4151 - protein, 317 aa, unidentified
  source 1..317: note = Related to JAGVVN010000001.1; note = Methylovulum psychrotolerans
MQIYEFLCKELLVSKQEINEFVLSAPKKYKRYTIPKRTSGKRVIAQPAKRLKDYQRALIKLLEQILPVHDAAFAYKKNIGIKENARRHQKSSYLLKMDFRDFFYSITPDLFFAILKKLDIVFSPQDCYLLTQVLFFNPSKKTGGKLIMSIGAPSSPFISNSIMFFFDKAIYESCLKKGICYTRYADDLTFSSNKKNALFELPVLVKQLLVEHFCGCITINESKTVFSSKSHNRHVTGITITNDDRLSIGRQRKRYISSLIHKFSLNQLADEDINYLQGLLAFACHIEPNFKQRMIDKYSAETISQIVTCVRRGDEKA

SEQ ID NO: 4152 - protein, 313 aa, unidentified
  source 1..313: note = Related to JAATWI010000006.1; note = Methylococcaceae bacterium WWC4
MQIYDFLCKEISVSKQEIYDFVSSAPKMYKVYTIPKRTSGKRVIAQPAKRLKDYQRALVKLLEKVLPVHDAAFAYKKQVGIKENAMKHQKSSYLLKMDFQNFFYSITPTLFFSILYKLNIDLSSEDRYLLTQILFFNPSKKTGGKLVLSIGAPSSPFISNSIMYFFDMSIYEYCINNNINYTRYADDLTFSCQKKDILFAVPTHVKQLLVEYFDGRITINESKTVFSSKSHNRHVTGVTLTNDNRLSIGRQKKRYISSLIHQFSLNQLADEDISYLQGLLAFACHIEPNFKQRMIDKYSAEIIAKIITRKRTL

SEQ ID NO: 4153 - protein, 319 aa, unidentified
  source 1..319: note = Related to WTAZ01000264.1; note = Methylococcaceae bacterium
MQLYQFLSTELSTSKQEIDKFILSAPKMYKIYTIPKRTSGKRTIAHPAKKLKEYQRTLISLLEQSLPVHDVAFAYKKNTGIKQNAAQHQQSKYLLKMDFQDFFHSIKPKLFLSILEKLKVDLTQEDRYLLSQILFWNPSKRSGGKLILSIGAPSSPFISNVIMFFFDQALYTECHRQNITYTRYADDISFSTNTKNTLFEIPHLVKKLLVNHFNGAITVNESKTVFSSKAHNRHITGITLTNENKLSIGRQKKRYISSLIHQFSLGQLPTEDIQYLQGLLAFACHIEPEFKQKMIKKYSFETINQISTSVEGEDEPIRR

SEQ ID NO: 4154 - protein, 316 aa, unidentified
  source 1..316: note = Related to JACJDY010000010.1; note = Pseudoalteromonas sp.
MHICQALCAELKLDKTQVIDFALESPKMYKVYAIPKRTSGKRIIAHPAKRVKVAQHALLRQMKVIFPIHHCAFAYQEGLSIKLNAQEHCHNQYLLKMDFQNFFNSITAPLFVRMLDKLSIKISPQDTFLIEHLAFWCPSKETGGKRILSVGAPSSPFISNWIMYGFDKIVFELCRKENIVYTRYADDLTFSTNKKNVLYKIPKQIKSILREQLDGGIVINDVKTIFTSKKHNRHVTGITLTNQGLLSIGRKRKRHISLLLHKFSLGLLGTEDILSLRGLLTFANHIESDFKARMTKKYSSQVIQQLLAYDRVHNHE

SEQ ID NO: 4155 - protein, 316 aa, unidentified
  source 1..316: note = Related to JAHKQX010000026.1; note = Shewanella sp.
MLICQSLCTELNLNQTQLIDFAIEAPKMYKVYAIPKRTSGKRIIAHPAKRVKIAQRALLTQMETIFPIHRCAFAYQQGLSIKLNAQQHCDNQFLLKMDFQNFFNSITAPLFVSMLDKLSINISSQDLFLIEHLAFWCPSKETGGKRILSIGAPISPFISNWIMYGFDKTIFDLCRKENIVYTRYADDLTFSTNKKNILHRMPKKIKSILRDELGGNIVINDIKTILTSKKHNRHVTGITITNHGDLSVGRDRKRYISLLIHKFSLGLLSEEDIASLCGLFSFANHIEPDFKDRMVKKYTAQVIQKLFSYDRVYKHE

SEQ ID NO: 4156 - protein, 311 aa, unidentified
  source 1..311: note = Related to RCHN01000034.1; note = Ketobacter sp.
MHLAHFLSTSLSISNQEIITFSSSAPNRYKVYSIPKRTSGKRTIAHPAKKLKLVQRLLSNHLSTILPVHESAFAYRKGLGIKDNAQYHMNGRYLLKMDFQNFFLSIVPELLFITLKKNAIEFSEEDEFLMSRLLFWRPSKSSSGKLVLSIGAPSSPLISNFIMFQFDQEMAAKCKSKGVRYSRYADDLTFSTNVKGALFDLTSLVKELLEKHLLGYIAINETKTVFSSKAHNRHVTGVTLTNDGQLSIGRQRKRFISSLIHQYSLGKLPAEDLSYLQGLIAYANDIEPVFVKRMSKKYSPQTMDQLIKGVK

SEQ ID NO: 4157 - protein, 314 aa, unidentified
  source 1..314: note = Related to NZ_SLZR01000017.1; note = Reinekea marinisedimentorum
MDFFERLARDLDISEQDVRGFALTAPNRYKIYRIPKRTSGSRVIAHPSRMLKAYQRLIISYVTELLPVHSCAYAYRQGVGIKDNARVHAKSSYLLKMDLQNFFNSINPSLFFDVVEKVGLEVADRDKWLLTKLLFWSPNKSSSGRLILSVGAPSSPLVSNFIMYPFDIRMSEYCFANGLKYTRYADDITLSTNKRGCLFDLPDYIKGVLANEYQGKLSVNESKTVFSSKAHNRHVTGITITNKGSLSIGRQRKRYISSLIYQFSSDQLDPDDTLHLKGLLSFAFDVEPDLRRRFEKKYTSKVIHQILTCEKGND

SEQ ID NO: 4158 - protein, 314 aa, unidentified
  source 1..314: note = Related to NSDJ01000001.1; note = Rahnella variigena
MKIVEFLSNKTGKNIQALIRLIDQAPRMYKVYKIPKRSVGFRVIAQPSKEIKELQRFTVEMLEKILPVHEKAMAYQKGKDIRSNALLHVKNDYILKMDFEDFFNSINPEVFHKSLEIDEISINNTELYFLTRLLFWNPSKRKNGKLILSVGAPSSPIISNYIMHRFDCAIEEFCNSNAIMYSRYADDMTFSTSKKNHLFSIPEIVRKTLRNKYYKRISIKQSKTIFSSKAHNRHITGVTLNNEGKISIGRSRKRMLSSLIFKASKNAIDDESLSSLTGQLGQAFYIDNFFKESMIKKYGESLIKSILGKKNEKA

SEQ ID NO: 4159 - protein, 314 aa, unidentified
  source 1..314: note = Related to NZ_CAJCKX010000049.1; note = Serratia sp.
MYIVEYLSKKTGRGMQELSRLVDQAPRMYKVYKIPKRSAGFRVIAQPSKDIKELQRFAVEILKQILPVHDKAMAYQKGKDIKTNALLHARNDYILKMDFEDFFNSINPELFNISVEKDKINITKNELYWLTRLLFWNPSKRKNGKLILSVGAPSSPLVSNYIMYRFDCAIEEYCNSNSITYSRYADDMTFSTSKRNVLFMIPEIVRKILKNNSYKRISIKQSKTVFTSKAHNRHVTGVTINNEGKVSVGRSRKRMLSSLIFKASKNELDHEVLSSLTGQLGQAFYIDVCFKESMIKKYGASIIKSILSGNHEKT

SEQ ID NO: 4160 - protein, 314 aa, unidentified
  source 1..314: note = Related to AP022371.1; note = Providencia rettgeri
MTIVKYLSEKTGTEIQELNKLISQAPRMYKVYKIPKRSLGFRVIAQPAKSIKKLQRFAVEILETILPVHESAMAYQKDKDIKKNALLHVKNNYILKMDFEDFFNSINPELFIKSLKKDKILISKIDLNHLTKLLFWNPSKRKNGKLILSVGAPSSPLISNYIMYRFDCDIEEYCQLKNITYSRYADDMTFSTKEKDRLFEIPGFVKKTLKKQSYKKISIKQSKTIFSSKAHNRHVTGVTLNNQGNLSIGRARKRMLSSFIYKACKNELNQEELLSLVGQLGQAFYIDKIFKKSMERKYGLLTIKSILGGNNEKI

SEQ ID NO: 4161 - protein, 314 aa, Citrobacter sp.
  source 1..314: note = Related to CP058318.1; note = Citrobacter freundii
MQIAEYLSTKTGKSVHDIGSLISNAPRMYKVYRIPKRTGGYRVIAQPSKVIKSLQRHAVEMLRDYLPVHLHAMAYQKGKDIKLNAQVHCKNEYILKMDFEDFFNSINPELFKKCLKLDGLHFSESDINLLIKLLFWNPSKRKNGKLILSVGAPSSPLISNYIMYRFDCAIEKYCKQENITYSRYADDITFSTLKKDQLFIIPDIVNKTLKQNSYKRISIKLSKTVFSSKAHNRHVTGVTLNNDGDISIGRARKRMLSSLIFQAMHGKLDNDELSSLKGQLGQAFYIDSKFKASMHKKYGISIINKIIGGNSEKT

SEQ ID NO: 4162 - protein, 318 aa, unidentified
  source 1..318: note = Related to JABSOI010000029.1; note = Alteromonadaceae bacterium
MNLLDLLNRELNKTTFSISESDILIFSMNAPKKYRVYSIPKRSAGTRIIAHPSKELKVYQRHLVDLFKNILPTHHTAYAYRQGLSIKENAECHKKNKYLLKMDFENFFNSINPLILKNELVKNKIKFTKEDFKLLEQLCFWCPSKKIGGKLILSVGAPSSPSISNFIMYQFDEIVENWCKQRKITYTRYADDISFSTSLKDALFEVPKLVESTLTSNFGKRISVKASKTVFSSKAHNRHITGVTITNEGELSIGRDRKRYISSLIHKFKLNMLAQQDIEHLKGLLGFAFHVEPVFRERMINKYSKKTMDEINQFRSES

SEQ ID NO: 4163 - protein, 308 aa, unidentified
  source 1..308: note = Related to NZ_CP014322.1; note = Alteromonas stellipolaris
MSILTLLSNDLGISENELKALLVNAPRKYKVYSIPKRTGGRRTIAQPIPALKQAQRSFNKCINLNVHEAAMAYRTGLSIKENANIHRMNPYLLKMDLENFFNSITPSLLWLNLKKQNIEFNLYDNHYLENLLFWRPRKSSKIILSVGAPSSPYVSNSLMYNFDITVHELCSNMHIKYSRYADDLTFSTKEKNHLFEVPKAINNLLLKEFGNNLTINTSKTVFSSKAHNRHVTGVTINNQGNLSLGREKKRYIKHLVHKFSFDLLDDSEVPYLKGLLSHANHIEPDFIVRLQKKYSDEIIQCLVNGTNR

SEQ ID NO: 4164 - protein, 310 aa, Aeromonas sp.
  source 1..310: note = Related to NZ_CDBH01000035.1; note = Aeromonas dhakensis
MDLIDALSSSLKINKSTLQDFCTLAPNKYRIYSIPKRNSGYRIIAHPSKELKKYQRTLNDLIKNILPVHSSAFAYRNGLDIKKNALRHAKNPYLLKMDFHDFFNRITPDVFWKQVGNKFLSLTRKDADIFEKLIFWNRSKKNDGKLILSVGAPTSPLISNSVMYNFDCSISEWCVKNDITYTRYADDITFSTRKKNILFTVPEKIKNEIIMHFGNAMLINDGKTIFSSKAHNRHITGITITNEGIPSLGREKKRYIYHLLHQYSLNLLEHDDILHLKGQFSFSCYIDKSLMHRAEKKYSSELVQKLIHYV

SEQ ID NO: 4165 - protein, 315 aa, Aeromonas hydrophila
  source 1..315: note = Related to NZ_CP027804.1
MQLIDFLSSKLEKTPQEIEKFALTAPKMYKIYTIPKRKAGHRIIAHPSKNLKSYQHLVIDYIKIKLPIHGAAQAYKTGHSIKTNALAHINGEYLLKMDFNNFFNSITPELFSLECAKRNIDLTRSELSLIKKLIFWNPSKKKGGKLILSVGAPTSPLISNFVMYGFDYLLSEYCHKNYISYTRYADDLTFSTRKKNNLFQIPSIVKDFLSAELNKRISVNESKTIFSSKAHNRHITGVTLTTENKLSVGRERKRYIYSLLHSFSLGNMAKPDIEHLQGLFSFACHIDETFKSRAENKYSKLIISQLHEGRLNNEK

SEQ ID NO: 4166 - protein, 337 aa, unidentified
  source 1..337: note = Related to QEKR01000001.1; note = Pectobacterium versatile
MTTLRQHLLTSPLVAELAFSLLSSSSKKVTKPDVDKWLILSLAKVMLSGPKMYRVYTIPKKNGGKRTIAHPSKVLKVFQKGLVEFLINKLPVHDAAYAYRKNISIKDNAFQHVKNSYFLRMDLADFFNSIDTSLFEEQIEKHKVQLADSDKVLLRRSAFWSPKKINSGNLILSVGAPSSPMISNFIMFSFDETITSICEPLKIKYTRYADDLFFSTSHKDVLFKMPKLIQYVLYSEFGKKITINEVKTSFSSKAHNRHIAGITITNNDTLSLGRERKRTISSMIHKYSLGNCTDFELAKLQGLLSFSKHIEPLFIERMKKKYSVSLIDVIISGQWRK

SEQ ID NO: 4167 - protein, 338 aa, unidentified
  source 1..338: note = Related to JAENMV010000007.1; note = Lelliottia amnigena
MTTLRHHLLTSPLVAEHAFSLLSSSSSKKVTKSDVEKWLTISIATVMTSGPKMYKVYTIPKKNGGKRTIAHPSKVLKVFQKGLVEFLVNKLPVHDAAYAYRKNISIKDNALQHAKNAYFLRMDLADFFNSIDVNLFEKQIEKHKIELAAADKALLRRSAFWSPKKMSSGNLILSVGAPSSPMISNFIMFSFDETITSVCDPLRIKYTRYADDLFFSTEHKNILFKIPSLIQYVLTSEFGKKIAINEVKTSFSSKAHNRHIAGVTITNNDTLSLGRERKRLISSMIHKYSLGNSNDIELAKLQGLLSFSKHIEPLFIDRMKEKYSISLVENIITGRWRK

SEQ ID NO: 4168 - protein, 338 aa, unidentified
  source 1..338: note = Related to CP002824.1; note = Klebsiella aerogenes
MTTLKHHLLTSPLVAEQAFSLLSTSSSKKVTKLDVEKWLTVSLAKVMVSGPKMYRVYTIPKKNGGKRTIAHPSRALKVIQRGLVEFLNDKLPVHDAAYAYRKNISIKDNALQHVTNPYFLRMDLADFFNSIDVNLFEERIEKHKIQLSAADKALIRRSAFWSPKKTNTGTLILSIGAPSSPLISNFIMFSFDETISSICAPLKITYTRYADDLFFSTKNKNILFKIPSLIQYVLSTEFGKKLTINEVKTSFSSKAHNRHIAGVTITNNDTLSLGREKKRIISSMIHKYSLGKSDDIELAKLQGLLSFSKHIEPLFIERMMKKYSVNLVDKIISGQWRK

SEQ ID NO: 4169 - protein, 340 aa, unidentified
  source 1..340: note = Related to JAADJV010000002.1; note = Rahnella aceris
MKKLTIFFASSPFIEAWLHIVKPSDEENFTSEQKIAHIKQSIALIMRSGPKMYKVYSIPKRNGGKRVIAHPAAMLKAFQRDLCLHLANLLPVHSAATAYQPASSVKINALAHASNHYLVKMDLANFFNSIDVDIFAAELRRHKIALTLKELSFIRQCTFWSPSKTSTGRLILSVGAPTSPLISNFVMHAFDDIIQKICEPLAVTYTRYADDLFFSTNVRDISFKIPDLVAYVLAKTYENHFSINQAKTRFSSRAHNRHVTGVTITNEGALSVGRQRKRIISSLIHKYTLQKINLAETKILQGLLSWAFCIEPTFVISMRKKYSDNVIQSIISGNWNNDRA

SEQ ID NO: 4170 - protein, 337 aa, unidentified
  source 1..337: note = Related to NZ_CP050508.1; note = Raoultella terrigena
MKKITNFFVTSPFVDAWLQTTVPSVGELSTEQRVACIGHNLALITRSGPKMYKVYSIPKRNGGKRVIAHPAAMLKAFQRDLNLHLVSLLPVHNAATAYRVSSSVKTNAKAHASNPYLLKMDLYNFFNSIDVDIFVAELRRHRITLAVKELSFIRQCTFWSPSKTSTGRLILSVGAPTSPLISNFVMYEFDNIIHKICESLSVTYTRYADDLFFSTNVQDVLFKIPDLVTYVLTNTYNGKFSTNQTKTRFSSKAHNRHVTGVTITNEGRLSLGRQRKRMISALIHQHCLKKINLVETKKLQGLLSWASNIEPTFVISMRKKYSDKVIQSIISGNWNDD

SEQ ID NO: 4171 - protein, 338 aa, Vibrio sp.
  source 1..338: note = Related to MCYT01000164.1
MAKLIEQLIHSTPVTAYANSVLSEYTDKFTAKDIEIIATQTLNDVKARGPKMYKVYTIPKRNGGKRLIAHPSKPLKATQRALVELLQKQLPVHEAAFAYRDGVSIKDNAFAHSKNPYFLKMDLSDFFNSIDTELFEDQLKSHSIFIRNKKLLHNTIFWSPAKELNNKLKLSVGAPSSPLISNFIMYNFDEAISTICHSSNIKYTRYADDLFFSTNTKNLLFNIPSLVNYLLEKQYDNKLSVNESKTSFSSKAHNRHITGVTITNDNNLSIGRKKKRYISSLVHKYKLGSLDVENIETLQGLLGFAKHVEPSFMIRLCKKYSQNTIDSITRGAWKNNEK

SEQ ID NO: 4172 - protein, 337 aa, Vibrio sp.
  source 1..337: note = Related to CP030798.1; note = Vibrio owensii
MAKLIDQLINSSFVVSYAYSVLSACTGKFTQEDVKLLATQTINDVKARGPKMYKVYTIPKRNGGKRLIAHPSKPLKATQRALVEVLQKKLPVHEAAFAYRSGLSIRDNALVHSKNRYFLKLDLSDFFNSIDVDLFESQLASNRIFIRNKTLLNQIIFWSPTKDLQSKLKLSVGAPSSPLISNFIMYRFDKDMSKICDSLNVRYTRYADDLFFSTNIKDILFDIPELVNYILDKRYDNKLLVNKSKTSFSSKAHNRHITGVTITNEGKLSIGRGKKRYISSLVHKYNLGLLEYEDMEKLQGLLGFAKHIEPSFIIKLSKKYSHQSVEYIAKGGWKNNE

SEQ ID NO: 4173 - protein, 339 aa, unidentified
  source 1..339: note = Related to NZ_UGHC01000001.1; note = Grimontia hollisae
MTKLKNQLINSTSVRSYAYDVLSEQSTRISEDDIEALAQKTVHDVWDNGPKMYKVYTIPKRSGGRRTIAHPSKPLKAVQKALVELWEAELPIHSAALAYQKGKSIKENAECHRYNKFLLKVDLSEFFNSIDIEVFESQLLGNNIKFDKRDSRLIRNILFWSPQKSLSSKLVLSVGAPSSPFISNFVMYTFDSLISEVCESLNIIYTRYADDMFFSTQVKNTLFKVPEIISFLLKNKYNNKLLINESKTIFSSKAHNRHVTGITITNDNKLSLGRSRKRYISSMVHKYKLGMLDFEDIEQLQGLLGFAKNIEPEFLVRLKKKYSSETVNIILNGKWKNEK

SEQ ID NO: 4174 - protein, 342 aa, Vibrio sp.
  source 1..342: note = Related to NZ_AP014635.1; note = Vibrio tritonius
MTKIAKQLLSSPFIHSYAYKELDELMDNVTQKDIDSFVELTVDDAIINGPKMYKVYAIPKRNGGRRIIAHPSQPLKAVQRDLIEILKSQLPIHDAAFAYQQGKSIKGNAEVHRFNKFFLKMDLSNFFNSIDVDLFYNHLDLNSVNIDIEDKSTIKNIIFWRPQKNETGELRLSVGAPSSPLISNFIMYKFDSIISEVCASFKIKYTRYADDLFFSTTVKGVLFKIPDIVEFILKSKYDDVLTINKSKTSFSSKAHNRNITGITITNSNELSLGRNRKRYISALVHKYRIGLLDDNATESLQGLLAFAKNIEPKFLMRLKNKYSNDVIESIISGRWKNHESEE

SEQ ID NO: 4175 - protein, 327 aa, Vibrio sp.
  source 1..327: note = Related to CP036500.1; note = Vibrio cholerae
MENIFNYLLSSPNVVDFSNESKKTKQPKLPQDILHDVLLYGPKMYKVYTIPKKNGGKRVIAHPSRGLKVVQRDLVVFLEKILPVHNSAYAYIKNRSIKDNAHYHSKNRYHLKMDLSNFFNSIDTELFFTQLDTNGVTFNSDEMYLLQRSLFWSPTKSEIGKLITSVGAPSSPLISNFIMNTYDFMISDICKSLEVKYSRYADDMFFSTNIKDILFTLPNIVDYILDTIYSGKLRVNSAKTKFSSKAHNRYITGLVITNDAKVSIGRSRKRLISSLVHKHQLGLLEPDSVSSLQGLLGFVRSVEPEFLDRLVKKYGDYEIQRIIKGLV

SEQ ID NO: 4176 - protein, 336 aa, Vibrio sp.
  source 1..336: note = Related to NZ_SLWI01000001.1; note = Vibrio crassostreae
MKKLLNYLASPETADNLKKYFELAYPQIKYDEDVFNLMAKHHIETLLKSAPKMYKIYTIPKRNGGNRTIAHPAKGLKATQRDLSKYLVDILPVHSCAFAYTKNKSIKDNALVHSKNKFLLKMDLVNFFNNINDTLLNNELVENDIPLTTLEITQVNKLSFWCPTKDDDGKMILSVGAPISPLISNFIMYRFDSKLSELAVNNKVKYSRYADDIFLSTNAPNVLGLFVNVVELLLLELYGGKLVINKTKTVFSSKANNRHVTGLTINNSGEVSLGRKRKRVISSLVHKFSIGILDSSEIESLRGLLSFSSSVEPEFITRLEKKYTFKLIDKIVRGLS

SEQ ID NO: 4177 - protein, 333 aa, unidentified
  source 1..333: note = Related to JAJVEH010000001.1; note = Aliivibrio fischeri
MKKLLDYLTSSDNLKNYLKLTYPQISYDDDVFLIMGKYHLSSLYKSAPKMYKFYTIPKRNGGRRAIAHPSKKLKVTQRDLSTYLEKILPVHDCAFAYRKNKSIKDNALIHVGNKFLLKMDLVNFFNSITPKMLINEIKESDLSFEESELDYIKKLAFWCPSKEDNGKLILSVGAPSSPLLSNFIMYRFDSVLSEVAKSNKVKYSRYADDIFLSTNVPNVLKLFVNIVKIILKEMYHDELIINEMKTVFSSKAHNRHVTGITITNDNKISLGRQNKRMISSLVHKYSLGVLDTSKIIRLRGLISFASSIEPDFIIRLENKYTFNLINKLIKGLD

SEQ ID NO: 4178 - protein, 339 aa, unidentified
  source 1..339: note = Related to NZ_JWGX01000025.1; note = Shewanella sp.
MEELQKSLLASNPVKEFFSQKASHIFGESGQKLPMAAESLALAALQNVKVQGFKMYKVYTIPKRSGGNRVIAHPSKELKAFQRGLVDILESELPIHSCAHAYVKRKSIKSNAMAHAKNQYLLKMDFLNFFNSVDIELLAKACSGNKKIEEVGLMQFANLVFWSPTKQRDGKLVLSVGAPTSPLLSNFVLYEFDNLISLVCNSMHVTYTRYADDLFFSTNEADILKSVPNIVKYFLDYIYGDKLRVNDAKTAFSSKAHNRHVTGLVIANSGRISLGRERKRFIKSLVYKSTKNELDVEELNSLMGLLSFSQHVEPDFIMRLVCKFGQDAVDYIVNAQWRG

SEQ ID NO: 4179 - protein, 308 aa, Enterobacter sp.
  source 1..308: note = Related to NZ_CP041062.1; note = Enterobacter ludwigii
MNIIEIISKKTMLASSNVITFIHTAPYRYKKYYLPKNNGGSREIAQPSRELKIMQRLILQLLLPYLPVHENAFAYVEGKSIKRNALMHRNNEYFLKMDFSDFFNSIKPIDLRNVLLKNGYETIPLNLNLIDNLFFYKKTKKSGLSLSVGAPSSPLISNAVLYDFDVRVSELCKQEDITYTRYADDLTFSCNEKGKLLVFQKEIAKILRKIQSPKLKLNDKKTIYASRSVSRRVTGIVINNNGELSLGRHKKRMISSLVHRYTLGKLIPDDIHKLKGYLAYAKHIESGFIVSMRNKYGADVIDSILKYN

SEQ ID NO: 4180 - protein, 308 aa, unidentified
  source 1..308: note = Related to NZ_CP031104.1; note = Leclercia sp.
MNIIEIISKKTMLSSSNVITFIHTAPYRYKKYYLKKNSGGVREIAQPSRELKIMQKLILELLVPYLPVHENAFAYVEGKSIKRNALMHHKNEYFLKMDFSDFFNSIKPLDLRNTLTDNGFETIPVNLNLIDKLFFYKKTKKSGLSLSVGAPSSPLISNAVLYDFDIKVTELCERQDIIYTRYADDLTFSCNEKGKLIGFQKEIVRILRKMKSPKLKINDKKTIYASRAVSRRVTGIIINNNGDLSLGRHKKRMISSLIHRYTLNQLNNDDILKLKGYISYAKHIDINFVSSMNKKYGAETLNSITKHN

SEQ ID NO: 4181 - protein, 308 aa, unidentified
  source 1..308: note = Related to NZ_JAIVKM010000013.1; note = Mangrovibacter yixingensis
MNIIDIISKKTLLPSPNVMVFINTAPYRYKKYYLPKNSGGVREIAQPSRELKVMQRIIIEKIADFLPIHESAFAYVKGKSIKENAQKHKRNEYFLKLDFSNFFNSIKPSDLRRVLIKNGFENNTFNLLLIDKIFFYKKTKKSGLTLSVGAPSSPLISNAVLYEFDVKVTELCNKEGITYTRYADDLTFSCNEKGKLIGFQKSIIKILRKIPSPHLRLNDKKTIYTSKSVSRRVTGIVINNDGQLSLGRKNKRMISSLIHHYTLNKLNAEDVYKLKGYLSYAKHIETTFINSMTIKYGVDTINAILKSN

SEQ ID NO: 4182 - protein, 308 aa, unidentified
  source 1..308: note = Related to NZ_JAAQVP010000001.1; note = Providencia rettgeri
MNIIDIISKKTMLPSSNVITFINTAPYRYKKYYLKKNNGSLREIAQPSRELKIMQKLILNILSEFLPVHENAFAYIEGKSIKLNALKHKENKYFLKMDFSDFFNSIKPIDLRNILIKNGFESNMYNLKLIDNLFFYKKTKKSALSLSVGAPSSPLISNAVLYQFDIELSEICRNENITYTRYADDLTFSSNEKGKLIDFPKVVYLILRKMHSPKIKVNNSKTIYTSKAVSRRVTGITINNQGELSLGRHKKRVICSLIHKFLQGELDNDEIHKLKGYLSYAKHIEINFIKSMEKKYGVELLNSIKKVV

SEQ ID NO: 4183 - protein, 310 aa, Salmonella sp.
  source 1..310: note = Related to CP074606.1; note = Salmonella enterica
MDIIKKIADETLMPVSKVSAFIFTAPYRYKVYPIPKRNGGFREIAQPSRALKFMQRIVIAELEKVLKVHENAYAYVKGRSIKDNVEKHQRNSYILKVDFCEFFNSISPCDLELCLKNNGLDSLLSSKELLNKLFFYKKSKRSALSMSIGAPSSPFLSNAIMYNFDSVISDMCSNKNITYTRYADDLTFSTNEKGILYEFIHEIDKVLEGIDSPKLKLNDKKTIFASKKCNRHITGIVINNEGELSIGRDKKRYLSSLVHKFSLNALNEEEIEHLKGYLAYVNKIEPSFISGMKRKYGVEVVNSIITFNPL

SEQ ID NO: 4184 - protein, 313 aa, unidentified
  source 1..313: note = Related to JAKUDL010000001.1; note = Shewanella sp.
MVIDDCITKMLKNQLLLSDAELLYFASTAPHRYKKYFIPKRNGVDLREIAHPSSQLKYVQRLLVESMVKTFPIHSSAVAYRKGISIRDNATLHLKNNYLLKMDFENFFNNITPEIFFDACEDNNISYSEKDKNLLKNILFYKKRRASGLSLSIGAPSSPLVSNFIMYQFDVLVSDFCAARNIVYSRYADDLFFSTRKSDELSQVAGFIKEILRTMYRGRLKINDAKTIHTSKKNKRLVTGVVLSSEDKLSIGREKKRFYSSMIHKFTLKLLDGDEIHKLQGYLSHAKNIEPLFISRMEKKYGHKALAEIMSYN

SEQ ID NO: 4185 - protein, 316 aa, unidentified
  source 1..316: note = Related to WBJR01000006.1; note = Hydrogenovibrio sp.
MSLLAFLSDNLMFHSSELKKFISTAPHRYKHYPIPKRSGNGFRIISQPSKELKFIQKILVEHLEEVVIIHHKALAYRKGLSIKDNALLHKANPYLLKMDFKDFFPSIVPELFFDALLKQDIHFSKQDYALLQKVFFMKKTRKSPFILSIGAPSSPLISNAVMFEFDKQIDELCQKRNITYSRYADDLVFSSKIDGALFDLPKLVEGVLDKDYFGLIRINKDKTVFSSKAHNRHITGVTITNDNKLSIGRDKKRLLSSKVHRYSLNQLEAELAAKLSGEISFAIFIEPSFKAFLIRKYGRDVVESLLRFNFENTPEL

SEQ ID NO: 4186 - protein, 311 aa, unidentified
  source 1..311: note = Related to NZ_UGYV01000001.1; note = Shewanella morhuae
MNLIKFLKETTLIPEDELLKFASTAPHRYKEYDIPKRNGKGVRHIAQPSKELKFFQKIIVNYLSDILPVHEKATAYKQRVGIKENALYHCGNEFILKMDFENFFPSITPDVLFHLFKRLDIKFDKTDEFFLEKLLFKKGRRDRNSYLSIGSPSSPFISNCIMYFFDIEADRVCWNRGITYSRYADDITLSTKKRNNLFDMPKLLNEMLTRELLGFIKVNKDKTVFSSKRHNRHITGVTLNNDGDISLGRDRKRLISSMIHRFKSGQLDSIQTAELQGFISFSYYIEPLFLNRLKLKYGTDIIDRIKSYNLL

SEQ ID NO: 4187 - protein, 311 aa, unidentified
  source 1..311: note = Related to PJAR01000040.1; note = Glaciecola sp.
MSIYVFLSDSLLISESDLEKFSSTAPYRYKVYDIPKRNGKGFRTIAHPSKELKLIQRLCVQYLENKLYVNDAATGYRRGLSIKDNAAAHSKNKYLLKMDFEDFFPSIKPLLFFYICKQREIKFTVKEKAFLRYILFRKSRGEDVFRLSIGAPSSPLISNFVMSTFDEIVLKYCINNKITYTRYADDLAFSTNVRNSLFDVPKTIQERLHDATRGTIKVNSSKTVFSSRKHNRHITGVTLTNDGLLSLGRKKKREISSLVHKFSIGTLEQTKISNLQGQLSFAYHIEPEFLIRLQKKYGQAIIDKIKGKTDK

SEQ ID NO: 4188 - protein, 309 aa, unidentified
  source 1..309: note = Related to NZ_AQXX01000010.1; note = Hahella ganghwensis
MNIEEYLTELLYVGPDLLYKFASTSSRRYKTYQIKKRSGKGVRTIAHPSKELKYIQRLLVEKLEQLLPVSDNAYAYIKGKSIRDNAQQHVNNKYFLKIDFSDFFYSITPDIFFFMLKKHKIEYSQKDQFLLKNLLFWRKERDGGLTLSIGAPSSPLISNFVLYDFDKSINSWCQGNKIVYTRYADDISFSTNKRNALFDVLANVKKTLNDCGLENIKINDSKTIFSSKAHNRHITGVTITNDNKLSIGREKKRLLSSMIHHFSQGNLPKEKYEELSGHLAHAFFIDPDFKNFVIKKYGNEVLKNLFQRK

SEQ ID NO: 4189 - protein, 310 aa, unidentified
  source 1..310: note = Related to NZ_BMLS01000007.1; note = Bowmanella pacifica
MIIEHLSETLFLAEHDIVRFSLSSPHRYKVYEIPKRNSSKTRTIAHPSKELKFIQRALVEFLSKILPIHEAAFAYKKGMGIKDNAKQHSKSKYLLKMDFKDFFPSITPDLFFRVAEDYGIEFNENDRIVLTGLLFWKPKRSDGLVLSIGAPTSPLISNFVMFEFDKKVSSDCLNKKITYTRYADDITFSTRVKDALFEIPPFISSVLNETVKGIELNPEKTIFTSRAHNRHVTGVTLTNDGEISVGREKKRLISSMIHKSKYSKLSSEAAANLLGLISYATHIEPEFMDRMIKKYGAEVIQAIKARAIGS

SEQ ID NO: 4190 - protein, 310 aa, unidentified
  source 1..310: note = Related to nan
MIIKHLSDTLFLAEHDIVRFSLSSPHRYKVYEIPKRNSKKTRTIAHPSKELKFIQRTLVDYLSKILPVHGAAFAYKKGIGIKDNARQHAKSKYLLKMDFKDFFPSITPELFFSVAKAHGIEFNKEDRIVLTGLLFWKPEGSDGLVLSIGAPTSPLISNFVMYIFDQKLSDECLNRKVTYTRYADDITFSTRIKNTLFELPHLITSLLTKTVDGVVINPDKTVFTSRAHNRHVTGVTLTNEGELSIGRERKRLISSMIHKSKFSKLSSEDASNLLGLISYATHIESQFLDRMTKKYGAEVLQAIKDRAVGS

SEQ ID NO: 4191 - protein, 310 aa, unidentified
  source 1..310: note = Related to BMOT01000001.1; note = Shewanella aestuarii
MIIEYLSESLFMAKYDIVNFALTSPHRYKVYEIPKRNSKNTRTIAHPSKELKFIQRELLKKLIEILPVHDAAFAYQKGIGIKDNANKHSNSKYLLKMDFKNFFPSITPSLFFSIAEKNGIVFDKNDQLVLKGLLFYKSKANKELTLSVGAPTSPLISNFLMHIFDQKISYECSLKKVTYTRYADDITFSTNIKNILFELPEIIMQLLQETVVGVEINPEKTIFTSKAHNRHVTGVTLTNEGGLSIGRDKKRLISSMIHKSKFNTLANDDACYLLGLISHASHIEPEFLERIIKKYGLEVIQNIKLSAITS

SEQ ID NO: 4192 - protein, 310 aa, unidentified
  source 1..310: note = Related to JADYXE010000008.1; note = Pseudoalteromonas sp.
MIIEYLSESLLIAEHDLTSFALTAPHRYKVYEIAKRNSKKTRTIAHPSKELKFIQRSLVELFEKSLDIHKAAFAYKKGFGIKDNAKAHINSKYLLKMDFKNFFPSITPSLFFTVAEKKGVVFTAADRAILTGLVFWKPQGRDDLILSIGAPTSPIVSNFVMNYFDEAVFDLCINRKITYTRYADDITFSTKLKDNLFDLPKIIETILNETVQGIEVNSEKTIFTSKAHNRHVTGVTLTNDNHISVGRDKKRLISAMIHQSKFKSLTPEDASHILGLISFAIHIEPEFLDRILRKYGAEVLNNIKAKAGGI

SEQ ID NO: 4193 - protein, 310 aa, unidentified
  source 1..310: note = Related to PGZF01000002.1; note = Gammaproteobacteria bacterium HGW-Gammaproteobacteria-15
MIINYLSDSLFMSKDDIVRFSLTAPHRYKVYEIPKRKSGQKRVIAHPSKELKFIQRSLIDILKLYLPVHDAAFAYRKGIGIKENAKQHLNSKYLLKMDFENFFPSITPALFFKTLEEHGFVLDGDDKLVLSGLLFWKKKDFDGLTLSIGAPTSPLVSNSVMYLFDKKISEICLSRKISYTRYADDITFSTNIKNILFDIPELVSSVLNELVDGVKLNCKKTIFTSKAHNRHVTGVTLTNDGKLSIGRERKRLISSMIHQSKFCNLTMDEASKLLGLISHAEHIEPGFLKRMIHKYGEEVLNNIKSRASGV

SEQ ID NO: 4194 - protein, 311 aa, unidentified
  source 1..311: note = Related to NZ_CP027426.1; note = Klebsiella oxytoca
MDILQHISDLLLTKKSEIISFSLTAPYRYKIYRIAKRNSDKKRTIAHPSKELKFIQRAITEYLSDKLPVHECAFAYKKGSSIKTNAQIHLHTKYLLKMDFENFFPSITPRLFFSKLRLANIDLTADDKVILENILFFKSKRNSNLRLSIGAPSSPLISNFVMYFWDIEVQKICSKIGVNYTRYADDLTFSTNNKDVLFDIPDMLENILPKYSLGKIRINHEKTVFSSKGHNRHVTGITLTNDNKLSIGRERKRKISAMIHHFINGKLPADEYNKLIGLLAFAKNIEPSFYKSMVIKYGPDNIHKLQKQKDK

SEQ ID NO: 4195 - protein, 319 aa, unidentified
  source 1..319: note = Related to NZ_WUBS01000016.1; note = Acerihabitans arboris
MNISKHLCEKLVMDEDEIFKFSITAPYRYKVYEIPKRNSPKKRTIAQPSKELKFIQRIIISLLKDVLPIHASCYAYRKNLSIKHNALVHLNTKYLLKMDFEDFFPSISPHLFFEILKLTKIQFEDNDLILLEKLLFFKPKRNSTLRLSIGAPSSPFISNFVMYFFDIEVQSLCDAHGINYSRYADDLTFSTNNKDLLFDMPIIVSDILSKHSFDSIKINNRKTIFSSKGHNRHVTGITLTNESNLSVGREKKRLISVMIHYFVTGRLDVDDVLKLQGMLSFARFVEPKFYLSMCKKYGLVNIKKLNSLQIASGDKSSYI

SEQ ID NO: 4196 - protein, 304 aa, unidentified
  source 1..304: note = Related to NZ_LUUH01000065.1; note = Methylomonas methanica
MSKPEIIRFCLTSPHRYKTYKIPKRNSDQKRTISHPSKELKFIQRVLNDYLREKLPIHDCAYAYKQGLNIKDNAEVHASTKYFLKMDFEDFFPSITPDFFFTMLDKAGLEINEIDSILLKNFIFCKASRKSGLFLSIGAPSSPLISNFVLFGFDENIKRFCAEKNINYTRYADDLTFSSNIKNSLFEVPEIVKFYLDKETNGKIKINKRKTVFSSKAHNRHVTGVTLTNDEKLSVGRNRKRLISAMIHHFKCGKLDPTEIDKLKGLMSFVNYIEGDFYRRMIIKYGSETIDKLNNYKQVKRDAK

SEQ ID NO: 4197 - protein, 307 aa, unidentified
  source 1..307: note = Related to MAJP01000040.1; note = Aliivibrio fischeri
MNIFEQLSDILCVDANELMDFASTSPHRYKVYTIAKRNSNKRRLIAHPSKELKFIQRILIKILEPKLKVNNVAHAYIKDKSIKTNAMQHVNSKYLLKMDLENFFPSITPNLFFSCLTKSGVEITERDKELLTGFLFWKPRHSYKLLLSIGAPSSPLVSNFILNSLDEELSVYCESNKIKYTRYADDLTFSTNVKDILFSLPEVVSESLYNNYNGDIKVNKDKTIFSSKGFNRHVTGIVLTNDNVLSIGREKKRVISSTIHKLKLGALDDNEVNQLQGIFAHACFIEPDFYNRMLKKYGAETLNKIKK

SEQ ID NO: 4198 - protein, 309 aa, unidentified
  source 1..309: note = Related to NZ_MKZZ01000010.1; note = Rodentibacter pneumotropicus
MKIVDVLSLKLLMSNTDIVKFANTAPHRYKVYQIPKRNSSKKRTIAQPSKELKFLQRILCGILEDILPIHNSAFAYKKNIGIKQNAEFHSKNKFLLKMDFKNFFPSINPNLFLRQIESHAISLDEVDKKLLINLIFRKPYREGILELSIGAPSSPLISNFIMYNFDKAISEKCNSMSITYTRYADDITFSTNSVNILFNIPKIVESLLHDIYQGDISLNKEKTVFSSKAHNRHVTGITLSNDSKLSIGRYKKRVLSSKIHHYLLGHLKEDEIQKLKGELAFSFHIEPILKKRFIRKYGKECFLKLDKEL

SEQ ID NO: 4199 - protein, 308 aa, unidentified
  source 1..308: note = Related to LZOY01000008.1; note = Haemophilus haemolyticus
MKIIELLSSMLLMENSDIIKFSNSAPYRYKVYQIPKRNSLKKRTIAQPSKELKFIQKLLYQILGKELPVHKSAFAYQKYIGIKQNAEQHVKNRFLLKMDFKNFFPSVNPELFFIEIEHYGIELDKIDKSLLTNLIFRKPYRKGGLELSIGAPISPLISNFVMYRFDDFISIKCNEMNVKYTRYADDLTFSSNCKDILFEIPGIVEKALFDIYKGNIVINKSKTIFSSKAHNRHVTGITLSNDDSLSIGRNKKRILSASLHYYTLGRLTKEEIQKLKGYLAFSFYIEPNLESKLIRKYGKECLDNLMKE

SEQ ID NO: 4200 - protein, 307 aa, Pasteurella sp.
  source 1..307: note = Related to NZ_CP028926.1; note = Pasteurella multocida
MNILSSISDKLLMNNSDLLEFSRTCPHRYKIYTIPKRNSKKKRVIAQPSKELKFIQRILIQNLENKLPIHNMAFAYRKGISIKNNAQKHLYNDYLLKMDFKDFFESITPKIFFRELEKHKIILSSEDIKFLTGVIFRKEKNELLLSIGSPISPLISNFVMFSFDKIVYELCLKKEITYTRYADDITFSTNRKNILFNIPSMIEDVLLANYEGEIILNKEKTRFTSKAHNRHVTGVTLSNENKLSIGRTKKRELIVALHYFINNKLDIDSIEKLRGELAFAFYIEPDFKNRLIKKYGQNSLDRIRHNN

SEQ ID NO: 4201 - protein, 309 aa, unidentified
  source 1..309: note = Related to NZ_CP063116.1; note = Haemophilus parainfluenzae
MNIVDYLSDLILMDRRELLKFSSTSPYRYKVYEIPKRNSNGKRTIAQPSKELKYIQRALLKFFDGVIPIHDSVFSYKKGISIKDNACCHVNYKYLLKMDFKDFFPSITPSILFNEFEKYKLYFNDDDKKLLSGLLFWKKNRKNDFLQLSIGAPTSPFISNFILYSFDKAISDICSEKNVVYSRYADDITFSSNVKNVLFEFPKIVIELLYQLYNGNIKINKDKTVFSSRAHNRHVTGITLSNDGFLSIGREKKRKLSSCFHYYITRKLSKIEIDKLKGELAFAFYIEPDFKNRLMGKYGEKTLELLMRE

SEQ ID NO: 4202 - protein, 309 aa, unidentified
  source 1..309: note = Related to NZ_SLYB01000005.1; note = Cricetibacter osteomyelitidis
MTILDILMDTLLLDMQELKKFASTSPYRYKVYQIPKRNSKKKRTIAHPSKELKFIQRALNGILSNILPVHEAVFSYKKEVSIKDNAQKHLKSQYLLKMDFKNFFPSITPEIFFDQLDKNNISYSVEDREIISRLLFWKPSRYKEYLSLSIGAPSSPLISNFIMYSFDKKINDYCNNINVTYTRYADDITFTTNVRNILFDIPNEIKKILLEEFSGKIIINNKKTIFSSKANNRHVTGIRLTNDNKLSIGRNKKRVLSSKVHHYSLGKINDDEAKKLQGELAFTFYIEPEFESKLIKKYGLETLLKLNKI

SEQ ID NO: 4203 - protein, 309 aa, Aeromonas sp.
  source 1..309: note = Related to NZ_AP022188.1; note = Aeromonas media
MSIVDYVCDALCIEKMQLMHFAVTAPHRYKKYEIPKRSGNGTRTIAQPSKQLKFIQRIIISELEKILTPHPSAFAYIKGISIKDNAEMHVKNRYLLKMDFKDFFPSITPDLMFQEYARFGVTFSPEDSALLSNILFFKLRKNSKLKLSIGAPSSPFISNIIMRHFDAVISELCQHKKISYTRYADDITFSSNIKNVLFEIPEAITVALKKEGYKCIKINKEKTVFSSKRNNRHVTGITISNEDKLSVGRTKKRILTAAVHKFSLGYLSESDIEKLKGELSFVFFVEPAFKDRLIKKYGYDVCHKLWKHA

SEQ ID NO: 4204 - protein, 309 aa, Aeromonas sp.
  source 1..309: note = Related to NZ_AP022264.1; note = Aeromonas veronii
MSIIDYVCDALCIEKTQLIQFAVTAPHRYKKYDIPKRSGNGTRTIAQPSKQLKFIQKIILLKLEKLLTPHQSAYAYVKNKSIKDNATVHINNRYLLKMDFKDFFPSITPELMFQEYARFGIMFSNDEQTLLSNILFFKLRKNSKLKLSIGAPSSPFISNIVMRHFDTVVSELCENKKIKYTRYADDITFSSNIRDVLFEFPQIIANTLKNEGYHDITLNIEKTIFSSKRNNRHVTGVTLSNDGNLSIGRDKKRLLSASIHTFSLGKLCEKDIEKLKGELAFAFYIEPEFKIRMLKKYGSSTCSRLWKVD

SEQ ID NO: 4205 - protein, 310 aa, Aeromonas sp.
  source 1..310: note = Related to NZ_JMGO02000012.1; note = Aeromonas enteropelogenes
MNIVSYVCDTLCIDEKQLMLFAATSPHRYKTYEIPKRSGNGTRTIAHPSKQLKFIQRLVISQLEKIVSPHKAAVAYIKGLSIKDNAILHAKNSFLLKMDFKDFFHSITPELMFQTYEQLGVSFSIKEREFLSNILFYKVRKNSHLRLSIGAPSSPFISNIVMHHFDDSMSKYCSEKEIIYTRYADDLTFSSNIKGILFHLPDEVRFHLDETGYKSIVVNIEKTTFTSKKHNRHVTGITISNDSTTSIGRQRKRNLSAAIHKFSLGNMTEDEIEKLKGDLSFAFFVEPDFKLRMKQKYGEKIYGMLFKKNS

SEQ ID NO: 4206 - protein, 312 aa, unidentified
  source 1..312: note = Related to NZ_PEAX01000003.1; note = Alteromonas flava
MSIFDSIVDSLCTSPEHLRNFAATSPYRYKVYDIPKRSGSGKRKIAHPAKQLKYIQRLAVHELEKFFTPHESAFAYVKGKSIRDNAKVHVRNEYLLKMDFKDFFPSITPELFFAQVEKLGTTFCDEDKVFLSNILFYKLRSYSKLRLSIGAPSSPFVSNIVMREFDIKISEFCKTKSIAYSRYADDLCFSTNISGLLFELPKLVTKTLKSNGYAELKMNRSKTVYSSKGHNRHVTGVTLSNDEKLSVGRSKKRETIARVHHYLNGRLTPEQVESLQGYLSFVFHIEPEFKIRLHKKYGNEAIEMLLSERKID

SEQ ID NO: 4207 - protein, 310 aa, unidentified
  source 1..310: note = Related to DQNK01000125.1; note = Gammaproteobacteria bacterium
MVKIVNFISESLCIEESELISFAHTAPHRYKIYTIPKRSGNGRRTIAHPSKQLKFIQRLTLRLLQDVLPIHESALAYKKSISIRDNANIHRKNQYLLKMDFKDFFPSITPSLLFRELERKNIIVSDEDKNFLASILFFKLRSNSSLKLSIGAPSSPLISNFIMHHFDQILSSECKKMKICYTRYADDITFSTNIKDSLFKIPSIVKNILKNEKYPELKVNEEKTVFSSKAHNRHVTGITITNEGALSVGREKRRLLSASLHRYIEGKIDGETKNTLKGQLSFAFFIEPQFKIRLQKKYGERALEKLFSNE

SEQ ID NO: 4208 - protein, 311 aa, unidentified
  source 1..311: note = Related to JAEINI020000025.1; note = Alishewanella sp.
MNILNSVSKESGLSVTDLLAFSKTCPHRYKVYFIAKRNSDAKRVIAQPSKEVKYLQGAVIKIFKSFDLVHEAAFAYKDGINIKQNAQVHANQKYILKMDFKDFFPSITPDLLFSQLNIAKVFLSEKDKEFLSGLLFWKRRRNSKLRLSIGAPSSPLMSNIVMYFFDSYIESYCRLNRIRYTRYADDLCFSSSMAGGLDSVKDTVNKALRSFFGRKIRLNTAKTIFASKAMNRHITGITLTNDGKLSVGRDRKREIIAAVHKVSQGNSPDCSLKTLAGLISYVHSVEGDFKDRLIKKYGEVIVQKIFDSLRE

SEQ ID NO: 4209 - protein, 315 aa, Acinetobacter sp.
  source 1..315: note = Related to NZ_CP055277.1
MIELNLLKSLNTDFPLGEDNILSFARTAPHRYKTYEILKRDGVSKRKIAQPSKEVKLLQRSALKVLEPILPVHPLAFAYTKARSIKHNALIHKESKFILKLDLTNFFNSITPKLLLEKFHTANISLTHNDQDLISHLFFWKEKRNESPKLSVGAPSSPLLSNFIMYNFDTKIIEVCKKNGCLYSRYADDITISSTENFYQLNLPFIIAKILREEFGESITLNNTKTKYISSAYRRQVTGVILTNDQDISIGHRKKRLLSSKIHHFKIQRLLDPNEIQKLKGELAFAFYIKPELRKKFEIKYGQNTITKILKYKRL

SEQ ID NO: 4210 - protein, 313 aa, Acinetobacter sp.
  source 1..313: note = Related to MVON01000005.1
MIELNLLKFLNIEFPLGEENIISFVNTAPHRYKTYEILKKDGKNKRKIAQPSKEVKLLQRSALKLLEPILPIHDLAFAYTKNRSIKNNAMIHQNSKFILKTDLSNFFNSITPKILLEQIRKTNISVSSKNEELVSNLFFWKETRKDGLKLSIGAPSSPLLSNFIMYNFDNKIVEVCKQYDCAYSRYADDITISSSKNFYELNFPLIIKKILLEEFGESIKLNSNKTKYISKAYHRNVTGITITNDGSISIGSNNKRLLSSKIHHFKNNKIKDTNEIFKLKGQLSFAFHIRPQLKEQFEKKYGKDTIYKILKYK

SEQ ID NO: 4211 - protein, 315 aa, Acinetobacter sp.
  source 1..315: note = Related to JADWNN010000006.1; note = Acinetobacter bereziniae
MKELNLLNLLNLEFPLGQDNILSFSRTAPHRYKTYEILKKDGISTRKIAQPSKEVKLLQRSAIKILESNFPVHYSAFAYVKNRSIKQNAIIHQNSNYIFKTDLSNFFNSITPLIFLEKIKQNNIILSDKNSQLITHLFFWKENRNDSLKLSIGAPSSPFISNFIMFNFDEKILEICKKHNCEYSRYADDITISSRNNFFELNFTSIITALLNEEFKGNIKLNTKKTKYISKAYHRNITGITITNDHNISIGHRKKRLLSAKIHHFKNNKIKNQSDILKLKGELAFAFYIMPHLREKFENKYGNDTILQILKFKTD

SEQ ID NO: 4212 - protein, 335 aa, Acinetobacter sp.
  source 1..335: note = Related to NZ_CP012808.1; note = Acinetobacter equi
MSNFLQKLKQFVYQLFNSKSEKNVLKISYPTNINQQKFKNKKSFLDFAYSAPYKYKNYYIPKRNSTQKRLISQPTAELKFVQKDVINQLSAFLPIHNCAYAYVKNRNIKDNAELHRHSNYVLKLDFKHFFHSIRPKILFNQLEHHQIKLSEIDQTILSFIFFWREKKDSPLKLSIGAPSSPVLSNFIMYRFDEMLNQLCEKHQCIYSRYADDITISSKYHFYDLNFPQHVQNLLDQEFQGKIKLNTQKTKYLTRKHRRFVTGITLTNDAKLSIGRQQKRLLSAKIHHFKINKLNDEQQILSLKGQLAFAFYIQPELKVQFSRKYGEELLHKIMSD

SEQ ID NO: 4213 - protein, 301 aa, Acinetobacter sp.
  source 1..301: note = Related to DADAZD010000003.1; note = Acinetobacter baumannii
MSDSELFDLAKTCPHRYKVYEIDKKNGGKRLIAHPSKELKYIQKLILDILKANLSIHHSAYAYVAEKNIKENASLHVNNSYLLKMDFKDFFPSITPGLFFDECEKHNIFFSKEDKDLLANILFWKKKHAKKLVLSIGAPSSPFISNFIMFSFDALISEYCNTNGIKYSRYADDLTFSTNKKEKLSKLPKLISEKLNSLYRKSIRINIEKTTFVSKACSRKVTGLVITNNNTISIGRERKRQISAMVHQYSIGKMTNSKDIEKLVGLVNFAIYIEPQFLNFLLKKYGREIVNSIYKLKNKNK

SEQ ID NO: 4214 - protein, 312 aa, Acinetobacter sp.
  source 1..312: note = Related to NZ_CP061828.1; note = Acinetobacter seifertii
MNIDIKRHLRNNLFISDLEIFELSKTCPHRYKVYEINKKNGGTRTIAHPSKELKYIQTLIINVLKTQLPIHRCAFAYVAGKNIKENALLHVKNPYVLKMDFKDFFPSITPGLFFNECEKHSLYLSKEDQQLIANFLFWKKKRAHKLILSIGAPSSPFISNFIMYSFDVVVNEYCSEKGIIYSRYADDLTFSTKQAGLLSHLPKIVSEKLNSLYKKSIRINSEKTTFVSKAHSRKVTGLILTNQNNVSIGRTKKRNISAMVHQYKIGKIIDKKEIEKLIGLVNFAVYIEPDFLNFLIKKYGKDTISKIYKIDT

SEQ ID NO: 4215 - protein, 301 aa, Acinetobacter sp.
  source 1..301: note = Related to NEGC01000003.1
MSEKELFNFSKTCPHRYKVYPIPKKNGGERIIAHPAKELKYIQRVIVKILKTKLSIHHSSYAYMNNISIKDNAALHSNNDFILKMDFKEFFPSITPLIFFNALNTQNIHLSKIDSALLANFLFWKPYRKQKLVLSIGAPSSPLISNFVMYEFDNQISSLCRNLNITYSRYADDLTFSTQEKNVLYVLPKQIQQILNTTYKKGIRINPEKTSFISKAFQRKVTGLILTNENNISIGRDKKRLISSMLHKYKIGLNTQKEDIEKLTGLLSFAFYIEPHFKESMIRKYEIDTINKLFKNKENPS

SEQ ID NO: 4216 - protein, 312 aa, unidentified
  source 1..312: note = Related to NZ_JAGKLI010000001.1; note = Providencia rettgeri
MSLLQFIANGLYITEDEAIRYIVTIPRRYKKFNIRKRNSNEFRLIAQPAKQVKSIQRIVLKYVISDFHVHERAFAYESYKDIRKNALVHHNNDYILKMDFKNFFPSIRPFHLMNCFANMNIKLDEMDFFVIENLFFWKPRRNSPLQLSIGAPSSPKISNVIMYSFDCEIFSRCKEMGIEYSRYADDLTFSTTKKGILFDIPKIVREILNEVNLKSIKINHEKTIFSSKKFNRHVTGITITNDGGLSLGREKKRILRSKIHHYICGVLPDVEILKLRGELGYAKFIEPSFFKAMVNKYGYDVIDSIAKYGNCS

SEQ ID NO: 4217 - protein, 312 aa, Proteus sp.
  source 1..312: note = Related to CP049941.1; note = Proteus mirabilis
MNLLQFISNGLYLTDDEAISYIMTIPRRYKKFYIKKRSSQEYRLIAQPARQVKSLQKVVLKHIDKHFHVHENAFAYEYNKDIRKNALLHSKNQFILKMDFKNFFLSIKPILLKKYFNEIGIELDKKDIIVIENLFFWKLRRNSPLRLSIGAPSSPKISNVVMYFFDCEISKKCKQLGIEYSRYADDLTFSTNINNILFSIPKIVRETLNQVGLNDIKINHKKTVFSSKKFNRHVTGVTITNDKKLSLGRERKRLLRSKIHHYTCGILSETEILKLRGELGFAKFIEPTFFESMVNKYGYKVIKSITTYGNLS

SEQ ID NO: 4218 - protein, 310 aa, unidentified
  source 1..310: note = Related to NZ_CP025933.1; note = Morganella morganii
MNLLQFIANGLYLTEDEAMRYIVTIPRRYKKFYIRKRNGIDYRLIAQPARQVKFLQKATLKYMGKYFHIHESAFAYKSGKDIRKNALVHCNNEYILKMDFKNFFLSIKPIHLKNYFSRMGITLDEKDIFVLENLFFWKLRRNSPLRLSIGAPSSPMLSNVVMYLFDVEINNQCEALDVTYTRYADDLTFSSNVKGILFDIPKIVKEVLTKVNMKGIKINREKTVFSSKKFNRHITGVTITNNGTLSLGRERKRLLRSKIHHYICGLLPDVEILKLRGELGYAKFIEPKFFESMMSRYGYEIIESIAKYGN

SEQ ID NO: 4219 - protein, 310 aa, Salmonella sp.
  source 1..310: note = Related to CP074281.1; note = Salmonella enterica
MELLSYISKGLFLSEEEAKRYIVTIPRRYKKYPIAKRNGNGYRLIAQPARQVKALQKAVINHMLANLKVHENAFAYEADKSIRSNALMHCNNDYLLKMDFKNFFMSIKPHNLLSVLKEYGVELTGTDIFVLENLFFWKLRRNSPLRLSVGAPSSPIISNTVMYFFDEEISKRCKELDITYSRYADDLTFSTKIKGALFDVPKLVREVLNIVNLRNIKINHEKTVFTSRKFNRHVTGVTITTEGYLSLGRDRKRLLRSKIHHYVCGVLSEKEILTLKGELGYAKFIEHKFFLSMIKRYGNAVISEISKYEI

SEQ ID NO: 4220 - protein, 310 aa, unidentified
  source 1..310: note = Related to NZ_CP033901.1; note = Klebsiella quasipneumoniae
MELLNYIANGLFLSDEEARKYISTIPRRYKKYHILKRNGKAFRLIAQPARQVKSLQSAVLNHISDVLQVHESAFAYESSKGIKANALIHCRNDYLLKMDFKNFFLSIKPFNFLRNLKEFGIELNETDVFVIENLFFWKLRRSSPLRLSIGAPSSPKISNVVMYFFDEKMTKKCAALGITYSRYADDLTFSTKVKGVLFNVPKIVREILNEVSLRNIKINHEKTVFSSSKFNRHITGVTITPDGHLSLGRERKRLLRSKIHHYVSGVLSPKEILTLKGEMGYAKFIEHSFYQSMINRYGVAVIDAIAKYEI

SEQ ID NO: 4221 - protein, 310 aa, unidentified
  source 1..310: note = Related to NZ_CP049115.1; note = Pantoea stewartii
MELLSFISNGLLLTEAETKKYISTIPRRYKKYQIPKRNGHGNRLIAQPAKQVKLLQKAVLNFICEHLQVHESAFAYEENKSIRANALIHCSNQYLLKMDFRNFFLSIKPHNLINYFQTKGVVLTESDIFIIENLFFWKLRRNSPLRLSIGAPSSPKLSNVIMYNFDEKISLKCSKMNIIYSRYADDITFSSHVKGSLFEIPRIVRETLNEVNLKNIKINHQKTVFSSRKFNRHITGVTITTEGHLSLGRVRKRLLRSKIHRFINEKLTSKETASLKGELGYAKFIEYSFYQSMIDKYGFDTINKIAKFPQ

SEQ ID NO: 4222 - protein, 310 aa, Escherichia coli
  source 1..310: note = Related to ABCQBJ010000001.1
MNLLQYIANGLFLTEDETKRFIITAPRRYKKFTIAKRNGLDRRLIAQPARQVKSIQRAVLKHIRENIKVHEHAFAYEKERDIKKNASLHKDHDYLLKMDFKNFFLSIKPVNLLNVIKMQGISLENDDVFVLENLFFWKLRRNSPLRLSIGAPSSPFISNAVMFFFDTVMSEKCKKIEVTYTRYADDLTFSTNRKNVLFEVPRLVREILNETSLRNIKINHEKTVFSSKKFNRHVTGVTLANNGVLSLGRERKRLLRSKVDYYRKGLLSPEEILTLKGELGNAKFIEPEFIERVESKYGSDVIREIQKYNI

SEQ ID NO: 4223 - protein, 310 aa, unidentified
  source 1..310: note = Related to NZ_CP023484.1; note = Dickeya sp.
MSLLKYIADGLFLTEEETKRFIITVPRRYKRFTIAKRKGLERRLIAQPARQVKSIQRAVLKYIRDEIKVHECAFAYEIDRDIKKNAFLHKDNSYLLKMDFKNFFLSIKPINLLNVIKRHGIELEGNDIFVLENLFFWKLRRNSPLRLSIGAPSSPFISNAVMFFFDKMLSEKCEQMGVVYTRYADDLTFSTNRKNILFGMPRLVREVLNETNLRNIKINHEKTVFSSKRFNRHVTGLTLANNGVLSLGRERKRLLRSKVDHYKKGLLSPKEILILKGELGYAKFIEPVFIERVKQKYGRDVVHQIQKYNI

SEQ ID NO: 4224 - protein, 312 aa, unidentified
  source 1..312: note = Related to RJLS01000002.1; note = Dickeya undicola
MKLLEIISKGLYLTEDEAKRYIATMPRRYKRYHIAKRNSDKKRLIAQPARQVKSIQRSVISIIHDEILIHENAYAYASGRDIKKNAEMHRKNKYILKMDFKNFFLSIKPHNLFHVFERQGIILDDEDFFVYGCLFFWKQRRNSPLRLSIGAPSSPFISNAIMFFFDDVISNKCKEMDVSYTRYADDMTFSTNNKGILFDLPKLVRNTLNDVGLKNIKINHEKTVFSSKKFNRHVTGVTITNDEALSIGREKKRLLRTKIDYYRKGLLNPGEVMKLKGELGFAKFIEEGFIERMIKKYGIELIESIKKFEINE

SEQ ID NO: 4225 - protein, 311 aa, unidentified
  source 1..311: note = Related to JZYL01000045.1; note = Pluralibacter gergoviae
MSLLEKISNGLMLSKADAKNYISTIPRRYKVYTIKKRNSEETRLIAHPSKQVKSLQRAMLTYFKDKLPVHSSAYAYISGKSIKENAERHVNNSYILKMDFRHFFLSIEPLHFINVIYNHGFELNEEDKFVIWNLFFWKRRSNSPLRLSVGAPSSPFISNAIMYFFDEAISETCAKMNVTYTRYADDLTFSTNNEDILFNIPRMVKGILKANGLSKIKINEAKTVYSSKKFNRHVTGVTLSNDGCISLGRERKRLLSSKIHHFSQGRLSDVEVLKLKGELGFAKFIEPLFIERMSIKYGLDIINHIQKFNPS

SEQ ID NO: 4226 - protein, 311 aa, Citrobacter sp.
  source 1..311: note = Related to JADVIA010000001.1; note = Citrobacter braakii
MTLLEKIANGLMLSKDDAKNYVSTIPRRYKVYTINKRNSEEKRLIAHPSKQVKALQRAFMSGFKKNIPIHSSAYAYENERDIKKNALQHVSNPFLLKMDFRHFFLSIEPRHLIKVMNDHGFELNDEDKFVISHMFFWKRRSNSLLKLSIGAPSSPFISNAVMYFFDEALSIACKDIDVVYTRYADDLTFSTCQSGVLFGVPKMVKNILKANGLSKIKINEKKTVFSSKKFNRHVTGVTLNNEGAVSLGRERKRLLSSKIHHFCNDLLDEDETLKLKGELGFAKFIEPSFVEKMKNKYGVDIIMAIQKYNPN

SEQ ID NO: 4227 - protein, 309 aa, unidentified
  source 1..309: note = Related to MVGB01000005.1; note = Serratia marcescens
MKIVNFISDKFFMPEQEVRNYLRTVPRRYKQFTIDKRNGEPRLIAQPAKQVKALQVSVLSELKRYIPIHECAYAYQSGRNIKANALLHAKNSYLLKMDFKNFFLSIKPEVFLNVLSKHGIAVSEDDALSIANLFFWKLRRNSPLRLSIGAPSSPFISNATMYFFDSYLSAECKKIDVDYSRYADDLTFSTKTKGILKDIPLLVKKALEMNDLKTIKINNSKTVFSSKKFNRHVTGITLNNNGDISLGRNKKRFLSSRIHYYSLGLLNNDDILELKGLLGFANYIEPIFLERMKVKYGDDLIVSIQKYIG

SEQ ID NO: 4228 - protein, 310 aa, unidentified
  source 1..310: note = Related to NZ_CABHXL010000034.1; note = Yersinia kristensenii
MNLFGIVSNSLFLSDMEIRNYVSTIPRRYKRYSIPKRNGIEFRIIAQPAKQVKVLQRIVLPFLQQIIPIHGNAHAYEKNKSIKTNALVHSKNEYLLKMDFKNFFLSIKPNDFIDIMKKHEIKITDDDKFIIENLFFWKLTRRSPLRLSIGAPSSPFISNAVMYFFDEIISHECEALDVKYTRYADDLTFSTNVKDILFLVPKIVKGVLKSSGLKNIKINTNKTVFSSKKFNRHVTGITLTNDGEVSLGRERKRVISVRIHYFTLGLLSTDDILKLKGDLGFAKFIEPEFIYRMERKYGLENIEKLRKFMG

SEQ ID NO: 4229 - protein, 310 aa, unidentified
  source 1..310: note = Related to NZ_CACSJK010000006.1; note = Rahnella variigena
MTIVEYISQGLFISESEFVSYTNTMPRRYKQFYIKKRNGEDRLIAQPAKTVKNLQLTVVGLLRDELRIHPAAMAYVKGRSIKDNAQKHVHNQFLLKMDFKNFFLSIKPAMFLMCLKKQGVNLDERDEHVISNIFFWKLRRNSTLRLSIGAPSSPFVSNVVMYYFDEAVESLCRMLGVVYTRYADDLTFSTNKKNVLFELPSVVKNVLNDVGLKAIKVNKDKTVFSSKKFNRHVTGVTLNNSGELSLGRERKRTISAMIHHHKLGLLNNEDVTKLKGYLGFAKYVEPLFLTRMERKYGEQLISQIQKFIPG

SEQ ID NO: 4230 - protein, 309 aa, Enterobacter cloacae
  source 1..309: note = Related to JAJFTC010000002.1
MDIVEFLAQAVFLSEKEFVSYVNTMPRRYKQFYIKKRNGDDRLIAQPARTVKTLQLTVVGMLQHDLKIHDASMAYVKGKSIKDNALQHVNNQYLLKMDFKNFFLSIKPEMFLTCVRKQGLKLSERDSLILANLFFWKLRRNSSLRLSIGAPSSPFVSNVTMYYFDEMVSDICNEYGITYTRYADDLTFSTNKKGILFSLPPLIKDSLKQTGLNDIKINNKKTVFSSKKFNRHITGVTLSNDDKISLGRERKRMISAMVHHFKNEVLEVDEIYKLKGYLGFANYIEPMFIARLKRKYGENVIMQIQKFIV

SEQ ID NO: 4231 - protein, 309 aa, unidentified
  source 1..309: note = Related to JPOT02000001.1; note = Pantoea agglomerans
MDIVEYLAQGVFLSEKDFLSYVNTMPRRYKQFTVKKRNGEDRLIAQPARTVKTLQMVVVSLLKNHLNIHEAAMAYVKGKSIKDNANAHVQNKFILKMDFRNFFLSIKPDIFLACIEKQGLILSDQDKMVLSNLFFWKLRRNSSLRLSIGAPSSPFVSNVTMFFFDELISKICKDKGIVYTRYADDLSFSTNQKDILFSIPALVKESLKVVGLKNIKVNNAKTVFSSKKFNRHVTGITLSNEGVVSLGRERKRSISAMVHHFTLGLLDKESIYKLKGYLGFAKYIEPSFVLRLKIKYGDEVVLKIQKFND

SEQ ID NO: 4232 - protein, 315 aa, unidentified
  source 1..315: note = Related to NZ_CP034938.1; note = Pectobacterium odoriferum
MNILNQLSNTLFMDKDSLKSFISTAPRRYKKYTIPKRNGDGVRIIAQPSKQIKSLQRYAANLLSKHLRVHYAAHAYVRGKGIKTNAAAHRNSNYILKIDFKDFFHSITPDIFLKTLETNNNIIENEDKFIISHLFFWKLRGNSPLRLSIGAPTSPIISNAIMYCFDEELTNYCTEINVTYTRYADDLTFSSFHSLSLATIQSTVQRLLIKHYKRKIKINREKTIYCNKAMNRNITGVILNNENELSLGRKKKRMISSLVHKFSYSLLNQKEINYLNGILGHASHIEPQFIERLKEKYGHDVIAKIKKSITYAHIT

SEQ ID NO: 4233 - protein, 315 aa, Citrobacter sp.
  source 1..315: note = Related to JADVFW010000007.1; note = Citrobacter braakii
MSILNQLSATLFMDKDSLKSFISTAPRRYKKYTIPKRSGDGVRIIAQPSKQIKSLQRFTANLLSEHLKVHYAAHAYVPGKGIKTNAAAHKNSQFILKIDFKDFFHSITPDLFIKTLEANEANISEEDRFIIAHLLFWKLRGNSPLRLSIGAPTSPLISNAIMYCFDEELTNYCTDLNVTYTRYADDLTFSSFHGLSLATIQRTVQTLLIKHYNRKIRINRDKTIFCNKAMNRTITGVVLNNSNELSLGRKKKRMISSLVHKFSYSLLNQKEINYLNGILGHAFHIEPQFIERLQVKYGHDVIDKIKQSITYDDIT

SEQ ID NO: 4234 - protein, 315 aa, unidentified
  source 1..315: note = Related to JAKZMT010000006.1; note = Pantoea ananatis
MSLLEQFSSALFMDRASLKSFIYTAPRRYKRYAIPKKNGNGFRTIAQPSKQIKSLQRFGISLLAIFLKTHYSAHAYVEGKGIKTNAAAHQGSDHLLKMDFKDFFHSITPDILMNTLDKNGGKEILDEEDRHIISHLFFWKLRGNSPLRLSIGAPTSPIISNAIMYDFDEEIADYCAELNVKYTRYADDLTFSSKDRESLTTIPNEVNIVLRKNFGSKIRINKEKTLHCNKSMNRSVTGIVLNNTNDSLSLGRKKKRMISSFVHKFSFSLLDQNEINYLNGILGHAAHIEPQFIERLKEKYGQDVIAKIKASIEYL

SEQ ID NO: 4235 - protein, 314 aa, unidentified
  source 1..314: note = Related to JAAAXN010000025.1; note = Serratia fonticola
MSLLDHLSEVFFMDKASLKSFIFSAPRRYKKYPIPKRNGEGDRIIAQPSKQIKSLQRFTINLLIDYLKVHHAAHAYVSGKSIKTNAAAHRKNSYILKMDFKDFFHSITPDLFLKVLSDRDNDGKLTEEDSFLISNLFFWKLRGNSPLRLSIGAPTSPIISNTIMYDFDEELTNYCLELNIVYTRYADDLTFSSSDRESLSIIPIAVRRVLIKNFNRKIRINSGKTIFCSKAMSRNITGVVINNNCELSLGRKKKRMISSLVHKFSYSLLTQDEMNYLNGILSHAHYIEPAFIERLKSKYGSDVIDKIKHSITFP

SEQ ID NO: 4236 - protein, 313 aa, Vibrio sp.
  source 1..313: note = Related to NZ_CP049914.1
MTNLFETLQEQLSLSDDELLSYLHTVPLRYKRYYIDKRNSTEKRLIAQPSRTVKILQKYVASELEEVIPVHQSAMAYCKGRGIKENAKKHAHSRYLLKMDLKRFFDSITPTILSDVIMKHGIELSEKDYILVSQLFFWKLRRNSPLRLSIGAPSSPFVSNAIMYFFDEEISKHCEELNIVYTRYADDMTFSTNKKNVLFELERTVVKLLRLNFGKDIKVNKEKTVHSSKAHNRHVTGVTLSNTGKLSIGRENKRNIRVSIHRFINGKTNDRDVQNLKGNLGFAKHIEPEFVKSLEDRYGVETIKKIQTFDILP

SEQ ID NO: 4237 - protein, 310 aa, Vibrio sp.
  source 1..310: note = Related to NZ_CP053541.1; note = Vibrio europaeus
MFQLFDTFREQLALSNDELSSYLHTIPFRYKRFYIDKRNSDEKRLIAQPAKAVKTLQRYAISEIEDELPIHSSAMAYCKGRGIKENALVHAKSRYLLKLDLKNFFESISPEILLSVISKHSIELCDNDKFLISNLFFWKLRRNSHLKLSVGAPSSPFISNVIMYFFDKDLAEKCNEMNVSYTRYADDMTFSTQDSNILYKIETIVRKLLKFHFDNKLTINRSKTVHSSKAHNRHVTGVTLDNHGRISLGRDNKRSLRAGVYNFTQGRLNKDEAMKLRGKLGFAKYIEPKFILRLEKTFGKDVIDELKKYN

SEQ ID NO: 4238 - protein, 314 aa, Aeromonas sp.
  source 1..314: note = Related to NZ_LR134376.1; note = Aeromonas encheleia
MTNIFRGLCEQLLMSENELKSYISSVPFRYKRYYIPKRNSNELRLIAHPAKVVKSLQRHAVSKLEPLLPIHKCAMAYCKGKGIKENAYQHKNNRFLLKMDLRDFFGSINPSIFLGVLKKHDLTLSKEDVFLLSNLFFWKLRRNSPLRLSVGAPSSPFVSNAIMYFFDKELHEYCNDNDIVYTRYADDMTFSTSKKDILFALEKTVKAFLKKNFGSFLRVNHNKTFHSSTAHNRHVTGITITNNKKISVGRNRKRKIRACVHSFKNGLLSNNDALKLKGELGFIKHIEPDFIINLTNKYGLDTIKKIQTFESVDT

SEQ ID NO: 4239 - protein, 314 aa, unidentified
  source 1..314: note = Related to CP001796.1; note = Pseudoalteromonas sp.
MNIIERISEDLLMPEKELLNFSSTAPRRYKKYTIAKRNSDERRLIAHPSKEVKFLQRLLVTHLEDKLTIHASANAYVKQKGIKSNALAHKDNQYLLKMDFKNFFLSITPSILIEQMLAFGIGLDDRNIEFISGILFWKLRRNSPLRLSIGAPSSPFISNVIMYNFDRLIEKECKVMGITYTRYADDLAFSTNIKDILFEIPKLVKNTLKKLYGSKIRVNTKKTVFSSKKFNRHITGITLTNNNLLSIGRKKKRFISSLVHKYTLELLSDEEILQLKGLLSHVSNIEPLFIGRLSNKYGTNIMTDLAPSKFFIGN

SEQ ID NO: 4240 - protein, 314 aa, Vibrio parahaemolyticus
  source 1..314: note = Related to NZ_CAJOAG010000011.1
MNIIESISEALLMPEKELLSFSSTAPRRYKKYTIAKRNSDERRLIAHPSKEVKFLQRLLVTHMEDKLPIHDSASAYVKQKDIKSNAFCHKNNQYLLKMDFKNFFLSITPDILLEQMLSFGIKLDSNNMDFISGMLFWKLRRNSPLRLSIGAPSSPFISNVVMYNFDCIIEKECKHMGITYTRYADDLTFSTNSKNILFEMPKLVKKTLKELYGTRIRVNSDKTVFSSKKFNRHITGVTLTNNNLLSVGRAKKRYISSLIHKYTLSLLSEEEILQLKGLLSHASNIEPLLIGRLSKKYGVDVMANLAPKKFFIGN

SEQ ID NO: 4241 - protein, 311 aa, Vibrio sp.
  source 1..311: note = Related to MCWA01000032.1; note = Vibrio splendidus
MSLISEISDDVLMTKDELLSFSFTAPRRYKKYHILKRNGNGLRLIAHPSKEVKFFQRLAISKLEILLPIHDCAIAYVKGKSIRDNAEAHRRNRYMLKMDFKNFFMSITPDLFISSLERNDINLEAQDIKFLEGVLFWKLRRNSPLRLSVGAPSSPFISNFVMTAFDIFMFGYCKDKGITYTRYADDLTFSTREKDLLFTIPKVVRDALKEYCNSKIRINSKKTVFTSKKFNRHVTGVTITNDEKLSLGRERKRLISAMVHHFVDDKYSLSHEEIQKLKGYLSFAKSIEPDFINRLSKKYGREYILKIQSFN

SEQ ID NO: 4242 - protein, 311 aa, unidentified
  source 1..311: note = Related to WMDC01000029.1; note = Photobacterium carnosum
MSILSDISKDVLMTESEILNFSSTAPRRYKRYYILKRNGKDLRLIAHPSKEVKFFQRLVISKLDGKLPIHHCAMAYVKGKSIKDNADAHKKNKYLLKMDFKNFFMSVTPELFISSLKKNNIILDTNDLIFLEGILFWKLRRNSPLRLSVGAPSSPFISNFIMKSFDDYIFNTCKEMNVTYTRYADDITFSTNIKTLLFTFPVIIKNALKEHCDKKIRINSEKTIFTSKKFNRHITGITINNNNNLSLGRNKKRLISSMVHHFISKDHSLTADEILKLKGHLSFAHFIEPDFIQRLSDKYGNEEIINIIKHI

SEQ ID NO: 4243 - protein, 307 aa, unidentified
  source 1..307: note = Related to NZ_BMYW01000013.1; note = Vogesella alkaliphila
MRISKKLADELLLDEAELRKFCATAPYRYKKYEIPKRNSDKTRLIAQPSKEVKFMQRLVVKYLRDILPVSRHAMAYESGTSIVKNASIHKNNPYLLKMDFKNFFLSITPSLFFGLMSDGGVEFSDDDKILLSNLLFWKLRRNSPLRLSVGAPSSPFISNVVMYHFDCLMESQCAAMRIRYSRYADDMTFSTRERDALSEMPGFVRSVLKRDYDGKIKVNSEKTIFLSKAKRRTVTGITITNDDTLSVGRDRKRNISAMVHHFSLGKLSAEEVQKLKGYLSFVAAVEPNFIYRMMSKYGNKVIEALFI

SEQ ID NO: 4244 - protein, 317 aa, unidentified
  source 1..317: note = Related to JACYUE010000003.1; note = Oxalobacteraceae bacterium
MSIFSTLADKLLMSEEELLRFALTMPRRYKKYEILKRNGIDTRQIAQPSRESKFIQRMIIDELRGVLRVHKAATAYEKETGIRLNALRHLNSRYLLKMDFKNFFPSITPELFFAVAESSGVDFEQADKVFLEHALFFRATRRSRLRMSIGAPSSPFISNFVMNTFDHAMMKFCVERNISYTRYADDLTFTTNEKNILFDLPKMVATLLAEYCFKKIRINSSKTVFSSKRFNRHVTGIVLTNNNELSIGRARKREIASLINSFRYGALSEDATLKLKGLMAHAYHIEPDFIARMKLKYSYEVVNAILRYPLAIQTLEQ

SEQ ID NO: 4245 - protein, 313 aa, unidentified
  source 1..313: note = Related to NZ_JACHXD010000002.1; note = Massilia violacea
MSLASILANKLVMSNADLFGFVLTMPRRYKQYKIFKRNGIETRHIAQPSKEAKFIQRIIVEELRKLLPPIHKAATAYEPGTGIKANALRHLNSRYLLKMDFKNFFPSITPEFLFLAAESSGIKFDELDKILLENALFYKSTRRARLRMSIGAPSSPFISNFVMSGFDNDMFDYCAKRNISYTRYADDLTFTTNEKDVLFEIPKIVESTLINACFRKIRINSKKTIFSSKKYNRHVTGVVLTSDGQLSVGRARKREVSSLINSFKYGKLDEKERLHLKGLIAHVHHIEPDFIFKMRKKYSDEVVNSLMKPPTAG

SEQ ID NO: 4246 - protein, 315 aa, Alcaligenes sp.
  source 1..315: note = Related to JAKUDK010000002.1
MNLISKLTEKLMMTEEELLRFALTMPRRYKQYFIPKRNSNERRLIAQPSQEAKFIQRIIIAELRELLTVHKAATAYEKGTGIRLNAIHHVGNRYLLKMDFKNFFPSITPELLFMILRDCGIKYDDRDRTILEHALFFKSTRRSRLRLSVGAPSSPFISNFIMNIFDENLAAYCLQQGITYTRYADDLTFTCNKKGILFNVPDVVKQFSKEHCHGKIRINSSKTVFSSKAFNRHVTGIVLTNDNQLSIGRARKREIASLVNSFKYGHLDLDESSRLKGLLAYANHIEPDFIARMKTKYSADVIDAIFHLDSTQKDH

SEQ ID NO: 4247 - protein, 311 aa, unidentified
  source 1..311: note = Related to NZ_CP086370.1; note = Massilia sp.
MNFLQHMCDKLFMSQDELINFARTMPYRYKKYRVGKRNGSGYRIIAQPSSEAKFIQRILLKELRRLLPVHECAMAYEPGVGIRKNAMRHLHSDYLLKMDFKDFFPSITPDLFFFFTKKIGLELGEKDKELLENVIFWKSTRSSYLKLSIGAPTSPFISNFVMHEFDKSMNQFCISKAITYTRYADDLTFTSNAKNILFEIPSLVSGHLKKDCLGLIKVNTKKTVFSSKAFNRHVTGIVLANDNSLSLGREQKRTLSSIIHRFSLGKLSEKETSRLKGHLSFAHHIEPKFIDRMKKKYGNDLIDLIFLHSCE

SEQ ID NO: 4248 - protein, 308 aa, unidentified
  source 1..308: note = Related to NZ_CP048832.1; note = Janthinobacterium lividum
MMSILSFVSDALMIDKVEMMMFAQTAPHRYKKYFINKRNGAGVRLIAQPSKETKFIQRVVLSKLREILPVHRCAMAYEKSVGIKLNAMHHKDGRYLLKMDFRDFFPSIMPNMFLALAKDCGVEFSDEDKEFLSRILFFRSTRKSLLRLSIGAPTSPFISNFIMYKFDVAMAEYCQENGINYTRYADDVTFSSNVKGILFDVPDIVKKNLRQYCCGQIKINPLKTIFSSKAFNRHVTGIVINNDSSLSLGREKKRIYSSMIHKFSLGLMDEKERERLKGFLAYAIYIEPDFIERMKKKYSSDLIAAIML

SEQ ID NO: 4249 - protein, 314 aa, Pseudomonas sp.
  source 1..314: note = Related to DAFPVK010000010.1; note = Pseudomonas aeruginosa
MSITTALCEKMLTGKSELLSFSHTVPRRYKTYYIKKRNSTEMRLIAHPAKTVKFIQRLAVEELRNYFPIHHCATAYEKGTGIKMNAFQHRRNQYLLKMDFKNFFLSITPELFFRVSEDLGVVFDSEDKALLEGLLFWRLRRNSPLRLSIGAPSSPFVSNLVMYKFDAALCEICESMGVVYTRYADDLTFTTNRKDVLFAIPDIVRQNLKAQCYSKIRINSEKTVFSSKAFNRHITGVTITNEGRLSVGRERKRLVSALIHKFTLGALSDQQIENLKGQLAHVKNIEPDFVVRMKKKYSDEAIAKIFAWKREGFL

SEQ ID NO: 4250 - protein, 312 aa, unidentified
  source 1..312: note = Related to JAKFZQ010000002.1; note = Pseudoalteromonas sp.
MNFLSKLNDALMIGEKALLSFILTSPHRYKKYEINKRNGKGKRLIAHPSKQLKYIQRLLVKELEEQLPVHESAMAYKKGVGIKNNALAHKDSKYLLKMDFKDFFYSITPEMFFKATASKGLHYSESDKLVLSHLLFFRLNRNSPLTLSIGAPSSPLISNFSMNLFDEAISNYCAELEVTYTRYADDIVFSTNSKNALFSIPSKVEKTLKSECFGCVKVNTGKTVFSSKAHNRHVTGITISNEGKLSLGRDRKRKISSLVHKFGLGLLNVREINELRGLLAFASDIEPLFLARLRGKYGSKCLSSISNYKQEE

SEQ ID NO: 4251 - protein, 308 aa, unidentified
  source 1..308: note = Related to NZ_LR877185.1; note = Pseudoalteromonas sp.
MDIMLLLKTMLVISESEILKFSATAPHRYKKYRIPKRNGNGKRRIAHPSKELKFIQRLIVNKLESILPVHDSAKAYKKGVSIKDNALAHKNTRYMLKMDCKDFFPSIEPQLFFKVASSCGINFSNLDKELLSNLLFYKLTRRSRLKLSIGAPSSPLVSNFVMYFFDAAIYEYCSELGVNYTRYADDLTFSTNRKEVLFEFPKVISEQLKKHCNGSIKVNSIKTVFSSKGHNRHVTGITITNDSKLSLGRSKKRTISSLIHKYSLGILTDEQKDCLRGHISFAKFVEPAFFIRMEKKYGKEVIQSIFSD

SEQ ID NO: 4252 - protein, 313 aa, Vibrio sp.
  source 1..313: note = Related to NZ_LBGP01000014.1; note = Vibrio metoecus
MNLSEILASSLFMDDEEIRSFAASSPYRYKVYTIAKRNSQERRVIAHPSKELKFIQRLIVSLLEKRLPIHYTAKAYTKGLSIKDNAQPHMKSKYLLKMDLKDFFPSIKPSLFFRECRVHGVELSELDVELLEGFLFWKRRRATQLVLSIGAPSSPIVSNFILYRFDEVISEYCMRLGINYTRYADDLTFSTNEKDLLIKFPARVRKVLNHLYDGQIKVNLKKTVLSSKAHNRHVTGITLSNDGKLSVGREKKRKLSASIHHFIMKKLSVEEILKLKGELAHTTFIEPLFLERMIEKYGYDAINELKHFSDESS

SEQ ID NO: 4253 - protein, 313 aa, Vibrio sp.
  source 1..313: note = Related to NZ_SMJS01000013.1; note = Vibrio echinoideorum
MNLSELLESFLFMEEEEIVSFAASSPYRYKVYSIAKRNSEERRIIAHPSKELKFIQRIIVDQLAGQLPIHNTAKAYMKGLSIKDNARPHAKYKYLLKMDLKNFFPSIKPSLFFKECRLHGVELSELDIDLLEGFLFWKRKRATHLVLSIGAPSSPLVSNFILYRFDEAISRYCKSLGINYTRYADDLTFSTNEKDVLLKFPAKVRKTLNYLYDGQIKINLRKTVLSSKAHNRHVTGITLSNEGKLSVGRETKRTLSASIHRFTQQKLSDDDILKLKGNLAHTVFIEPDFLDRMIKKYGRNAIYELKHYTPSSN

SEQ ID NO: 4254 - protein, 313 aa, unidentified
  source 1..313: note = Related to BMPZ01000002.1; note = Shewanella gelidii
MNLSELLASLIFMDDEEIISFAASSPYRYKVYSIPKRNSEERRIIAHPSKELKFFQRVIVKQLSERLPIHSAAKAYTKGLSIKDNALPHANSKYLLKMDLKDFFPSINPSLFFKECRRHGIDFSDLDIELLEGFLFWKRRRATKLVLSIGAPSSPLVSNFILYKFDEDISRYCNSIGINYTRYADDLTFSTNKKDVLLKFPTKVRNTLNSLYDGQIKVNLRKTVLSSKAHNRHVTGVTLTNEGKLSVGREAKRNLSASIHSFTLQKLSNEEIFKLKGHLAHAEFIEPDFLERMVKKYGQEAIWELKHYTHSKN

SEQ ID NO: 4255 - protein, 312 aa, unidentified
  source 1..312: note = Related to NZ_BLRF01000013.1; note = Shewanella xiamenensis
MNLSELLASLLFMDDEEIISFATSSPYRYKVYSIAKRNSSERRIIAHPSKELKFIQRLIIQQLTVILPVHKAAIAYTKGLSIKDNARPHANSKYLLKMDLKDFFPSINPSLFFKECKKNGIDFSDLDMKILEGFLFWKRRRTTNLVLSIGAPSSPLVSNFILFKFDEIISNHCAILGINYTRYADDLTFSTNEKNVLLSFPAYVRKVLNTLYDGQIKVNLKKTVLSSKAHNRHVTGVTLTNEGCLSVGRNKKRQLSAAIHYFSLKKLSNEDIFKLKGSLAHSVFIEPDFLLQMERKYGKEIIFQLIHYALDD

SEQ ID NO: 4256 - protein, 313 aa, Vibrio sp.
  source 1..313: note = Related to JAEMEZ010000008.1; note = Vibrio cholerae
MSLFESLSMMLLMDEGELRSFALTAPYRYKVYTIAKRNSEERRVIAHPSKELKFVQRLIINQLEPKLPIHPSATAYIKGKSIKDNALPHVNSKYLLKMDLKNFFPSIKPELFFKECRHHGIELTDVDKSLLEGFLFWKTRRSNKLTLSIGAPSSPMVSNFILHRFDEKMSKLCLAEGVRYTRYADDLTFSTNKRGTLLSYQSKVRRIIGILYDGNIKINLRKTVLSSKAHNRHVTGVTLTNDGNLSVGREEKRKISAAIHHYSFNMLEHEDVLRLSGRLAHASFIEPEFLEKMIKKYGQDTISKLMKSGTEPV

SEQ ID NO: 4257 - protein, 309 aa, Vibrio sp.
  source 1..309: note = Related to NZ_CP026321.1; note = Vibrio campbellii
MNLFESLSAMLLMDEKELRSFALTAPYRYKVYTIAKRNSDDRRIIAHPSKELKFIQRLIINMLLPKLPVHSAATAYIKGKSIKDNAIPHASKKYLLKMDLKDFFPSIKPDLFFKECRHHKIEISETDKSLLEGFLFWKTRRSNQLKLSIGAPSSPFISNFILYRFDEEVSKLCRAEGVTYTRYADDLTFSTNKKGVLLSYQSKVRRIIGTLYNGNIKVNLKKTVLSSKGHNRHVTGITLSNDGSISLGREQKRKISAGIHHFSLNLLEHEDVLKLGGKLAHASFIEPSFLEKMIKKYGQEAISRLMKTT

SEQ ID NO: 4258 - protein, 316 aa, Vibrio sp.
  source 1..316: note = Related to VHSP01000001.1
MNLSETLSTVLFMDEAELRSFASSAPYRYKVYAINKRNSDEKRIIAHPSKELKFIQRLIIKQLQPRLPVHTVATAYIRGKSIKDNALPHAKSKYLLKMDLKNFFPSIKPDLFFKECKHQGVPLSDSDKELLEGFLFWKSRRAKGLSLSIGAPSSPLVSNFILYRFDKAMNQLCQSEGVTYTRYADDLIFSTNKKGVLLAYPPKVRRLIGTLYDGNIKINLRKTVLSSKAHNRHVTGITLTNDGRLSVGRDDKRKLSAAIHHYASHMLTPEEVQILRGKLSYAVFVEPELLERLIRKYGKQVIADLQKVNPTLNLKS

SEQ ID NO: 4259 - protein, 315 aa, unidentified
  source 1..315: note = Related to JACJEU010000008.1; note = Shewanella sp.
MSISKLLSKNLFMDELELRSFSLSSPYRYKVYKIPKRNSKELRTIAHPSKELKFVQRLIVRELGQLLPVSEAATAYMKGISIRDNALVHSNTRYLLKMDLKNFFPSITPEIFFNECLRAGVEFEQLDIDLLRGFLFWRPRRSKKLILSIGAPSSPLVSNFILNQFDENIINFCKTIGVRYSRYADDMTFSTDIKGVLFTFPLMIKKILKTLYGNSIKINQDKTVFASKAHNRHVTGVTLSNDGCVTVGRESKRKISASIHHFSLGILQPNNIIQLKGLFAHSTFIEPKLKNQMVEKYGIEIIERLMSYQPNDLKK

SEQ ID NO: 4260 - protein, 312 aa, Vibrio sp.
  source 1..312: note = Related to RKQY01000017.1; note = Vibrio crassostreae
MNISTLLSEHLFLDDIELRSFADSAPYRYKVYKIPKRNSEELRTIAHPSKELKFVQRLIAKELSSVLPLHQASMAYRKGTSIRDNALVHSNSSYLLKMDLKDFFPSIKPELFFRECSRYGLEWTDLDKTLLNGFLFWKPRRAKKLVLSIGAPSSPLVSNFVLYQFDEHIANYCKELGVNYTRYADDMTFSTDRKDLLFKFPIQVRKTLKALYGSSIKVNLNKTVFSSKAHNRHVTGVTLSNEGKVTIGRERKRVLSASIHHFSLGVLGHDEILKLKGHFAHLIFIEPLVKEQMIKKYGSSLIGRLTSYQGSP

SEQ ID NO: 4261 - protein, 309 aa, unidentified
  source 1..309: note = Related to NZ_FOHV01000012.1; note = Thorsellia anophelis
MNIEKYLSENLSINISALHSFSRTAPHRYKVYSIPKRNSKGERIIAHPSKELKFIQKMIIKKLTDILPLHESVISYRKKKSIVNNVIPHLNSSFLLKIDLKDFFPSIEPDLFFEQCKLLDIHFSDNDKKLLTGFLFWRNRKSSKLQLSIGAPSSPLISNFILYRFDDRITKLCASYNVNYTRYADDLSFSTISNSILLKLSEEISAMLQEIFQGRFLINHEKTIFSSKASNRHITGITITNSGEMSLGRNFKRNISACIHKFTLNQLPQEELLKLKGHLSFFKHVEPYFILRMESKYGKHILDKIRKSQ

SEQ ID NO: 4262 - protein, 312 aa, unidentified
  source 1..312: note = Related to NZ_CP088265.1; note = Leclercia sp.
MTNNLKSLRKLLQSTLFLSDDLINIFITTAPYRYKIYEIDKRSSDEKRKIAHPSKELKLIQRIIVKELSNMLPVHDCAYAYRTGRGIKENALIHSKNSYLLKLDLSNFFNSLTPEIFFAECRRNNIDFDKDNASIISNCLFYREHRKSSLKLSVGAPSSPFISNVIMYSFDQIIETECRKREITFTRYADDMTFSTSIKNTLIGFDELIKKVLFDLFKGAISLNQDKTILSSKAHNRHITGITISNNDNISLGRERKRLISSAIHRFSYGKLDQEAVDKLKGLLAFAYYIEPSFIATMEKKYGRETINKLKK

SEQ ID NO: 4263 - protein, 315 aa, unidentified
  source 1..315: note = Related to CP020501.1; note = Serratia marcescens
MSNNPKSFRKLLQSTLFLSDELINTFIATSPYRYKIYDIAKRNSDEMRRIAHPSKELKFIQRIIVKELSDLLPIHECAYAYRPGRGIKENALFHSKNSYLLKLDLSNFFNSLTPKIFFSECKRNNIFFDEDDTSIISNCLFYREHRKASLKLSVGAPSSPFISNAIMYSFDKRIEEVCNNKGVSFTRYADDMTFSTNTKNVLVGFDRIVKEVLFDIFKDAIFLNNDKTIFSSKAHNRHITGVTISNDDNISLGRDRKRYISSAIHHFSLDKLSENEIEKLKGLLAFAEHIEHSFVDRMVKKYGSDVMKKLKKTDK

SEQ ID NO: 4264 - protein, 312 aa, Pseudomonas sp.
  source 1..312: note = Related to NZ_JADBHI010000015.1; note = Pseudomonas arcuscaelestis
MLILEELASKLLISTAELVKFVNTAPYRYKVYSIPKRSGRGLRTIAQPTEVLKVIQRMVLDSYLKGLPIHDCATAYRDGLSIKENAAVHLGSKYLLKMDFSDFFPSIGPSDLITHIKKHRKDIAREDAYAVRKIFFWATKKDPAHRLSIGAPSSPFISNTLMYEFDCKVFDECTRLGVRYTRYADDLTFTTNVRGILFELPDIVTKTCAEIGYPTLRVNQDKTVFSSKGNNRHVTGLVLTNDNKISLGREKKRYFRSLIHRYSLGGMSSEDIYALKGRLAFAKHVEPTFYYAVVQKYGAELIKSIMEYQILK

SEQ ID NO: 4265 - protein, 312 aa, Pseudomonas sp.
  source 1..312: note = Related to NZ_CP025261.1
MLILEELASKLLISTAELVTFVNTAPYRYKVYTIPKRSGRGVRIIAQPTEVLKVMQRMVLDSYLKGLPVHDCATAYRDGVSIKENATAHLDSKYLLKMDFSDFFPSISPSDLISHIKRHRGSVSREDAYAVKKIFFWARKKDPLHRLSIGAPSSPFISNTLMYEFDCKVFDECARIGVRYTRYADDLTFTTNTQGVLFGLLDIVNKICAELAYPTLRINSDKTVFSSKGNNRHITGLVLTNDNKVSLGRERKRYFRSLIHKYSLGELSGEDIYALKGRLAFAKHVEPTFYSAVIQKYGAELIASIMVFQILE

SEQ ID NO: 4266 - protein, 316 aa, Pseudomonas sp.
  source 1..316: note = Related to NZ_CP067098.1
MTILAYLSNKLLISSAELIGFVNTAPYRYKVYPIPKRSGRGVRIIAQPTDVLKVMQRMVLESFLVGLPVHHCATAYRDGVGIRENATEHLKSKYLLKMDFSDFFPSIGPKDLILHIKKHRGEISKEDAYAVKKLFFWTKKKDPVHKLSIGAPSSPFISNTLMYEFDCRIFEECARLEISYTRYADDLTFTTNKQGILFELPSLVVRICREIDYPTLNINADKTVFSSKGRNRHVTGLVLTNDDKISLGHEKKRYVRSLIYRYSLGGMSSDEIYSLKGMLAFAKHVEPSFYQSVVRKYGEAVVGSIVSFQLIKQVAQ

SEQ ID NO: 4267 - protein, 312 aa, Pseudomonas sp.
  source 1..312: note = Related to DORR01000095.1
MTILTELSQKLLISSEELKEFINTAPYRYKVYPIPKRNGRGVRVIAQPTEVLKAMQRMVLDDFLAGLPVHACAMAYRDGLGIKDNASLHVKNQYLLKMDFSDFFPSIGPDDLISHIRRHREGIGREDAYAVKKLFFWARKKDPTHRLSIGAPSSPFISNTLLYDFDCRVNDECTRLGIIYTRYADDLTFTTNNKGVLFGIPDFITHICKLVDYPTLKVNHEKTVFSSKKNNRHVTGLVLTNDNKISLGHDKKRHIRSLIYKYSLGGIPSEEILALKGMLAFAKHIEPVFYQAVMRKYGFHVLDSIMSFQPKE

SEQ ID NO: 4268 - protein, 313 aa, Pseudomonas sp.
  source 1..313: note = Related to NZ_JAHSTY010000001.1; note = Pseudomonas azadiae
MTILADLAKKFLISSVEIAHFVNTAPYRYKVYTIPKRSGRGVRVIAQPTDVLKVMQRMVLETYLVGLPVHNCAVAYKEGQGIKENAIAHVNNQFLLKMDFSDFFPSIGPQDLISHIKKHKGQISREDAYAVKKLFFWARKKDPTHRLSIGAPSSPFISNTLLYEFDCLVSHACSKLGVVYTRYADDLTFTTNEQGVLFDVPVFIFKICDAVEYPRLKVNSDKTVFSSKANNRHVTGVVLTNDNKISLGHARKRQIRSLVYKYSSGEMTTEEVYSLKGMLSFARHIEPTFFQGLIRKYSYEVVGSIVRFESIKA

SEQ ID NO: 4269 - protein, 321 aa, Pseudomonas fluorescens
  source 1..321: note = Related to LKEF01000044.1
MSILELLSQKLMMSSSELRLFIKTAPYRYKVYPILKRSGKGIRLIAQPTDVLKMMQRMVADESLSGLPVHACATAYREGLSIKDNAEAHAKNQYLLKMDFSDFFPSMGPSDLVKHIEKHKGSITAEDAYMVKKLFFWARKKDPIHRLSIGAPSSPLISNTLMYDFDCALQEYCDKLSITYTRYADDITFTTNTKEILSAIPNYIEGLCERISYPKLKINNQKTVFSSKKNNRHVTGLVISNEDKVSLGRERKRYIRSLIHKSIAEAMTSEEIYNLRGLLAFSKHVEPTFYQSVIKKYGQPAIYFIETFQSAQKAAKVINKT

SEQ ID NO: 4270 - protein, 311 aa, Pseudomonas sp.
  source 1..311: note = Related to FOQB01000015.1; note = Pseudomonas syringae
MSILELLSQKLMMSTSELRSFIKTAPYRYKVYPVPKRSGKGVRIIAQPTDVLKMMQRMVADEFLSELPIHACATAYREGLSIKDNAEAHVKNQYLLKMDFSDFFPSMRPSDLVKHISKYKGSITAEDAYMVKKLFFWARKKDPIHRLSIGAPSSPLISNTLMYEFDCILQEYCDKLSVTYTRYADDITLTTNIKGVLLGVPNHVKELCGHIAYPTLKVNDAKTVFSSKKNNRHVTGLVISNEDKVSLGRERKRYIRSLIHKSVVGDMTNEEMYNLRGLLAFARHIEPTFYDAIAKKYGLSAIYFIETFQPA

SEQ ID NO: 4271 - protein, 325 aa, Pseudomonas sp.
  source 1..325: note = Related to NZ_CP077085.1; note = Pseudomonas shahriarae
MSILESLSQKFMISANELRSFIKTAPYRYKVYPIPKRSGKGFRLIAQPSDVLKMMQRMVLEEFLSELPVHSCAAAYREGLSIKDNAEAHAKNQYLLKMDFSDFFPSMAPADLINHIVKHKGAITSEDAYMVRKLFFWARKQDPTYRLSIGAPSSPFISNTLMYSFDCVLQDYCEKIGVTYTRYADDITLTTNVKGLLLNMPNYVRSICKEIAYPTLKVNEQKTVFSSKKSNRHVTGLVINNENQISLGRERKRYIRSLIHKSSLGGLTDEEMHNLKGLLAFAKYIEPTFYKSVLDKYGLPALYLIETFQSNPKVIESLEIKRQFP

SEQ ID NO: 4272 - protein, 311 aa, Pseudomonas sp.
  source 1..311: note = Related to NZ_VDNQ01000002.1; note = Pseudomonas oryzihabitans
MSILESLANKLLIKPGELFSFIKSAPYRYKVYSIPKRNGRGMRIIAQPSEALKVMQRLVLDDYLMGLPIHNSATAYIVGKSIRDNALRHANNPYLLKMDFSEFFPSISPADLSLHVKKYKGVVSPEDEFMLRKLFFWAQKHDTRHRLSIGAPSSPFISNTLMYEFDSKLSRACSEKEVVYTRYADDLTLTTRNKDVLFSMPEFIAGLCQQIEYPRLQINSEKTVFSSKKHNRHVTGIVINNKNELSLGREKKRFIKSYIYRFSSDELSSVEIIQLRGLLAFAKHVEVSFYNALIAKYGLETVSRIERYQPV

SEQ ID NO: 4273 - protein, 312 aa, unidentified
  source 1..312: note = Related to NC_015554.1; note = Alteromonas naphthalenivorans
MDIYNALSELLLIDEVEIVSYINKAPHRYKVYKIPKRNGSGSRVIAQPAKELKVLQKSALNMPLLDLPVHKSAFAYMEGIGIKQNAQKHSKNQYLLKMDFSDFFPSIVSSDLLSHVEKHKGKLEIKEKVALKKLFFWCVKGSTEHRLSIGAPSSPFLSNTILFDFDTIVNDYCTQEKITYTRYADDLTFTTNVSGVLFELPTYIEGVLKKLEYPTLKINHSKTVFSSKKNNRHVTGLVLTNDNAISLGRDRKRYIRSLVYGFCNKKLSDDESIKLRGLISFAKHVEPTFFRSLVKKYSLAVISDIERYYPDN

SEQ ID NO: 4274 - protein, 311 aa, unidentified
  source 1..311: note = Related to JADZHD010000030.1; note = Shewanella algae
MDIYESLSEMLLIDESEIVEYINKAPHKYKVYEIPKRNGHGTRTIAQPARELKVFQKLSLEHPLLNLPVHDAAFAYRDGIGIKQNAEVHAKNQYLLKMDFADFFPSILDTDLITHIEKHHGKIDQRNKTAISKLFFWRKKRDIINRLSIGAPSSPFISNTLLYDFDEEISNICTPLMITYTRYADDLIFTTNEPGILSNIPNVVVETLKSIKVPTLRINPQKTVYSSKKNNRHVTGLVLSNDDKVSLGRTRKRYIRSLVFQYHSENLASDDIVKLKGLLGFAKHIEPTFYSSLINKYSLDLILSIEKYDPA

SEQ ID NO: 4275 - protein, 308 aa, Chromobacterium sp.
  source 1..308: note = Related to NZ_CP029554.1; note = Chromobacterium phragmitis
MSIIKYLADQLLLSEEDIRLFIKKAPYKYKVFAIQKRNNHGERIIAQPAKELKSIQQMVLIEFLKELPIHSCAMAYRHGISIKDNAKVHSSNTYLLKMDFADFFHSIRPEDLIEHYEKYKAKLSADDRVSLKKIFFWASRKPPEIKLSIGAPSSPFISNTILFDFDSIVSKVCIAHEITYTRYADDLTFTTNIRDTLFDIPNLIARVIKDIDYPRLKINHTKTVFSSKRSNRHVTGLVLTNENQISIGRSMKRKIKTMIFLYSKKNLSPDDIKFLRGYLSHIHNVEPTFLHSLTKKFGTRIVTSIFHQ

SEQ ID NO: 4276 - protein, 314 aa, unidentified
  source 1..314: note = Related to NZ_KB913033.1; note = Hydrogenovibrio halophilus
MSLIDFLKEKTGVHKSTLKSFVRSAPHRYKTFPIDKRNSDKKRLIAQPSRLLKKIQNLVVSEYEFLINLPIHPCVMSYVKGKSIRDNALVHKDSSYLLKMDFKDFFPSIKPSDLIEHIEKHKRVSLDDDEKDYLSRLFFYSQSRKEEIVLSIGAPSSPYISNTVLYDFDVTIAAECDSTGVKYTRYADDLTFSSNDKQSLINLHNAMESILSSLQYPKLALNTNKTTFLSKRVNRHVTGLVINNDGGVGIGRKKKREIKSLVHRYLNHSLEDERHPYLRGYLAYIWGVDKQFVAQLEAKYEISILDVVKQLEAD

SEQ ID NO: 4277 - protein, 313 aa, unidentified
  source 1..313: note = Related to JAKISK010000029.1; note = Thiomicrorhabdus sp.
MSIVDFLVEKLVVPKSIVETLVLTAPHRYKTYEVTKRNGKGKREIAQPSKELKYIQRIVLKEFDLMQNLPIHDSAMAYRKNIGIQDNALMHKDNQYLLKMDFSNFFPSIVPTDLIKHIEKYKGLKLDEEDIKCLSRLFFYTKEKGSGLVLSIGAPSSPYISNTLMYDFDILLQKKCEQKNIVYSRYADDLTLSTNVPKILFDFPAVVNGILKEILTPKLLINDSKTVFLSKGTNRNVTGLVISNEGKVTIGRDKKREIKSMVYKYSLSHQLDPESEIPYLKGYLNYINGVEPSFLKSLEKKYGIDLIKLIRNS

SEQ ID NO: 4278 - protein, 314 aa, unidentified
  source 1..314: note = Related to BLYD01000277.1
MSILEGLSKKILLNEPDLWKFISSAPHRYKKYKIEKRNGKGFRDIAQPSKELKFVQNTAVFGIDLFQNLPIHHSAKAYIKKINIKDNAEAHKLNSYFLKMDFSNFFPSIKPVDFINHIEKHKNLTLSEKDKLIISKLFFYKKYRKSELVLSVGSPTSPYISNTLMYDFDDIVYKYCIEKKITYTRYADDLTFSTMTKVDLFEIPVFIKSTLNELLYPRILINNDKTVFLSKRTNRHITGLVITNDGKVSIGRKKKRYIQSLVYKYCNSNISEESTSYLKGYLAFCLGIDVDFVISLEKKYGKENIDSIRGLNKG

SEQ ID NO: 4279 - protein, 313 aa, unidentified
  source 1..313: note = Related to nan
MVTIIQDLSSLLSIDAERLRKYIATCPHRYKVYGIPKRNGSGIRTIAQPAKELKTLQKLVYEKYLESLPVHEACTAYRKNISIKDNALAHVKNNYLLKMDFLNYFPSITPKDLIKHIEKHLNWNEWEEDKFVIERLFFYVRNRGEGLRLSIGAPTSPFLSNTILYEFDSKITELCNLQNITYTRYADDIAFSTNKKDILFDFAGVVADILSQCEYPSISINPDKTVFLSRKGNMHITGLVLSNDRKVSIGRSKKRYIKSLVYRFLNNNLTEDEKLYLSGYLSFCVSVEPDFIEKLKSKYGANTINELMGRQSG

SEQ ID NO: 4280 - protein, 324 aa, Pseudomonas sp.
  source 1..324: note = Related to NZ_KE384408.1; note = Pseudomonas azotifigens
MNIVSYLSQTLYIAENEVEKFINTAPHRYKQYQIPKRNNNGVRLIAQPAAELKIMQLLAIAQFQQFLPVHSSATAYCRGKGIMDNAKAHAKNSYLLKMDFKDFFHSIKPSDLIRHCSQHMGGIDDATAKQITKLFFWTPKRTSSLILSIGSPASPFISNTVMYQFDCLMSEICSEKGIVYTRYADDITFTTNVKGLLFQIPSLVIDICKKIDYPRLSVNSEKTVFSSKGNNRHVTGVTITNEGKLSLGRHKKRKIKSLVFDCLNNKLDSAERRSLSGLLAHAKHIEPSFFLSLTKKYGYSEIAKIASNKPTLEVVVANPLTICD

SEQ ID NO: 4281 - protein, 316 aa, Pseudomonas sp.
  source 1..316: note = Related to JACAOT010000014.1; note = Pseudomonas tolaasii
MKIISFLSKTLYLPEHEVTAFINTAPYRYKEYSIPKRNGTGTRQIAQPSSEVKVLQTLAIEKIKNNLPIHSSAMAYREGLSIKDNASMHAKNKFLLKMDFENFFHSLLPHDLLLHTEKYYSSISEEDKKTLSKLFFWATKRDRKLKLSIGAPSSPFISNTLLYDFDEAVSNVCRPLDITYTRYADDLTFTTNTNKILFEIPDLIQKICETLTYPKLKINKGKTVFSSKKHNRHITGITITNEATLSLGRHRKRHIRSLVHQHMLGKLSSKQITELKGLLAFSKHIELTFYKTLVNKYGFKTLLDIQATQTKNSDTP

SEQ ID NO: 4282 - protein, 311 aa, unidentified
  source 1..311: note = Related to CAJHIV010000001.1; note = Methylomonas albis
MILQFLSNLLNLEKREIIKFIASSPYRYKVYSIPKRKKGEFRLISQPSSQLKFIQKATLDHFFSDLPVHSSAMAYIKGKGIKDNALMHAGNAFMLKMDFQDYFPSIKPEDFVNHIKSSSQLRFSEEDEFVVCRLFFWSPVRGKPLVMSIGAPSSPFISNTVMYPFDEKVDSYCKNNGVIYSRYADDLVFSTCSPQILSLVPKFIEETIRLLSYPKLKINREKTVFSSKKHNRHITGLTITNESTVSIGRARKRYVSSLVHRYTLSQLDNAQIVYLKGYLAFCSDVEITFVKRLEKKYGESVISELLKNTGG

SEQ ID NO: 4283 - protein, 313 aa, unidentified
  source 1..313: note = Related to nan
MNILNKVSEMSGIPQDMCAKFIISAPMRYKRYEIPKRNGSGTRLIAQPSKIVKPLQKICIDQLRKTLPIHSAALAYEVGTSIKKNANKHRYNRYLLKMDFTNFFPSIKPDVLLRTFEEHGLVITEEDKFVLSSLLFWKPRRRAPNLELSIGAPSSPFISNAVMYFFDVAVTEHCSNRGIVYTRYADDLTFSTNIADTLFEIPNFLYDLVQQTNMSFLRFNTDKTVFASKKVNRHITGVTITNDGRLSLGRKRKRKISAMIHRFSLQQLRSNDEINELKGILGFAKHIEPIFVRRMCDKYGKDTIVKIQKFNSD

SEQ ID NO: 4284 - protein, 313 aa, Vibrio sp.
  source 1..313: note = Related to NZ_QLYY01000008.1
MNILDKISELSGIPQDMCARFVVSAPVRYKRYEIPKRNGGGTRLIAQPSKSVKPLQRVCISELRGVLPIHGSALAYEAGTGIKRNANKHRYNRYLLKMDFTNFFPSIKPDVLLSTFEQHNVALTEVDKFVLSSLLFWKPSRSESTLELSIGAPSSPFISNAVMYFFDVAVTEYCERKGITYTRYADDLAFSTNTADILFELPKFLNELVQQPSMSFLRFNTDKTVFASKKVNRHITGVTITNDGRLSLGRKRKRKISSLIHRFSLQQLRCDEEVNELKGMLGFAKHIEPIFVRRMCQKYGEEIILKIQKFNSD

SEQ ID NO: 4285 - protein, 313 aa, Vibrio sp.
  source 1..313: note = Related to JAHVKH010000015.1; note = Vibrio hangzhouensis
MNILDKISEVSGMPRTMCLRFIVSAPIRYKRYEIPKRNGRGVRLIAQPSKSVKPLQKACIGELRDILPIHPAALAYEVGTGIKRNANKHRYNRYLLKMDFTDFFPSIKPDVLLSTLEQHNVELTEEDKSVLSSLLFWKPTRGDSNLELSIGAPSSPFISNAVMYFFDVTVEDYCKQRGIVYTRYADDLFFSTNASDILFDVPRFLSGLVQKPNLAFLRFNNDKTVFASKKVNRHITGITITNDGRLSLGRKRKRKISSLIHRFSLQQLTNPEEINELKGLLGFAKHIEPIFLIRMYNKYGRDTILKIQKFNSD

SEQ ID NO: 4286 - protein, 312 aa, Vibrio sp.
  source 1..312: note = Related to MSCG01000002.1; note = Vibrio splendidus
MNILNQISEKTGMPKRLCASFIITAPKRYKRYEIPKRNGRGVRLIAQPAKSVKLLQRICVESLRKSLPIHQAATAYEVGTGIKMNANRHRFNKYLLKMDFADFFPSITPEVLFNTFESHGVELSDENQYILKNLLFWKPTRDSSLELSIGAPSSPFISNAVMHEFDSKVTEFCDSLGVRYTRYADDLVFSTNTPNVLFDLPEVLGSLLSEPSLSFLRFNSDKTVFASKRNNRHITGVTLTNDGRLSIGRKRKRRLSSLIHRYKLGQLTASKDIEELKGHLGFAKHIEPIFIARMTKKYGIETIQSLQKFKSE

SEQ ID NO: 4287 - protein, 315 aa, Vibrio sp.
  source 1..315: note = Related to NZ_CP049331.1; note = Vibrio ziniensis
MELINKISTITGVPKGTCISLIVTAPRRYKRYEIPKRNGSGTRLIAQPAKSIKTLQRVCIEILRDYLPVHGVAMAYEVGVGIKRNANRHRYHRYVLKMDFSDFFPSITPEVLLNTISRHGVVLSDIDKMVLTNLLFWKPTRHNDNLQLSIGAPSSPFVSNAVMFFFDSMLNEKCRQLGITYTRYADDLIFSTNLKDVLFEVPSLLSRDVLANTEFNFLCINEGKTVFASKRNNRHITGVTITNDGRLSIGRKRKRVLSSLIHKFTTGELKDPIEIMKLKGLLGFAKHIEPIFIQRMAVKYGSEVIEQLKKYPTKI

SEQ ID NO: 4288 - protein, 310 aa, Vibrio sp.
  source 1..310: note = Related to RHPA01000002.1; note = Vibrio cholerae
MSYLEQFTEITSLSSVEILNFVKSAPYRYKQYYIPKRSGRGVRLIAQPSKEVKYMQYIGKQLILDELPVHAAAYAYQKGASIKANASQHVSNKYLLKMDFSDFFPSIKPPLLLDVIQSKVGTLSTHDTTLIKRLFFWQRERISPLQLSIGAPSSPLISNVVMYDFDEFIHAYCSERGINYTRYADDLSFSTNERGLLFHIPELVSSYLTENEHLGLSINSGKTKFSSKKHNRHVTGLVLNNENQLSLGRERKRKIRTLVFLFSQSALDLDETYHLKGLLAFALNIEPNFILRLRSKYSSEMIDSIFRYQE

SEQ ID NO: 4289 - protein, 310 aa, Vibrio sp.
  source 1..310: note = Related to AAXPSE010000001.1; note = Vibrio vulnificus
MSYLENFTEITSLGSQEILDFVKSAPHRYKQYTIPKRNGRGVRLIAQPSKEVKYMQYIGKQLILDELPVHSAAYAYQKRTSIKANASQHIANKYLLKMDFSDFFPSIKPPLLLGVIQRQVGELSADDITLIKRLFFWQRDRMSPLQLSIGAPSSPLISNVIMYAFDEYLYSYCAQRGISYTRYADDLSFSTNERGLLFHIPEVVSNYLSTNEHLGLSINTTKTKFSSKKHNRHVTGLVINNDDQLSLGRKRKRKIRTLVYLFTQSALETDEVFHLKGLLAFASNIEPEFILRLKSKFSNEVVDSIWRYQE

SEQ ID NO: 4290 - protein, 311 aa, unidentified
  source 1..311: note = Related to OBMM01000001.1; note = Thalassospira xiamenensis
MQPSNLICKRFMMSKAELYHYANTCPHRYKTYSIDKRSGGKRKISQPSRDLKAVQRFVLSEYLEKRLVIHSSAKAYRVGVSIVDNAKEHVAQKYLLKMDFSNFFPSILSSDFMKLLRRDKIVDSEEEVKLLSKIFFMNDSGSLRLSIGSPGSPSISNAIMYDFDEVISKKSIDNSIFYTRYSDDITFSTNEKDILFSWPNVVSDVLRGIDFPKLKINTDKTKFSSKKFNRHVTGITLANQGYLSIGREKKRLIRARVHNAMNLDDEEILSLSGDISFACQVEPNILEKLWRKYPDQMNLILRRKEKTNQLE

SEQ ID NO: 4291 - protein, 304 aa, unidentified
  source 1..304: note = Related to GG703517.1; note = Ruegeria sp.
MTVSDLIRRRFSFSPAELRVYAQTCPYRYKTYPIDKRNSQQKRWISQPSKDLKAVQRLVLSEFLGPKLTVHDSAKAYKSDTNILDNAGPHLKNRYLLKMDFRDFFPSIRAQDFVRYLLGSGIVQDEAEANLLARIFFKYCDGELCLSIGSPGSPVISNALLFPFDENISDICQKNIVAYTRYSDDLTFSTNTRDLLFSWPQKVEEALTALQSPKLELNREKTVFSSKKFNRHVTGITITNDDKASIGRDKKRALRTRIYNAPNLNEEELARLRGYISFVNQVESDMISKLWKKYPKQMGRILRQ

SEQ ID NO: 4292 - protein, 314 aa, unidentified
  source 1..314: note = Related to AMRK01000002.1; note = Celeribacter baekdonensis
MSDIIQRIKRRFAFSDSEFNTYLNTAPFRYKNYTIPKRSGGVRLISQPSKDLKSIQRFILSEFLLPKLEIHECATAYREERNIADNARPHLQNQFLLKMDFKDFFPSIRAIDFSQYALRRSIVESEEEATMLGKIFFKSTNNGLRLSIGSPGSPPISNAVMINFDKQISSMCRDSGIAFTRYSDDLTFSSNSKGILFGIPNQVQEVLEVIQRPKLMINAEKTKFSSKKFNRHVTGITITNDGLMSLGRQTKRRVRSEVYNAPSMQPKERQRLRGYLSYAKQFEPSFVIKLWEKYPAQMALIKNSAFTKRNGDPQ

SEQ ID NO: 4293 - protein, 318 aa, unidentified
  source 1..318: note = Related to LMCG01000004.1; note = Pseudovibrio sp.
MGAGERVVTIIDHIQHEFGFSRNELVAYAGTCPHRYKTYNIRKRNGDPRTISQPSKDLKAVQRFIVSRFFEDQFVIHEAATAYRKGVSIVDNAKPHLNSSYLLKMDFKNFFPSIKSDDFVTYLVEMGIYEDEARILSRIFFKKERDELVLSIGAPSSPIISNALLHEFDERVAQYSKERSLNFTRYSDDITISTNVENVLFDVPNYINELLGDIRLPRLRINEEKTVFSSKKFNRHVTGITISNEGQASLGRSKKRRLKAAVHSADKLTEIERFKLRGRLAFAKQVDPKFIELLHAKYPKQISLINSAQWAWDLSDFL

SEQ ID NO: 4294 - protein, 313 aa, unidentified
  source 1..313: note = Related to NZ_VFSV01000069.1; note = Paenimaribius caenipelagi
MKPTQILKKELFLADIELKRYVSSCPRRYKRYPIDKRSGGKRIIAQPTPDLKAVQRLLVSQFLEKCLQVHECAMAYQVGKSIVDNAKIHSKNSYLLKMDFKDFFPSIRSKDLCHLLVAQGHLDQGDEIELRTISRVFFMLENDELVLSVGAPSSPFISNALLFEFDTIADEYCKEHGISFSRYSDDLTFSTNIKDALFAVPGFIKEALKAMEYPSLLVNDGKTVFSSRAHNRHVTGITLTNDGKLSIGRKKKRSIRTQVFLFSASRLSTQEARSLQGYISFARSVDAAFYSSLLSKYPVAMAQLEAANFGEIN

SEQ ID NO: 4295 - protein, 316 aa, unidentified
  source 1..316: note = Related to JAKCFH010000010.1; note = Rhodovulum sulfidophilum
MRPKDVLRQNLFISGSELDRYLSSCPRRYKHYKIDKRGGEKDSKRPISQPTPELKGLQRTLLDEFLLERLPVHEAAMAYKKDTSIADNAKVHARNPYLLKMDFENFFPSIKSFDLCSLLIDTGKLDKDDQLDLRIISRVFFMREGPELVLSIGAPSSPFISNAMLFNFDSIVTEHCSSLNISYSRYSDDLTFSTKEKGILFDIPTFIRETLKLIKYPKLSVNEKKTVFSSKAHNRHVTGVTLSNSGEISLGRSKKRSLRTQVYLFSRGQLLPKEAAALQGYIAFSNSVEPKFVESLLEKYPEAMRALAAARFSLDD

SEQ ID NO: 4296 - protein, 306 aa, unidentified
  source 1..306: note = Related to FONF01000022.1; note = Marinobacter sp.
MSLIEQLSKRTNLPLDSIQKYAKTCPVRYKVYSIPKRNGKGFRVIAQPSAPVKALQRELVSILEDYILVHECAMAYREGVSIFDNASKHKDNDYLLKMDFKDFFPSIDPATVLGLIMSQCPVAEKSDTLYLLSILCRKPRGSDRFIVSIGAPSSPFISNAYMYVFDDILSKLLVDKGISYTRYADDLTFSTRKKGALFEVPALVKKVLVDSGYRTIRVNEEKTVFSSKKHNRHVTGLVLTNDGRVSLGRSKKREIRTLIFKYLHGELSKPEVESLKGLASHARHIEPEFWERLKSKYGIDDSFFKL

SEQ ID NO: 4297 - protein, 320 aa, Desulfovibrio desulfuricans
  source 1..320: note = Related to NZ_CP072608.1
MLNSALITYFSVKTGLDKSVCLHVALSAPKRYKAYSIPKRNGEMRTIAQPTPVVKHLQRLALRLFDGKLPIHKAATAYRKGSSIVSNVSPHLGNSFILKTDFNSFFNSIKPQDLDLLDLGGTIGLKSEEVYILKHLFFWLPKGASDFCLSIGAPSSPMLSNYLLFQIDTKIYNYCIEHNIEYTRYSDDITLSTDKKFILKDAYDCINGICTRTSSPSLVINQRKTVFTSKKHKRFITGLVISNDEKISLGREKRRLIKSILFNFVNNKETTIQSLEQLNGLLAFAAHIEPEYVMRLCKQYEAHLSHLYDKGVFLIRYASK

SEQ ID NO: 4298 - protein, 311 aa, unidentified
  source 1..311: note = Related to JAFXQN010000116.1; note = Alphaproteobacteria bacterium
MVIDEILKKIIYPRPMLEYLILTAPRRYKVYDIPKRNGKGSRTIAQPTKLIKAIQRECIEYLSKLFPVHFTATAYVKGKSIRDNALKHKNNRFLLKMDFKNFFNNITEYDFRKYIQKHRTDYNISWTEKDCEDLCNIFFWCPKNTYKRILSVGAPSSPSLSNILMYDFDAIIYKYCSENDVVYTRYADDLTFSCNKAFKLKDVEKYVTDISKAIDSPTLVINEDKTVHTSKKKNRHVTGITITNDGQLSLGYKRKIVLKSLIHKYANNELDENSILYLKGMLNFATSIEPDFIQRMKNKYGEDTVSAILRY

SEQ ID NO: 4299 - protein, 303 aa, Vibrio sp.
  source 1..303: note = Related to NZ_CP014041.1; note = Vibrio alginolyticus
MLLELISKSTLIEKDQVLDIANKASISYARFTIPKKDGSQRLIYQPSMAIRALQKVVYDEVLDKLPVHDACYAYRKKRSLKDHANVHKNNNYLLRIDLKDFFESITRSDIEKYCHESISKVFPHFNEEDFKLMTNIICRKDTITIGSVTSPSLSNSICYTLDERISRLAKSHGVKYTRYADDMFFSTSNKNVLCIIQKGVSGIIKGLEYPTLTINKKKTKHSSKKNRMSVTGVVITLDKKLSIGRGNKRFIREQVYKWSSLSSEDKSYLSGYLSFVKSIEPSYINRLCNKYSSQKIQEILRFS

SEQ ID NO: 4300 - protein, 303 aa, Vibrio sp.
  source 1..303: note = Related to NZ_AEIU01000111.1; note = Vibrio caribbeanicus
MLLELISKNTLIEKDQVLDIANKASTLYARFTIPKKDGSERLIYQPSMAIRALQKVVYDGVLDKLPVHDACYAYRKGRGLKEHANIHRNSKYLLRIDLKDFFESITRSDIEKYCNEYVSKVFPIFNEGDFNLMIDIICRKNTITIGSVTSPSLSNSICYNLDEKISRLSDSYGVKYTRYADDMFFSTTNKNILKIIQKEVSSIIKKLDYPKLTINNKKTRHSSKKNRMSVTGVVITVDKKLSIGRDKKRFIRGQVYNWKNLSIEEKSYLSGYLSFVKSVEPSYINRLCDKYSSHVIQEILRFS

SEQ ID NO: 4301 - protein, 307 aa, unidentified
  source 1..307: note = Related to JAKEVJ010000129.1; note = Shewanella sp.
MILEEIQKRTFLDIDYIRSIINRSNSLYSKFYIFKRDGSKRWIHHPKKELKLIQRVVNDNILDKLKIHPSSTAYRRGCSVKKNALLHVNNDFLLRMDFKSFFDSISYDDIENFLDKEFSISEPNWTYSDTKLLAKLLCYKNSLVMGAVTSPCISNAICYKLDKKLSGLCQNHNVIYSRYADDLYFSTSERNTLFFIEKEVLKIVANLELPSGLTINKNKTFHSSRKRKKQVTGLILTHDKKLSIGRNKKRTVKSKVHNWATLNENERSYLSGYISYIHSIEPQFINRLCLKYGADLVGEIISYNSKL

SEQ ID NO: 4302 - protein, 312 aa, unidentified
  source 1..312: note = Related to PBKZ01000009.1; note = Rheinheimera sp.
MKLILDVIHSKTFLEVDYIIILLGKVNSLYSRFSIDKKNGSGRRTVYHPSKELKAVQRVINDHIITKLDTHDACKAYKLGCTTKKNAEPHLNSRFLLRMDFKSFFESIEYKDVHKFCQEFIKKHFIEWTDEDSEIFSKFVCYKGRLVMGSVTSPALTNAMCVGLDNLLYEKCESIGVKYSRYADDLYFSTDAPNILKKLEKDVYKIVSSLKIPSSLKINSDKTYHSSRKRRMIVTGLVITNSGTISVGRGKKREIKSLVFNWESLDEEFKKYTSGYLSYIKSVEPEFLNNLCLKYGAEKIRVVMTYNQSLKI

SEQ ID NO: 4303 - protein, 306 aa, unidentified
  source 1..306: note = Related to QGUA01000011.1; note = Idiomarina loihiensis
MLLELIKAKTLLDEDYIKETCLNSNALYSSFYLPKKNGKLRKIYHPHKELKAFQRILHDNVLAYSKVHSASMAYSSGSSIKRNAERHSEKKFLLRMDFRSFFESISSKDVFQFCEKTLSNQFSGWDRFDSDMFTNFVCYKNSLVMGAVTSPSIANLILYEFDDSLSTFCSSIGVTYTRYADDMYFSTNTRNVLKEVERRVYKIVEKLQLPNDLKINTSKTYHSSKSRRRLVTGLVLTCEGSVSLGRKKKREVRSLIFKWDSLTDEEKQSLSGYLSYAKSIEPDFINRLCMKYGSNIVKNVLEYSPE

SEQ ID NO: 4304 - protein, 306 aa, unidentified
  source 1..306: note = Related to LZFG01000013.1; note = Photobacterium phosphoreum
MLIKLISEKSLIDEDFILDFANKQQVNYFKFQIEKRTGGMRTIYHPSKELKYIQKILLDDVISSLPIHNCCYAYVKNRNIHTHAIQHKNAKYLLRLDFRNFFESISYKDIYEFCETTMGIYNKGWTSSDSEIFSKLVCYKDRLTIGSVTSPSLSNAICYDLDIKLSQLALSKSVKYTRYADDMFFSTKIKGVLYALQNDINNIISTNTLPSKLKLNLEKTHHTSKKRKMAITGLVITNDGNISLGRRKKREIKSKIYKWDTLSTDERTYLSGYLAYIKSVEPEFINNLCDKYDANLILEIIKFNTK

SEQ ID NO: 4305 - protein, 313 aa, Vibrio sp.
  source 1..313: note = Related to SMCU01000001.1; note = Vibrio crassostreae
MLLELISSLTLLEEEYILNIAQTSSQRYKKFYITKKNGNLRAIYHPSKELKGIQRVIHNELLQKLPTHPASAAYKKGCSIKKHAEQHKKSKYLLRLDFKNFFESISEIDIRCFANNNIIGVIKGWSEEDTKLLVELATFKGGLTIGSITSPLLSDALCYQLDIALFSLSHELGVTYTRYADDLYFSTNHRNTLKKIPSNVDTIIKELEYPKKLKINYSKTNHSSKKNRMMVTGLTLTNDFKVSIGRSKKREIRSKIYKWSELNKDDKLHLSGYLSYIKSVEPSFINTLCGKYGATIIQSIIRFNSKKDPNLKS

SEQ ID NO: 4306 - protein, 308 aa, unidentified
  source 1..308: note = Related to NZ_WMDI01000001.1; note = Photobacterium carnosum
MLLEMISNLTLLEKEYIQNIAKTASKRYKRFLIPKKSGGNRVIYHPSKELKGIQRVIHEELLQKLPIHLASAAYNKGCSIKKHAEQHRKAKYLLRLDFKNFFESITEIDINCFVNNKFIDIFDDWSEEDTKLLIDLTTFKGGLTIGSITSPLLSNAICYQLDIALFSLSHELEVTYTRYADDLYFSTFHRDVLKKIPSKVDIIIKELEYPKNLKVNNNKTNHSSKKNRMMVTGLTLTNDFKVSIGRSKKREIRSKIYKWVDLNQDDKLQLSGYLSYIKSVEPSFINTLCGKYGAKVIQQIIIFNSKNI

SEQ ID NO: 4307 - protein, 307 aa, Vibrio sp.
  source 1..307: note = Related to NZ_ADAF01000002.1; note = Vibrio mimicus
MLLELLSRLTILEEEYILNIAQTSAQRYKKFHIKKRNGTLRAIFQPSKEVKGFQRIIHDEVLKRLPSHPASAAYKEGSSIKKHAELHKRSKYLLRLDFKDFFESISEHDIRKFASENLTGKIKGWTDEDTNLLVKLCTFKGGLTIGSITSPLLSDAICYNLDVALYSLSHELGITYTRYADDLYFSTNKSGVLKKIPERVEEIISRLECPNKLKINKSKTHHSSRKNKMKVTGLTITNDFKISIGREKKREIRSKVFNWDGLSPEEKAHLSGYLSYIKSVEPAFINNLCTKYGASIIKEITVFNSKK

SEQ ID NO: 4308 - protein, 307 aa, Vibrio sp.
  source 1..307: note = Related to NZ_JPTQ01000476.1; note = Vibrio harveyi
MLLELISNITILEEDYILNVAQTSSQRYKKFYIPKRNGSLRAIFQPSKELKGIQRVIHDEVLKKLPSHTASSAYKEGSSVKKHAEQHRKSNYLLRLDFKDFFESISDHDIRKFANQNLVEKITGWTEDDTNLLIKLATFKEGLTIGSITSPLLSDAICYNLDVALFSFSHELGITYTRYADDLYFSTNNRGVLKTIPSKVEDVISNLDYPSQLTINRSKTYHSSKKNKMMVTGLTLTNDYKVSIGRTKKREIRSKIYNWSALDLEQKHHLSGYLSYIKSVEPAFINTLCTKYGANVIREISVFNSNK

SEQ ID NO: 4309 - protein, 309 aa, Vibrio sp.
  source 1..309: note = Related to NZ_CP046834.1; note = Vibrio vulnificus
MLINLISKLVLLEKEYIVSIADTASRRYKRFFINKKNGKLRAIYHPAKELKAIQRVIHDEVLKKLPSHEASCAYKQGCSVKKHAEMHKGARYMLRIDFKNFFESIRTEDIRHFADKKMMSYIEGWTKADTELLVKLTSFQEGLTIGSITSPLLSDAICYDLDVSVFSLAHELGVKYTRYADDLYFSTNKKGVLKSIPPKIEAILLDLKCPHNLKINTAKTHHSSKKSRMMVTGLTITNDNNISIGRTRKREIRSQIYNWTSLNDEDKKYLSGYLSYVKSVEPEFINALCCKYGAYKIKEIIVFNSSGIN

SEQ ID NO: 4310 - protein, 305 aa, unidentified
  source 1..305: note = Related to NZ_MAJU01000015.1; note = Aliivibrio logei
MILLKYLAKELLLDESYIEELANSASNHYKSFTIPKKSGGDRLINQPSRELKALQRTLHDNILSKLPIHDSAFAYRDGQSIDKHAKVHLSARYLLRLDFKDFFESIKAHDIYRFINKHGINLLDNWSELDTKLLVDIVCYKQKLTMGSVTSPILSNAICFALDKQLEKICYMHDVKYSRYADDLFFSTSKPNVLRKIEKDVFNVVAALNEPEKLKINRKKTYHSSKKNRMSVTGIILTTDGNISIGRDNKRKVRTMVFSWNKLDVVEKRYLQGYLSFCASIEPEFINSLCNKYGADKITEIQRYN

SEQ ID NO: 4311 - protein, 305 aa, Vibrio sp.
  source 1..305: note = Related to MCZC01000024.1; note = Vibrio lentus
MILLEYLARELILDKGYIKDLAINSSLNYISFSIPKKSGGERIIHQPSRELKALQRALHDNLLKKLPIHESAFAYRKGKGIDQHAKVHLSARYLLRLDFKQFFESIKAKDITSFINKNKDLLLSGWTDSDTKLLVDIVCYKHKLTMGSVTSPILSNAICFLLDKELEKICYLNDVKYSRYADDLFFSTSKPNVLRKIQKEVFKIVSELDEPGQLKINVNKTYHSSKRNRMSVTGLILTNDGKVSVGRCNKRKVRTMVFNWDTLDEKDKFYLQGYLSFCSSIEPEFINSLCNKYGSEVIVKIQTYN

SEQ ID NO: 4312 - protein, 307 aa, unidentified
  source 1..307: note = Related to JQED01000055.1; note = Colwellia psychrerythraea
MKLLDHLSSSLLLDKTYIMELAETASQRYKQFSIPKKTGGFRSILHPARELKTLQRIIHEDILVKLPIHNSAFAYRKKLNIFDHANVHIGASYLLRMDFKNFFESISSKNIAKFLDSKANYLLKDWKAEDTELLVKLVCYKSSLTIGSVSSPTLSNAICYELDEALHKLCYVRGIQYTRYADDLYFSTNEPNILNSIQNNVYEIVNSLSIPDKLRINSSKTHHSSRKNRMSITGLILTNSGDVSIGRDMKRKIRSLIFKWCSLDVKEKKYLAGYLSFCASIEPEFLNSLCKKYGADIIYEIQNFMNK

SEQ ID NO: 4313 - protein, 303 aa, unidentified
  source 1..303: note = Related to NZ_VWXD01000007.1; note = Pantoea sp.
MLIEHLSDTLILTNDFINDLADTASKNYNKFSVPKKNGGTRVVYQPNKELKLLQRVIHDDFLKILPVHPACSAYLDGASVKENAERHKNNKYLLRIDFVDFFKSITHNDILSFLIENKIHPQWNDNDTELLLKLVCYNGRLTMGSVTSPMISNLVCNKLDKAIESICNIQDIIYSRYADDIYLSTNTPNILGMMPKKITNILRKIDYPKHLIINTSKTQHSSKKTRMTITGLKITNMGTISIGREKKREIRSLVHKWDTLPIEKKKYLQGYLSYCVSVEPLFINALCEKFSAKIIKKIQSYKF

SEQ ID NO: 4314 - protein, 303 aa, unidentified
  source 1..303: note = Related to NZ_CABDVS010000002.1; note = Raoultella planticola
MLIDHLSDSLILTHNFINDLANTASKNYNKFSVPKKNGGTRVVYQPHKELKLLQRVIHDDFLYSLQVHPACTAYIDGSSVKKNAEKHRHNKYLLRLDFVDFFKSITHNDILLYLMENKIHPQWTDEDTEIFLKLVCYNGRLTMGAVTSPMISNLICIKLDKAIESICSPLNITYTRYADDIYLSTNTANILGLMPKKIIHILRTIEYPKNLIINTSKTQHSSKKTRMIITGLKITNDGEISIGRDKKREIRSLVYKWDSLSIEQKKYLQGYLSYCVSVEPLFINALCEKFSAKVIKKIQTYKL

SEQ ID NO: 4315 - protein, 303 aa, unidentified
  source 1..303: note = Related to CP077366.1; note = Pantoea agglomerans
MLIEHLSDSLILTENFICELADTASKNYNKFSVPKKNGGTRVVYQPHKELKLLQRVIHDDFLVKMPVHPASTAYLKGASVKNNAEKHKNNKYLLRLDFVDFFKSITHNDILSFMMENKIHPDWNEYDKEIFLKLVCYNGRLTMGAVTSPMLSNLICNKLDRIIDSICSQQNITYTRYADDIYLSTNTAGILGSMPQRIINVLRLLEYPKHLIINSSKTKHSSKKSRMMVTGLTITNTGNISIGRDKKREIRSLVYKWDQLTIEKKKYLQGYLSYCVSVEPLFINSLCEKFSAKIIKKIQSSKL

SEQ ID NO: 4316 - protein, 303 aa, unidentified
  source 1..303: note = Related to CP026980.1; note = Pectobacterium parmentieri
MLIEHLSENLILTKQFILNLADSSSDCYNKFSVPKKGGGTRVIYQPNKELKLLQRVLHDDFLTKMPVHNACTAYRDGSTVKLNAELHKDKKYLLRLDFVNFFKSITHNDIFLYLQENKLSPNWIDDDTELFLKLVCYKGRLTMGAVTSPMLSNLVCEKLDRAIEGICNHDALTYSRYADDIYLSTNTPNILSQVPKKVIAVLRNLEYPKNLIINTSKTLHSSQKRRMLVTGLTITNQGNISIGRDKKREIRSLIHKWEALPTDKRKYLQGYLSYCASVEPLFINSLCEKYSAKLIRKIQSYKF

SEQ ID NO: 4317 - protein, 303 aa, Enterobacter sp.
  source 1..303: note = Related to FVZI01000003.1
MLIEYLSKSLVLTPDFIKEIADTANERYNKFSIPKKNGGTRVIYQPQKELKVLQRSLHDHFLKKVPTHQAICAYQEGSSIKKHAELHSKNNYLLRLDFIDFFKSITSNDILHYLMEHKLHSEWTENDSQLLLKLVCFKGRLTIGSVTSPLLSNLVCNHLDRCISEIAISRGITYSRYADDIYLSTSSKDILFDMPKKIISVLRNINYPKNLILNSTKTIHSSRKKKMTVTGLIITNDKTVSIGRKKKREIRSLVHKWDVLTLEKKKYLQGYLSFCAGIEPLFINSLCEKFSARKIRDIQKQKL

SEQ ID NO: 4318 - protein, 305 aa, Enterobacter cloacae
  source 1..305: note = Related to BPMY01000001.1
MLLNYLSNNLVLTPEFISNIADTANERYNKFSISKDNGKNRVIYQPQKELKLLQRVLHDDFLRRIIPHPCCTAYKDGASTYKNAIQHIENRYLLRLDFVDFFKSITSNDIFLFLKENSSKLHPEWTEEDNELFLKIVCYKGRLTMGSVTAPGVSNLVCKALDYRISDLCAARGITYTRYSDDMYFSTNKENILLNLTPEIIAIIRNIDYPKHLIINSSKTKHSSRKRKMSVTGLVITNDKKISLGRDKKREIRSLVHKWDNLDSKRKKHLQGYLSYCASVEPLFINSLCIKFGAATISKIQKYIP

SEQ ID NO: 4319 - protein, 317 aa, unidentified
  source 1..317: note = Related to NZ_CABHYG010000014.1; note = Yersinia proxima
MLIKYLSDNLVLTTDFIQELANTADDRYNKFSVPKKNGGTRVIYQPQKELKLIQRVLHDDFLKKIIAHPACSAYCDGSSVKKNAERHKSNKYLLRLDFVDFFKSITSNDVLHFLADNKLHNDWTTHDTELFLKLVCFKGRLTMGGVTSPILSNLVCNNLDVAINDISISLGITYSRYADDIYLSTNNPNILFCMPGKVISLLRSIEYPNYLILNTKKTNHSSKKNKMMITGLILTNDGEVSLGRKKKREIKTLVYIWETLSIERRKYLQGYLSYCASVEPLFINSLCEKFSAKKIKDIQSYKFQSSNSSVPSKILTK

SEQ ID NO: 4320 - protein, 304 aa, Proteus sp.
  source 1..304: note = Related to NZ_CP054157.1; note = Proteus vulgaris
MLIKYLSDNLVLTTAFIHELADTADNRYNKFSIPKKSGGTRVIYQPHKELKLIQRILHDDFLKKIPVHPACTAYSDGSSVKKNAEKHKHSKYLLRLDFVDFFKSITSNDIYYFLSENKLHSNWVKEDNELFLKLVCFKGRLTMGGVTSPILSNLICYELDIAINELSQSLGVIYSRYADDIYLSTNNPNILFNLPARIIKILRSVKYPKNLILNTKKTVHSSKKRKMIVTGLTITNDNQISIGRKKKREIKTLVYLWKGLTPEKKKYLQGYLSYCSGVEPSFINALCEKFSAKVIQDIQQYKIN

SEQ ID NO: 4321 - protein, 308 aa, unidentified
  source 1..308: note = Related to CQAZ01000033.1; note = Yersinia pekkanenii
MLLKYLSESLILTADFITNLSNTADERYNKFGIPKKNGGTRVVYQPQKELKLLQRVLHDDFLKKINVHIACTAYCEGSSVLKNANIHKENKYLLRLDFVDFFKSITSNDIRLFLNEKKGEFSDSWDDLDSDLFLKLVCFKGRLTMGGVASPMISNLICYKLDLLINELCLSLGVTYSRYADDMYFSTNTPDILFTIPKRVISILRQLDYPKKLILNTNKTKHLSKKRKMIITGLVITNTGTVSLGREKKREIRSLVYKWNILDDKKKKYLQGYLSYCASVEPLFINALCEKFSSQAISEIQTYCPPST

SEQ ID NO: 4322 - protein, 304 aa, unidentified
  source 1..304: note = Related to AODU01000021.1; note = Pectobacterium peruviense
MLTEYLASSLILTTDFIRDVADTADERYNKFGIPKKNGATRVVYQPQKELKILQRVLHSEFLVKLKVHSSSTAYSDGSSVIKNANLHKNKKFLLRLDFVDFFKSIRSSDIRLFLNERGSELSDQWTNDDSDVFLKLVCFKGRLTMGGVTSPAISNLICYKLDSALSEICLSLGVTYSRYADDMYFSTNVPNVLFSMPNRLIKILRSIDYPRSLYINTEKTKHSSKKRSMKITGLTLTNNGEVSLGREKKRRIRSLVFNWSNLTVDEKKYLQGYLSYCASVEPLFINSLCEKFSSKIITNIQKYK

SEQ ID NO: 4323 - protein, 305 aa, unidentified
  source 1..305: note = Related to JADUBR010000008.1; note = Serratia marcescens
MLLDYLSSSLVLTNEFVSLIANTSDERYNKFSIPKKNGGTRVVYQPQKELKLLQRVLHDDFLSKIPLHSACTAYCRGSSVIKNANMHRGNKFLLRLDFVNFFKSITSNDIFNYLNENRDKLDGHWTNEDLELFLKIVCYKGRLTMGSVTSPVISNLVCSMLDSKLQAVCVPLGVTYSRYADDMYFSTNGKNILFDIPSRVIGIIRTLGYPKGLILNTSKTSHSSKKRKMSITGLVITNDGKISLGRDKKREIRTLVYMWDSLTVKKKKYLQGYLSYCASVEPLFINSLCVKFSSAVISKIQSFTP

SEQ ID NO: 4324 - protein, 309 aa, Escherichia coli
  source 1..309: note = Related to CP057980.1
MLIEYLAKVLLLEADFILKVANDANSHYGKFSVPKKGGGTRIVYQPSKELKVLQRLLHDNVLSKLPIHPNAVAYQQGSSVFKHASIHKAKRFMLKMDFEGFFDSIKKSDVERFINDNKHFFSDDWSKDDTDLLVKIVCFNGRLTMGAVSSPVVSNAICYELDHILNEFCLSKGITYTRYADDMYFSTNEENVLKQIPPFLRSNLKNLKYPSKLWINRKKTLHMSKKNKMMVTGVTLTTDGGVSLGRDKKRMVKSLIFKWEALDEKKRLFLQGYLSYCKSVEPLFINRLCAKYSSELIDEIQRYQPVVSE

SEQ ID NO: 4325 - protein, 325 aa, unidentified
  source 1..325: note = Related to NZ_JAEMHM010000012.1; note = Geomesophilobacter sediminis
MLLEFIAQHLILTPEYILTVANTASKRYKEYYIDKRDGTKRLIHHPSKELKSIQRCINQGILPRLPVHHCAAAYKPGAKLIDHVTRHKNSKYLLRLDFKDFFHRLTDMDIMLCLDEYKHFLPSDWNVLDSDLLIKLVCRYHKLTIGAATSPSLSNILCFKLDTQIQTLCDHLGVEYTRYADDMYFSTIKPNILYDVRSSVYNIVNSLKYPSNLLFNNRKTKHTSKKHRRVITGLVVTPTAKISIGRDKKRDIRSKIYNWNGLSVAEKYSLKGYLSYCNSVEPSFINSLCDKYTAGTINLILKYDESAEAPKPKLLSPIEAIAASA

SEQ ID NO: 4326 - protein, 311 aa, unidentified
  source 1..311: note = Related to VFZY01000080.1; note = Acidobacteria bacterium
MIRERMASAIGVTIEYISGLANGASHAYKTYRIPKRDGRLRTIHHPSKQLKALQRWLLQNVIENLPVHSAAFAYKKSTSMFDNARAHSKNRFLLRIDLNDFFPSITDTDVRRFIQDRATMFEGWTNGDIDAFCKIICRNGHLTIGAPTSPAISNVLCFDLDSALSSLASKLGVTYTRYADDLFFSTNQAGVLRPLQESVEQTVRVATLPGNLAINHGKTRHSSKKRLRRVTGIVIGSDGKAHVGRGVKRKIRGMIHRFDSLNDQDRASLAGLIAYVIGFDPAFLNSLVTKYGHAAVSRARFPTRPSGVNVN

SEQ ID NO: 4327 - protein, 303 aa, unidentified
  source 1..303: note = Related to PSRJ01000392.1; note = Acidobacteriia bacterium
MMVDKMALDLGLTRKFVANFSRGASHAYKFYTIPKRNGGERPIHHPSKQLKSMQRWLLAYVIEPLPVHPAATAYRKHRSILDNARAHAASKFLLRMDCENFFPSITEDDVLLYIQQRPSLFPGWTAFDIEVFCKLICRNGRLTIGAPTSPGISNALCYEMDSALADLGLKRSVNYTRYADDLFFSASKPDVLRPLQSDIEQLITDLELPGGLKINPAKTRHSSKRGRRRATGIVLGSDGQPHIGRALKRKVRSLIHGVDSLDPAARQSLAGLVSYAIGFDPDFMNSLVIKYGHAVMQKVRFPT

SEQ ID NO: 4328 - protein, 312 aa, unidentified
  source 1..312: note = Related to JAIQGJ010000040.1; note = Acidobacteriia bacterium
MMLEQMANGIGIPVVFIENLANAASYEYKTYTIRKRSGGLRTIHHPSRRLKALQRWLLANVIQNFPVHLAATAYAPGRSIFKNASVHATSRYLLRMDFTDFFPSITQNDVRSYVNTNTRFFEGWNSTDVNAFCNLISRNGVLTIGAPTSPAISNALCYDLDARLELFCSKSGVTYTRYADDLFFSADRSGTLRQIEEGVLRIVSELEIPRCLVINRAKTRHSSKRGTRRVTGIVLGSDGKPHIGRTLKRKIRASIHQFAALDDAGKDSLAGLIAFAVGFDPDFLNSLIKKYGLAAVRIAMKKPSAKTGGKPL

SEQ ID NO: 4329 - protein, 341 aa, unidentified
  source 1..341: note = Related to JACHEB010000003.1; note = Edaphobacter lichenicola
MTTELGLTWEFVANLAGSASYEYKKFIVRKKSGGLREIFHPSRKLKAVQIWLLRNLLGQLPVHESATAYRTGISIYDNATRHTKSRYLLRIDLENFFPSIRDSDFSAYVDSNQENFKGWTEIDKAIVTSLMFRNGELTIGAPTSPALSNALCFQLDVQLSKLANNRGLVYTRYADDLFFSSIKPGVLSSVLDEAQSIIDELPIPATLKINRAKTRHSSKKGRRQVTGIVLGSDGKPHISRTFKRSIRSMVHKFDLLREDQKVALPGMISFVAGEEPGFLNSLITKYGFELIARVTTIQSLAERQRIHLPKVKPSPPKKVRAKSSTQVLFDTLRNAGFDVDD

SEQ ID NO: 4330 - protein, 303 aa, unidentified
  source 1..303: note = Related to NZ_JACHIP010000003.1; note = Granulicella aggregans
MIIEKMSAELSLPLKYVDFLALTASHQYKQYTIPKRTGGERIILHPSRKLKALQRWLLSNVIAVWPVHPAAMAYRPGVSIFDNANIHVQSQYLLRMDMTNFFPSIEVRDLVAFMAKRPTLFQDWTDRDKSYFARLVFRHGKLTVGAPTSPALSNALCFELDSALAGITSAQGVAYSRYADDLFFSANKKQVLISIEAEAKAVLGEIKIPANLSLNQAKTKHSSKRGARRVTGIVLGSDGKAYVSRDTKRTIRTLVHQLDTLKDEERIRLAGLISYVSGFEPAFLNNLILKYGADKVSSAKQHT

SEQ ID NO: 4331 - protein, 306 aa, unidentified
  source 1..306: note = Related to SHBB01000070.1; note = Sandaracinaceae bacterium
MSIVDSAAASLGVSRDKILTLADQANHSYVTYSIPKKSGGEREIHHPSKPLKAVQRWFLRRWISLLPVSPLATAYEPGSSVLKNALVHEGAKYAVRIDLQDFYWSISSDDFRSYLATVPAGAEIDFGDVETVAALLFRHGRLTVGSPTSPSLSNRMCRKLDTECEALAVKIDARYSRYADDMYFSATHPGILSAIESSLESILSGLDTPGSLRINKSKTQHFSQKTGIFVTGLVIGSDGKVYLGRRRKREIRALIHNLESLDLDARRRLAGKISFARSIEPAFVNALIKKYTVGRFRSASRPDSAG

SEQ ID NO: 4332 - protein, 308 aa, unidentified
  source 1..308: note = Related to QHPH01000062.1; note = Verrucomicrobia bacterium
MLIELLSQRLLLPEKYISNLAAGASHHYKTYYVSKRRGGARLIEHPSKQLKAVQRWLAANIICHFPVHAAATAYKSGVNIADNARRHASSSFLVRIDLQDFFPSLRAVDVKRLAETSLVFVPGGGQWSSDNIDVFVCLSCKDGRLTIGAPTSPPLCNALCYHLDLQLTAFAQQRELTYSRYADDLVFSARAPDQLRGVPAQVAATLENLEVPRGLKINTSKTWHASRRGRRKLTGVVITSDGKLSVGRQLKRRLRTLVYRHYTLDKTQKKNLARWLAHVRSIEPEFINSLILKYGADRVVDAMQPHSG

SEQ ID NO: 4333 - protein, 313 aa, unidentified
  source 1..313: note = Related to NZ_FOXY01000012.1; note = Donghicola eburneus
MLIELLSKTSNVPESKLLSLSLTASRRYKVYTIPKRTGGDRLIEHPSRELKAIQRWIVQALFARFPVHEAATAYRKGTGIRENAERHRQSKFTNRYDFSNFFPSFSQDRVLHYVSEQSKNLGIDLTQRDLDFVGNIVCRHGRLTIGAPSSPAISNAMMFEFDSRMHEASQSRGLVFTRYADDIFLSSFEPGKLEGLEALILKSKRDIPHLRLRLNRQKTAYLSKKYSRKVTGIVITPQHTLSIGRERKREVKALIHQWIKGGIEPERFYYLKGLFAFAIDIEPQLEARLMEKYGKEKIQLLRSADFDFPIGLI

SEQ ID NO: 4334 - protein, 313 aa, unidentified
  source 1..313: note = Related to NZ_LGHS01000039.1; note = Pseudorhodobacter aquimaris
MLIELLSRTAKIPEAKLVSLAESASRRYKVYTIPKRTGGERVIEHPSRELKAIQRWIVRALISRFPLHESATAYRKGTGIRENAERHRKTKFTNRYDFASFFPSFSQARVVQYIGEQAKAVGIDLSERDLEFIGNIVCRNGRLTIGAPSSPAITNAMMFEFDRRMHEDCHAKGLVYTRYADDLFVSSFEPGQLDGIEKVIVKNKRGISHLRLRLNHQKTAYLSKKYRRVITGVVITPQHTLSIGRERKREVKALIHKWIKGDIDPTNFYYMRGLFSFAIDIEPEFEKRLAEKYGAARIRQLRSADHDFPIGLI

SEQ ID NO: 4335 - protein, 313 aa, unidentified
  source 1..313: note = Related to NZ_RBIG01000007.1; note = Oceanibaculum indicum
MLIELLSRTSGIPDERLLRISATASQQYKLYTVPKRTGGERLIEHPSRELKAIQRWVIRALINRFPVHDSATAYRIGSGIRENAERHRTSKYTNRYDFMNFFPSFRKEHISIFIKEQSDIIGIDLSERDIDFIANIVCRNGRLTIGAPSSPAITNAMMFAFDKKMHDACKSRDLIFTRYADDIFISASEARKLFNIENLIIDSKRDIHYLNLRINHKKTAMLSKKYHRSITGVVITPQHTLSIGRDRKREIKSLIHRWINGQIDAEKTEYLKGLFSYAIDIEPSFETRLIDKYGADIIKSLRSPENAINTNRS

SEQ ID NO: 4336 - protein, 325 aa, unidentified
  source 1..325: note = Related to CP069017.1; note = Pseudosulfitobacter pseudonitzschiae
MLIDQIARSSQLEVDELVRLAQNASQHYKLYNIPKRNGEPRRIAHPSRELKAIQRWIVKVIIQRFPIHDAATAYRTGGGIRENAERHRISLYTNRYDFANFFPSFKREQVQSFIQSESEKVGLLLSDDDADFVGKIVCRYDRLTIGAPSSPSITNAMMFPFDQILFDYCVKRDLIYTRYADDIFISANKSDQLNNLEVRIADAKRKIPHLSIRLNRQKTAYLSKKYHRSITGVVITPDHKLSVGRSRKREIRALVHRWINGKLDPIEVSYMRGLIAFARDIEPKFEVALRAKYGPQRIEEILRRPDLTTTPGWPKEGNNDDDVPF

SEQ ID NO: 4337 - protein, 321 aa, unidentified
  source 1..321: note = Related to NZ_CP010725.1; note = Phaeobacter inhibens
MLIQQIARTTKLDEQDLRHLAASADRRYKVYLIPKRGHGHRKIEHPSREIKALQRWITKVIIDRFPVHHAATAYRKGNGVRENAERHRTSKYTNRYDFANFFPSFGQAQVENFVKQEAEKLGMLFDNDDLRFVGNIVCRFGRLSIGAPSSPALTNAMMFDFDRTLFDWCQSKELIYTRYADDLFISANEPDRLNKLEPLIAKAKRDVAHLTLRLNRRKTAYLSKKYTRLITGVIITSDHKLSIGRERKREIKALVHRWLNGKLEAGEIYYMRGLLAFARDIEPEFEKNLRSKYGDAAINEVLRHPSLGKAPDPEFQLPPWL

SEQ ID NO: 4338 - protein, 309 aa, unidentified
  source 1..309: note = Related to JAGRDV010000235.1; note = Rhodobacteraceae bacterium
MLIEMLARTTSFDLDRLSRISMTASRRYKIYTIPKRTGGVRTIEHPSRELKAIQRWIIKALFAKFPVHESATAYRKGFGIRENALRHKQTSYTNRYDFADFFPSFQQSSVEKFLALQAKILQIDLSPLDIRFVGNVVCRNQRLTIGAPSSPAITNAMMFKFDENLNNSCESDKLIYTRYADDIFVSSNEPNKLFDVEVRIENAHRGIDYLSLELKNEKTAILSRKYARKVAGVVITPTHNLSIGRERKREIKALVHSWSVGALEKDRFAYLRGLLAFARDIEPDFERRLRAKYGDPTIDRLLFAPDLYA

SEQ ID NO: 4339 - protein, 315 aa, unidentified
  source 1..315: note = Related to NZ_MBST01000045.1; note = Ensifer sp.
MLVELLVRASKISEAKLTSLAATASNRYKVYEIPKRSGGKRTIEHPSKELKAIQRWIAKAVFARFPIHSGATAYRQGFGIRENAERHRQSKFTNRYDFSNFFPSFTQAEVQNFLRSRSAAVGLVLTEKDIGFVGNIVCRNGRLTIGSPTSPIITNTMMFDFDVTLDNFCAERGLIFTRYADDMFVSSNKEGQLFSVEDGIHLAMNSIPNLNLEVNHKKTALLSKKYLRRVTGVVITSDHRLSIGRHRKREIKALIHKWRTGTLEVEKLHYMRGLVAFARDVEPNFEQRLRLKYGDQAIDEIVHSSDLSIVFDKNT

SEQ ID NO: 4340 - protein, 311 aa, unidentified
  source 1..311: note = Related to RHWX01000009.1; note = Brevundimonas sp.
MLLERLEKHTGLPRSLLERYAETASKRYRVYTVEKRNGDRRTIEHPSREIKAIQRWLIRALIGNMPVHEASTAYSKGASIRKNAERHVRSRYTVRLDFEGFFPSFGGADVIAYLKKTHDDPIMVLSAEDLSFIRRIVCRHDALTIGAPTSPGLTNAMMFEFDSALADWCAARALIYTRYADDLFISASAPGALAGVEAKAAELAAAFPYAKLALNREKTAHLSRKYRRSITGLVITPEQTLSIGRDKKIRLKSDVYAYSKGNLQSEQRSRTAGLIAFVRDVEPAFYETLLRKYGRETIEGLQKGLRSSLKG

SEQ ID NO: 4341 - protein, 302 aa, unidentified
  source 1..302: note = Related to JADCLP010000001.1; note = Erythrobacteraceae bacterium E2-1 Yellow Sea
MLLDELSAETGLRPDRLEYYADSASRRYYSFTIKKRNGDPRWIRHPAKPLKSLQRWLNSNVISRMRVHQCAMAYQPGSNIRSNALRHASSNFTVRIDFEDFFPSFKRSGIVKFLKDQEKFGLKLGRRDITFLSKIVTRFDELTIGAPSSPLLTNAMMYSFDKEVSEFCERKGLTYTRYADDIYISSVAPNGLDGVLQRVAAAAKKFPYAKLRINSSKTSYTSRRYRRMITGLVITPDHKISLGRKRKREIHSLVHMASVDKLDLEKLSYLQGMLAFTKDVEPSFFETLVAKYGRKTVERILL

SEQ ID NO: 4342 - protein, 302 aa, unidentified
  source 1..302: note = Related to NZ_CP033204.1; note = Sphingopyxis sp.
MLIDWLCAETGLQRERLIAFAASASKRYFVFRIKKRDGSERQIAHPAKPLKGIQRWLNSRVIKSWKVHDAATAYQRGASIRLNALRHAETNFTLRVDFKDFFPSFQAKGIEKFISDQPNGGKKFDKVDLKFITDIITRNGRLTIGSPSSPFITNAMMYSFDEEVSLFCDASGLVYTRYADDIFVSSHNPGNLAQAYDFLCSAANKFPYANLSINHNKTKFLSRKYRRTITGIVITSDRKISIGRPRKKEIKSLINSYIYGKLDDEKEMYLKGMVSFACDADNVFFLSLEKKYGKKVMGRLIG

SEQ ID NO: 4343 - protein, 303 aa, unidentified
  source 1..303: note = Related to VBWB01000009.1; note = Rhodospirillaceae bacterium
MLLERLRKQSGLTTAQIEMYAATASKRYKIYTIKKKNGGDRTIEHPSRALKSLQRWVNKSIISKLPTHVSATAYAKGCSIRKNAQHHLGSIFTLHVDFKSFFPSFKSDGISDFFRIKSKELGIELSEEDVNFITRIVCRNNCLTIGAPTSPSITNAIMFEFDDVVNEWCNQRRLVYTRYADDLYISAFEPGMLSDVIPFLISALDKQRFVRLKINHDKTAFLSKKYRRAITGIIITTEGKLSIGLKRKKLIKSMVLDFKYGRLPMEDKSRLHGLISFALDIEPAFHETLIRKYGENTIKSIST

SEQ ID NO: 4344 - protein, 309 aa, unidentified
  source 1..309: note = Related to NZ_AP018907.1; note = Blastochloris tepida
MLLERLERQSRLSRGQLEQFAITASKRYKIYNIPKRNGGERQIEQPSRAIKAIQRWLNLNLIRKFPIHISSTAYNKGSSILRNAEFHKNTNFTVRIDFEDYFPSFRDNGIERFLQENRSVIGDPLDDNDISFIRNIVCRHGRLTIGAPSSPLLTNAIMFQFDGIVYQFCQSRGLVYTRYADDIFISATRANSLGDVADFVASVSTGYPYANLTINCRKTVFLSKKYRRVVTGMVITPQGSVSVGRNLKDEVRSGVYKFKNGIIDGDEIARIRGLVAYIYGVEPSFLGILERKYGDETIGRLLGGRPLVK

SEQ ID NO: 4345 - protein, 312 aa, unidentified
  source 1..312: note = Related to NZ_BACU01000350.1; note = Azospirillum sp.
MLLEKLKDHSGLSERQLDRYAATASNRYKVYTIPKKPFGVRTIEHPSREIKAIQRWLNSNIIRKLPVHSSATAYHRGASIKENAIRHAGSNFTLHVDFQNFFPSFHGHHIEKFLRWWSEENKINLNDNDISFFRKIVCRNNALTIGAPSSPILTNAMMFDFDGTVALWCTSNGFIYTRYADDIFISSVLPGKLGNALEFLKETCPSFPYANLSINHNKTAFLSRRYKRSITGLIITPERKISIGRAKKEEIKSEVYKFSKGELTSEEIGRLRGKIAFTRDVEPSFYDRLLNKYGYSTIHTLEFLGEGDLLGK

SEQ ID NO: 4346 - protein, 310 aa, unidentified
  source 1..310: note = Related to NZ_JACNMM010000013.1; note = Oceaniglobus trochenteri
MLREVLAEKSGISPKRLQFIQENASRMYKVYPISKRDGTDRIISQPTPELKALQRWLSRGIFQRLPVSSCAMAYKKGASIRENAKAHVKTSFTLHLDFEDFFPSFSTDHIIRYLSENTKLNSDDIQFCSDVVCRHGRLTIGAPSSPAVTNALMHSFDLQVDSWCSGRGLVYTRYADDINISSAGSGSLGDVEGFISATAKDFKYASLTINGKKTAYLSKKYRRSITGINVTPEGCISIGRARKREIKSLVHSFKLGSLEPELLWKLGGLIAFAHDVEPDFVVSLKKKYGSATVEAILHQKTPRGLRGPKE

SEQ ID NO: 4347 - protein, 309 aa, unidentified
  source 1..309: note = Related to NZ_CP033435.1; note = Cereibacter sphaeroides
MLREVLAAKSGMSLSRIERLQCNASKMYKTYPIPKRDGSDRMISQPTPELKAVQRWLARGIFQRLPVSACATAYKKGASIRKNAEAHVASSFTIHLDFKDFFPSFSHGHVSRFLSEATRLSQEDILFCSDIVSRHGCLTIGAPSSPSVTNALMYSFDVSVERWCMKRGLIYTRYADDINISSKCPGALREVEDFVRDASGAFEYANLVINERKTAYLSRKYRRSITGVNVTPEGRLSIGRDRKREIKSLVHQCVMGTLQVDMLWRLGGLIAFSSDVEPHFVDALKNKYGADVIEKILHQKTPRGAWVAD

SEQ ID NO: 4348 - protein, 306 aa, unidentified
  source 1..306: note = Related to NZ_LGSQ01000001.1; note = Pannonibacter phragmitetus
MLRDALSNLAGIPISRISRIQENASKLYKVYEIPKNNGKKRTISQPTPELKAIQRWLIRNVFAKLPVSTYATAYKKGASIRLNAEFHRNSLFTLHMDFENFFPSFTENNVFDFLKENTNLNQDDISFCVDLCCRFGALTVGSPSSPALTNAMMYAFDQQISDWCAERKLVYTRYADDINISSSSPDALGDAEGFIKDASKEFKFGNLKVNEVKTSYLSKKYRRSITGLNITPQGSISIGRDRKREIKSLVYKYKEELLPKELFWQVGGLIAFANDVEPTFVRSLIEKYGQKTIEELLHQRTPRGLK

SEQ ID NO: 4349 - protein, 304 aa, unidentified
  source 1..304: note = Related to NZ_LSRP01000113.1; note = Pararhizobium antarcticum
MLIETLSKQSGVTIENLKWLAETASKRYKTYEIPKRTGGVRTIHHPSRGLKGIQRWVSKFLLARLPVHTAAQAYVRGASIRKNAELHAGSKFTLRIDFANFFPSFSSEHVEVFLATAERDRSIGLTDQDISFVSRIVSRHGQLTIGAPSSPILTNAMMHFFDGQIAEFAERQNLTYTRYADDLFFSSSKPDNLTDALEIVQQVSVAYPYANLRVNPDKTAFLSRRYSRRVTGLVITTDGKVSIGRERKRMVKAQVHKFLQGQLDIFEVPKLRGYLAFVQDVEPEFWEGLKRKYGADAMITVTGG

SEQ ID NO: 4350 - protein, 311 aa, unidentified
  source 1..311: note = Related to FMVA01000017.1; note = Rhizobium sp.
MLIEALIKQSGMNDVSLEWLALTASKRYKTYDIPKRNGATRTIHHPSKSIKSIQRWVSKFLLRRLPVHVAAQAYVRGASIRKNAELHAGSKFTLRIDFSDFFPSFSREHVELFLAAVERDRSIGLTNRDISFLSRIVSRHGQLTIGAPSSPILTNAMMHFFDSQIAEFADRKNLIYTRYADDLFFSSNKPDNLTDVLAIVQQVSATYPYANLRINPDKTVFLSRRYSRRVTGLVLTTDGKVSIGRARKRAVKAQVHKLIQGEFDNFELPTLRGYLAFIQDVEPEFWESLKSKYGADAMLTVVGKQHFSNLL

SEQ ID NO: 4351 - protein, 311 aa, unidentified
  source 1..311: note = Related to NZ_QJRY01000001.1; note = Rhizobium wuzhouense
MLKETLSKQSGVTIENLEWLAETASKRYKTYEIPKRNGGLRTIHHPSRGLKGIQRWVSKFLLRRLPVHVAAQAYVRGASIRKNAGLHANSKFTLRIDFADFFPSFSKEHVEVFLAAVERERQIGLVQQDISFVSRIVSRHGRLTIGAPSSPMLTNAMMHLFDSQISEFAERQKLIYSRYADDLFFSSNGPDNLSDVVATVRQIADSYPYANLRLNPDKTVFLSRRYSRRVTGLVLTTDGKVSIGRERKRAVKAQVYKFIQGELDNFEVPTLRGYLAFIQDVEPEFWESLNRKYGADTMLTVRGKQHFAALL

SEQ ID NO: 4352 - protein, 312 aa, unidentified
  source 1..312: note = Related to JACZKU010000431.1; note = Proteobacteria bacterium
MLVEALQKQSGLPTSVIMRIAETASKRYKAYKIPKRSGGWRDISHPSRELKAIQRWINRTLFMKLPIHESATAYAKGSGIRRNAEIHAWSSYTLRLDFENFFPSFDIHGISEFIAAQSDEREWGLTKQDVLFVGMVVTRYGRMTIGAPSSPILTNAMMYMLDSELAEISEKRKLSYTRYADDIFLSAYAPDSLADMIPIAKEIVGRQKFVRLKFADEKTAHLSKRYKRSITGLVVTPDQKISIGRERKRTIKSLVFRFINGELGDVELMRLSGTIAFVYDVERAFYDSLVRKYGEDVIGKIQKPHLADAEST

SEQ ID NO: 4353 - protein, 324 aa, unidentified
  source 1..324: note = Related to JAIUNO010000183.1; note = Proteobacteria bacterium
MLLEKLQIQSNQSLERLERFATSASKRYKVFQIPKRSGGFRIIEQPSKEIKAIQRWLIEALFDEFPIHHSATAYIRGKNIRSNAEVHAESNFTLKLDFENFFPSFTERHLIKFLRNYPLIEKKQINDRDINFISRICLRNGRLTIGAPSSPTITNAMMYQFDTLMSARCAEDNFSYTRYADDVFVSSRSYINVGEIILFVENLLSKYEYASLRLNKDKTAILSRKGRRSITGCVITPQRGISIGRKLKKSIKHKIYESINGRLSSLEATKLMGYLGFLKDIEPNYFESLKKKYGADAIKTITSGNYDEIKLVPLILDDLDDTPF

SEQ ID NO: 4354 - protein, 307 aa, unidentified
  source 1..307: note = Related to NZME01000040.1; note = Thalassospira sp.
MILEWIAKETGVGAAQIATIVRSANNRYCTYSIPKRDGTPRQISQPSKKLKFVQRWLAKRVFVNLPVHKSATAYLPGVGIRKNALEHASSKYLLKMDMSDFFPSIREEDIVKLMLLNSEKWAGFEDADANFIGKAVSYRGALTIGAPSSPVLSNAILFEFDELVHEYCINNELVYSRYADDISISSKGRIDLHAVSGVVEEFVQKLETPKLNINREKTVIVSKKHQRFITGLNLTSDGNVSVGRLRKREIRTLIFKFKSADLDFSEIGYLKGWMAYLNAVEPSFVERARLKYGDRTVQKIFEYDVDG

SEQ ID NO: 4355 - protein, 326 aa, unidentified
  source 1..326: note = Related to JAEUOZ010000023.1; note = Rubrivivax sp.
MNYAELLQAWCRLLRATPQDVTVLLMRGPYQYKHYQIEKRTGGKRDIFHPTPNLKAVQRWLVNEHLQTLPVHDSVYSYRVGRGIRQHADAHVHSNFLLRLDFKDFFPSITQDWLLQFLLQSAHEGSLSLDDRAIAACMRVLCRFNKFDGSLALSIGAPSSPAISNAILFPADVDAHSRCAELGCLYTRYADDIYVSSREKNVLVEAERQVKAAFSQHAPRLQFNADKRINVSKKAKRVVTGLTLTPDRKLSIGRELKRSIKTLVYLHVSGKLDPVERPRLCGLVSYVRDVEPAFYNSLVLKFGHVTMEELFRCGPGEALYLPNEGL

SEQ ID NO: 4356 - protein, 316 aa, unidentified
  source 1..316: note = Related to NESB01000001.1; note = Limnohabitans sp.
MTRNDLIFALAKLLRASHEDIQKLILTAPYQYKHYKIKKRTGGYRDIYHPTASLKAVQRWLVSNCFLHLMIHPSVFSYREGVGIRQHASQHLHSNFLLRIDFKDFFPSIDQSWVLDFFYQEVNAGRLPIQLETVPTLARLVCRFAKEEKTMALSIGAPSSPLLSNAMLFALDQDMDEYCRAHDCVYTRYADDIYISTKHPNILSGIRDLLTSKILEFTPKLVINDKKTINVSKKIKRVVTGLILTPDRQVSLGRNLKRSIKTKIYLFTHGQLPVDEVEHLRGLVAYASDAEAVFYDALIHKFGSASIDRLLNRKKN

SEQ ID NO: 4357 - protein, 321 aa, unidentified
  source 1..321: note = Related to NZ_CP093331.1; note = Pseudoxanthomonas daejeonensis
MNYSDLLSSAAKLLRTSSIEAERIIITAPYRYKHYKIEKRNGGQRDIHHPTPALKAIQRWLVSTPLANLPVHDCVYSYRKGRNIAMHAAMHVESNYITRFDFSDFFPSITATTIRRFLLEETMKGTIDLDTAAINAIVRLVCRAEDKSGKLVLSIGAPSSPHLSNAVLHDFDHVMESSARIAGGMYTRYADDIYVSGRTKETVALLEKAFIRETSKLLPYLKINERKTQRLSRKRRMAVTGINVTPQRKLSVGRDLKRSLKTKVHLALLGQIAPEELSALRGMIAHVASVEPAFMDSLSKKFGVERLESFLTSREIEEVSR

SEQ ID NO: 4358 - protein, 314 aa, unidentified
  source 1..314: note = Related to JAFLDZ010000021.1; note = Xanthomonadales bacterium
MKNADLERALSAYLRIKPPDLRQIVRTAPYRYKHYQIDKRNGGKRDIFHPSPELKAIQRWLVENVLLNIPVSPSAMGYEKGCSIRDHARQHLQSNYFTKLDFSNFFPSIQLDWITRFLLESLPDYDNEAIHSIARLACRWADAGMPLALSIGAPSSPALSNRIMFALDTALSEVASANDVTYSRYADDIYFSCAKANTLHDLEREARKIIIEMTPALRLNEQKTLHTSRKRKVLISGVGITSTRKLSIGRNLKRSIRTQVFLWSMGSLPAENFPKLRGLLNFANDIEPEFLASLHRKFGDDLIKRFLAGDFERN

SEQ ID NO: 4359 - protein, 316 aa, unidentified
  source 1..316: note = Related to JAFECW010000526.1; note = Proteobacteria bacterium
MNRNQLIAELAAQLRVSPANIERVIASAHRRYKRYTLIKRTGGSREIFHPTPELKAIQRWLIKNVFDQLPTHPSVHAYEPNCSIARHAAAHRRSNFFLRMDFSDFFPSISAQWVKNFLLESIQAGLVDLDKDSVDSICRLVCRRGRLEVESKLTIGSPSSPSISNRILYTFDSKLFEACHERGVIYTRYADDIYFSTREPDVLHEIEQIVTDLVRATVPELSLNRKKTQRASRKRRVLITGLVITSDRKISVGRDLKRSVRTQIHLWKQGNLPLEDIPRLRGLVSFIAGTEPEFLSSISRKYGAESIERLLNPAIN

SEQ ID NO: 4360 - protein, 326 aa, unidentified
  source 1..326: note = Related to DNQH01000067.1; note = Candidatus Andersenbacteria bacterium
MMNNDNLITAWSGLLRSSSEDVIRFIFTAPHRYKHYKIPKKTGGFRDIYHPTPELKAVQRWLNANIFSSLRIHDAVYSYRNGRSIKDHASIHLSSNYFLRLDFKDFFPSIELSWVEEFLRFNSNNNIIPCDLTTISTISHVVCRYSEKEKTNALSIGAPTSPILSNAILYDLDQAVSRLCSENDVIYSRYADDIYLSTKHKNSLDRIGSDVLELVGKLVPMLQINQKKTIYSSRKRKVNITGLNISTERNVSVGRELKRSVKTEFHLWCIGKLPNEKLTRLRGMISYVKGVEPSFFDALRNKFGAEKMESFLSLNIAPIEFVEIPF

SEQ ID NO: 4361 - protein, 322 aa, unidentified
  source 1..322: note = Related to QFOJ01000011.1; note = Pseudoxanthomonas spadix
MNKNELLIKLATHLDILPEEVEHILKSAPYRYKHYTLKKRGGGARDIYHPTPEMKAIQTWLVANIFAALPVHESVYSYRSGLSIADHARVHVKSKFVTKLDLQSFFPSIAGIQVRAMLRAANAAKKVALTDDAIATIVRFCCRGDRGGGDLRLSIGSPSSPAISNAILYGLDENLKKASHHVGVTYTRYADDLYFSTSDRDVLAGVERAARSIIARYGFLKVNEDKTQRTSKKRRVVITGLTATSAGGVSIGRGRKRKIKTELYLHFSERLPLDKIGTLRGLVSFSMGVEPNFYHSLCLKFGENRMRAFIAEGGNGGQSAPF

SEQ ID NO: 4362 - protein, 321 aa, unidentified
  source 1..321: note = Related to JACPTK010000096.1; note = Betaproteobacteria bacterium
MTLLSRMAADMGLSSAYIHKIAVSASHRYKVYSVRKRTGGRRVIEHPARELKLLQTWLLDKLFSHFRASDSVYSYRIGKSIRGHANNHRRNSFLLKIDLKDFFPSITSEDVYKFLKDRQNDLSSPLTPTDCRLIAAIVCRRGRLTIGAPSSPAISNSILYRFDLAIATFCRQRGVTYTRYADDLFFSTNTPNLLTEINKEVRRCLSALPYPRLKINPEKTVFTSRKRLRLVTGVVLTSDKRLSVGRAKKRMLRTLVYLFSTDRLDEKKTAYLRGNLAYVASIEPTFIGSLEKKFGKRVLDRLHKQPLINLKPKSRSAEGFK

SEQ ID NO: 4363 - protein, 305 aa, unidentified
  source 1..305: note = Related to DMQK01000160.1; note = Nitrospira sp.
MFLQQLVKITGLSEAYIIKLARTASHRYRTYQIPKRKSGVRTIDHPSRHLKFLQRWLVRNIFSYAPVHPSVYSYKEGVSIRQHASLHVKSKYTLRIDFRDFFPSIKSADVQKLLDKNVERFPFQLTDRDIHIILSLSSKDGKLTIGAPCSPAVSNAIMYDFDKHWSQRSKRLNVIYSRYADDIYFSTNRSGVLSKILSELKEHLATRDSPRLILNNAKTVFASRKRRRVVTGIVITPTRKLSLGREKKRQLRTLTFLFGKGQLDRDRAKSLQGFLSYASTIEPIFISRLRKKFGDELISKIVQMP

SEQ ID NO: 4364 - protein, 337 aa, unidentified
  source 1..337: note = Related to NZ_WESC01000006.1; note = Parvibaculum sp.
MILERIARETGIGVDHLRVIVKTASRRYKTYTIPKRTGGRRTISHPTPEVKFLQRWLVRNMFSALPVHHAVASYREGVGIADNAQAHVRKNYLLKIDFKNFFPSIRAADIRHLLEKNSSRFSDILTDDDVQVITDIVCKNGALSIGAPSSPILSNAILIDFDEFVFQASKDREVIYTRYADDLFLSTDKPNCLSVMMELIRIRLSSGGQPSLSINEEKSVFTSRKRNRTVTGLVLTSDRTLSVGRKKKRQIRTMIHLYQEDKLSAESISYLRGYLAFVHAAEPDLLVRLQQKFGQETMDQLMCYPLVPRKGHGRGAQRPAIPLGAHKTGSPQNSSDS

SEQ ID NO: 4365 - protein, 309 aa, unidentified
  source 1..309: note = Related to CP053449.1; note = Proteobacteria bacterium
MRIAQIIAKQTSAVTAAHLIALANSANHRYKTYKISKRNGQHRTIEHPSRQLKFVQRWLGRKLFSKFPIHSKAFAYVRGKSIAHHAEIHVSNNYLLRIDFKNFFPSITAENIKHKLNDFRYKDGSNLEPAEIDFITKIVTKSGQLTIGAPSSPIISNILMYEFDHYWDQYSSERGITYSRYADDIYFSTNVPNLLNQCLIDVREYLRENPNPRLFINDNKVVHTSKKRNRTVTGLTLTSDRKVSIGRDRKRQIRSLIFKHKNGLLNEQQIGQLSGILSYVRSVEPEFITSIEQKYGGAFINSISGVNQT

SEQ ID NO: 4366 - protein, 317 aa, unidentified
  source 1..317: note = Related to JACQAP010000013.1; note = Betaproteobacteria bacterium
MILRSMAADMRVPVAYIELIATTASHRYKIYRIRKRTGGTREISHPSKELKGLQRWLVLHVFSQLPIHDSVYSYRNGLSIRDHAEVHKRNNYLVRIDFKDFFPSITAKDVARLLLANRQNLPLTITAADLKAICWIACRNGRLTIGAPSSPVISNAVLYPLDEYWFNTCEQRGISYSRYADDIYLSTNAPNVLATIYKEIRKDLEEREWPKLQINQRKVVFTSRKHNRNVTGLILTSDRRVSIGHKKKRWLRSQVFKFMEGQLPAEQVSYLRGYLSFAKSVEPSFLTRLRKKYGASVIHQIANIQPMQLKLVKVRKK

SEQ ID NO: 4367 - protein, 317 aa, unidentified
  source 1..317: note = Related to SCTX01000106.1; note = Betaproteobacteria bacterium
MILRKMAEDMRVPLAHIELLATTANHRYKIYRIPKRTGGTREISHPSKELKSLQRWLALHLFSRLPIHDSVYSYRIGVGIRDHAEIHKRGNYLVRIDLKDFFPSITSKDVARLLIENRQKLGQIITATDLKAICWIVCRNGRLTIGAPSSPVISNAVLYAVDEYWSVTCEQRGITYSRYADDIYLSTNRPNILAGTYDEMRKDLENREWPKLQINRRKVVFTSRKHNRNVTGLILTSDRRVSIGHEKKRQIRSQVFKFTQDQLSAEQVSYLRGYLSFAKSVEPSFLTRLRKKFGVSVIHQIANTQSIQIKKVKARKQ

SEQ ID NO: 4368 - protein, 306 aa, unidentified
  source 1..306: note = Related to JAIQGJ010000086.1; note = Acidobacteriia bacterium
MILERISAQLALPTPFLGKLARTASHRYKEYPIKKKSGGTRTIHHPARELKLIQTWLLHNVLIRLPVHAAATAYRQGFSIKRNAEMHVSHNYLLRIDFQNFFPSLTGIDVVGILQANRQKLADVEVTDQDIIFITQIVCRYNSLTIGAPTSPQLSNAIMFKFDETWSRMAQALEVTYSRYADNLYFSTNRPDTLREILGRLRESLNEVGHPALKINEDKTIFSSRKRRRLAAGLVLTSDRKISIGREKKRWIKSLVNRFKYKQLKPEEVASLRGWISYLRSIEPTFVLSLERKYGLDLAANSTWEV

SEQ ID NO: 4369 - protein, 314 aa, unidentified
  source 1..314: note = Related to DQSS01000385.1; note = Arcobacter sp.
MNIFQEEISSHFSKSYRDIFRYALSASRRYKSYTIPKRTGGSRDIVQPSKELKEYQRYIVSTLFNKLPVHYAVYSYQKEKNIKQMATKHINARFLLRIDFKEFFPSIKGEHIRSFLKSNVDYLETSINDYDLTLINLLVCKSNKLTIGAPSSPVISNTILYELDNFLFDKCNVEGIVYTRYADDLYFSTIHPNKLKTILPLLKQYLKTFFIRLVINEDKNIYTSKKRRQQITGLTLTTDKKLSVGRKKKRYIKSLIYKYSQQNIVPEEINYLKGYMSYLYSIEPDYIEKLRKKYSSELVGELLPLRHKEENDEE

SEQ ID NO: 4370 - protein, 309 aa, unidentified
  source 1..309: note = Related to JAIZOJ010000089.1; note = Sulfurovum sp.
MNIFQEEISRHFEKSYRDIFQYASRASRRYKSYTIPKKTGGSRKIIQPSKELKEYQRYLIETIFNKLPVHDAVYSYREGRSIKQMAEKHIDARYLLRIDFKEFFPSIRGEHIREFLTSNIHHIELSISDYDLTLINLLVCKSNKLTIGAPSSPIISNTILYELDKFLFDTCHAENIIYTRYADDLYFSTMCPNKLQTLLPILKQYLKTFFIRLAINEDKNIYTSKKRKQQVTGLTLTTDKKISVGRKKKRYIRSLIHKYSQQNITGEEANYLKGYMSYLYSIEPDYIENLVRKYSKETIAELLPLKNNN

SEQ ID NO: 4371 - protein, 309 aa, unidentified
  source 1..309: note = Related to NZ_CP041235.1; note = Sulfurimonas sp.
MNTFQKQLSEKFEKPFLEIYQFAYSASRRYKTYNIPKRTGGNRIISQPSKELKEYQRYLITKVFSKFPIHESVYSYQDGKNIKGMALNHVNKRFLLRVDFKSFFPSIKGEYIRGFLVKNIELYELSLSKNDITLINMFVCKSNQLSIGAPSSPIISNILLYELDSYLSEICTNLNIIYTRYADDMYFSTNQTNQLEKILPLLKEYLKSFYIKLVVNEDKNIFTSKKRRQIVTGLILTTDGNISVGKNKKREIKSLIYQYIKQTISSADLNYLKGYLPYLYSIEPSYIDILKRKYTEKIICKLLPLKQDI

SEQ ID NO: 4372 - protein, 308 aa, unidentified
  source 1..308: note = Related to MUXE01000017.1; note = Arcobacter caeni
MLKFNELLKKEDDIDFFKLYLFSLDASRKYKTYSIKKRKGGLRTINHPSKELKKYQRILSKLIFSKLPIHESVFSYKKRISIKNLAEQHKNNRFLLRIDFKDFFPSLTSKNIRELLEKNLSLFDFELSKDDITLINNIVCKSNKLTIGAPTSPIISNALLYDFDCEMNNFSKKIKYSRYADDLYFSSNIPNLLQNIIPYIKTFLLNYKIKLQINEDKNIYTSKKRKRCVTGLVLTTDNEISIGREKKKYLKSLIFKYIKKTITSEELIYLKGYLSFVKSVEESFLNNLIKKYNPVIIKEIQELKNIVI

SEQ ID NO: 4373 - protein, 307 aa, unidentified
  source 1..307: note = Related to CP021072.1; note = Aliarcobacter cryaerophilus
MIFLESICKRFEKNLNQIVDFSTTANKRYKTYKIKKRTSGTRTIEQPSQELKLYQKFISEKIFLNLPVHEAVFSYKKNISIKNLADKHKNNRYLLRIDFKDFFPSIKGDNIRLFLKNSNLKLSDLEITLINLFVCKNNKLTIGASSSPSITNAILFSFDDDVYKFCLEQNIIYSRYADDLYFSTNEEGILSSILEYVKNYIFSYKIDLHINYDKNIYTSKKHRRIITGLTITTDGNISVGRKQKQYIKSLINSYKYKCLEDEQINYLKGYLNFLVYIEPTYIDNLKNKYGEVIINELFINKFNNKCN

SEQ ID NO: 4374 - protein, 310 aa, unidentified
  source 1..310: note = Related to CP053451.1; note = Proteobacteria bacterium
MIVKRIAQETGLDSAYLDKVVRTASHRYKTYKIAKKNGGLRIISHPAKELKFLQRWLVSNLFCHLPIHSAVFSYREGRNIKQLAETHIANNFLLRIDFEGFFPSILVRDVSNLLKNSIDVLPFQLSRSDVNKIGMIVCKDGRITIGAPSSPMLSNAILFNIDTEIADACVKKGVVYTRYADDLYFSTNEPMVLQEVFEGVKGVLRKNKSPKIRINAEKTIFTSRKHKKMVTGLYITPDRRVSIGRQKKRAIKALVYSYINQSIAEEDMSYLRGYLSYIKSVEPGFLRSLEKKYGQEVLQKIMIHEYVKRK

SEQ ID NO: 4375 - protein, 331 aa, Chromobacterium sp.
  source 1..331: note = Related to JAFBBB010000001.1; note = Chromobacterium violaceum
MNLIKVMADKFGLSPDFVQKTISFAPRSYKRFEISKKNGQKRTVYQPARKVKLLQSFVSDEIIKRFPLHPAVFSYREGLSIRDNAEQHRRNNYLLRLDFRNFFESIEIKDVIQFFIRNVKNAPFVLSHDDILLLSQLCCFRADDGKLRVVIGAPSSPSIANAILYDFDVEVFDHCKSQGIIYTRYADDLYFSTNHQNLLSKIPEFVSRVLSQTSSPRLMINEKKTYHTSKKHRRIVTGLTITSENRISIGRDRKREIRTLVFKCISNSIDIDKKEYLRGLLSYVSSVDPDFFFSLLRKFGEDAIYSIQKNQPQSDRNVLSTEESDSGEFPF

SEQ ID NO: 4376 - protein, 305 aa, unidentified
  source 1..305: note = Related to JACRMO010000001.1; note = Gammaproteobacteria bacterium
MIIQQIAKSSGIEASYLRTIVSTASHRYKIYKIPKKTGGEREIHHPSRELKYLQRWLVDNVFAYLPVHEAVFSYRDGKSIRDLAKKHANSRYMLRLDFASFFPSIVGSDVVRLLKNNVGSVPISLTTHDLMDIRNIVCRFGRLTIGAPSSPVISNAILFEFDNYIYSKCKQIGIRYTRYADDLIFSSQKTGVLSRVEADVIAALKHLPGPKLAINDKKTVFSSGKNRRKVVGLVITSEKKISIGRDKKRYVKSLVYKYINGILSADELVYLRGYLAFVNSVEPEFLAMLSAKYGSDKIRLITHPV

SEQ ID NO: 4377 - protein, 324 aa, unidentified
  source 1..324: note = Related to PAHM01000018.1; note = Bdellovibrionaceae bacterium
MTLNEIAKNLGVRISTLQSIARQANYLYISYRVKKYDGSYRTINHPSRRLKAIQREILKQVFSKAPVHVNVYSYKKGISIGDLARYHAGASYLTRFDFTKFFESILQSDIDLLIEKLIDSGSIDLLKSDIQTISKLVTLKGALTIGAPSSPMISNCIMYSFDVFCADYCRSKGVKYSRYADDIYLSSSSPNVLKPLGAFLITNFSKHTSLKLSLNRDKSLFTSKKHGMKVTGLTLTSDGKVSLGREKKRKIRSMLHHFSHGRLDERQAESLRGYLNFALNMEPTFITSMKAKFGKEIKQLSISPPKPKRWPFYSRQSIGIRGSY

SEQ ID NO: 4378 - protein, 333 aa, unidentified
  source 1..333: note = Related to JAFGUG010000057.1; note = Thiotrichales bacterium
MSIVKKIAEENGVPEHLINRIVNSSNHAYKTYEIAKKNGDTRTICHPSKKVKALQYWLNQNVFCHLPVHSSVYSYRSGLSILDVAKEHVGKKYFLKLDFKAFFPSITADDLRRHLHKHNNLVELDRDDIEVALKIVSYQEALTIGSPSSPILSNSILYDFDDKLTLFCIDKGVTYTRYADDLTFSTNDSNVLTEINSFTRELLQGFDGVKLKINEDKTQFLSKKGRVRILGLILTSDGKISVGREKKREIRSLVNRFKYDAIEPDHDSNGNVLSTIEEKKRSLQGYISFIESIEPDFISSLKNKYDENVIEAIKKFSYEEAIQSRTVIDRTPS

SEQ ID NO: 4379 - protein, 315 aa, unidentified
  source 1..315: note = Related to WGNH01000025.1; note = Alphaproteobacteria bacterium
MMIYPRTLTGTIDIENFLRKRPMLIDKFSKEIGLPRPSVQKIAASANYLYKHYTIPKRSGGERDIYHPTPRLKLVQRWITRHVIRDLPVSDAAMAYRKGKSITDNARLHAGKRFLLKMDFTDFFPSIKARDLQPILTSRGYDPEDVNFILTICFKSGSLTIGAPSSPAVSNIVMFALDQEFKGIADRRKLTYSRYADDLTFAGNVRGNLIEAKKDVERLIGTWASPNLTLNQRKTVLVSSAHRQKVTGITLTTDGEISIGREKKRELRAIVHRSTYQKLEPEVEAYVQGWLAYANSIEPKFVDSLRKKFDTYLDF

SEQ ID NO: 4380 - protein, 313 aa, unidentified
  source 1..313: note = Related to FNEQ01000013.1; note = Duganella sp.
MSLRDRLEKSLPFSRKEIDLLVLSAPLRYKTYQIPKKTLGKFREVSQPTPEVKLLQRWLISNVFGDFAVHDAAKAYRNGIGLLQNVAPHKNHRYLLKLDFSNFFPSISSGHFFEFMDGKGYDHDDLIVMSRVFFKNYRKTASLRLAIGAPSSPALSNILLYDLDVAISNFCRNLDITYTRYADDLSFSTNTAEVLSEVEKNISKIIKENCIINLTLNEEKTVHASKKNGRKITGLTITSDNKISIGLQQKKLLRAKIDRYQKGLLTQDAIDSLKGYIAFVDSVEPEHLVRLTKRYGIEIMRQLYTRINLENNI

SEQ ID NO: 4381 - protein, 312 aa, unidentified
  source 1..312: note = Related to NZ_WWCJ01000015.1; note = Massilia guangdongensis
MSLRDQLLRALPFNATELDLLIWSAPLRYKTYYIKKRQPGLFREVSQPTPEVKLLQRWLVANVLSNFPVHTSAKAYKRGTGLIENVQPHVQHRFLLKVDFENFFPSIKADHFIRFASDAGIDDLDSNLMKQVLFKRTKGTGSLALAIGAPSSPHLSNLMLHSLDCALALTASRENIAYTRYADDLSFSTSTPGVLSEFEKKLPLIIRENCDIPLKLNAEKTIHASKKSGRRITGLTITPQGTISVGLEQKKLLRSQIHRFSKNELNAESIQSLTGYIAYLASIEPAHLVRLARYYGIDVMRALYPPISDLLV

SEQ ID NO: 4382 - protein, 305 aa, unidentified
  source 1..305: note = Related to JABXFH010000020.1; note = Janthinobacterium sp.
MSLKKILEKSLPFSSKEIDFFVMSAPLRYKVYKIKKKEPGKFREVSQPSAEVKLLQRWLMLNVLVKFKVHDSAKAYKAGVGLLDNVSPHVNNRFLLKMDFENFFPSITSGDFFDFMVGKGYDYEDIVVMVSILFKKDRADDSLRLAIGAPSSPLLSNILLYNFDVALDDYCQTLGVVYTRYADDLSFSTKNSGVLNGVEKALGGIIESSCSISLKVNRDKTIHSSKKNGRKITGLVIGSDNKVSIGLERKRLLRSQVYRFKKGFLDPEQVGSLKGYIAFLQSVEPEHVKRLINIYGRETMFLLLS

SEQ ID NO: 4383 - protein, 306 aa, unidentified
  source 1..306: note = Related to AHJE01000051.1; note = Cupriavidus basilensis
MSLKDRLLRALPFSRQELELLISTAPFRYKEYKIPKRKEGAFRLIAQPTPEVKLVQRWLVKNELSTLPIHSAAKAYKADTGLIENVIPHKNHRFLLKLDFENFFPSITASDFHQFMEDNGFSNTDIPTLINLLFKRDHATKSLRLAIGAPSSPTISNILLYPLDRALDNHCSDLAVSYTRYADDLSFSTNLPGILKDIEQSVPALIKASCSLNLRINKNKTTHTSKKRGRRVTGLVITSENEISVGRFRKRLLRAQIHHFGAGKLPPEETEALRGYLSFLNSVEPDQIDRLRIFYGKELMSRLMSR

SEQ ID NO: 4384 - protein, 305 aa, unidentified
  source 1..305: note = Related to NZ_JACOGA010000020.1; note = Undibacterium flavidum
MSLRTRLLANLPFSKNELNLLIASAPIRYKEYSIPKRQPNKRREVSQPTPEIKLIQRWVVENELNKFPIHESARAYKKNVGLIANVLPHKNNRYLLKVDFKDFFPSITNHDFRKFMIGTEFSDDDLHDLSQILFKADHKTKTLRLAIGAPSSPLLSNILLYSLDSVIHDHCKEIEVTYTRYADDLSFSTNRPNLLTSLYENLPILISSGTDIHLTVNIEKTVHTSKGNGRRITGLTITEKNEISIGRERKRILNAQVFRFKNNLLSIEDIEKLKGYISFLRSVEPEHINRLIQKYGESTILALQR

SEQ ID NO: 4385 - protein, 305 aa, unidentified
  source 1..305: note = Related to JABFMQ010000002.1; note = Herbaspirillum sp.
MLLKELMLESLPFSSGELEVLIGTAPFRYKEYKIPKRDSDKFRQISQPTPEVKLLQRWVVVNVLSQFPVHPAATAYRSGRGLLENVRPHQKNRFLLKVDFKDFFPSITSENFKVFLKESSYSDAEIRILCNILFKLDRRTEQLRLAIGAPSSPALSNILMYRFDEVISKFCDRLYVVYTRYADDLTFSTNERDVLCKVEKALPEVIAEFGLIALTVNQEKTRHASKKTGRQITGLNISSEGEVSIGRDRKRLLRVQIFKFSKGELTADEIDSLRGYIAFLQYAEPAHVTRLRSSFGDDLISRLCS

SEQ ID NO: 4386 - protein, 305 aa, unidentified
  source 1..305: note = Related to NZ_JABUXU010000010.1; note = Advenella sp.
MSLKTDLLQALPFTEHELTMLIATAPRRYKEYTIEKRRRPERRNIAQPTPEIKTLQRWLSKNVLSKFPIHASATAYRKDVGLSANVSPHLGNRFLLKIDFKNFFPSIESDDLVAYLEKKAELTNDDCYILTQILFKKNVEKGKLTLAVGAPSSPQVSNILLFQFDEAVSNYCLAHNIAYTRYADDLSFSTSTPVILRDCLSVVRKIIQDLPYPKLVINEEKTVETSKKRGRRITGLTITNDDTISIGRLQKRKLRVLIHRFKTGNLDACEQESLRGYLAFLNSVEPKHVERLKISFGVDTLALLL

SEQ ID NO: 4387 - protein, 305 aa, unidentified
  source 1..305: note = Related to NZ_CP089848.1; note = Paralcaligenes sp.
MSLKVDLLQALPFTAQELDVLIATAPRRYKEYTIEKRNKTGRRNIAQPTPEIKTLQRWLSKNVLSNFPIHASATAYRTGVGLAQNISPHLNNRFLLKIDFQNFFPSITSDDLLAYLEKRKEFTDDDRYVLTQILFKRDAERRKLTLAVGAPSSPQLSNILLFQFDEDISAFCIENKIAYTRYADDLSFSTSTPEILRGCLNTVRQILRDLQHPRLLINDGKTVETSKKRGRRITGLTITNEGAISVGRLQKRELRVLIHRFLNGHLDACEQESLRGYLAFLYSVEPTHIERLKASFGASTLASLL

SEQ ID NO: 4388 - protein, 304 aa, Achromobacter sp.
  source 1..304: note = Related to ALJE01000030.1; note = Achromobacter marplatensis
MSLRSKILMDLPFTERELSLLIISAPRRYKEYWIPKRNGRQRLIAQPTPEIKLLQRWLVQNYLSGFPVHAAATAYRQGIGLKENVLPHLRNRYMLKLDFENFFPSLKSSDLLNFLKDAPLDQVDINMLAQLLFRKADLGLELAVGAPSSPHLSNVLMYKLDDRINGFCTANGIAYTRYADDLTFSTSKPHVLRECLQFVTSALAETASPKLRLNAEKTVETSKKRGRRVTGLSISTESKISIGRDKKRDLRVLVHRFTKGDLNAEEIQKLRGYCAFLRSVEPEHLDRLAKSFGVEVLLALTEGY

SEQ ID NO: 4389 - protein, 306 aa, unidentified
  source 1..306: note = Related to QTOY01000016.1; note = Burkholderia stagnalis
MALKDLMLESLPFTSTELDRLIETAPLRYKEYEIPKRNSDDKRPIAQPTPEVKLMQRWLMDEVLRKFKIHHAATAYRKGVQLVDNVRPHANNRFMLKLDFRNFFPSIIAKDFASYLVKSGWRNRDDIHLLCNVIFKFNRRRKLLELSIGAPSSPMVSNFLMFDIDQEIYQYCKDNEITYTRYADDLTFSTNRTEILRDCKDFVVDVLDNTDSPLLRLNVDKIVETSVKRGRRVTGLGITSDNKVSIGREKKRALRLEIYRYINGYLSATDSEALRGYLAFLKSVEPEHIQRLQKSFDDDRLGGLLP

SEQ ID NO: 4390 - protein, 315 aa, unidentified
  source 1..315: note = Related to CAKMAA020000066.1; note = Candidatus Nitrotoga sp. HW29
MSIFDRMLRELPFSASELKYLIATAQYRYKVYKIPKRQSNQFRTIAQPSPEIKLLQRWLMSDILSTFPINKAATAYREGRSIADHASLHAKKKFLLKMDFKNFFPSISAEDVHRYLIEYRKVSPEDTRLIGLLVCWRNKTDGKLCLSIGAPSSPLLSNAMLYTFDKVVTKLCRDQKVTYSRYADDLAFSTNKKEVLSVITTNIYDICNNLVYPRLVINEQKTVSISRSYRRVLVGLVLTPTGKVSLGREKKRRLRSELYRFSQGRLNLADVPKLRGELAFAWSVESDFIFTLLRQFSEGVFRQLDLPFSLPNEIN

SEQ ID NO: 4391 - protein, 315 aa, unidentified
  source 1..315: note = Related to NZ_QYUN01000002.1; note = Noviherbaspirillum sp.
MSLLQKMLIDLPFSGDELKALISTAPYRYKVYQIPKRQPNQFRTIAQPSAEIKVIQRWLIKNVLSSLPIHKAATAYRLGESISDHAVIHADKRFLLKMDFEDFFPSISAADIQMHLIQSGKLSQDDARLVRQIVCWFDKIKGGFCLSIGAPSSPLLSNALLYTFDKKITQLLKGKKVSYSRYADDLAFSTNRTDVLSTIPAQVQSICDELEYPQLRINHSKTVSTSRAFRRTLVGLVLTPTGEVSLGREKKRRMRSELYRFSKGLLAVTETPRLRGELAFAWSVERAFINSLVRQFGIEVFRILDLPFGEEYDLN

SEQ ID NO: 4392 - protein, 312 aa, unidentified
  source 1..312: note = Related to NZ_CP031704.1; note = Solimonas sp.
MNLLDRMIDELPFSKEELLEIIATASYRYKVFQIPKRQPGQWRTIAQPTPEVKLLQRWLVDNVLSQLPVHRAATAYREGVSIYAHAEKHVDKKYLLKMDFQDFFPSISADAVQQHLLGVGKIKEKDATLIRALVTWRNKVSGKRCLSIGAPSSPILSNTMMYRFDTEISIIAKRYGAVYSRYADDMAFSTNRKGVLTELSREVESLCGKLPYPRLTLNKQKTVYTSRAYKRVLVGLVLTPDRKVSLGREKKRELRSKLYRLLKGAPGVDSASLRGELAFANSVEPEFISSLVRQFGTDAFLQLGLPFGSSKA

SEQ ID NO: 4393 - protein, 312 aa, unidentified
  source 1..312: note = Related to NZ_ARWF01000001.1; note = Methylotenera sp.
MSIFNRMLTELPYSKDELLNLIATAQFRYKVYKIPKRKPNQFRTIAQPSPEIKLIQRWLVKSVLADLPLHKVATAYRKGKSIADHANLHKKYQFLLKMDFKDFFPSINVLDVRNYLIETANMSEDDARLVSSLVCWKDKEKNRLCLSIGAPSSPHLSNIIMYEFDEQVSIMCKELNVSYSRYADDLAFSTSQKNVLEKIPNIIKNICLALEYPKLIINDSKTVSTSRAKGRVVVGLVLTSEGNISLGREKKRQLRYELYKFSKGVLDHESISKLRGDLAFVWSVEERFIHTLLRQFGNEVFTNLELPFQKAD

SEQ ID NO: 4394 - protein, 313 aa, unidentified
  source 1..313: note = Related to JAGKSE010000017.1; note = Acidovorax sp.
MKLLQLLLREVPFEKQELLTIIATASRRYKVYQIPKKDGKSVRTIAQPAPEVKLLQRILHEKLIGKWPIHKAATAYISEQSIADHVRRHVNSKYLLKLDFKNFFPSITAADIRQHARRHSKLGEDDLDIFVNIVAWRNNLDHSFCLSIGAPSSPAISNSMMFEFDESISAFCKKKEVTYSRYADDLAFSTTHRDTLKEVEAEVHRLTLSIQSPKLTINEKKTVNVSKKYNRSLVGLTITPDQKVSLGRERKRDIRAKLYLYGRGYLNGEDVAHLRGLLAYAWSIEPTFILSLAEKQGNELFAKLELPFRNLKD

SEQ ID NO: 4395 - protein, 308 aa, unidentified
  source 1..308: note = Related to JAGOGO010000002.1; note = Deltaproteobacteria bacterium
MVVSLLAKLSKDLLLPKERLEYLIRSAPYRYKVYEVPKRSGTGMRTIAQPAKEVKRLQYWVIENLFPRLPIHPSATAYIKAKNILNNSELHVAKPYLLKLDFVDFFPSIKGDDFIQYIRELNNLDLDELDLQLLVRILFWYPKRIHNLQLSVGAPSSPYLSNAIMHRFDSEIESYCCQRSITYTRYADDMTFSMMEKAARSEVLNRVLQVIQQLPFPKLQINQKKTIFGSKAHRRMVTGLVLSNAGRVSLGREKKRRIRAQIHHLITGHLTPQEKSSLRGMLAFARSIEPNFVERMEQKYGKRVLSNI

SEQ ID NO: 4396 - protein, 311 aa, unidentified
  source 1..311: note = Related to JACRDD010000019.1; note = Desulfobacterales bacterium
MISSLLGSMSADLLIPKDRLDYLLRSAPYRYKVYQIPKRSGSGTRTIAQPAKEVKSLQYWVIKNIYPFFPIHPSATAYTIGKSILKNSEAHATKPYLLKLDFKDFFPSITGNDFLQYSKNIKQLALSDRDLRLLMRLLFWLSERNYDFRLSIGAPTSPFLSNAIMYQFDQVVFDYCNERNISYTRYADDMAFSMHNIKMRSEVLEMVQNTLTSLPFPKLQLNHKKTIFGSKAHRRIVTGLVLSNNDTVSLGREKKRRIRAQIHHLLLGRLDNKEISKLKGMLAFAHDIEPAFVERMVEKYGEKVIKSLRSA

SEQ ID NO: 4397 - protein, 306 aa, unidentified
  source 1..306: note = Related to VRUF01000040.1; note = Planctomycetes bacterium
MTLLGQMSKDLLVPKGGLVYLMRSAPHRYKVFPIPKHSGKGQRIIAQPAREVKRLQYWVIKNLFPRLEIHPAATAYIHGRNIRYNTEIHSQLPYILKLDLKDYFPSLKGDDFKRYASNHSGLSLSDEEVDHLVRLLFWQRDKDSQLQLSIGAPSSPGLSNALMYSFDSEIFSFCNANGINYTRYADDMAFSMREKEKRGDALRKVTEILEVMESPKLHINDGKTVFGSKAHRRMLTGLILTNDGRVSLGREKKRRIRSQIYHFIKGDLSDTKRQYLQGMLSFSKDVEPEFIRRMEKKYGIETLNSI

SEQ ID NO: 4398 - protein, 309 aa, unidentified
  source 1..309: note = Related to PHBJ01000028.1; note = Deltaproteobacteria bacterium HGW-Deltaproteobacteria-13
MKDVLLEKMSYDLLLKKEQIIHLILSAPHRYKVYQIPKKSGAGMRTIAQPAKEVKILQYWVIENCFPLMPIHRAATAYVKDKNIRDNCEPHIKNPYFLKLDFKDFFPSIKSDDFIQYMKNIGNITFDDIDIQRLARILFWCPKEYTGLQLSIGAPSSPYLSNAIMYRFDNEIDLYCTQHNISYTRYADDMTFSMLDKTLRENVQQKVIELLQSIPFPQLELNNKKTIWGSKAHRRMITGLIISNDEKISLGRERKRRIRAQLNYAINGKLTPEQKKSLSGMLAFVRNIEPDFVLRLEKKYGRELISNLR

SEQ ID NO: 4399 - protein, 305 aa, unidentified
  source 1..305: note = Related to MVRX01000406.1; note = Syntrophaceae bacterium PtaU1.Bin231
MLADRIADDLLLPMEMLQYLVRSAPHRYRVYRIPKHSGSGFRTIAQPAREVRMLQYWVMKNIFPELPVHSAATAYCAGKNIRDNCAPHAANPYLLKLDFRNFFPSIKAGDFIQYAAEARHLPFDPPELRMLACILFRRPKGKKEMVLSVGAPSSPYLSNALLYGFDDEMSRYCESRGIVYTRYADDMAFSMQDKAKRLEVLHKVRDVLRQMPFPRLTLNDRKTVFASKAHRRSITGLTLANDGRISLGRERKRQISAQLHHFVNGKLPQEERGKLRGLLSYVKDIEPAFFTRMAEKYGREKIAGI

SEQ ID NO: 4400 - protein, 306 aa, unidentified
  source 1..306: note = Related to VGGK01000004.1; note = Chlorobi bacterium
MANELLISQMSNDFMLPEKKLKKLILSAPYRYKVYSIPKRSGKGYRVIAQPAKEVKILQYWIVRNVLCKFVVHDAARAYVKGCGLLSNVSPHCYSKYLMKLDFKDFFYSIKAGDFLSYFSLYKDFGYSDMDIQEMVKILFYARNKGDYCLSIGAPSSPLLSNIIMSDFDKRVVEFCSSRSIVYTRYSDDMTFSMSDSLLRREVFFEIKRLLDIIPYPRLKLNEDKTLFLSKANKRMVTGLVLSNDGRISIGHDKKRMLRSKIYKYTKGHLDVDEVNQLKGMLAYVNSVEPDFICKMKIRYGDLIIF

SEQ ID NO: 4401 - protein, 309 aa, unidentified
  source 1..309: note = Related to NZ_LT907975.1; note = Pseudodesulfovibrio profundus
MGSKSVSFSLISKISSDLLIPVENLRYIIRTSPYRYKKYSIPKRRGRGVRSIAQPAKEVKKLQYWVIKNVLSKYPVHPAATAYKKESSILQNAEIHLDSRCLLKLDFEDFFPSILATDIVHFFEKGSLEFDEEEVNALASILSWARTRTAERVVAIGAPSSPMLTNIMLYDFDSVVRRWCDETKINYTRYADDISLSGDSKESLAEAKRKIAELLEEMNSPRLSLNNDKTVFAMKPFRRFVTGLYLSNEDKISLGRDKKRAIRAKVHHFVNGKFNQDQIQHLRGVIAFARSVEPEFVERLENKFGKLFQ

SEQ ID NO: 4402 - protein, 307 aa, unidentified
  source 1..307: note = Related to MEKZ01000132.1; note = Acidobacteria bacterium RIFCSPLOWO2_12_FULL_60_22
MLKNLGAALLLSQQELSRLISSAPHRYKTYLIEKRNRGQYRTIAQPAKEVKALQYWVIQNVLNMFHVHPAAIGYQRGKNIADNARSHVNSRFLLKLDFKDFFPSIRSADFDLYIRKQQIQITDQEVAALSRILFWNPKGTKDMCLAIGAPSSPGLSNILMFEFDSAVEAFCSEAGVSYTRYADDLSFSANLSDELRRVEEWVTHLCDNLESPRLSLNREKTVRVSKKRARRVTGLVLTNDSKVSIGRDQKRRIRASVHHFATGRLPEDQSRKLRGLLAYINSVEPSFLNRLRHKYGADTIKRLQSAT

SEQ ID NO: 4403 - protein, 316 aa, unidentified
  source 1..316: note = Related to FUZY01000002.1; note = Burkholderia sp.
MDLIDRLQSAFPLSRPEVELIIRTAPLRYKLHFIEKRNGRGQRQIAQPTAELKLVQRWLVSEFVNNLPVHPAAVAYRPQLGIKDHARKHAAKRYLLKLDFKDFFPSIQARDFHAHLARYTELSLPDKHALTRLLFRLDRETKEMVLSIGAPSSPAVSNTVMYRFDSMVSDYCKDLRVEYTRYADDLAFSTDQPHVLDEIQNHVRQLCRAMEYPSLTLNEGKSVFTSKKHQRQLTGLILTNEGKVSLGREKKREIRAMAHRFSNGDLSAEDVSRLRGLLAFAMSIEPQYVESLVRMIGQQSYHSLMRPGRRTHSSDQ

SEQ ID NO: 4404 - protein, 314 aa, unidentified
  source 1..314: note = Related to NZ_LMEK01000025.1; note = Variovorax sp.
MNLIERLQIAFPFSRREVELLIHTAPRRYKIHSIEKRNGRGLRMIAQPTAELKLVQRWLVSNYLQSLPVHSAATAYRPSLGIKDHAQLHASGKYLLKLDFEDFFPSIRGEDFRQHVARFSDVTLPDQTAMVRLLFRADVDAKRLILSIGAPSSPAVSNTVMYSFDLAVKEYCEQAGVRYSRYADDLAFSTNVPHILEAVKTRVVEICRTLEYPRLRLNEGKTVFTSKKHQRQLTGLILSNDGRASLGREKKRKIRATAHHFAQGVLSPEEVGKLRGLIAFAMSIDAEFVASINNMLGEQIFKELMRGNGEVAEG

SEQ ID NO: 4405 - protein, 308 aa, unidentified
  source 1..308: note = Related to JAIZPW010000002.1; note = Burkholderia contaminans
MNLIDRLQAAFPLSRAEAASMIETAPRRYKIHLIEKRNGRGLRQIAQPTAELKLVQRWIVANYINALPVHQAAMAYRPDLGIKDHAKEHATKKYLLKLDFRDFFPSIKANDFKQHLTRHTEISEADKVAITRLLFRYDRENQDMRLSIGAPSSPSVSNTVMFHFDTIASDYCNAAGVQYTRYADDLAFSTNTPHILDELQNFVRETCRQLDYPRLTLNEEKSVFTSKKFQRQLTGLILTNEGSVSLGREKKRLMRAMAHRFNLGTLSLDDTKKLRGLLAFAISIEPEYVNSIIRMIGEPSYKSLMRGN

SEQ ID NO: 4406 - protein, 310 aa, unidentified
  source 1..310: note = Related to NZ_CADFAD010000001.1; note = Burkholderia gladioli
MDLIDRLQAAFPLSRAEVELLIKTAPRRYKIHTIEKRNGRGLREIAQPTAELKLVQRWIVSTYINELPVHSAAIAYRPGLGIKDHAKKHAARKYLLKLDFKDFFPSIRAGDLRAHLTHHTDLSTADKSALMRLLFRLDSENGAMVLSIGAPSSPAISNTVMYPFDIAIADYCRENDIAYTRYADDLAFSTDTPHVLDALQDFIRKTCRGLIYPSLTLNEKKTVFTSKKFQRQLTGLILTNDGTVSLGREKKRDLRAMAHHFSRGALSNEEMSRLRGLLAFAMSIEPQFVHSIIRMIGKEAYAQLMHASGT

SEQ ID NO: 4407 - protein, 305 aa, Alcaligenes faecalis
  source 1..305: note = Related to DOIE01000002.1
MNIIENLQKAYPLSKEEVEFFIQSAPRRYKVHHIEKRNGRGLRVIAQPTAELKIIQRWVTKKFINKLPVHDSAMAYRLGKGIKNHANSHAQQKYLLKLDFKDFFPSIKPRDLKLHLANYTDLHKDDISVILKLLFRYDKSKGLSLSIGAPSSPAVSNTIMYPFDEMVSDYCKKRKIKYTRYADDLAFSTNHPHILDVLQNFIRELCESLKYPKLKLNEEKSVFTSKKFQRQLTGLILTNDGKISLGRDKKRLIRAMAHNYKIDKLDPKEVSRLRGWLAFALSVEPEYVESIKRMLDKDIYEKLMK

SEQ ID NO: 4408 - protein, 327 aa, unidentified
  source 1..327: note = Related to CP063848.1; note = Massilia sp.
MDATNSELLELLCDEHPLTRAEAWELILTAPRRYKIHYIEKRNGRGRRLIAQPTAELKAIQRWIISKYIAAMPVHEAATAYRPHKNISDHARVHAKNKYLLKVDFKDFFPSIRDRDFVQHAVKHLGISTRLASELSFLLFRRDENKGLSLSIGAPSSPSVSNSLMYEFDLKLSEYCDANEIVYTRYADDLALSTNKPHELDKANEFIRELLGCIRYPRIEINPEKTVFTSKKFQRQLTGLILSNEGKVSLGRDRKRSIRAMADHYRKGKLAPELHTKLKGWLAFSLSVEPDFVRSIRTMMGEFHYFKLVSVNEKMEAEGIIPSGDEW

SEQ ID NO: 4409 - protein, 327 aa, unidentified
  source 1..327: note = Related to NZ_WWCS01000001.1; note = Duganella margarita
MDATNSQLLELLCEEHPFTRAEAWELIRSAPKRYKVHFIEKRNGRGRRLIAQPTAELKTIQRWIVNKFIAPLPVHDVAMAYRPGKNIADHARSHAGNKYLLKIDFKDFFPSIRARDFTRHIVKHLGVNTRLASELALLLFRKDENKRLSLSIGAPSSPSISNTLMYEFDCKLSEYCKENEITYTRYADDLALSTNKPHQLDKANEYIRELLNCVKYPRIMINPEKTVFTSKKFQRQLTGLILSSEGKVSLGRERKRLIRVMADHYRKEKLDPNLHTQLKGWLAFSLSVEPDFVRNIRALMGEEYYSKLISIDVKVATEQLIPADDET

SEQ ID NO: 4410 - protein, 338 aa, unidentified
  source 1..338: note = Related to WNKY01000030.1; note = Duganella radicis
MTRSAAKPMRRSMDATNSQLLNLLCDELPFTRTEAWELIRSAPRRYKVHFIEKRNGRGKRLIAQPTAELKAVQRWVVTRFISQMPIHDAASAYRTNRSIGDHARLHARNKYLLKIDFKDFFPSIGARDFKRHAIKYLAIDARLASELALLLFRRDEHKRFTLSIGAPSSPVLSNTLMYEFDSKLSEFCEPKGITYSRYADDLALSTNKPHELDTAFKFINELLNDLAYPRLTINQEKTVFASKKHQRKLTGLTLTNAGDISLGRERKREIRAMADHYRKGKLEGNRHGQLKGWLAFALSVEPEFVRTIRKLLGEEMYAALLSFGDVSAPLVTQLDDRE

SEQ ID NO: 4411 - protein, 323 aa, unidentified
  source 1..323: note = Related to PEFN01000001.1; note = Janthinobacterium sp.
MVDNNSELVDMLCDELPFTRTEAAVFIDSACRMYKIHFIEKRNGKGKRLIAQPTAEVKEIQRWIIKKYIKNLPIHNAATAYREGRNIFDHARPHVKNKYLLKVDFKDFFPSIRAHNFSKHIRKHLGISKPLAIDLARVLFRQDEKRRLSLAIGAPSSPSVSNTLLYEFDSQLSIFCQANNIQYTRYADDLALSTDTPKILDEALKFIEKLIKDIPYPKLSINNEKTVFTSKKFKRELTGLILSNDGSVSLGREKKRMIRTMAHKYSSGELHDSLIGRLKGFLAFAHSIEPIFAAKIREKIGEEKYNSLTNFQETNHQKKVQDF

SEQ ID NO: 4412 - protein, 307 aa, unidentified
  source 1..307: note = Related to JACPYR010000019.1; note = Nitrosomonadales bacterium
MNLIEHIQKDFSLSLHDARVLIFTASRRYKLHYIEKRHGRGKRLIAQPTAEIKLLQRWAIESYLSKLPIHRAATAYRPGRGIKDHAEVHADNRYLLKLDFQDFFPSILGRHFLMHLKSHASIADDDAKFLMRLLFRFDRDSQDYVLSIGAPSSPAVSNTIMYDFDNALTDYCKTHDIIYSRYADDLALSTSKPKVLDDAFNFVKQLCKDVPYPRLQLNDTKTVFTSKKHRRQLTGLILTNEGKPSLGREKKRLIRSMAHRFSLSELPDDQILHLRGLLAFAYSIEPLFFSSINRMIGGEAFQRLMKG

SEQ ID NO: 4413 - protein, 307 aa, unidentified
  source 1..307: note = Related to MGWP01000046.1; note = Gallionellales bacterium GWA2_55_18
MNIIERIQSDFSLSLHDARVLIFTAAYRYKLHYIEKRHGRGKRLIAQPTAEIKLLQRWAVEKYVGQLPIHKAATAYRSGTSIKDHAALHAENCYLLKLDFQDFFPSILGRHFLMHLKSYMKISDDDANLLMRLLFRFDRESQDYVLSIGAPSSPAVSNTVMYDFDNKLTNYCRTHDIVYSRYADDLALSTSKPKVLNNAFDFVKKLCGDMPYPRLQLNDAKTVFTSKKHRRQLTGLVLANDGKPSLGREKKRLIRSMAHHFSLGELPQDQVLHLRGLLAFSFSIEPLFFSSINRMIGEEAFQRLIKG

SEQ ID NO: 4414 - protein, 309 aa, unidentified
  source 1..309: note = Related to NZ_JQKP01000004.1; note = Ferriphaselus sp.
MGLIERIQQDFTLTRREVQLLLLTAASRYKLHYIEKRHGRGRRLIAQPTAEIKILQKWAVANYVNLLPIHNAATAYRPGRSIKDHAVAHAGNRYLLKLDFENFFPSITGNNFFDHLKSYLEVSDEDANLLVRLLFRYELVSRNYVLSIGAPSSPAVSNTIMFKFDTALAEYCDANQIAYTRYADDLALSTNTPKVLNDAYNFVRQLCRETQYPRVSLNEKKTVFVSNKFRRELTGLVLSNEGRPSLGREKKRQIRSMAHHFSLGQIPPEDVPHLRGLIAFAISIEPEFIESIKRMISIELFQSLMSGQA

SEQ ID NO: 4415 - protein, 308 aa, unidentified
  source 1..308: note = Related to NZ_ARWC01000001.1; note = Methylotenera sp.
MKLITAIQNDLPLSISEIQLLLLSAPHRYKVHEIQKRHNRGTRVIAQPTSEIKVLQRWATTNILAKLPIHSAATAYVAESNTKKHAQAHAKNRYLLKLDFKDFFPSIKADDYLQHLIKYAKIDIDDARLLCRLLFWRDRVSNSLKLSIGAPSSPMVSNTVMYDFDTFVSEFCLKIEVVYTRYADDLAFSTDNPKVLESVHEFIITLCKNLPYPNLQLNEEKTVFVSKKHKRYLTGLVLTNDGKPSVGRDKKRQIRAMVNTYANGNMPDDELNRLRGLIAYAHGIDEKFIDSLIRMVGTENYNKLISGR

SEQ ID NO: 4416 - protein, 323 aa, unidentified
  source 1..323: note = Related to SSDX01000104.1; note = Rhodocyclaceae bacterium
MCQGQERITKFIRSNDMNVIRTIVNAYPLSLREAAVLIQTAPARYKVHQIEKRHGRGTRTIAQPTAEIKLLQKLLVREVIEKLPVNDAAKAYRSGQSIADHARPHASNRFLLKLDFKDFFPSIRGADFLKHLHKHSEIGTEDSKHLVKLFFWRPRGTRSLVLSIGAPSSPAISNTIMFDFDSALSDFCTREHVVYTRYADDLAFSTNGPEVLHRVHEHVINLCRTLKYPRLTLNDAKTVYTSKKHHRSLTGLVLSNDGKASLGREKKRQLRAMVHRLKYDLLNQEERAKLKGWIAFALSIDEEFVRSLKRIMGDQTFESLMRG

SEQ ID NO: 4417 - protein, 307 aa, unidentified
  source 1..307: note = Related to NZ_CP073754.1; note = Methylomonas paludis
MNVIEIILHEFPLGRQEVERLIRTAPSRYKVHEIEKRNGRGKRTIAQPTAEIKLLQRYLVDRYISNLPVNDAAKAYRLNHNILDHASPHAKNQYLLKLDFKDFFPSIRAVDFIKHLRKYSALSREDMKTLSRVFFWRPKGQRDLILSIGAPSSPAISNTILFDFDSAVIEHCIKNEITYTRYADDLALSTNQPNILNDAYIFVEMLCRSLKTPKLTLNADKTVFTSKKHHRQLTGLVLSNAGTASIGREKKRTIRAMAHHYKQGILSQEEHGRLRGWLAFMMSIDREFVTTIEKMIGEVAFQKLMQD

SEQ ID NO: 4418 - protein, 309 aa, unidentified
  source 1..309: note = Related to NZ_NWMV01000032.1; note = Macromonas sp.
MNVLELLQKKLPLSRSELLLLIATAPNRYKVHTIDKRHNRGKRVIAQPTAEVKALQKLLLGILRGKLPVHSCAKAYQPGTSIRDHALPHAPNRYLLKLDFKDFFLSIKGGDFSSHIKRHLDIPDVEIEIFTHAFFWTPKKTMDFVLAIGAPSSPWISNTILFEFDELLTDYCDSKNVKYTRYADDLAFSTNTPHVLKDVHAFVQDICKEIAYPRLNINESKTVFTSKKNSRSLTGLILSNEGSVSIGRAKKREIRAMAHKYQIGALDLESTLHLQGLLAFMQSIDPDFNQSIARMVGNDRYLTLTKQLQ

SEQ ID NO: 4419 - protein, 307 aa, unidentified
  source 1..307: note = Related to NZ_CP009962.1; note = Collimonas arenae
MKVLDQLFTDFPMSPQQLRILMLTAPYRYKFFHIPKRSGGRRLISQPAKEVKWLQRYVIEIIRKKIPVHRCATAYEPGSSIFANAEAHVQNRFLLKMDFKNFFPSITDMDVSHLIKSAYPDIEDGELELIVRLLVMSDKKNEKFVLAAGAPSSPFISNALLNQFDTELHLHCLSQNVVYTRYADDIALSTNAPLLLSELHKFIRVLVNEMKHPVLKINEEKTVYTSKKHNRKVTGLTLNSQKQVSLGRDMKRELRAAVDKFRKNELSQEAVSTLRGKLAFALAVEPEFVLRLRTHYTDEVITRLFQS

SEQ ID NO: 4420 - protein, 310 aa, unidentified
  source 1..310: note = Related to NIQA01000002.1; note = Pusillimonas sp.
MNMKSLISLLVDELPFSEREIRELLNSAPSRYKVHYIEKRKGRGLRQIAQPTAEIKLLQRWAINQYRDQLPVHPTAKAYISDSGIRQHAAAHVKNSYLLKLDFKDFFPSIKGIDVRRHLAKHLGAPSEDLSLLMKLFCWKGKPVGGLRLSIGAPSSPFISNSIMFEMDEKIQKKCSDYDATYTRYADDLAISTNQKDALSAIYEHILELCDSSKYPSLKINPGKTVFTSKKHNRHLTGLTLSSDGKVSLGRDRKRLIRAMTHAYTTGKLNPDELGKLRGWIAFAYSIEPDFVESLERMIGLQALNRIRRT

SEQ ID NO: 4421 - protein, 300 aa, unidentified
  source 1..300: note = Related to NZ_OU745373.1; note = Cardiobacterium sp.
MSLLQELSDKFQLHEQLMESFIKSAPYRYKFHKIDKRHGGKREIAQPVKSLKIVQRWLVKHYLSKYPTHSKSAIAYIKNKNIKDFAEPHRNNIFLLKLDFKDFFNSIKISDFYIFCEKLSIPEEDKIFLGLLLFCKNKQDEPYLSIGAPSSPTLSNVLMFNFDNEVFNLCKKDGIIYTRYADDLAFSTNQPNVLRQLLSNIKELCAKLNYPRNLQINTQKTIFTSKKYNRTLTGLVISNDGNVGIGREKKRKLRAIAHQAKLGRLSQDKVGSLLGKIAFLKGIDPSFAKQLEDKYLKHIS

SEQ ID NO: 4422 - protein, 300 aa, unidentified
  source 1..300: note = Related to CP005967.1; note = Haemophilus influenzae
MLINDLKEKFSLNEKEILSFINSSPSRYKSYNIKKRHGGTREIAEPTRSLKILQSWALNKYLSKYKIHPSAIAYVKNKNIKDFVLPHSNNKYLLKIDFKNFFNSIKGIDFLHFLEDKKSDLSNEERHLLTNIFFCKNKTSESKELYLSIGAPSSPFISNIIMIDFDDQISQLCANIGVTYTRYADDLAFSTNNPNILDELLEEIEIICKNLNYPKKLEINSEKTVFTSRKHNRTLTGLVISNDGKISIGREKKRKLRVIAHKASLRLLDQESLDKFKGTLAFLLSIDPDFSNYLKQKANI

SEQ ID NO: 4423 - protein, 302 aa, unidentified
  source 1..302: note = Related to LUAO01000054.1; note = Neisseria sp.
MLSVLENFKKTFSFSTVSAIIFIQTAPNRYKFHTIQKRHGGEREIAQPTKSLKIVQRWVINQYFQNSPIHKAATAYIKGKGILDHAEQHKSNKYLLKLDFKNFFNSINIQDFYEFINRSMPQFSEEDRDILGLLLFCKNKDDNYYLSIGAPSSPHVSNIILYKFDCLIQEICSKKGVVYTRYADDLAFSTNIPHILKGILCDIEHILSNLEYPKNLKLNQEKTVFLSRKHNRTLTGLVISNTGKISIGRDKKRKLRAAIHNAIHGKLTDEEIQTLKGRIAFLKGIDKEFAIKLEQELQSANL

SEQ ID NO: 4424 - protein, 306 aa, unidentified
  source 1..306: note = Related to NZ_LXSJ01000026.1; note = Eikenella corrodens
MSTIFDKICETFSLNPHEAEIFIKTAPERYKLHSISKRHGGVRYIHQPTKNLKFIQRWLVNSYFSSMPIHSCAHAYVKNRNILSNAKPHSHNKYLMKLDFSDFFTSITIRDFLIFAHDNLREFSYEEHHILASLLFCRHKINGDFVLSIGAPSSPIISNIMLYHFDQVLYDFCRTKYVYYTRYADDLSFSTNQPRILKEEVFPFVEGLCKTISYPNYLKLNKNKVVHVSKKFNRRITGLVLSNEGNISIGRDKKRQLRAMAHQMSLNKLPPEKINKLLGYINFLKGKIDPEFAEQLIQKLNNKHNK

SEQ ID NO: 4425 - protein, 319 aa, unidentified
  source 1..319: note = Related to NZ_LPEB01000197.1; note = Burkholderia ubonensis
MNIINAPLFERLLALSPFSARELGILIATAPHRYKDHYIEKRNGRGKRLISQPTAELKFLQRLIVKHEFSSLPIHGAATAYRSGSSIKAHALPHAHSRYLLKLDFSDFFPSLKANALRYRLSRDASYTEQELWILCQLLCRQPRRDAGLQLSIGAPSSPCVSNYLMWEFDSRLAEFCAACGTAYTRYADDIAVSTTFADVLDVVEAEVRRLLGELGYLGLSLNEGKTVNVSTKSRRTLVGLVLANDGTVSIGREEKRRLRATMHRLTQGGLSGDEVARFRGQLAFAHSIDASFVDLLCARHNFPNVASIGSPDGGDLTD

SEQ ID NO: 4426 - protein, 319 aa, unidentified
  source 1..319: note = Related to CABVPW010000018.1; note = Burkholderia lata
MSIANEPLFERLLALSPFSARELGTLVATAPYRYKDHYIEKRNGRGKRLISQPTAELKFLQRLIVRHEFSSLPIHEAATAYRPHRSIKAHALPHASARYLLKLDFRDYFPSLKASALRYRLSRDATYTEQELWILCQLLCRKPKRDAELQLSIGAPSSPHVSNYLMGEFDSRLTDFCGACGAEYTRYADDIAVSTSFPHVLDAVEGEIRRLLGELSYLGLSLNEGKTVNVSKKNRRVLVGLVLANNGVVSIGREEKRRLRATMHRLVQGALPADEVAHFRGQLAFVYSIDPAFVTSLCARYDFPNVGSIGAPSGGDSTD

SEQ ID NO: 4427 - protein, 319 aa, unidentified
  source 1..319: note = Related to NZ_JAELTS010000025.1; note = Paraburkholderia sp.
MSIINEPLFERLLTLSPFSARELGILIATAPYRYKSHYIEKRNGRGKRLISQPTAELKFLQRLVVKHEMSSLQIHNAATAYRPNRSIKEHALPHARARYLLKLDFRDFFPSLKATALRHRLLADANYSAQELWMLCQILCRRPRRDAELQLSIGAPSSPYVSNYLMYEFDSKLARSCEACGAEYTRYADDIAISTSFPQILDIIEVEVRRLLGELDYLGLSLNEGKTVNVSTKNRRTLVGLVLANDGNVSIGREEKRRLRAAMHKLTQGKLPVEETARLRGQLAFAYSIDPDFVNDLCARSNFASVAAISQPDNGKQTD

SEQ ID NO: 4428 - protein, 315 aa, unidentified
  source 1..315: note = Related to NZ_SNVI01000005.1; note = Paraburkholderia dipogonis
MSIVNEPLFDRLLALSPFSARELGVLIATAPHRYKNHYIEKRNGRGKRLISQPTAELKFLQRLIVKHEMSSLPIHDAATAYRSQRSIKEHALPHARARYLLKLDFRDFFPSLKATALRHRLLLDANYTEPELWMLCQILFRKAGRHTDLQLSIGAPSSPHISNYLMWEFDKKLAQFCELLGAEYTRYADDIAVSTSFPHLLDAVEAEIRRLLGELDYLGLSLNEGKTVNVSTKSRRTLVGLVLANDGTVSIGREEKRRLRATMHRLVQGLLAGEEVARLRGQLAFVYSIDRAFVDSLCARHGFTSVGSIGQPTSD

SEQ ID NO: 4429 - protein, 317 aa, unidentified
  source 1..317: note = Related to CP007783.1; note = Burkholderia cenocepacia
MNIISTPLFSRVLENSPFSERELLMLVLTAPERYKDHYIEKRHGRGKRLISQPTAEIKYLQRLIVARELSELPIHPAATAYRVGCSIKDHALLHASNRYLLKLDFTDFFHSIKQDAVLSCLSRDTSYSVNEQWMLVQLLCHRPRGAGDLQLSIGAPSSPFMSNYVMHEFDNKVDRMCRASGAVYSRYADDMAISSSLPRVLDAVEHQIRALLLEMKSPKLRLNESKTVNVSKKNRRTLVGLTLSNEGSVSIGRDEKRRLRAMMHALTEGRLDVTSVSLLRGKLAFAQSIDSVFVSQLCRRHGFSSVKDIRPPISSIG

SEQ ID NO: 4430 - protein, 316 aa, Nitrosomonas sp.
  source 1..316: note = Related to QWIC01000028.1
MSFAREPLFVRLLDLTPFSERDLAILIATAPRRYKDHYIEKRNGRGKRLISQPTAELKFVQRLLIKHELTHLQLHEASVAYRSGSSIMDHASPHASARYLLKLDFKDFFPSLKASTLQYRFTKDSDYSENEKWILCQLLCRGSLITGDLQLSIGAPSSPYISNYLMWEFDTKLTEFCKKYSAEYTRYADDLAISTSQPHALDKIESEVRRLLMELSYLKLTLNEDKKVNVSKKNRRTLVSLRLANDGNVSVGRQRKRQLRAAMNALIHGRLSTAEISRFRGMMAFVYSIDPNFVDQLCSKNGFATISAIDAVKIKK

SEQ ID NO: 4431 - protein, 315 aa, unidentified
  source 1..315: note = Related to CP001132.1; note = Acidithiobacillus ferrooxidans
MSIVTEPLFQRLLAWSPFSEHELVVLIATAPSRYKAYYIEKRGGRGQREISQPTKEIKFLQRLLASKELRELPIHDVAVGYRSGRSILDHAQPHASARYLLKLDFTNFFPSLKSKALDHRLSRDTAYSTAERWILRNLLCRRTPGTGNYQLSIGAPSSPHISNYLLCEFDQLMSDYCGIRVVRYTRYADDLAFSTSIPSVLNDIETEVRRLIQELDYLGLSLNEAKTINVSTKHRRTLVGLTLSNDGRASIGRIAKRELRQAIHSLRHGLLSQSEIANLRGRLAFTYAIDPEFIEHLLHRYGFESISTIDGPQTD

SEQ ID NO: 4432 - protein, 330 aa, Chromobacterium sp.
  source 1..330: note = Related to NZ_MKCR01000001.1; note = Chromobacterium amazonense
MIPEYESLFARILAQSPFSSKELVTLLGTAPDRYKDHFIQKRNGRGLRQISQPTAELKFLQRLLVNFEFCNLPVHNAATAYRAEKSIKSHAVEHAKNSYLLKLDFKDFFPSIGSDAIKHRLRLDMNYSETELWMLCQILCRRDRLTNRLQLSIGAPSSPFLSNYIMWEFDCRIQSYCDQLGVSYTRYADDLAFSTSVPHILDVVHEYVERLLRELSYLGISLNKEKTVNVSKKNRRSLVGLVLSNSGNVSIGRAEKRNLRAAMHALINNKLTQDEAGKLRGKMAFLLAIDPDFVNGLCVKYNFTRVADIQATNYDSSQPQKNDGTDDLPF

SEQ ID NO: 4433 - protein, 312 aa, unidentified
  source 1..312: note = Related to CP045571.1; note = Acidithiobacillus thiooxidans
MNFRSANLFTRLLEMSPLSARELSRVIATAPHRYKSHFIEKRHGRGKRLISQPTAELKYFQRWLVDNELNQLPVHDAATAYRKGRSILDHATPHAKQRYLLKLDFKDFFPSLNEHALRHCLERDCNYSEEEIEILCNLLLKSASIEGGPLQLSIGAPSSPFISNYLMWEFDIAMQQYCEVMGVMYSRYADDLAFSTDTPRLLDKVFDTVQKILASISYLPLILHPDKTVNVSKKRRRLLVGLTLANDGNVSIGREEKRRLRAALHAYTQGRLPCDEVARLAGMLSFVWSIDPKFVENLCQRHGFSRISDLLR

SEQ ID NO: 4434 - protein, 316 aa, unidentified
  source 1..316: note = Related to NZ_CP012371.1; note = Nitrosospira briensis
MRISDASLFERIIENTPFSEAELVLLILTGPTRYKDHWINKRHGRGKRLISQPTAELKLVQRWLVSSELSSLPVDVHATAYRKGLSIRDHVSPHTRSHFLLKLDFKDFFPSLTDSALRYRLEHDANYTELEVLILTKLLFRKKQSEETYRLSIGAPSSPFISNYLLLDFDRRLADYCESNYLHYTRYADDIAISVNRAGTLDFAKVFVERLISELPYLGLRLNEEKTVNVSKKFRRQLVGLVISNQGKVSLGREEKRRLRAAVHSLALGKLDVRQSVQLRGQLAFCLSIDRDFVITLCNRHGFQRVCDLPSGSDAS

SEQ ID NO: 4435 - protein, 315 aa, unidentified
  source 1..315: note = Related to JABFSF010000055.1; note = Methylotenera sp.
MKLSSTPLFLRLLELTPYSEYELATLILTAPTRYKEHYIVKRHGRGKRLISQPTAELKLLQHTTINKELNKLEIHNSATAYRCGSSILHHAQPHANSNFLLKLDFKDFFPSLTDKALKHKLRADTNYSELEIDILRNILLKKDRKSGNFNLSIGAPSSPYVSNYLMNEFDMLVSIYCKTKKLAYSRYADDIAISSTKPYLLDEAKSYIDDVLLKLDYLGLILNQEKTVNVSKKHHRELVGLVLSNDGQVSLGRDGKRNLRAGVNALINGKLDEIAASKLKGQLAFYMAIDRDFVLNMCKKYGFNSIVELSKKSKP

SEQ ID NO: 4436 - protein, 326 aa, unidentified
  source 1..326: note = Related to JACPOI010000036.1; note = Burkholderiales bacterium
MSFLETNMFARMVERSPFSYTDLAILILTAPKRYKEHHIKKRSGGLRLIAQPTKELKFVQRLLISNELSHLKVSEAAAAYVKERSIKEHAEKHAGNRYLLKLDFKDFFPSITKDAINRLLIQQTDLSADERYIACQLLLRSPKKEETLRLSIGAPSSPFISNCVMYEFDEKLLGYCQANGITYSRYADDIALSTQNPRTLDPAKAFVEGLLSQLDYLKLSLNPAKTVNVSTKNRRTLTGLVLSNEGTASIGRDKKRLIRAQVHSMIKGQLSTEEAVSLKGHLSFLYSVDKSFVVNLARRYGLDAKSLMTYRTSSTDSLPPQPDKSS

SEQ ID NO: 4437 - protein, 341 aa, unidentified
  source 1..341: note = Related to NZ_PVLR01000019.1; note = Malikia spinosa
MAEFDNNNLFLTLLNQSPFSSGELKTLISTAPQRYKNHFIEKRNGRGRRLISQPTRELKGLQRSLLSIIDEVIAPSAVAVAYRKGKSIKDHAAPHAKNSYLLKLDFKDFFPSIDWFTISHCFKETGKFSDDEIKIMNFILCRYDSEPISLRGSFKLSIGAPSSPPISNFIMRDFDETLENFCKNESVTYTRYADDLALSCSIPRKLDEVKNFIASILDEKKYLNLFLNEGKTVNVSKKNKRSLVGIVLSNEGVISIGRDKKRLIRATLHKASQGLLTEKQLEKLKGHLSYYINIDRDFVYSLVGKYGFGSVSQVSFETIKYPEVFSARDNLFFGRDDGIPF

SEQ ID NO: 4438 - protein, 311 aa, unidentified
  source 1..311: note = Related to NZ_AP022673.1; note = Sphingomonas sp.
MSQLLPLFVAESGMDPHDIVRIIRTAPRRYKVFFIPKRSGEPREIAQPARELKVLQRILVDKVLCKLPVHDAATAYRKGLSILDNSDPHSGSTPILKLDFENFFPSITESDWLRYCRENSILREDDREIAARILFRRAKGERTLKLSIGAPSSPMLSNILLYRFDSLVEAAALKRGLKYTRYADDMSFSGQRAGMLKDMIKEVAEAARIARYPRLKLNKSKTTFVTTATRRSVTGVILSNDGTVGIGHGRKRLISSKVHHAMLNKLSVDEVRQLAGELAFVNVVEPIFLAWLRNKYGEQTIDNIKRLILPI

SEQ ID NO: 4439 - protein, 309 aa, unidentified
  source 1..309: note = Related to NZ_CP016456.1; note = Sphingobium sp.
MSDLVNLFVAESGMAHDDVLRIIRSAPQRYKVFSIPKRSGGTREIAQPARELKVLQRVLVDSILCNLPVHSAATAYRKGRSILDNAIPHKGGLPILKLDFENFFPSIVADDWINYCNDHDIFDNNDRLMSAKILFRRAKGERILKLSIGAPSSPIVSNILMFEFDTLVTESANKRRLNYTRYADDMTFSGQRAGMLKDMVKEVASAARSVSYPRLNLNRSKTTFVTAATRRSVTGVVLSNDGEVGIGHQRKRIISAKVHYSTQGKLNIDQLRTLAGELAFINVVEPAFLSWLSAKYGEPAIEKIKHLEI

SEQ ID NO: 4440 - protein, 312 aa, unidentified
  source 1..312: note = Related to JADKHG010000002.1; note = Sphingomonadales bacterium
MLSKFLKQLSVHTGLSEADLLKIWTNAPDRYKVFRIRKRSGGWREIAQPARELKLVQRALVEILLSQLPVHDAATAYVRGRSILDNATPHRGDTPILKLDFRDFFPSILAEDWEAYCAAHDVIQGSDVHLTSRMLFRRPRSSTKLRLSIGAPSSPMLSNVLMYEFDDAIDKIAKDKGIAYTRYADDLTFSGQRIGMLQDMVRAVKKTLRNQSSPKLRLNQSKTVFVTMASKRTVTGVVLANDGTAGIGRGRKRELSAAVHHAKMGKLEKSELKELCGHLAFANAIDPDFLKFLAKKYGSEVIRAIQSAVELK

SEQ ID NO: 4441 - protein, 310 aa, unidentified
  source 1..310: note = Related to APMP01000001.1; note = Caulobacter vibrioides
MSDLIRLLSAETGLSNSDLIRIIRTAPRRYKVFYIPKRTGGMREIAQPARELKVLQRVLVGRLLGALPVHDAARAYRTGMSIRDNAAPHAGSGPILKMDFRDFFPSIRSTDWQRYCRDHDILSEEDREITSLIFFRRNKGEKIFRLSIGAPSSPVLSNVLMYDFDTQVSAEAERRGIAYTRYADDLTFSGQRAGMLKDMVGEVEKAARKVKYPRLQVHGEKTTYITASRRRTVTGVTLANDGALSLGRDKKRLLSAGVHHASLGKLSAEQMEELAGQLAFANVVEPEFLDRLRAKYGEAVDLVRRSVRSS

SEQ ID NO: 4442 - protein, 311 aa, unidentified
  source 1..311: note = Related to JADPJG010000026.1; note = Bradyrhizobium sp.
MSRVVSLIAVETGLPTDDIHRLIRSAPRRYKVFHIPKRSGGTREIAQPAREVKLLQRVLVTHVLSSLPVHDAAMAYRTGRSILTNATCHAGHGPILKMDFKDFFPSIRAEDWMVFCRNAQLFDESDAELSAQILFRKAKHEHVLKLSIGAPSSPVLSNVLLVPFDVMVAAEASKRGIKYTRYADDLTFSGQRIGMLKDMIDVVRLTTKQIRRPKLTINSEKTTFVTAKHCRVVTGVTLANDGALSLGRDRKRMLSARVHHAVLGKLNPDELLRLSGDLAFANVAEPSFIDRLSNKYGSEAIQTIRHAPRSS

SEQ ID NO: 4443 - protein, 311 aa, unidentified
  source 1..311: note = Related to nan
MSKLVDLIVSETGLPPSDVLRLIRSAPRRYKVYRIPKRSGGEREIAQPAREIKLLQRVLVDKVLSSLPVHRAATAYMKGCSIAANASYHAGSGPILKMDFRDFFPSIRAEDWVLFCRNTHVFDENDAELSAQILFRRAKHEHVLKLSIGAPSSPILSNILLMPFDTMVMAEASKRHIRYTRYADDLTFSGQRIGMLKDMIDVVRLTVRQVQRPKLTVNLDKTTFVTAKHRRVVTGVTLANDGLLSLGHDKKRRLSAAVHRAIHGGLDSKELLSLSGDLAFAKVIEPSFLDRLARKYGPEAVQMIRHAPRQS

SEQ ID NO: 4444 - protein, 311 aa, unidentified
  source 1..311: note = Related to JAFWCE010000141.1; note = Loktanella sp.
MGNLINTLSVQTGLSPSDVRLILRTAPRRYKVYTIPKKTGGERVIAQPAREVKLLQRALMSALLEKLPVHENAKAYKMGTSLLGNAQPHSGQSPILKMDFADFFPSIHGIDWLRYCAQSAILDREDSIFSANLLFRLAKHERTLKLSIGSPSSPLISNILMYGFDEIILREATKRKISYTRYADDLTFSGQRVGMLKDMPSIVEKAIREAKGPRLSINKSKTTYVTSRFQRRVTGLVLANDGTVGIGRDKKRLIRSKVHRAINGKLDVKQASELAGYLAYVNSVDPELILSLESTYGIKIFGELIPKLLSK

SEQ ID NO: 4445 - protein, 306 aa, unidentified
  source 1..306: note = Related to NZ_PHSI01000091.1; note = Cereibacter azotoformans
MNSLTSLLASQSGLSHADVLRILNTAPKRYKIYSIPKRGGGMREIAQPSREVKLLQRIFVDEVLTKLPVHSAATAYRKGCSIRQNAEAHLGATPILKMDFKDFFPSLHGVDWLRYCRHNRILNESDAALSANLLFRKAKKDRTLKLSIGAPSSPALCNVLLFDFDSYVAEAASRRNIVYTRYADDLTFSGQRFGLLKDMPEIVRTAIREAKGPRLRVNEDKTVFVSSKFQRRVTGLVLTNTGTVSIGREQKRKIRASVHRALLNKLEPNEVASLKGYLAYIKSVEPEFLQVISRTYSDFDTEWLLP

SEQ ID NO: 4446 - protein, 315 aa, unidentified
  source 1..315: note = Related to NZ_CP039435.1; note = Brevundimonas sp.
MIDDLIGLLSRMTGLPPSAVRRIILSAPRRYKVYYIDKRSGGKREIAHPARELKLLQRAFLDAVLEDLPVHVSATAYIKGKSLKDNALPHVGAGPILKMDFRDFFPSIRAKDWIAYAREHRVFSNDHDAELSALLLFRRPKGESVLRLSVGAPTSPALSNILMYNFDQAVWASVGERFVTYTRYADDMTFSAARTGFLQGVQTRVSAIIREMSYPKLELNHQKTRFVTEKYHRDVTGLTLSLDNRVTIGQLRKRNIRAGLHQAKLGQLSREELQTLSGHIAFAADIEPEYIGKMKERYGEDLLDWITKGRQSDDR

SEQ ID NO: 4447 - protein, 315 aa, unidentified
  source 1..315: note = Related to NZ_SGIS01000054.1; note = Sphingomonas populi
MRSKLVDLLIRELRIGERELAALIATAPDRYKTYFIPKRSGGRREIAHPAFELKIAQRAIISGFLNELPVHHCATAYKKGSSIRQNAERHCHNRAILKYDFKDFFPSITEQAWLSYCDRRKVMDRSDAVLAGRLLFRRPKGGRILRLSIGAPSSPILSNVLLYDFDCQVHERVTAHKITYTRYADDMTFSSERTWNLREVDKILRSVINSLGTPSLTINGSKTTLVTPKYHRQVTGLVLTLDGRVSLGRDRKRLIRARVHHAVSGKLSKAALVNLAGTLAFAKDVEPEFYNRLELTYGRENLETIKYSVRDYHRE

SEQ ID NO: 4448 - protein, 315 aa, unidentified
  source 1..315: note = Related to NZ_JAKRET010000004.1; note = Sphingomonas sp.
MTSKLVEFLTRELRIGERELAALISSAPDRYKTYFIPKRSGGKREIAHPAFELKIAQRAMINGFLKDLPVHPCATAYRKGSSIRQNAERHCHNRAILKYDFKEFFPSITERAWLTYCDRHSVLDRSDAISAGRILFRRPKGGRILRLSIGAPSSPILSNILLNDFDREVHQRVSAHKITYTRYADDMTFSAERTWNLREVDGILRSVIRLIGTPSLTINSAKTTLVTPKFHRQVTGLVLTLDGRVSLGRERKKLIRARVHYAINGKLDRHAMAHLAGTLAFAKDVEPEFYTRLERIYGRDNMELIKHSVRGYSRS

SEQ ID NO: 4449 - protein, 315 aa, unidentified
  source 1..315: note = Related to JALHLF010000113.1; note = Novosphingobium sp.
MTSPLVELLIRELRISEREVLHLIATAPERYKVYTIPKRNGGRREIAHPAKELKVAQRAVVNSYLNNLPIHDAAMAYKIGRSIKDNAAYHAGSGSILKYDFVEFFPSITEFAWIAYCDRHAVMDRADAIRSGRILFRRPKGGRILRLSIGAPSSPILSNILMHDFDEEVTQLVAEHKIKYTRYADDLTFSAERTGYLTAVDKILRGVIARSKAPKLKINDSKTVLATPKVHRQVTGLILTLDGKVSIGKNKKREIRVKLDYFRKGLLGEREVAPLAGYMSYIWDVERDFYIKMQRHYGEEVLARLQKQGQHKISP

SEQ ID NO: 4450 - protein, 326 aa, unidentified
  source 1..326: note = Related to NZ_WMHO01000038.1; note = Sandarakinorhabdus rubra
MTSPLITFLMNELHLGEREVVRLILTAPERYKVYQISKRNGGKREIAQPAPEVKAAQRAIVRAYLLSLPVHPSATAYSPGSSIIKNASAHSDAGPILKYDFKDFFPSITEKAWISYCLRVGLFSKEDAVRSGRLLFRRPKGGRILRLSIGAPSSPIVSNLLMYDFDERLSKLLEGHKIVYTRYADDLTFSAPRTGNLLEVPKAIRAAMNSMSHPKLALNSQKTVLVTKRYQRNITGLILTLDGNISVGRSRKRLIRAGIDHFIRGKLDVDQTVKLAGIIAFTKGVEPTFFAKLTTRYGNDVMGKIMASTKDYKRPRPETVNRTKRR

SEQ ID NO: 4451 - protein, 318 aa, unidentified
  source 1..318: note = Related to NZ_JACIJH010000001.1; note = Sphingopyxis panaciterrulae
MTSKLIEFLVSEVGLSARNIERLIQTAPERYKVYHIRKRSGGWREIAQPATELKIVQRAIVEKYLKHLPIHPAATAYVPGSSIRRNAAIHSVNGPILKYDFKEFFPSITERAWLRYCEIHGIFDRVEAIQFGRLLFRRPHGGTILRLSIGAPSSPILSNVLMYEFDKMLHERVAQHSVTYTRYADDLTFSARRTGYLNSVNRILRSTISQVQLPKIKINEEKTVVATEKYRRQVTGLILTNDKRVSLGRERKRNLRAALHHFREGKLDIDQSVKLAGLMAFARDVEPEFYTRMELTYGKDLLSQLKYLVKGYRRPEYR

SEQ ID NO: 4452 - protein, 316 aa, unidentified
  source 1..316: note = Related to DPST01000077.1; note = Erythrobacter sp.
MSALISVLQQSLGIDAMSVRRIIATAPERYKVYSIPKRGGAGRRIIAQPAKEVKALQRILLKTFLSDLPVHPSAFAYVPGKSIRTNAVTHVANGPILKMDFQNFFPSIRSYDWLSYCHDNGVFDSEADARMASKILFRREKGESILRLSIGAPSSPHVSNLLMYEFDRAISDKVAEDYVTYTRYADDLTFSAERTGYLTRVEKDVRKTLRDLRYPRLFINDRKTVLATTKYRREVTGLILTNDHRVSLGRHKKRLLRAQIHRYSKGELNNIATAKLAGNMAFASDVEPTFYTRMERVFTKEVMDRLKDSVNRQDQS

SEQ ID NO: 4453 - protein, 314 aa, unidentified
  source 1..314: note = Related to JABFWP010000009.1; note = Sphingomonas sp.
MSRLLAVLTEATGLSGYDLARVIATAPHRYKQFTIPKRQGGTRLIAQPAREVKAMQRAIVRAYLSDLPIHPAVTAYEPGTSIRENASRHATNGPILKLDIADFFPSIRADDFLSYCAEHSLFDDESERIAATKILFHRPKGARVLRLAIGAPSSPHISNLLMYHFDRAVASEVGDQFVTYTRYADDLTFSAKRTGYLNPVEKIVRKVLREIGYPRLKLNDSKKVVATKKYHRQVTGLVLSNDGRVSLGRKRKRELRAALHHFAGGKLEPKAQKHLHGMMAFAKDAEPDFYARMQARYGRNVFEALSEALREADE

SEQ ID NO: 4454 - protein, 332 aa, unidentified
  source 1..332: note = Related to JADCAE010000108.1; note = Phenylobacterium sp.
MSELLPVLIGATGLSDSDIRRIVSNAPSRYKHFTIKKRNGKDRHISQPSRELKALQRALMEFKLSQLPVHPAAMAYKHDVSILENATAHAGNGPILKYDFVDFFPSIRSKDWQRYCDYYSIFEKSEDKWISERILFQRDKGSRILKLSIGAPSSPILSNIIMNEFDTVISQKVASDNVVYTRYADDITFSAPRVGYLNRIDRIIRRTIKEVPWPRLKINEEKTVLATSKYRRQVTGLVLANDGSVSIGRDRKRSVRAALHRAQHDRLTDQETAYLCGMLAFINSVEPEFLARMENHYGVELLQRLRRHASIGRRPTERSRAKGEDLRIDGSD

SEQ ID NO: 4455 - protein, 314 aa, unidentified
  source 1..314: note = Related to JAGRQC010000004.1; note = Sphingomonadaceae bacterium LXI357
MSKLISILIESTGLTERDVMKIISNAPRRYKHFRIKKRNGSLRDIAQPARELKALQKVIVEKYLLELPVHQAAMAYRKGRSIRENALAHVDNGPILKMDFKEFFPSIRVRDWQAYCEDRSLFMDGDDLHHTSKILFHQSKGESYLKLAIGAPSSPHLSNLLMYKFDALVSQLVQKDYVAYTRYADDLTFSAKRTGYLTGVEKAVRRAIKEVPWPRLSINENKTVVATPRYHRQVTGLVLTNDQEVSLGRDRKRKISAAVHHAKHGELTVEAAARLSGTLAFVNSVEPEFLLRLERKYGREVIDNLKQFPWKLEK

SEQ ID NO: 4456 - protein, 324 aa, unidentified
  source 1..324: note = Related to NZ_CP054151.1; note = Agrobacterium vaccinii
MSEILKALSTATGLSDRDLRAIISNSPDRYKVYSIAKRRGGRREIAQPARELKVLQRALNDIVLSKLPVHPAAMAYRPGIGLKQNAQAHSHNGPILKFDFQDFFPSLRAEDWQEYCHRHKVFNDEEDVELSSKIMFRRKNRHSTVLRLAIGAPSSPPLSNILMFDFDIAMQAYCASQKVTYTRYADDITFSAQRTGFLTGVPKALERIVKDLRSPRLKINHDKTVLATKKYKRMVTGLILTNDGSVSLGQQRKRNIRAGVHRWTLGVLSNADICRLAGHLSFAEDIEPAFISRLANKYGAQAIADIKRAYLQQGSDSSQNPVKI

SEQ ID NO: 4457 - protein, 316 aa, unidentified
  source 1..316: note = Related to FTMQ01000001.1; note = Rhizobium sp.
MSEILRALSEATGLSDWDLRAIISNAPDRYKVYHIDKRRGGRREIAQPARELKVLQRALHDIFLAKLPVHPAAMAYRPGIGLRQNALAHSHNGPILKFDFQDFFPSLRAEDWEAYCRRHNVFINEEDVNLSSKIIFRRKSRHSSVFRLAIGAPSSPAVSNILMFDFDKTVQSYCESQSVIYTRYADDLTFSAQRTGYLTGVPKALERIIKDQKSPRLKINSEKTVLATKKYKRMVTGLILTNDGDVSLGQLRKRSIRAGVHRWTLGGLSPADTCRLAGHLSFAEDIEPAFVARLARRYGAQAIADIKNAYRQSGAP

SEQ ID NO: 4458 - protein, 315 aa, unidentified
  source 1..315: note = Related to NZ_JACHEG010000009.1; note = Rhizobium wenxiniae
MSELISVLSQATGLSDFDLRAIISNAPDRYKVYYIAKRKGGRREIAQPARELKVLQRALNDSILSKLPVHPAAMAYRPGVSLRRNAQAHSHNGPILKFDFQDFFPSLRAEDWEDYCRRHGVFKDDEDIELSSKIMFRRKNRRSSVLRLAIGAPSSPLLSNILLFDFDENLAKYCDSQKITYTRYADDLTFSAKRTGFLNGVEKFLVKLIKDADHPRIKLNLNKTVLATKKYKRMVTGLILTNDGKVSLGQLRKRNMRAGVHQWILGNLSEADTCRLAGHLAFAEDIEPDFVARLTVKYGAQVIAEIKMAYRRRVL

SEQ ID NO: 4459 - protein, 314 aa, unidentified
  source 1..314: note = Related to NZ_NWSV01000001.1; note = Rhizobium chutanense
MSELLRMLSEDTGLSEIDLRTIIATAPNRYKTYEIDKRRGGKREISQPARELKVLQRAMVQRILSGLAIHSAAMAYRPGISIRNNAAYHAGDGPILKFDFKDFFPNIQAVDWEKYCEKHSIFDHQEDVKLSSRILFRKSSRYSPVLRLAIGAPSSPMLSNILMFEFDEYMQSYAESQKAKYTRYADDLTFSAPRTGYLNGVEKVLRQAIHKIKNPKLQLNEDKTVLATRKYKRMVTGLILANDGSVSLGHQRKRNMRSAVHHWLLGKLSSAEQANLAGLLAFAEDVEPSFVFALARKYGTSTLKDIKKLADIES

SEQ ID NO: 4460 - protein, 341 aa, unidentified
  source 1..341: note = Related to NZ_JADNQW010000005.1; note = Methylosinus sp.
MPQSSKQLKGCNVSDVVQALVAASGLSERDVRTIIATAPSRYKTYSIPKRRGGERIISQPAREVKFLQRIIVEEILSRLPVHDAAMAYREGRSIRDNAAVHAGGGAILKFDFADFFPSIKADDWAAYCRRHSVFKDVDDIRLSANLLFRRTKYGSVLRLAIGAPSSPHLSNILMREFDQRVTEAVAKEKVKYTRYADDLTFSAKRAHNLIGIERVLRRIIREVASPHLRLNEDKTVLATRKYRRVVTGLVLADDGKVSLGRDRKRDIRAALHHYALGQLNGHETARLSGLLAFVNAIEPEFLERLVDKYGPAVIERIKARLPPTANCQQPHDPIIEFKFRE

SEQ ID NO: 4461 - protein, 302 aa, unidentified
  source 1..302: note = Related to NZ_JAEPIV010000062.1; note = Azospirillum sp.
MSESDVRLIVLTAPSRYKTYTIPKRNGGERIISQPAREVKFLQRVLVNDVLSQLPVHSAAMAYREGRSIKDNAAAHAGGGAILKFDFSDFFPSIVASDWRAYCERHGVFDNEEDIRLTANLLFHRTKRSSKLRLAIGAPSSPTLSNVLMFDFDQCIAGLVAKDKVRYTRYADDMTFSSKRAGNLSNVERVLRKVLKDLVSPRLRINEKKTVLATKKYRRVVTGLVLSDDGKVSLGRDRKRIIRAMLHHYTLGRLNGEETARLSGLLAFVNAVEPMFLKRLIDNYGVEIVDRLKASLHPNSIF

SEQ ID NO: 4462 - protein, 337 aa, unidentified
  source 1..337: note = Related to NZ_VSTH01000095.1; note = Bradyrhizobium hipponense
MSKLLPLLVAGTGLSEPDIIRIVSNAPLRYKSYRIPKRRGGNRTISQPARELKVLQRILTEEFLSKLPVHQSATAYRAGTSIKHNALAHALNGPILKFDFANFFPSIGARDWTVYCEREGLMLEARDIWISSNIFFHRWSRQGRLSLAIGAPSSPCLSNVLMNEFDEKIANAVASDQVTYTRYADDLAFSAKRTGYLNQVEKILRRTIKEIKFPNLTLNESKTILATKKYKRFVTGLTLTNDGKVSLGRERKRKIRAALKHYADDRLNIHEQAKLAGLISFAHDVERDFVLRMERTYGSELLQALKLVRLPSTRGGGGGGVEFDSDVSDASDPDDDF

SEQ ID NO: 4463 - protein, 318 aa, unidentified
  source 1..318: note = Related to RXJE01000056.1; note = Bradyrhizobiaceae bacterium
MSKLLPLFISDTGLSEHDVLRIVRDAPIRYKTYRIPKRTEGTRVISQPARELKALQRILTAELLSKLPVHPAATAYRPGVSIRANAAAHAPNGPILKYDFKDFFPSITSKDWRNYCENNHVFDNDEDLWISTNILFQKRRGESRLTLAIGAPSSPSISNILMRDFDSTVSALVAKDYVTYTRYADDLTFSARRTGYLTVVDKILKKTLRDMKSPSLTLNPSKTAIATTKYKRFVTGLVLTNDGAVSLGHDRKRKIRATVHHVTLGKLSERQLAELAGMLAFVNDVEPQFLAKLERTYGVDLIQKIKTGRGSSKNFDLD

SEQ ID NO: 4464 - protein, 318 aa, unidentified
  source 1..318: note = Related to nan
MSKIIQILMEETALNEPALRRIIYTAPSRYKTFYIPKRNGKNRRIEQPARELKAIQRVLVQKLLSTLPVHPSATAYRPGLSVRDNAARHAHNGPVLKFDFEDFFPSIRARDWRVYCEKKGLLETEEDIYLTQQIFFRREKGSSVLRLAIGAPSSPALSNILMWDIDAAIAEMIDGEQVSYTRYADDLTFSARRTGYLNGIEKGLRAILRSAGGPRLKINEEKTVLATKKFRRQVTGLILANDGHVSLGRDKKRLIRAAVHRETLGLLETSEREQLAGMLAYVNVAEPLFLARLKKKYGVEAIEELKKAVRPGNEPERP

SEQ ID NO: 4465 - protein, 304 aa, unidentified
  source 1..304: note = Related to NC_015976.1; note = Sphingobium sp.
MIEHTGLSRSDILSIARNAPQRYKTYTISKRNGGKRTISQPAREVKVLQKILLEHVLYKLPVHSAATAYRQGISLKENATRHVHNESIKKFDFKDFFPSIKGRDWIKYCGDHGVFADTVDVGLSTHILFHQPANSTILRLAIGAPSSPALSNVLMFEFDKIITDEVAKDEVIYTRYADDLTFSASRMWNMIDVPKVIARAIKNNHYPRLNINPDKTISATKKYKRQVTGLILTNDGKVSLGRKRKREIRAEVHRALIGQLTNDQLMHVQGILAFVEDVEPDYLRRLESYYGAEFIRNLRKRVRE

SEQ ID NO: 4466 - protein, 311 aa, unidentified
  source 1..311: note = Related to NZ_SMBO01000002.1; note = Novosphingobium sp.
MSKIIRLLTAETGLPTHDVRAIINRAPISYKHYTIKKRSGADRPIAQPAREVKRLQKILMGFLSDLPVHSAATAYAPGASIKDNAERHAKNGPILKFDFTNFFTSIRERDWKNYCAKYNLFDDPDDVTLSTKLFFCRVPGSTLLRLAIGAPSSPWLSNVLMYEFDDLISRRVRQDQVTYTRYADDLTFSARRTGYLTRVEKILNRTLSEMENPRLTLNQEKTVLATMKYRRVVTGLVLANDGRVTLGRERKRRIRAALHSAFAGKLDAEAMTRLAGMLAFVKSVEPEFFEQIAARYGENVISKLAGSQSQL

SEQ ID NO: 4467 - protein, 309 aa, unidentified
  source 1..309: note = Related to NZ_CP039695.1; note = Novosphingobium sp.
MGHLIEQLASGSGLLENDVRKIVATAHRRYKHYTIKKRNGEDRPISQPAKEVKLLQRLFQKQFLQNLPVHPSATAYEKGLSIKENAGRHMHNGPILKLDFKNFFPSIKASDWVAYTEAHGLLDDLEDRELSARLLFKSTRTSAGMRLAIGAPTSPHISNLLMYDFDRLMAERAAREMVTYTRYADDLTFSAKRTGYLQPIEKIVRTTLREINRPRLTLNDEKTVFATTKYRRVVTGLTLTNDGTISIGRERKKLIRAMIHHYEKGLLDAENLRKLVGLLAFANDAEPAFVLRMKLKYGEKLMAEILDLS

SEQ ID NO: 4468 - protein, 316 aa, unidentified
  source 1..316: note = Related to JAFVHE010000060.1; note = Sphingopyxis sp.
MSKLIRLLSIQTGLTEQDVERIINRAPDTYKSYTIPKRNGKGNRVISQPAREVKVLQRVLTERLRSLPIHDAAMAYRKGISIRANALKHAQNGPIRKYDFESFFPSIKGLDWEQYCLQNPVFSDPEDILRSINLFFHRAKRHNVLRLAIGAPSSPWLSNVVMFEFDDAVSRAVAKDRVTYTRYADDLTFSAPRTGHLTVVDDIVRKAIRNIQCPRLKLNEAKTTVATKKYRRVVTGLILADDGEVSIGRDKKRLVRAEVHHALTIGVGWEKADKLLGYIAHVRSVEPSFYYRLLAHYGEDFEARVRAKNGPPVFDL

SEQ ID NO: 4469 - protein, 313 aa, unidentified
  source 1..313: note = Related to NZ_CP011310.1; note = Aurantiacibacter atlanticus
MSDLIKHLSSETGLSDADVERIIARAPRSYKFYTIDKRTRGKRLISQPAREVKALQRALVKYLDALPIHESATAYRKGKSILDNAAPHSQSGPIKKYDFKDFFHSIRARDWETYCAEKGVFEDQEDVALTARLMFHVTPGSSILRLAMGAPSSPWLSNVLLHDFDKRLADELAKEKIIYTRYADDLTFSAPRTGHLNSVDGILKDIIRDTDAPELTINALKTVVATTKYRRTVTGLVLANDGRVTIGRDRKRYIRSAIYHALKGANTAEENQMLLGYIAFIGSVEPDFVEKLKAKYGPNFVERLSEAHIANNQ

SEQ ID NO: 4470 - protein, 338 aa, unidentified
  source 1..338: note = Related to NZ_CP092689.1; note = Gluconobacter frateurii
MMKEHLVTEGEPAVRFPDVLQILSEETGLLISDIRHIISSAEVSYKTYTIPKRSGGMRVISQPSRQVKILQQAIINRILLNLPIHESATAYRKGKSILDNAHPHQGAGRTILKIDFSQFFPSIKSADWVHFCKKNKLMNDIDQYYTSKILFKKEPNMRGLRLAIGAPSSPLISNILMYDFDNAVNELIVSEEVVYTRYADDLTFSAPRTGYLVDVESKLRKIIRKNVHPRLKINEEKTVYATSKYRRSVTGIILTNNGNTSIGRQKKRIISSCVHHAKCGLLSAEDLKKLSGYLAYISSVEPDFLQYLRKKYGDEIIELLKKIGNPNTKVELIPKISV

SEQ ID NO: 4471 - protein, 330 aa, unidentified
  source 1..330: note = Related to NZ_JAERLO010000011.1; note = Gluconobacter cerinus
MSEENFVTAQEYRFDNILQILSEETGLLLNDINYIISSAPKSYKTYNIPKRSGGTRTISQPARQVKILQKALIKNVLLNLPVHPAATAYQKGKSILNNAQPHQGEGRSILKIDFSEFFPSIKHFDWIDYCKKNRILNEQDQHYTSRILFKKEVGMRGLRLAIGAPSSPLLSNILMFDFDSAVNDLIVTDKIAYTRYADDLTFSAPRAGYFGEIEKKLRTIIRGMSHPKLKIKEEKTVRATPKFKRSVTGLILTNQGKTSIGRDKKRIISASVHHAKNNNLSQEQMKKLSGYLAYIKSIEPSFLDYLRRKYGEAIMDSLRKMGHPDYRVEN

SEQ ID NO: 4472 - protein, 336 aa, unidentified
  source 1..336: note = Related to NZ_CP068419.1; note = Gluconobacter sphaericus
MKNQAPHSITDRFNRSAIENFDLIQILSEETGFLSSDIKRIIHSAPKSYKTYEIPKRTGGKRIISQPAREVKILQRVIIEKVLSHLPIHQFATAYRPGISILNNALPHKGAGRSILKMDFENFFPSIKSHDWITYCEELEILSNEDRALTASLFFKSQPPKRGLRLAIGAPSSPILSNILMYEFDKKIEKEIYGKEIIYTRYADDLTFSSERTGYLLDVRSIVRKALMEIKYPKLKINKEKTKYFTSKYRRSVTGLVLTNQGEVSLGRDKKRSISAGIHNALNGKLNDEEMKSLSGYLAYANSVEPNFLKKMSEKYGDDIMKTLKKFGNPEVNIKI

SEQ ID NO: 4473 - protein, 315 aa, unidentified
  source 1..315: note = Related to JAEULJ010000003.1; note = Altererythrobacter sp.
MSDLIALFVHETGLGEHDIRKIVATAPARYKTYAIKKRNGIDRRIISQPARELKLLQRTLIDAVLKNLPVHRSATAYRTGMSIIDNVRPHINSGAILKLDFSDFFPSLRESDWREYCVRNEIFRSEEDIEVSGLVLFKKERQRRELRLSIGAPSSPIVSNILMFDIDSEIESKIVSEEVVYTRYADDMTFSARRTGFLNKVEKNVREILRGSQSLRLQLNDDKTVYATKKYKRQVTGLIITNDATVSVGRERKRNLMAAIHAALSGKLSGDQVRETLGMVSFVISVEPDFKKRIERKNGEDALALLSKLASTKGT

SEQ ID NO: 4474 - protein, 310 aa, unidentified
  source 1..310: note = Related to NZ_JAINWL010000001.1; note = Proposed Citromicrobium bathyomarinum
MGSLYDLLKRETALPDRDLQKIIATAPARYKTYKIPKRNSEKMRVISQPAKEVKLMQRVLMREFLSNFPIHKAATAYKSGSSIRDNAAAHVGRGPILKFDFKDFFPSITENDWRKYAEGRGIAELDIEISTKIFFKKEFNRSLLRLSIGAPSSPILSNILMFGIDERISAEIASDEVSYTRYADDITFSAPRTGYFNGLERHLRMILREIEYPALKINSEKTVYATSKFRRQVTGLVLTNDGQISVGRDRKRNLFAAVHHALNGRLNDEQIEEVLGLIAFVSSIEHDFKDRLEKKYGPEVVRRLYRCKQN

SEQ ID NO: 4475 - protein, 325 aa, unidentified
  source 1..325: note = Related to QFOF01000021.1; note = Azospirillum brasilense
MMSWITRMLALHTGLQESAIHRIMVTAPVRYKTFFIPKRNGELRQISQPAREVKLVQRAFSEIILKKLPVHPCATAYIDRKSILHNAQPHAGHGQIVKMDFKNFFPSIRRVDWIHYCQENSIFDSQIDADLSSSLLFQKNKNSGLMRLAIGAPSSPILSNILMYNFDYLVSKAVLKDHVTYTRYADDMTFSAPRTGHLVNVVRIVKSVCRSLNYPRVEINENKTVYATAKYKRAVTGLILTNDGRVTIGRDQKRLIRAMVHHAINTNLTKEALERLAGNLAYINSVEPAFMETLTRKYGAENIQRIRCIWRKDSPKNSTSKKSLT

SEQ ID NO: 4476 - protein, 317 aa, unidentified
  source 1..317: note = Related to NZ_MLCO01000142.1; note = Roseomonas deserti
MSELVRKLAQETGVPEPLVREIMLTAPVRYKEFHIVKKSGGLRKISQPAREVKLLQRIATKILLNQLPVHPCATAYRINSGLLNNVKPHAKNSQILKLDLKEFFPSLRLVDWYQYCRRNFMNISSEDITLAGRLFFRKTPKKVSLRLAIGAPSSPSMSNILMYEFDTLVHKYCLTENIVYTRYADDMTFSAPRTGYLVGVIKNVSRIIRKLKSPNLEINSGKTVYATQKYKRSITGLILANNGSITIGRDAKRLTRARVHHAIKGRLTEDEIIKLSGYLSFIMSVEPSFVYTLQVKYGAHQINQILHASLTPKERIE

SEQ ID NO: 4477 - protein, 317 aa, unidentified
  source 1..317: note = Related to JACKJE010000004.1; note = Methylobacteriaceae bacterium
MDLLILETGLGERDVRAIAATAPIRYKTYEIEKRNGGKRLISQPARELKALQRVIVNEVLDKLPVHPAATAYRPSLSIKDNAKPHTVSGAILKLDFKDFFPSLREVDWESYCKQHNIFETPEDIHLSSRILFHRKKTASTLRLAIGAPSSPTLSNVLMFELDTHISKLVASDGITYTRYADDMTFSAPRAWNLVGTLRKVRKLLRDTASPRLQLNTDKTVLVTKKYRRVVTGLVISDDQRVSLGHERKRLLRAAVYRFIQGKLSIREQARLAGNLAFAYSIEPEFIQRLEDRYGTSTITDIKRAPRLLQSSGDNQNR

SEQ ID NO: 4478 - protein, 304 aa, unidentified
  source 1..304: note = Related to NZ_CP088280.1; note = Bradyrhizobium sp.
MKLSPWKQGWMWHLSRALCEVHPLDIEPIAFPNVSQPAVEVKALQRGLIEILLRDLPMHHAATAYRVGISIKDNAMRHAGNGPILKMDFKDFFPSIKPRDWSAYCKRTGVLSDSVDIHLTSLLLFQRPKGSSVLRLAIGAPSSPFLSNALMFDFDQAIAEAVAKDHVIYTRYADDLTFSAPRTGHLVNVEKIVRATLRALQYPRLTVNDDKTTRVTRKYGRKVTGLTLTNDGKISIGHKRKRLIHAAVHHASLGKLSPASLGELKGLLGFANSAEPQFINTLRQRYGAALIQRIQTFDIPKRAR

SEQ ID NO: 4479 - protein, 315 aa, unidentified
  source 1..315: note = Related to JAFKKC010000005.1; note = Hyphomicrobiales bacterium
MAAIIERLALATGMDVGLVGRVLRSAPVRYKTYLIPKRTNGFREISQPAVEVKALQRGLIEILLRDLPVHEAATAYRVGMSIKDNAQRHAGNGPILKMDFKDFFPSIKPRDWISYCTETGVLIDQTDIHLTTLLLFHRPKGTSGMRLAIGAPSSPFLSNALMFNFDKAIAEAVAKDHVRYTRYADDLTFSAPRTGHLVNVEKIVRSVLRGLEYPRLLVNQDKTTRVTRKYGRKVTGLTLTNDGRVSIGHGRKRQIRAAVHHASLGKLDERSLAELKGLLGFANSAEPQFVITLIEKYGADIIHQIQKSPNRPRKI

SEQ ID NO: 4480 - protein, 316 aa, unidentified
  source 1..316: note = Related to RJJT01000004.1; note = Rhizobium pisi
MMGKIVEALAIETGMDVGLVERIMRSAPARYKTYRIPKRTKGFREISQPAVEVKALQRGLIEVLLRNLPMHEAATAYRVGMSIKDNALRHAGDGPILKMDFKDFFPSIKPRDWSAYCKQTGVLMDPVEIQLTSLLLFQRPKDSSVLRLAIGAPSSPFLSNALMFEFDKAITEAVAKDHVVYSRYADDLTFSAPRTGHLVNVEKIVRATLRALEYPTLTVNDDKTTRVTRKYGRKVTGLTLTNDGKVSIGHERKRFIRAAVHHASLGKLSTASLGELKGLLGFANSAEPQFIGTLKERYGAELIQFIQTFDIPKREQ

SEQ ID NO: 4481 - protein, 318 aa, unidentified
  source 1..318: note = Related to NZ_FODE01000022.1; note = Paracoccus alcaliphilus
MSSNIVKALSLQTGMDVLLVERIIQTAPIRYKTYRIPKQAGGFREISQPAIEVKALQRGLIEILLRNLPLHEAATAYRTGMSIRDNALRHAGDGPILKMDFKDFFPSIRPADWSAYCEKTGVLTEADDVKATSLILFHRPKGSSIHRLAIGAPSSPFLSNALMFDFDKLVTDAVGRDHVRYTRYADDLTFSAPRTGHLVNVDRIVRAAIKSIDRPRLKINDDKTTRVTRKYGRKVTGLTLTNDGSVSIGRERKRLIHAAVYRASKGELDLPSLAELKGLLGFANSAEPAFIMTLRERYGDEVIKYIQRYRIPKRIPQQ

SEQ ID NO: 4482 - protein, 319 aa, unidentified
  source 1..319: note = Related to SRUN01000004.1; note = Mesorhizobium sp.
MVGIIELLAINTGMDTGLVERIMVTAPVRYKTYFIPKRHGGLRKISQPALEVKVLQRALIEVLLNELPVHDAATAYRTGMSIKDNALRHAGHGPIMKMDFKEFFPSIFARDWDQYCETTEVLTEPREIYLTTRLMFQRPRDSSLLRLAIGAPSSPVLSNALLFEFDEMLTAEVAKDHVVYTRYADDLTFSAPRTGHLVNVEKAVRTVIKAIRRPKLTINEDKTQRITTKFGRHVTGLTLTNDGEVSVGHERKRQLHAAVHRALHGKLDVIELGKLKGILGFVNSAEPEFIVTLRKKYGSKIIDSIQKTPVPLRPRPFKK

SEQ ID NO: 4483 - protein, 319 aa, unidentified
  source 1..319: note = Related to WUFV01000007.1; note = Rhizobium leguminosarum
MVGIVEILAIESAMDVGLVERIIRTAPVRYKTYQIPKRAGGNRTISQPAKEVKLLQRSLIDVLLRNLPVHDTATAYREGLSIKDNALRHAGDGPILKMDFKNFFPSITPFDWAEYCKESGTLTDPQDIHMTSLLMFQRPKGSSALRLGIGAPSSPFVSNALLYEFDKRVTAAVAKDHVKYTRYADDLTFSAPRTGHLVNVEKMVRSTLEGLKYPKLAINDEKTTRVTRKYGRKVTGLTLTNDGQVSIGHKRKRLLHSQVHKASLNQLDVDEMVALKGMLGFVNSAEPQFLKVLTRRYGEGVLTRIRRFETEPAGRGTFN

SEQ ID NO: 4484 - protein, 316 aa, unidentified
  source 1..316: note = Related to RPJK01000002.1; note = Sinorhizobium medicae
MAGIIEMLAIETAMDTSLVERIIRTAPIRYKTYQIPKRSGGYRTISQPAKEVKLLQRALIDVLLRKLPVHDTATAYREGLSIKDNALRHVGDGPILKMDFKDFFPSIRPGDWAEYCKETGALTDAQDIKLTSFLMFQRPKGSSTLRLAIGAPSSPFVSNALLYDFDNRITAAVAKDHVRYTRYADDLTFSAPRTGHLVNVEKLVRSTIHGLKYPKLMINAEKTTRITRKYGRKVTGLTLTNDGQVSIGHDRKRLLHAQVHRASLNHLDADELLNLKGMLGFVNSAEPHFLEVLRRRYGDAVLTRIQRYEVEPPQKP

SEQ ID NO: 4485 - protein, 315 aa, unidentified
  source 1..315: note = Related to NZ_KI912610.1; note = Mesorhizobium ciceri
MSDIVRILAIETGMEMSLVERIIRTAPVRYKTYQIPKRSGGHRTISQPAREVKLLQRALIEVLLRRLPVHEAATAYREGMSIRDNALRHVGGGPILKMDFKDFFPSIRPHDWVEFCKETGAISDLVDIQLTSLLMFQRPKRSSTLRLAIGAPSSPFVSNALLFEFDKRISEAVAKDHVIYTRYADDLTFSAPRTGHLVNVEKMVRSTLRGLGYPKLTVNNEKTTRVTRKYGRKVTGLTLTNDGKVSVGHARKRLLHATVHRASQDKLNSTELGVLKGMLGFVNSVEPQFIEKLRERYGSALIGRIQAYDIPKRKW

SEQ ID NO: 4486 - protein, 318 aa, unidentified
  source 1..318: note = Related to NZ_WOAC01000018.1; note = Mesorhizobium sp.
MSIIDILSFESGLEATTVERIIRNAPLRYKTYQIPKRSGGSRTISQPAREVKVLQRALSDVLLRVLPVHEAATAYRPEMSIKDNALRHAGDGPILKMDFKDFFPSIKPRDWTLYCKETGALTDPVDVRQTALLLFQRPKGSAVMRLAIGAPSSPFVSNALLYEFDKRIAAEVARDHVTYTRYADDLTFSAPRTGYLVNVEKMVRTTLAGLEYPKLLINGQKTTRITRKYGRRVTGLTLTNDGRVSIGHERKRILHAQVHSATKDLLDNDQIAELKGMLGFVNSVEPQFLDVLRRRYGHSIITFIQRFESNPPTLDLLE

SEQ ID NO: 4487 - protein, 356 aa, unidentified
  source 1..356: note = Related to JAJAVB010000031.1; note = Aurantimonas sp.
MAGDGNRLLERERPGQVQQHPSGFEGRNAMSGIIETLAVETGIEPGLVDRIVRTAPSRYKTYPIDKRGGGTRLISQPAKEVKILQRALNDVLLKHLPVHASATAYRESLSIRENALPHAGIGPILKLDFAEFFPSIKLHDWKKYCEKTGCLTDVHDVEMSGRLIFHRPKGRSTLQLAIGSPCSPFVSNALMHEFDFLVVEAVAADKVVYTRYADDLTFSAPRLGHLRDVEKIVRRILRGLSFPRLRLNINKTTYVTSKFGRRVTGLTLTNAGGVSIGHARKRKLHTAVYRASQNNLNADELAELKGMLGFAHSVEPEFIEILRRRFGNDIVSFIQSYPIERKRSAKVIAVEPDETR

SEQ ID NO: 4488 - protein, 327 aa, unidentified
  source 1..327: note = Related to NZ_MKIN01000018.1; note = Rhizobium taibaishanense
MTNLLRSMAIETGLSEVIVQRIMQSAPNRYKHYSIEKRSGGKRLISQPAIEVKLLQRAFVSLYLSKLPVHAAAIAYRPNKSILDNALPHVSSGSILKMDFKDFFPSIRKAHWMNYCAEFGIFETQSERELAASLLFHRPKGSSVMQLAIGAPSSPTLSNVLMYKFDEIISSEVATDKVIYTRYADDLTFSADRSWNLVDVERIVKKTLQNISYPKLQLHPSKTIHVTKKFSRSVTGLILANDGRVTIGKKRKRIIHAATHAASLGRLDDRQLQKLAGMLAFVHSVEPSFIALLERKYGFETIKGLQKIGANDRRNLRAAVGEADFGT

SEQ ID NO: 4489 - protein, 321 aa, unidentified
  source 1..321: note = Related to JALBGV010000046.1; note = Neorhizobium sp.
MVSLLRAMAIETGLSEVVVQRIMQSAPHRYKQYKIDKRSGGKRLISQPATEVKLLQRAFVELYLSKLPVHPAAMAYRPNLSIFDNATAHAGSGSILKMDFKDFFPSIRKANWMSYCAEFSILENHSERELAASLLFQRPRSSNAMQLAIGAPSSPALSNVLMFQFDEIISAGVAKDKVIYTRYADDLTFSADRSWNLVDVEKTVKRALREIAYPRLQLHPDKTTHVTKKFSRSVTGLILANDGRVTIGKRRKRAIHAATHAASQGRLDDRQLQKLAGMLAFVHSVEPGFIDVLERRYGLETIMRLQTIGAKDRRNLRPPDA

SEQ ID NO: 4490 - protein, 326 aa, unidentified
  source 1..326: note = Related to JAFJZW010000005.1; note = Agrobacterium rosae
MASFLRTMAVETGLSEVVVQRIMQSAPHRYKHYEIDKRSGGKRQISQPATEVKLLQRVFVELYLSKLPVHPAAMAYLPNKSILDNANAHAEAGSILKMDFKDFFPSIRKASWMSYCAEFSILENHAERDLAASLLFQRSKGSGAMQLAIGAPSSPALSNILMFQFDEVISSEVSKDKVVYTRYADDLTFSADRSWNLVDVEKTVKRALREIAYPRLQLHPDKTIHVTKKFSRTVTGLVLANDGRVTIGKRRKRAIHAATHSASLGRLDDRQMQKLAGMLAFVHSVEPAFMGVLERRYGSETIMRLQTVGSRDRRNLRPINETLDKK

SEQ ID NO: 4491 - protein, 328 aa, unidentified
  source 1..328: note = Related to NZ_LANJ01000022.1; note = Devosia epidermidihirudinis
MVTLLRAMAIETGLSEVIVHRIMQTAPHRYKQYTISKRSGGKRLISQPATEVKLLQRAFVDLYLSKLPVHPAAMAYRTSLSISDNAKAHAGSGSILKMDFRDFFPSIRKASWMTYCAEFSILDNSFERELSASLLFQRPTGSHGMQLAIGAPSSPALSNLLLFQFDEIISAEAAKDKVKYTRYADDLTFSADRSWNLVDIERTVKRVLREIAYPRLRLNPDKTIHVTKKFCRNVTGLILANDGRVTIGKKRKRTIHAATHAASQGRLDDRQLQKLGGMLAFVKSVEPAFLDVLRRRYGFETIMKLQTIGAKDRRNLRPQIDAVEISGG

SEQ ID NO: 4492 - protein, 328 aa, unidentified
  source 1..328: note = Related to NZ_CP013068.1; note = Pannonibacter phragmitetus
MVSLLRTMAVETGLSEAVVQRIMQSAQHRYKQYYIDKRSGGKRLISQPATEVKLLQRAFVDLYLSKLPVHPAAMAYRPGRSILDNASAHADSGSILKMDFKDFFPSIRKASWMAYCANHSLFDSQSERELSASLLFQRPKGASSLQLAIGAPSSPALSNVLMFQFDEIVTGEVSKDNVTYTRYADDLTFSAERSWNLVDVEKTVKRALREIAYPRLVLNTDKTTHLTKKFGRSVTGLVLANDGRVTIGKRRKREIQAATHAASLDRLDARQMQQLAGMLAFVNSVEPDFLGVLERRYGIETIMRLQKVGAKDRRNLRPQTLEEDAGHL

SEQ ID NO: 4493 - protein, 315 aa, unidentified
  source 1..315: note = Related to VRUZ01000039.1; note = Methylobacterium sp.
MSALVAKLVLATGIDQSSVRRIMLSAPRRYKSYYIAKRNGGLRKISQPAREVKVLQRALIDLLLSDLPVHRTAMAYRVGTSIKDNANAHKTSGPIIKIDFTNFFPSIKRSDWADYCQKTGCLNDPTEIGLTSSLLFQYQKEHASQRLAIGAPSSPMLSNILMYEFDSEIESRLQGTRIVYTRYADDLTFSAPRTGYLHDVMKIVRETMRAIPYPRLKINPDKTTYVTTKYRRSVTGLTLSNDGRVTIGWRKKRELHAAVHNAKLDKLNAKGLQALAGYLAFVQSVEPSFLSVLRNKYGTEIIMKIKAANVKKALR

SEQ ID NO: 4494 - protein, 325 aa, unidentified
  source 1..325: note = Related to NZNS01000009.1; note = Parvibaculum sp.
MSQLLDKLSFETGMRANELRRIMYTAPNRYKIYSIPKRVGGFRSIAQPAREVKLLQRTLAKTFLTTLPTHAAATAYKPETSLRSNALPHAGRGPVLKLDFRDFFPSIRDRDWIAYCRQTGCLTEDEDIYLTSRLLFHRRKGESHLRLAIGAPTSPILSNILMYEFDVRVVETVVADGVTYTRYADDMTFSAQRTGNLTHVIRDVGRVLRDIQYPRLALNPEKTTLVTAKYGRRVTGLTLANDGRVTVGRDSKRKIRAAVYQAVNGRLDPEQMQVLTGMLAYVNAVEPEYLDVLRRKFGTQAILKIQRAPRGEKIRRRSPALAQNR

SEQ ID NO: 4495 - protein, 328 aa, unidentified
  source 1..328: note = Related to NZ_LWMO01000047.1; note = Rhizobium anhuiense
MTELLRQLSTETGLAESAVRRIIANAPERYKVYHILKKNGGKRKIAQPARELKLLQRALVELLLSKLPVHPAATAYVKGRSIRDNAERHCHSGPVLKMDFKDFFPSITDRDWAAYCSQTGCLTDAEDIRLTSLLLFHRPVGGRVLRLAIGAPSSPIVSNLIMFPFDAMISEVVAVDHVIYSRYADDLTFSGPRTGHLTGVARSVKRALREIPFPTLKINAEKTTYVTMKYHRQITGLTLANDGRVTIGRDNKRALRAQLDHYSKGTMPKADVPRLAGRLAFVKSAEPSFFLNLLENHGWERIQEILRQSNQKARRAKPLASDENDFAG

SEQ ID NO: 4496 - protein, 325 aa, unidentified
  source 1..325: note = Related to JACHZB010000001.1; note = Rhizobium sp.
MTELLKQLSIETGLVESTVRQIIANAPERYKTYHISKKNGGTRKIAQPAREVKLLQRALTALLLSKLPVHPAATAYVKGRNIRDNAELHCHSGPILKMDFKDFFPSITARDWAAYCTRTNCLADPEDIRLTSLLLFHRPAGGRVLRLAIGAPSSPIVSNLIMFPFDQMISEAVAVDHVIYSRYADDLTFSGPRTGHLTVVAKAVKNALKEIQYPSLKLNPEKTTYATMKYHRQVTGLTLANDGRVTIGRDRKRALRAQLDHYYKGILPLKEIPRLAGNLAFVRSAEPSFFFKLVERHGYQKIHDILRQSNRKNKKLPSGRNESPI

SEQ ID NO: 4497 - protein, 326 aa, unidentified
  source 1..326: note = Related to SGNZ01000005.1; note = Agrobacterium salinitolerans
MREMTDLLKRLSVETGLPESTVKSIISNAPERYKEYLIHKKNGGYRKIAQPARELKLIQRAFIDIVLSKLPIHSAASAYRRGKNIRDNAMPHSHSGPILKMDFKDFFPSITERDWSAYCQQTGCLTDPGDIRLSSLLLFHKPSGGRILRLAIGAPSSPILSNVIMFQFDEAISNAIAKHQVIYTRYADDLTFSAPRTGHLNSVAKAVKNALKEIPYPQLKINHEKTTHVTMKYHRQVTGLTLANDGRVTIGRDHKRSLRAQLHYFINGKLDEAETAHLAGKIAFVKSVEPEFYFSLLEKLGAEKINFLLSKSNRKKLSLKKSPKLN

SEQ ID NO: 4498 - protein, 326 aa, unidentified
  source 1..326: note = Related to NZ_FMAG01000002.1; note = Rhizobium multihospitium
MTDLLKQLSIETGLPEYTVKSIISNAPDRYKEYYIKKKNGGSRLIAQPARELKLIQRAFVDILLSKLPVHSAATAYRKGKSIRDNALPHSHSGPILKLDFKDFFPSITESDWVAYCKHTKCLTDPNDVRLSSLLLFHRPSGGRLLRLAIGAPSSPVLSNIIMFPFDEAISAAVAHDHVIYSRYADDLTFSGPRTGHLTGVSKAVKKALREIPYPTLKINHEKTTHVTMKYHRKVTGLTLSNDGRVTIGRDNKRTLRAQLHHYLSGKLNESEVAHLAGRIAFVKSVEPSFYFTLIERHSDRVIQMLLTKSNQKHAKEKRQPISFEGG

SEQ ID NO: 4499 - protein, 315 aa, unidentified
  source 1..315: note = Related to JACVBP010000001.1; note = Ensifer sp.
MSEIIEKLVAASGLNPFVVRRILATAPRRYKEFSVPKRNGGKRKIAQPAKELKILQRAFVDEFLSELPIHPAATAYRAETSIKDNAERHAGFGPILKMDFKDFFPCITDRDWEHYCQRNNLFEDPLERRLSTLLLFHRPKGGSKLRLAIGAPSSPTLSNVLLFEFDRYISELVAPDKVLYTRYADDLTFSAPRTGHLTGVKRAVSRAINHVDFPTLRINREKTTYITTKFHRSVTGLTLANDGRVTIGRDKKREIRASVHRFTLGKLDEDSIERLHGYISFINSVEPEFIDVLTKKYGSGMMQNLRDASVAIRRA

SEQ ID NO: 4500 - protein, 305 aa, unidentified
  source 1..305: note = Related to JACGXN010000001.1; note = Phyllobacterium myrsinacearum
MSEYSIRKILATAPERYKEYRIPKKSGGYRDIAQPAKELKILQRGFANNFLMKLPIHHTAMAYRHKQGIRDNAQRHAGFGQILKIDFKGFFPSIRVEDWRSYCAATGFLIEAEDIDLSSLLLFHRARGTRGLRLAIGAPSSPILSNILMYEFDQRVSEIVAQDKVIYTRYADDLTFSAPRTGYLLDVKKNVSKILDELQFPRLEINHKKTTHVTTKYHRVVTGLTLANDGRVTVGRERKRLIRATIHAYIQGRLVAEDVGRLAGLIAFVKSAEPEYFGLLKHQYTPEKIIEILKWSSGTLNLFDD

SEQ ID NO: 4501 - protein, 315 aa, unidentified
  source 1..315: note = Related to NZ_CP043489.1; note = Labrys sp.
MKFLIQESGLSEQTIKRIAIDAPQRYKAYEIKKKNGGVRQIAHPARELKILQRAIVKHVISGLPVHDAAMAYRKGRNIRDNAKRHAGTSIILKMDFKDFFPSIKAQDWHQYCEDNRILTSSEDIWLTSQILFYRARGTRLLRLAIGAPSSPALSNALLYDFDKRVTELVSQEEVVYTRYADDLTFSAARTGYLTGIQKLISRALREMETPKIKLNHKKTTHVTTKYSRNVTGLVLSNDGRVTIGRERKRKIRAMIDHFIKGRLNNRQKAHLSGMIAFAKSAEPEYYTYISEKYNNVLREILNSRAKKTCRIEASR

SEQ ID NO: 4502 - protein, 325 aa, unidentified
  source 1..325: note = Related to NZ_CP073063.1; note = Brevundimonas diminuta
MTPLIRALSASSGLSAADTLKLVKDAPDRYKIFDIDKRRGSEKRKIAQPAAEVKYLQRIVVEILLSRLPVHSAATAYIKGGSLRDNAAPHAGVGRPILKMDLKQFFPSIRSRDWESYCSDNEVFSDAQDAYLSSRLLFHRPPGGRVLRLAIGAPSSPMMSNILMYEFDKRISAAVEEDEVTYTRYADDLTFSARRTGYLVDVRKRVYRVVRELNYPKLDINRSKTVYATSRYHREVTGLILSNDGRVTIGRDKKRVIYSMVHRYLKGGLNGAEIQHLAGILAFVKSAEPDFLLNIDRKYEIGTVSDIAKTAGRIHVSDRQSYWQS

SEQ ID NO: 4503 - protein, 325 aa, unidentified
  source 1..325: note = Related to JAHCDM010000009.1; note = Roseococcus sp.
MLTQYLAQATGLSTLEIERIARSAPRRYKDYMIPKANGGHRLISHPAREVKALQRALVEWLSDKFPVHHCATAYKKGGSIALNADQHAQNGPIMKMDFRNFFPSIKSHDWIKFITENNFPLNEFDRELTRTILFHKRPSMPDLRLAIGAPSSPFISNIMMYDFDCYVHDKTKAEKITYTRYADDLTFSSARAWNLRDVEPIIKKAVRDHAFSKLEINNEKTRVVTTKFRRIVTGVTLANQGHISVGRNAKRELRAIMSRLSLRQTPKQNPSQIVGILGFLGSIEPKYLQSLKEKYGKDTFDFLYSLAGDLRTDNRQGQADAATED

SEQ ID NO: 4504 - protein, 322 aa, unidentified
  source 1..322: note = Related to NZ_JXMU01000014.1; note = Ahrensia marina
MSKIIRDLVLETGISASTLQVIINSAPESYKVFSIPKKTGGTRIIAQPSKQLKIIQRALIEVLLHDFPIHEAAKAYVKGSSIRVNADQHAGSQPIQKYDFSDFFPSITSSDWRKYCDHNQVNLSTADLHLCTKILFRRAHGERTLRLSIGAPTSPILSNILMFDFDKKISEKLAGDEVKYTRYADDLTFSAPKTGYLNAVPRALRECIQEIQFPTLKLNAKKTAKITAKHRRIVTGLTLANDGRVTIGRDKKRLIRSKVHKFKLGQLDRLALDKLTGELAYINAVEPEYISVLKRVYGDECISKITRNKPLRKYTPPSRNGS

SEQ ID NO: 4505 - protein, 303 aa, unidentified
  source 1..303: note = Related to FOBJ01000004.1; note = Variovorax sp.
MLGANDLLSQMSSDFGMLPNHLQSIVRTAPIRYKVFYIPKRSGGLREVAQPAREVKAIQRWLMAHFGPLLPLHEAATAYRPGASIKNNALRHVDSDYLLKMDFRNFFPSILMTDIIRHLKIHCGQQYDASAIKLIAYVCTWAPGRQGPLRLCIGAPSSPLLSNSVMFDFDTQLSSVAAADGVRYTRYADDLALSVCRSGALKNYPSLVSKIVADLKYPQLKLNEGKTVFASRAGRRVVTGVTLTADHQLSIGRTRKREIRAMYHRMVLGKLSAEEQRELAGLIAFADDIEPGFAAWLSSPKKL

SEQ ID NO: 4506 - protein, 305 aa, unidentified
  source 1..305: note = Related to JAFKGB010000002.1; note = Burkholderiales bacterium
MLSANDLLSQMASDLGMLLSHLQSIVRTAPIRYKVFHIPKRSGGLREVAQPAREVKAIQRWLTAHLGQLLPLHEAATAYRTGASIRSNALQHVDSDYLLKMDFKNFFPSILITDIIQHLEVYCGRQYDSSAIKLIAYVCTWAPKRQKPLRLCIGAPSSPLLSNSIMYSFDMRLSSAAAADGICYTRYADDLTLSTHHPRVLANYPALVADIAASLNYPRLKLNEKKSVFASRSGRRIVTGVTLTPDRHLSIGRIRKREIRAMYHRMTLGQLNQEEQRELAGLIAFANDVEPGFAAWLSGSKKLET

SEQ ID NO: 4507 - protein, 303 aa, unidentified
  source 1..303: note = Related to NZ_NRRT01000126.1; note = Rubrivivax gelatinosus
MLRANDLLHQMSSDFGMLTSHLHGIVRTAPIRYKVFYIPKRSGGLRELAQPAREVKAIQRWLMERLEPLLPLHEAATAYRAGASIKSNALRHVESDYLLKMDFTNFFPSILMTDIVRHLETHCGQQYDASAIKLIAYVCTWAPKRQGPLRLCIGAPSSPLLSNSVMFDFDRRLMDFAAHDQITYTRYADDLSLSARTSGALNAYPKLVAELTESLEYPKLALNTKKTVFASRAGRRIITGVTLTSDHQISIGRARKREIRAMHHRMTMDQLNLDEQKRLAGLISFAEDIEPGFSAWLTKTTEA

SEQ ID NO: 4508 - protein, 303 aa, unidentified
  source 1..303: note = Related to JAFLDL010000016.1; note = Candidatus Accumulibacter sp.
MLCANDLLLKMSSDFGMLAGHLQSIVRTAPIRYKVFYIPKRTGGLREVAQPAREVKAIQRWLIKRLKPLLPLHDAATAYRSGASIKKNAQRHVESDYLLKMDFRNFFPSILMTDIVRHLEIHCGQQYDPSAIKLIAYVCTWAPKRQGPLRLCIGAPSSPLLSNSVMFDFDKQLSSAAASDSVTYTRYADDLALSSRTSGTLNNYPGLVAKLAGSLNYPQLELNERKTVFASRAGRRVITGVTLTADRQTSIGRKRKREIRAMYHRMILGKLSPDEQRELAGLIAFADDIEPGFSAWLSKSIDT

SEQ ID NO: 4509 - protein, 303 aa, unidentified
  source 1..303: note = Related to FP475956.1; note = Thiomonas arsenitoxydans
MLSQADILQRMAADLAMLPSHLAKIIQTAPLRYKLFEIQKKSGGRREVAQPAREVKAIQRWLIRELGPRLPVHECATAYREGSSIRKNAEAHASSRYMLKLDFTNFFPSIVRSDLHAHLDRHCSDYLDPSARKLIAHVSCWARHREPPLRLCIGAPSSPLLSNSLMFEFDNRLAAVAKDDGVVYTRYADDITLSSRDRGKIDRYTEIVQTLLESLQYPKLTLNEGKTVLASRAGKRVVTGLILTPEGSVSIGRDRKRLIRAMYHRSLTKQLDSKETQVLAGLIAFADSIEPGFSQRLKGSVRP

SEQ ID NO: 4510 - protein, 302 aa, unidentified
  source 1..302: note = Related to WWER01000012.1; note = Pusillimonas sp.
MQREPDIILQMAADLGMLPSHISLLIRTAPLRYKVFYIPKKSGGMREVAQPAREVKTIQRWLIRYLKDRLPIHEAATAYTTGSSIRANAAAHCHSRYLLKLDFSNYFPSIVKHDIQMHLERYCADFLGESARELIAQTCCWMPRREHPLRLCIGAPTSPMLSNSVMYDFDRLLGNIANDEHVTYTRYADDITLSAEEPGKLDRYVEVVMQLLRDLAYPRIELNMAKVVRASRASKRVVTGLVLTPSGSISIGRDRKRLIRAMFHRKIQGKLNAEEAQVLEGFVAFAENIEPGFRKRLERSML

SEQ ID NO: 4511 - protein, 303 aa, Achromobacter sp.
  source 1..303: note = Related to CYTI01000014.1; note = Achromobacter xylosoxidans
MTSLLDDMAIAFGMPRKRLLNIIRTAPLRYKVFFIKKKAGGLREVAQPAKEVKAIQRWLMSSLAEHLPLHSAATAYTPGSSIKRNAEAHLGSQFILKMDFENFFPSISEDNIKAHLRNFCSDYYTENDIAIIARACTWARKRSPPLRLCIGAPSSPLLSNSVMFSFDDMLFQHANQDEVIYTRYADDLTLSSSHPDVLKEYPKIVAGILEKLAYPALSINQRKTVHASKAGNRTVTGLVLASDDKISIGRERKRLIRSMYHRYKTGKLDPELIPKLFGLLNFAEDIVPGFRANLERGYENVDI

SEQ ID NO: 4512 - protein, 309 aa, unidentified
  source 1..309: note = Related to NZ_JAJEJQ010000001.1; note = Paraburkholderia sp.
MAYPDLLRKMAGDLGMLPRQLASIIKTAPLRYKVFAIPKRDGSPRVIAQPAREVKAIQRWLINELRPQLPVHEDVMAYEPGTSIKKNAERHLGSRFMLKMDFSNFFPSISAEALHMHLESYCGNTYTLVDRQLIVRACTWLPQRTRATALQLCIGAPSSPLLSNSVMYEFDCAVSEKAQSEGVVYTRYADDITLSTTERGILSEYADFVSDTLATLAYPRVTVNRRKTVHASRAGLRMVTGIVLTPDGGLSVGRDRKRLARSMFHRRTLGLLTADESAELDGLLAFIDSVEPGFSATLRTSLLNKKPHP

SEQ ID NO: 4513 - protein, 310 aa, unidentified
  source 1..310: note = Related to NZ_UWYX01000002.1; note = Burkholderia gladioli
MAHADILLRMAADFGMLPTQLASIIKTAPLRYKVFEIPKRDGSPRTIAQPAREVKAVQRWLINELRPHLPIHDAVMAYEPGTSIKKNAETHLRSQFLLKMDFSNFFPSISAEALRLHLELHGGSRYTLADRHAIVRACTWLPERTEWTSSLQLCIGAPSSPLLSNSVMYEFDCVIAEKAQFDGVTYTRYADDITFSSNERGILTLYSDFVNDTLGKLVYPRITVNGSKTVHASRAGRRVVTGLVLTPDGQISVGRDRKRLARSMFHRKTLGLLSAEEAAELDGLLAFIDSVEPGFSDRLRDGTRNSQQHP

SEQ ID NO: 4514 - protein, 307 aa, unidentified
  source 1..307: note = Related to QTRZ01000002.1; note = Burkholderia cenocepacia
MAHADILARMANDLGMLPGQLANIIKTAPLRYKVFTIPKRDGTRRTIAQPAREVKAIQRWLINELRPQLPIHDAVMAYEPGTSIKKNAEMHLRSQFILKMDFSNFFPSISAEALRLHLELHCGNRYSLADRHSIVRACTWAPERAPTLQLCIGAPSSPLLSNSVMYEFDCAIAQKAKSEGVTYTRYADDITFSATERGILAPYFIFVKEMLQQLAYPKITINERKTVHASRAGRRVVTGLILTPDGKISVGRDRKRLARSMFHRRALGLLSADESIELDGLLAFIDSVEPGFSDRLRAAARNSRPHP

SEQ ID NO: 4515 - protein, 309 aa, unidentified
  source 1..309: note = Related to NZ_JOMH01000001.1; note = Polycyclovorans algicola
MRNSRIFQEMAEALGMLPGHLEKIVRTAPLRYKKFSIPKRDGTPRLVAQPAREVKLIQRWLISNLRDHLPVHPSATAYEKGSSIVINASAHQESNYFIKMDFQNFFPSIKGKDIDLHLQSLSRINLSQEDRDVVVRSCTWAPHRIPPLELCIGAPSSPVLSNSILFEFDCAVESYLIEEKLPVRYTRYADDLTFSSLSGGWLHDVRNQVKMIVRGLEYPKLRIKEEKTVLGSRAGRRVVTGLVLTPDKKLSVGRERKRTARAMYHRFWKGELDESEVMQLEGLLAFVESVEPGFKSRLQDYYRKKNPAA

SEQ ID NO: 4516 - protein, 309 aa, unidentified
  source 1..309: note = Related to JACVAP010000002.1; note = Xanthomonas sp.
MDKLESSHLIRVLSLESGLLPEQVANIVRTAPFRYKSFKVKKRTGGLRQLAQPAKEVKWIQSRVVDFLRPLLPMHDAVNAYEVGSSIKKNAGIHASSRFLLKMDFSNFFPSILESDIVAHINCFAPSISEVDAFVITRSCMWANGRKFPLQLCIGAPSSPFLSNSVMYSFDDLISKKAAERDITYTRYADDLTFSSRREGILADFQSMVEVVISEILYPRLKLNTAKTLHASRAGRRVVTGIVITPEGELSVGRDRKRLVRAMAHRDSMSQLDSDGVDKLEGLINFIDGIEPGFAQKARRWRNKKVAGA

SEQ ID NO: 4517 - protein, 302 aa, unidentified
  source 1..302: note = Related to PBYA01000036.1; note = Salinisphaera sp.
MKISESQLFGRMCQDLSLQSESLKRIISTAPLRYKKFRIPKRSGGWREVAQPAREVKKLQYWIIRELGDILPVSDHATAYRDSISIKNNALVHDGSNYLLKMDFASFFPSIKFSDLSQHLSKYVKELTADDIGVIALTTLWTPNREPPLRLCIGAPSSPLLSNSILFDFDALVSKSLPDSVKYTRYADDLFFSTQESNQLSYVERLVRETVHELAYPALSFNDNKTVNVSRNSRRSVTGVVLKPDGGLSVGRERKRIARAMCHKLSIGRLSADEEAKLRGLLAFISSIEPRFAERLKSKYSI

SEQ ID NO: 4518 - protein, 308 aa, unidentified
  source 1..308: note = Related to JAIOAJ010000071.1; note = Stenotrophomonas maltophilia
MDGLISNVAALVGVSSASCRRIANGAHRRYKVFTIAKRGGGRRVVAQPAREVKAVQRAVCQLLSENLPVHDSATAYKAGTSIAANAAAHAGAQFLTKLDFSDFFPSISGDLISDLLRRRCEHLTEAEIEFVVDVCTWRPDGRKVLCIGAPSSPLLANAVMFEFDCEAFEAASEMCVSYTRYSDDIALSSMVPDTLRQAETAVRRIIASRPALRVNERKRVAVGRGTSMVITGLTLTNQGGVSVGRSRKRGVRAGVNRYLLGELDEADTLKLKGEVAFVLSIEPEFRGVLVRTYGLRVWTLLPRMVAGG

SEQ ID NO: 4519 - protein, 307 aa, unidentified
  source 1..307: note = Related to NZ_MDEE01000039.1; note = Xanthomonas dyei
MIGLVSKVSSLVGVSTSSCRIIARGAYRRYKIFAIPKNNGGRRVVAQPAREVKAVQRAICQILSDKLEIHQSATAYKPGSSILANAAVHKGAKYLTKLDFTDFFGSIDGESIFHLVESRCPDLSAAELKFIVDACTWRPQGRAVLCIGAPSSPFLANAIMFEFDAKAFDLANRVDAKYTRYSDDIAISSLKPDLLKGLEENIRNLVRGSRLPYIRLNDQKRVAVGRSTSMSITGLTLTNQGGVSVGRERKRGVRAGVSRFFNGQLSPAEIAKLKGEIAFVLSIEPNFRGVLINTYGLRAWELLPKSQ

SEQ ID NO: 4520 - protein, 305 aa, unidentified
  source 1..305: note = Related to JADUKR010000001.1; note = Stenotrophomonas maltophilia
MNGLVAQVSQMAGISSSSCRLIARGAHRRYKKFTIRKKNGGIRVVAQPAREVKAIQRAICVILSEKLFVHASATAYKIGSSILSNAAAHAESRYLSKFDFSDFFPSIGADSLINLLAIRVPNLSEAEVRFVVDACTWQPNGRAELCIGAPSSPLLSNAVMYSFDENIFSALAEMGVSYTRYSDDISISSKREGILADAELLLRAAVARSRFPVLRMNEEKRVAVGRGVSMTVTGLTLTNQGGVSVGRARKRGVRAGVEKFVRFGATEVEFARLKGELAFVLSVEPEFRQVLIRTHGERILRLLPR

SEQ ID NO: 4521 - protein, 316 aa, unidentified
  source 1..316: note = Related to MIGM01000010.1; note = Xanthomonas arboricola
MIGLVSTVSFLAGISTDSCRRIAASAHRRYKVFTIPKKNGRDVRVVAQPAREVKAIQRAICAALNEYLHVHPTATAYVKGSSIIANAGMHKHCKYLTKLDFKSFFPSIDGESIERALRSKIADLSESEIQFVLNACTWRPEGRQVLCIGAPSSPLMSNAVMYDFDQLANIECRNMGVIYTRYSDDISISSEQPDKLSLAENRIREIIQIQSQPRLFFNDSKRVAVGRGTAMRVTGLTLSNEGKVTVGRTRKRGVRAGISRYMRGLVDEEALQKLRGEISFVLSVEPEFRKVLIRTYGISVVRILPPRIASKTGDIK

SEQ ID NO: 4522 - protein, 311 aa, unidentified
  source 1..311: note = Related to NZ_JQNL01000001.1; note = Luteibacter sp.
MSEFIDQVAASLGLSRGVCENIARTAHRRYKVFLIPKKNGRGFRTVAQPAREVKAIQRTLVLMLDQLLPVHPAATAYRPGSSILRNARAHVRAKYITKLDFEAFFPYIDRTSLGRHLRQHLSHLDGDDIAFILSACCWTPKGTTTQRLCIGAPSSPMLSNSIMHDIDSDIQTYCEEVGAVYTRYSDDICISATMPDVLAPLEQRIRHRIRESTRPTLTLNEAKRVAVGRGSAMNVTGLVLSNEGTVTVGRERKRGVRAGVMRYLKGALDLNETARLKGELAYVISIEPGFRFVLAKTYGMEIQALLPSAGI

SEQ ID NO: 4523 - protein, 311 aa, unidentified
  source 1..311: note = Related to NZ_CP093547.1; note = Lysobacter gummosus
MIGLVSQVAEKVGISSQACRRIASSAYLRYKKFVIPKSNGRDFRFVAQPAKEVKAIQRALVEILGAYLPVHDSATAYRIGLSICDNARRHASAKFITKLDFSDFFPSIDAPALSAHLRAHIANISDAEVMFIMNACLWRPEGRQVLCIGAPSSPMLSNSVMFEFDTLISGLASQADVVYTRYSDDITVSSREPDKLRGIEIAIRKACATMSHPKLEINEKKRVAVGRGNAMRVTGLTLTNAADVSVGRLRKRGVRAGINRYVNGDLDDDQVERLKGELAFVLSVEPNFAEALLRSYGAMSLSKILPRKVLP

SEQ ID NO: 4524 - protein, 309 aa, unidentified
  source 1..309: note = Related to JACVAK010000003.1; note = Pseudoxanthomonas sp.
MNGDLLSFVVAQTGLSRQAVIRISETARHRYKVFSIDKKRGGKRIVAQPAREVKAVQRAIVAALSSRLPVHESATAYVPGSKLINNAIPHAGQKYLLKFDFENFFPSIDDSAIRKALSGETQNGFSQDDILLVVGSCLWRPPGSSLLGLCIGAPSSPFLSNAVMFEFDGIVSRLARELGISYTRFSDDVTFSGPDASSLSKMELGFRETCRELNAPKLVVNEKKRTFCSRGAAMRVTGLTLSNGGGVTVGRARKRGVRAGVDNYLRGTLDLKKVERLRGEVAFVISIEPLFRDVLIATFGDRVRDVLPS

SEQ ID NO: 4525 - protein, 313 aa, unidentified
  source 1..313: note = Related to JACVAG010000005.1; note = Pseudoxanthomonas sp.
MTLGLISAIASEAGISKGSALRVAVSAYKRYKVFKIKKRSGDGTRTVAQPAREVKAIQRAIVQFLSSRLPVHDAATAYVGGSSIYANANFHAGARYLLKMDFSNFFPSIRPLDIERHLLRHLGSEISPAEVSFVIQACIWRDPEMGGFGLCIGAPSSPFISNTILHEFDTSVRSVCDEYLAKYTRYSDDMTFSADGPDVLAEVERRVRAVVKEMRSPVLLLNENKRVAVSRSAAFRVTGLTLPNQGGVSVGRKRKRGVRAGVHKFVLGQLDAKGVEKLKGELAFVLSIEPEFRYVLVETYGGAIHQLLPGKWH

SEQ ID NO: 4526 - protein, 318 aa, unidentified
  source 1..318: note = Related to NZ_FUXP01000009.1; note = Lysobacter spongiicola
MTTRLVNRLSQQVGLPAGDIERIISSAPRRYKEFKIRKRSGSGFRDIAQPSRELKILQKAVVEELKPHLPIHDCVHGYVIGRGIKSNAAAHRKGRFILKMDFADFFPSIKPVDFRAHLRESLPDRYDDIEARQLELLLFWLKRGERTLRMCIGAPSSPSISNYLMYAIDSRITENCRLNAVTYTRYADDLTFSCGEEGILGEVEGAVSRIVGETVHPRLRINPDKTIHISRKQRRTVTGVNITPTGELSIGRDRKRLIRAMVHRHIRGLLDLRGQNELIGLLGFAHDVEPSFAQKMWASLKGAPALKRSRRVDYMLEG

SEQ ID NO: 4527 - protein, 312 aa, unidentified
  source 1..312: note = Related to NZ_CP041965.1; note = Xanthomonas arboricola
MTTNLVHLLSREVGLPISDIEKIIASAPRRYKEFKILKKNGRGVRDIAQPSRELKALQRAVVSKIAPRLPVHDCVHGYVLGRGIKSNAQSHLGGSFILKMDLSDFFPSIKPVDLRHHLNKFLPEEFDDVELRQLELILFWIKKGTSILRMCIGAPSSPLISNTIMFDVDLEIDNLCRQYDVKYTRYADDLTFSCSEKGVLSLIQRGVSLIVRSSKSPIIKINEEKTLHLSKRAKINVTGVNLTPDGSLSIGRERKRLIRVMAHHHSLGSLDAEGQNKLIGLLGFAFDIEPNFAMGVWGALAGAPKLLRTERR

SEQ ID NO: 4528 - protein, 308 aa, unidentified
  source 1..308: note = Related to VCME01000014.1; note = Xanthomonas hortorum
MSTPLVKLLSMSVGLTPTDVMRIISSAPRRYKEFLIPKNNGRGHRKIAQPSREVKLLQRALCESVLTGFPVHNAAHGYVRGRGIRTNAEAHQSANFILKMDFENFFPSMKPNDLRLHLQMYASTRFDENEVRQLELILFWLEKGSDSLRMCIGAPSSPMLSNTFLYSIDAQLTAVCDKSGVTYTRYADDLTFSSSEPNLLKEIQNETELIIGKADYPKLKINKDKTIHISKRQRRTVTGINITPSGKLSIGRGRKRLMRSMAHRHSQGILSTEDQKMLGGLIAFAADIDPGLAVDIKLSLLNHPPLAK

SEQ ID NO: 4529 - protein, 314 aa, unidentified
  source 1..314: note = Related to JAAAEX010000007.1; note = Stenotrophomonas maltophilia
MTTGLVQMLSQRSGLPQADIERIVASAPRRYKEFTIPKKSGRGLREIAQPSRELKLLQRIIVDAVLSRMQVHECAHGYVAGRGIRTNAAAHARSKYILKMDFKDFFPSLVPLDLRSYLQKHQPSGFTEQEVRQLEQILFWRKKGSNVLRMCVGAPSSPALSNALMYELDQSISDASSTRGVTYTRYADDLTFSSRQKDVLGSLLTEVIAIVSESKSPYLRINPSKTISISRGQRRTVTGVNITPDGRLSIGRESKRLIRSMVNYHASGKLDEEGQARLIGLIGFATDIEPDFSARMRIALLNSPPLLATPSRSV

SEQ ID NO: 4530 - protein, 311 aa, unidentified
  source 1..311: note = Related to NTJG01000001.1; note = Xanthomonadaceae bacterium NML93-0793
MTTRLASSLSKWSGFALPDVEHIIATAPRRYKVFTIPKKRGGLRQIAQPSRELKSLQVLLIGRVLHHLPVHDAAHGYVIGRGIKTNAQAHSKSNYLLKMDLRDFFPSIRPRDLRAHLKVQAEGYLTDEEVGQLCNLVFWRPKGQRGLRLCIGAPSSPFLSNTIMLGVDQKLAEVARSLGVLYTRYADDLAFSSNEADVLPALEARVIDVVEGSRFPKIFVNREKTVHISRAQRRMLTGLILNSVGDVSLGRDRKRLIRAMVQSSRYGRLDEKELEKLNGLLSFAHDVEPGFAMKMRARMALPQVDDGLGEV

SEQ ID NO: 4531 - protein, 320 aa, Nitrosomonas sp.
  source 1..320: note = Related to FODO01000031.1
MDLILQLANDLGLANRDILLIANSAPYRYKEYKIPKKKPNTFRDIAQPAREVKILQRWVIENVLTKLPIHNAATAYIKDRNIKYNAMLHAGNPFVLKMDFSNFFPSIVPKDFKTHLLRHLPNMYTEDEINLLLRILFWRNKKEERFQLSIGGPSSPNLSNSIMFEFDSLISDECNSLNIVYSRYADDLVFSSIDFDLLKRIHNQVAIYLKKIPYPKLTLNNDKTMFLSKRGNRTVTGVIITNDGSLSLGRDRKREISCQINWHKKGNLKRSDTLKLHGMLCFANDIEPGFIDRMRTKYGIDTIHELIHLDTSKDQKTIKI

SEQ ID NO: 4532 - protein, 307 aa, unidentified
  source 1..307: note = Related to NZ_BMMF01000004.1; note = Salinarimonas ramus
MKLLREVAIENGLAPEELIYIGPSLPSRYREFAIMKRDGTPRWIAHPARELKGIQRSIVRSLISQFPIHDSATAYRLGFNIRKNVEPHVRQEFIVKMDFANFFPSIRPHDLISYLSNTQFKLSDTEIKFLTHALFWKPKKASDLRLSIGAPSSPPLSNALLYDFDVHVDALCRVNQVKYTRYADDMTFSATNTQSLEVVHKQIVRFVKEMKSPSLRLNTTKTIWLSKAHRRNVTGLIVTPNGEISIGRDRKRLISAKLHHYSLGRLGVAETKHLHGLLAFANAIEPQFVDRMRRKYGVEVLALRHQK

SEQ ID NO: 4533 - protein, 317 aa, unidentified
  source 1..317: note = Related to NZ_RXOL01000001.1; note = Croceicoccus ponticola
MSLLSELIWATGLPQPELMRIITTAPSRYKVYQIPKRTGGWREIAHPARELKALQRLMLNKYLINFPVHQSAMAYVKGRNIGDNAAIHTDSNFFLKLDFERFFPNIKVKDWIRFLKNNNFQPFLSDEIPITSQILFWGSGHRKPQCLSIGAPTSPILSNILLYDLDVELSAHAQAMGVRYSRYADDITISGQTIDQIIAFESLVRQRIRHLASPKLKFNDSKRGVYGRSVKRMVTGLVVTPAGAVSIGRDRKRAISSLVHRFSLGQLDQDQLGYLKGMLGFAKANEPEFLDRLRAKYGDAVIDAATKLHLPPRNRKD

SEQ ID NO: 4534 - protein, 321 aa, unidentified
  source 1..321: note = Related to NZ_CP069354.1; note = Microvirga sp.
MRLLEELAINLGLGTAEIETIVETAPARYKVYDIPKRSGGTRTIAQPSRELKALQRYILSTKLVKFPVHKSAMAYLPGKNIARNAEEHLNGNILLKLDFENFFPSILVKDWESFAKKHPVQVIPVEDIKLYSKILFWGQRSRTPRCLSIGAPTSPMLSNLLLFTLDEQLDEAARKCSVNYTRYADDITVSGSTVEQVTAFEKLARKIVKSLRSPRLIFNEEKRGLYTRGQRRMVTGLIITPNGTLSIGRERKRTISAMLHKALLGELDLESTGHLKGLLGFSLANEPLFVNRMREKYGDAIVDRVLRLKLPERILQEGKQG

SEQ ID NO: 4535 - protein, 322 aa, unidentified
  source 1..322: note = Related to QRGO01000001.1; note = Undibacter mobilis
MSLLTELVQEFGLGQSDLLRIIDTAPARYSVYPIRKRNGGFRTIAQPSREVKAIQYYILEKKLGVFPVHPSAMAYVKGRNIRQNAASHASSGPILKLDFQEFFPSIGVRDWERFVKSHPVDAIDLSDLKYYSKILFWGQHRKSNVPKCLSIGAPTSPIISNILLYDLDVKMSALAELLGVVYSRYADDITVSGQCVDEVLEFERLARREVKSAKSPKLTFNEEKRGLYFRGQRRLVTGLVLTPTERVSLGRKRKRTISSLLHKSTLGQLDPKRRGYLKGLLGFSVANEPEFLGRLRRKYGDEAVNAALVYFVPKRIDQEALF

SEQ ID NO: 4536 - protein, 327 aa, unidentified
  source 1..327: note = Related to SALN01000219.1; note = Mesorhizobium sp.
MSLILELAEATGLSSGDIERVIRTAPARYKTYPIEKRSGGIRIIAQPSRELKVIQNYILKEKLKDFPVHSCAMAYEKGRNIFDNAASHVGSRVLMKLDFKDFFPSIKVKDWERFIAASSVETISPTEVYLYSKVLFWGEKRRSSVPKCLSIGAPTSPKVSNILLYDFDMTMSGKARSLGLSYTRYADDITISGDTVEQILLLEREAKQILRKMAHPKLTFNEAKRGIYSKGQRQMVTGLIVTPQAVVSIGRERKREISSLLHRSLLGQLDNDRRSLLKGLLGFCVANEPEFIGRLRRKYGNGAVNAAMKFHAPKRARVQPPPPPTLF

SEQ ID NO: 4537 - protein, 316 aa, unidentified
  source 1..316: note = Related to NZ_CP011479.1; note = Hoeflea sp.
MELVEAIGLSVADINHVIDTAPARYRVYPIEKRSGGERMIAQPSRELKAIQRFILREKLSSFPVHHCAMAYEEHRSIYANAQMHKNTRAILKLDFQEFFPSLKVADWEMLVSKLKPNAINISDIKLYSKILFWGQQKGSKFPRCLSIGAPTSPKMSNLLMFDFDSIVAEKAIEHGLNYSRYADDITISGDSTLKITTLERDIQKLVRSMKSPRLTFNEEKRGLYTKGQRRMVTGLIITPAKDVSIGRDRKRNISSMLHRDTLRKLDVDSRGQLKGFLGFCAAVEPQFIDRLRHKYGDAAIDRAMKYHTPKRSINET

SEQ ID NO: 4538 - protein, 318 aa, unidentified
  source 1..318: note = Related to JAHBYX010000006.1; note = Mesorhizobium sp.
MSLLLELVQHTGLSAAELRRIIQTAPKRYRAFPISKRNGTERIIAQPSREVKELQRYLLDQKLTGFPVHDSAMAYEAGTSIRKNAYRHKNGNYILKLDFKEFFPSIKPRDLENLIRRSKREEIAVSDIPIYLKILFWGGLDKSTIPQCLSIGSPSSPRISNILMFDIDERICSEVQKFDVMYTRYADDITLSGKGLEVVRAAEDKVVQVVRKSRFPKLEFNRDKRGIYSRAVRRMVTGLVITPVGSISIGRERKREISALLHRSSLNQLVTEERGHLKGLLGFCVACEPEFVGRMREKYGHKTIDEAMKYHVPKKRGR

SEQ ID NO: 4539 - protein, 316 aa, unidentified
  source 1..316: note = Related to RXIO01000070.1; note = Ancylobacter aquaticus
MPILDDLVSDLGFSFKDVSRIISTAPARYKVYGIPKRDGGFRIIAQPSRELKLIQRYILENKLNKCKIHECATAYVKNKSIYENAEVHKSADKIIKLDFINFFNSIKPRDWRAMAPKLDGCLFEASDLEIYIKIFFWGHVKNSSVPRCLSVGAPTSPSISNILMYDFDQAVFAAAKDLNINYTRYADDITLSGDSISHLHKMESHVRKSLKIISFPKISINEKKRGLFTRAGRRSVTGLIITPDGSISIGRDKKRLISAMVHHFVTGEMTEEGKAKLKGWLAFCVDNEIEFVERLRIKYGNEAISKALKYYIKPLS

SEQ ID NO: 4540 - protein, 326 aa, unidentified
  source 1..326: note = Related to JAIETA010000075.1; note = Reyranella sp.
MTIGLLKELGIKLGMGRSDLLRIISTAPKRYKVYQIPKRRGGTRTIAQPSRELKAIQRVLLKAVLSKFPVHAAATGYVENRSILDNAVAHMSSRVLLKLDFRDFFPSIVPDDWRRLARAKFVDLDEDEVWLSTMILFWGQKSTTPRCLSIGAPTSPMLSNIVMYSLDVRLAEAAAATNTTYTRYADDITASGPTIEDVRQFEAYAREIVGRSVSPQLTFNDQKRGIYSSGQRRMVTGLVLTPSNSVSIGRERKRLISSMLDHWIKDSLDNERKARLKGLLAFCIAAEPAFVSRLRAKYGDGPVNDVLRYHIVRKGPPPRQAGKSSS

SEQ ID NO: 4541 - protein, 320 aa, unidentified
  source 1..320: note = Related to CP090554.1; note = Neorhizobium galegae
MSLFEDLLFFTGLSAPDLRRIIATSPARYKQFTIAKKSGGERLIAQPSRDLKVLQRYIQGNILSKGTIHASATAYKNGASIKHNANIHKYNRVILKCDFKDFFHSIKPRDWILYAQENFHSLSQDDVGLCARVLFWGRGTSKPACLSIGAPTSPVLSNLIMFDLDEKLTRSAEKIGATYTRYADDITLSADKIETVLLLEKRLKSAVAKSKYPKLTFNGDKRGLYTTAHRRNITGLNITPDEEISIGRDRKRMISSMIHKYSIGQLSEKDAGKLKGYLAFAYDCEPDFIERMIRKYGEEQISIIRQLHLPPRQRDIEFPE

SEQ ID NO: 4542 - protein, 317 aa, unidentified
  source 1..317: note = Related to NZ_PCDP01000036.1; note = Rhizobium tubonense
MTLFDELSILTGLGASDLNRLIYNAPARYKEFPIKKRSGEDRIIAQPSRELKIVQRYIAGLVLNRLPIHSAATAYKEGANIFANVQSHSANRIILKLDFTDFFHSIKPTDWRNYAKVHIPSLSKEDVELSAKVLFWGMKSNRPICLSIGAPTSPVMSNLIMYDLDEQFFQITNDIGVTYTRYADDITLSGSNKESVIEAEKAIRVAVRKCKSPKLLFNESKRGIYSTGQRRHITGLNITPSGKISLGRERKRMISSLIHKYSLMLLDANDVGKLKGYLAFSLACEPEFLGRMRIKYGSTLIEEIQKTHIPARTLPES

SEQ ID NO: 4543 - protein, 321 aa, unidentified
  source 1..321: note = Related to NZ_FPAJ01000001.1; note = Sulfitobacter marinus
MSELDLLRTVALNVGLSEESTLEIIRDAPQRYKVYPIPKKGKGHRIMAQPARELKPIQRSIADIVLEKFPVHPSAMAYRRGVSIADNAKVHAGKNSILKLDFESFFNSISAAAWRRFMKAQEIIELESHELALLTKALFWGAGQRTPYCLSIGAPSSPLVSNIIMFEFDRQMHDFAEKHGIRYTRYADDITASAREFKNLAAFERHLRTYISRNKTPSLKINEEKRGIYSSSDRRLVTGLVLTPDGKVSLGRERKREISSLVHKSTLGQLDIEQLGYLHGMLAFAISSERDFVNRLRIKYGEDAISSVLRYRVPRRDGTAR

SEQ ID NO: 4544 - protein, 306 aa, unidentified
  source 1..306: note = Related to NZ_SDEA01000022.1; note = Paracoccus luteus
MSDASVLEIIQNAPKRYKVYRIPKKGSGFRIIAQPARELKTIQRSISKLVLEKLPVHASAAAYRPKIGIFHNAAVHAGTSPILKLDFERFFNSITAEAWRRFVASQEELRLSRSEMALVTRALFWGEGSKNPSCLSIGAPTSPLISNAIMFQFDVEMSNFAEERGLRYTRYADDIVASAKDFKVLHHFERHVRQYIKKNKTPSLTINESKRAIYSPGDRRLVTGLILTPDGKISLGRHRKREISSLIHFFRLGQLDHERLGYLQGLLSFSLSVEHDFVSRMSSKYGNDVVSAILNYRVPRRDGSPR

SEQ ID NO: 4545 - protein, 319 aa, unidentified
  source 1..319: note = Related to NZ_LMEM01000009.1; note = Devosia sp.
MSLLEELQTYSGLGYGELGAVLRTAPRRYKAYLIPKRSGGHRMIAQPARELKNLQYFLIDRTLSKLPVHSAAAAYRENVGIRSNAAAHARNEVILKLDFSDFFPSIKPRDWMLFCGSLDPEVAEASGLATGADVMLATRLLFWGRGTFEPKCLSIGAPSSPVLSNVLMFAFDTAVAAHAIQNDVVYTRYADDITLSSDRSKQILLVEAAIRRYIKRYRSPALTINEEKRGLYTSGQKKMVTGLVVTPEKRVSLGRDRKRMISSLVHRFTLTQLELPKIAYLQGMLAFARDVEPSFYASLERKYGQPTMRALLAFRLPKS

SEQ ID NO: 4546 - protein, 311 aa, unidentified
  source 1..311: note = Related to JAFKLT010000057.1; note = Sphingomonadales bacterium
MSVEPKHSLIRTCALATGLTINEVVRIAGIGPKRYKIYQIPKRSGGQRTICHPSRELKALQYVFLRDILAQLPVHSAATAYKSGSSIKQNASRHLASRIILKLDFENFFHSIKVADWMAYAKATFPHWTAHDIEFSLFVMFWGAGGYKPVCLSIGAPTSPLVSNALMYQFDGVLSNFAAANGLVYTRYADDITISAEGRLDKDAIMAEIHSALDLIEYPRLKLNTAKTKLASKATSRRVTGLVLANDGSLSLGRERKRLISAMVHRAVRGLAEPDAIAHLRGLLAFANDVEPSFVAMLRKKYGSFVLDILH

SEQ ID NO: 4547 - protein, 300 aa, unidentified
  source 1..300: note = Related to AWFC01000023.1; note = Hyphomonas sp.
MSSLIEKISAETRISIPDVKLTVRTASRRYKVYSIPKRDGTARIIAHPARELKAIQRALISESPASLRVHSAASAYEDGSSIAKNANIHVKNSWLAKFDLENFFNSITVSAWQMYLSKLEVDDEYVELSSKVFFWKPERRKSDLCLSVGAPSSPFASNRYMFSFDQYVSDYCTKNNLAYSRYADDIAISSQSEIELIHLQEVIEEGLKESRLKLNSRKTLLLGPGQRRVVTGVILKNDKKISLGRGRKRIIESMVHNYAKGKPSSSLEVIRGHLALLKMIDPDGYNRIRKRYENCTSLFK

SEQ ID NO: 4548 - protein, 317 aa, unidentified
  source 1..317: note = Related to DOSK01000382.1; note = Brevundimonas sp.
MSRVLTDIAEHLGVGTEDVRKFIFAAPARYKVFSIPKRRGGQRTIAQPSAPLKEIQRFVAANQLATFPVHDAAAAYITGKSIADNAARHRKGKYLLKLDFENFFNSITVKDWRRLVALTPNHGITPQDLPHLDRILFWGGGTFSPIMLSVGAPSSPTISNMIMFRFDTAVSQKAAEVGAVYTRYADDISISAPTAKTCLEVERFAVSALRALKYPGLRFKTDKRGLYGPGQRRLVTGLVVTPDNRVSLGRERKRNISSLVHKASLGKLDAPEMLELKGLLGFVHSAEPRFLQTLKTKYGAELVQRIAAFEVKKLGDG

SEQ ID NO: 4549 - protein, 314 aa, unidentified
  source 1..314: note = Related to FOOA01000003.1; note = Aureimonas phyllosphaerae
MSLRDEICIATGIGLSEFARIENSAPVRYKSFSIAKKSGDYRIIAQPSRELKIIQRWICENYLASFPVHNAAYAYRLGRGISHNARVHAGSRYILKIDFKDFFHSITPNDLFVRIKLANKDLSKADKRTLSQCLFWGKGVNMPLCLSIGAPSSPMLSNIVMFDFDERIARICKDKGVKYTRYADDITVSSEGIDELLFVERGIRETVKNSKNPKIEINEDKSRRFGPGQRKLVTGLNLTSEGGVSIGRGRKRKIHSMMNSAKYGILPDHDIGMLKGLIAFSISCDDDLVTLLRKKYGSDVVDRILSFKVPSRRR

SEQ ID NO: 4550 - protein, 334 aa, unidentified
  source 1..334: note = Related to DOJP01000165.1; note = Rhodospirillaceae bacterium
MGTFFDPENSKLCLRLARETRMPYSALYRLVLTAPYRYKTYKIQKVGRPGQVRIIHHPARELKTIQRWLVKNVLYSMPVHSAACAYEKNTGIKLNASKHVNNNYILKMDFKDFFPSIVPRDIFLRMPADTPWNSNDFYFLSRVLFCKKDTGTKLSLSIGAPSSPKISNIVMYEFDQKVSEYCNQKNITYTRYADDMTFSTNRREILQECEDFINGLVREMDSPHLEINASKTLHTSKKHHRRITGLVLSSQGFVSLGRERKRLIRAMLHNYKYNQNSDADKTQKLKGLLAFACDCEPIFIDNLKAKYEAEIDCLLSMKPEKPYIRRLLGSRSKS

SEQ ID NO: 4551 - protein, 337 aa, Vibrio sp.
  source 1..337: note = Related to CP023054.1; note = Vibrio anguillarum
MKSLYDISEFTEKSVEEIIANYLTAPRKYKEFKIKKRNGGLRTISQPSKDVKFYQYAIIEKILKNLSIHDSATAYRDSKSIYHNALPHKGSSWILKLDFKDFFHSIRPEHLKSFLLDAYEDISSIEVDILNHYLFWLDRTDRKLKLSIGAPSSPIISNIVMYNFDESVCDICSKYSVIYTRYADDITLSASSRECLLEAEEELKVLIEETQTPLLVLNDKKRVLIGRNRSKRVTGVVITHENKLSVGRYKRKKVRAMLHLYSNDKLNEQDIPILHGTLSYIKSIEDNFYRSLRDKYGDAVFTKLAKESFKISKLKYYGKEESEEEKTQSKDDNDIVF

SEQ ID NO: 4552 - protein, 328 aa, unidentified
  source 1..328: note = Related to CH724143.1; note = Photobacterium sp.
MLWGLIFDMKSLLEISKFTGKDVTEIISNYLTAPRKYKEFKIKKRSGGFRTISQPSKDVKIYQYAIIENVLNNLSIHDSATAYRKGKSIYHNAFPHKDSMWILKLDFKDFFHSIRPEHLKSYLLDEIKGISSIEVDILNHYLFWMDKTDRKLKLSIGAPSSPIVSNIIMYKFDENVSNICSKFNVIYTRYADDLTLSANSRECLLETEKELKALVEETQIPLLVLNDKKRVLIGEHKSKRITGVVITHESKLSVGRYKRKKVKAMLHLYANGKLNEEDIPILHGTLAYIKSIEDNYYRSLRDKYSDAFFTKLYQESFSISERKYLGKE

SEQ ID NO: 4553 - protein, 324 aa, Vibrio sp.
  source 1..324: note = Related to JAKKCQ010000002.1
MKILSDISECLGKGIGEIISNYLTAPRKYKEFKIKKRNGGFRQISQPSKEIKNYQYAIISKVLNELPIHDAATAYRNKKSIYHNALPHKDSAWILKLDFKNFFHSIRPEHLKSYLTEAYEEISSIEIDILNHYLFWMDKTDRKLKLSIGAPSSPIISNIIMLKFDNAVSDICSKHDVNYTRYADDLTLSAQSKESLEKAEEELNALVEETQTPFLILNDKKRVLIGNNQSKRVTGVVITHENKLSVGRHKRKKVRAMLHLYVNEKLEKKDIPVLNGLLSYIKSIELEYYLSLKDKYGDVVFSKLSLESFSISGMLKKPEKKMKA

SEQ ID NO: 4554 - protein, 326 aa, Proteus sp.
  source 1..326: note = Related to JADRZV010000010.1; note = Proteus mirabilis
MKYLLDILEHSKKTIDDLIFNYLTAPRKYKEFEIKKRSGGFRKISQPSFDVKLYQYLIMENILAKLPIHDAATAYRYHKSIYHNALPHKNSDWILKLDFKDFFHSIRPKHLKSILTDVYKDISSIEIDILNHYLFWMDRGDQKLKLSIGAPSSPIVSNIVMYKFDETVFNMCSENNVIYTRYADDITLSSDSRNILLKVESELKKIIADTQEPLLILNNNKRVLLGKQKSKRITGVVITHEKKLSVGRYKRKKTKAMLHLYVNNKLKKGDIPILHGTLSYINSIESEYYQLLELKYGKATFRKLTKDAFYISKMKYKNINKNDMDN

SEQ ID NO: 4555 - protein, 334 aa, unidentified
  source 1..334: note = Related to NZ_LTZD01000015.1; note = Aliivibrio fischeri
MKILKDLSEKLDIDVDDIISSYLTAPRKYKEFKIPKKRGGFRDIAQPSNEIKIFQYGLIDTFLKNFPIHDCATAYMENKSIYDNALPHKDSKYLLKLDFKDFFHSIRPEHLKFYINKYNEGISNIEIDIINNFLFWMDKEDNKLKLCIGAPSSPMISNIVMYDFDLELESLCNTNNVIYTRYADDLTLSSNSNSSLMEVEGFLNKIVERTQIPLLELNDSKRVCIGDKKSKRVTGIVITHNNQLSVGRYKRKRIRAMLHLYNCNKLNENDIPRLHGLLSFVKSIEPDYYDLLKLKYNENLLKQLAKESYIISRKWYVSFNNDSLNVGDEDDIVF

SEQ ID NO: 4556 - protein, 326 aa, unidentified
  source 1..326: note = Related to PYNJ01000059.1; note = Photobacterium kishitanii
MNILKTLIEVLGVSYSSIFKDSLTASRKYKEFTIPKKKGGRRKISQPSEDVKIVQSAISSVLLNSLPVSDYAYAYIRNRSIYDNAFIHKESSFLLKLDFKDFFHCIRPEHLKYYIKKNISDISDMEVDIVNNFLFWFDNDDNKLKLCIGAPTSPLISNIVMYEFDEKISKICEDFDVIYSRYADDITLSSNNRDDIDTVEIKINNLIKETNIPLLKLNKKKRVFVSQHMSKRITGIIITHDNKLSVGRYKRKKIKALLHLYNNRKLKDKDIPYLHGFLSFIKNIEPEYFNKLKSKYNEKLFHQLAKESYILSKKEKEKEMITHEKL

SEQ ID NO: 4557 - protein, 335 aa, unidentified
  source 1..335: note = Related to CP045427.1; note = Shewanella sp.
MNKLNILNEISNDIDVNIGEFFNFSSMAPTAYSTFQIRKKSGGTREISQPAQWLKSVQYAIIQKLLEQLPIHYTATAYQKGKGIKQNAEAHINKTFILKTDFENFFPSILQSDLELILKRNNIEINSFEYSVISRFLFKKKNDSNKLELCIGAPSSPMISNVVMFEIDSLLSEKCNELDISYTRYADDMTFSSDKYENVEFILEFLKQTILKVESPQLILNNKKTKIISKGRSQRVTGVILSNDGRVSIGRNKRRRARTLLHLLELDKVDDKSLVELYSIVSFMRNIEPEFYEILKEKYGYNLFKKLYKKFSLLVEKHTDQSTGMKLKFKGFNVD

SEQ ID NO: 4558 - protein, 345 aa, Vibrio sp.
  source 1..345: note = Related to NZ_CP042449.1; note = Vibrio alginolyticus
MNIVKVISDLINQDITYMFLLSATAPEAYSTFYINKKSGGIREISQPSKEVKEVQYVIIKEILSKLPVHECAKAYKKGVGIKQNAVEHLNKEFILKTDFSNFFPSIKPADLEYYFKKNNIEINNLEFDIISKILFKKKENSNKLELCIGAPSSPIISNIVMYEIDELLYSHCKERNISYTRYADDMTFSSNSIEDLKEILSTLKKVIIKNKNPELILNQKKTRLISSGRSRRVTGVILSNEGKLSVGRTKRRRTRTLLHLLSKSSIDDKSIIELYSNISFIRNIEPEFYQKLLSTHGQSTFNKLNKSFQSLIEKNTDNNGFTWRFGINGDSLVKKVIYEDDDIQF

SEQ ID NO: 4559 - protein, 321 aa, Salmonella sp.
  source 1..321: note = Related to AAIODZ010000022.1; note = Salmonella enterica
MSYIDNLSRVLNCSVMSLISGYIKAPKKYKVFYIKKKNGKGLREIAQPAPDIKEVQRAIVSTLLAKLPVHECAKAYIKETSILNNAEPHKENKYILKVDFENFFYSIKPQDLYFYLLRGEIKLTQFEYEILSHYLFRRKKGEKKLRLCIGAPSSPIISNIVMYDFDCILSDYCHLNNIAYTRYADDITLSSESYGKIKDAYSFIARVVSDLKKPELKINSDKTKIIGKGRSRRITGVIISNTGELGVGRFLRKKIRALTHLYSNHKLSERDIPYLLGMLAHIKNIEPSYYEALVSIHGDNLFKKLGKDSYRILENKRGNDN

SEQ ID NO: 4560 - protein, 317 aa, unidentified
  source 1..317: note = Related to NZ_CP025085.1; note = Serratia sp.
MSYIDELSKTLNCTPKTIISGYIKAPKKYKVFFIKKKNGKGLREIAQPSPDVKKVQRAIVNSLLSLLPVHECATAYIEEKSIFDNAEPHKKNEYILKMDFENFFYSIKPQDLNYFISKNDIKLNHFEYEVISHYLFRRKKGEKKLRLCIGAPSSPIISNIVMYDFDEKLFNHCKENDVIYTRYADDLTFSSDSFDKLNDVKNFVIDLVSLQKKPELIINTSKTKFIGKGRSRRITGVVISNTGDLGVGRFLRKKIRALFYLYSNNKINHKDIPYLLGMLSHIKNIEPDYYYSLIKINGEDKLKQLGKDSFAVLQKKQ

SEQ ID NO: 4561 - protein, 322 aa, unidentified
  source 1..322: note = Related to DAEHES010000012.1; note = Serratia fonticola
MGYLNDLAGSLDSSVASLISGYLQAPRKYKVFYIKKKGSDKLREVAQPSPDVKNVQRAIASTLLNQLPIHSCAKAYIKDLSIYDNAKEHKTNTYILKMDFRDFFPSIRPNDLLLCLEKNSIKLNDFEYTILKHYLFWRKRGDNGLRLCIGAPSSPIISNIVMYDIDCKIDSICQALNIPYTRYADDLTFSSNSIDTLNIVFDKVKNIISSQESPRLIINHNKTKFIGKGRSRRITGVIITNDGQVGVGRYLRKRVRALLHLYSNNRIKVNDIPYLQGMLSHVKNIEPKYHEELLKKYNESLIKRLNLDASRIIKENRRNGVI

SEQ ID NO: 4562 - protein, 319 aa, unidentified
  source 1..319: note = Related to JAFJZU010000009.1; note = Pectobacterium brasiliense
MSYLEHLALSLNSSVASLISGYLKAPQKYKVFKIRKKNNKSFREIAQPSPDIKNIQRAITSTLLKNIPIHPCAKAYIEGLSIYNNAYEHRENNYLLKMDFKNFFPSITPNDLLLCFKRNNIELNNFEYNILKHYLFWRKRGERSLRLCIGAPSSPTISNIVMYEFDCKIHEYCITHNIPYTRYADDLTFSSNEIEKLHAIYDYVTSVILENKSPNITINDSKTRYIGKGRSRRVTGVIITNEGKLGVGRYLRKKVKALLYIYNNKDLRKEDIPYLQGMLAHIKNIEPSYYEKLLQKYEPSLLSRLGKEAATIIKERSLN

SEQ ID NO: 4563 - protein, 323 aa, unidentified
  source 1..323: note = Related to NZ_CP009769.1; note = Pectobacterium brasiliense
MSYLDELANYLEKSVPYLIRNYISAPRKYKVFYIDKKNGSKKREVAQPSKEIKEIQRAIVKTLLENIPIHSCAKAYMKNSSIYDNALPHKDNVFLLKMDFRDFFPSIKPSDLLYFLERNGLKFDAFEGTIVTNYLFWRRKGERKLSLCIGAPSSPIISNIIMHDIDSEINTYCEKEDIIYTRYADDLTFSTDNIVKLQKIHDFISNLTNRTEHPKLLINKEKTRYIGKGRSKRVTGVVITHEGELGAGRYLRKKIRAMIYLYSQKKLKKEDIPYLHGMLSHINNIEHDYYIKLKKQYGAAMFSALYQESFCISKKEKEADKVI

SEQ ID NO: 4564 - protein, 324 aa, unidentified
  source 1..324: note = Related to NZ_CP034015.1; note = Shewanella livingstonensis
MELISKVAEHLGLPMHELISNMRSAPSMYKAFSIKKRNGGDRIIRQPSPFVKNIQRAIVDIVFSGIDRSEFSMAYEKGRSIKDNALIHTGADFLLKMDFKDFFPSIKPSDLFRTLGDLGYDFNDLDRMFLSRYLFVEVGSLLELSIGAPSSPMLSNLVMKHFDIAIGDFCHKNSIRYSRYADDLTFSGCCYKDLKKVEAHVVHIISLDNKSNLLVNDKKTRLIGKGRSQRVTGVILTHDGNISVGRNLRKKIRGLVHLYSNKKLNNSDIPYLHGIISHMRNIEPEYYEKLIVLHGDVLFKRLAKQSYAIGKHLRCAHLKTGLVK

SEQ ID NO: 4565 - protein, 319 aa, unidentified
  source 1..319: note = Related to JAHKRD010000001.1; note = Shewanella sp.
MEIISDLAEELNVSIIELINQMQQAPKKYKVYSIKKRSGGSRIIAQPTAFVKMVQKGLCTSFLSQFKYSNSAMAYVKERSPISNANVHVGAKLILKLDFENFFPSIKAAHFIEFLERNKVTLESLEIDFLIRYLFRKVKGSYELSIGAPSSPLISNVMMYDFDLEIEEALKDSLINYTRYADDLTFSANSFEELNEAKLFVEAVILSKRYSFLKINEDKSKIIGRGRSQRVTGITLTHDSKISIGKSLRKRIRGMLHLYNQKKLKKNDIPYLHGIISHMRSVEPDYFKKLIDVYGAELFSRLARQSFMISKETKMKLME

SEQ ID NO: 4566 - protein, 318 aa, Aeromonas sp.
  source 1..318: note = Related to NZ_CDBP01000069.1; note = Aeromonas dhakensis
MSNESITDIICKSLSLLAHELLIKAMKAPLSYRVYTIPKRSGGKRTIAQPTAEIKKIQRCIVKTVLDPLPTSDISTAYKKDISIKDNAERHLGKKFILKMDFKDFFPSIRPEDLINSLERNNVRLSSADRKILILFLFRRNNYGRFELSVGAPSSPIVSNIIMYEFDIAVKEYCEKNNIVFTRYADDLTFSSNSIEDIKKTPAIIKSNLMLMDSPKLSINEKKTHIVSKGRSQRVTGVTLTHDNKLSIGRNLRKKIRAMLHLYKNNKLEHNDIPYLHGIISHMRNIEPEYFNKLLESYDDVLFKDLAKVSFNVSKVYK

SEQ ID NO: 4567 - protein, 321 aa, Vibrio sp.
  source 1..321: note = Related to CP001805.1
MENLLKEICSSSDLSIQDVIKGLSTAPLAYKVYTIPKRTKGERVIAQPSPFVKEVQRTLISVFLTKYKPSEVSTAYVEGKSIIDNAEAHKDNDWILKLDFKNFFPSLKPNDLFTFLEREGVVIGEFDKKILSSYLFRRNNRKLELSIGAPSSPLVSNLIMKSIDNKIEGYCNDNSIVYTRYADDLTFSTMDLDKIDALKQYIAAVLSETKSPKLSINDSKTKVIGRGRSRRVTGIVLTHENKLSVGRYSRKKIRAMVHHYSNRTIKKSDIPYLHGVISHMRSVEPDYYQKLEIKYGSDFFSKLAMDSYKISKAVKLKKLVK

SEQ ID NO: 4568 - protein, 321 aa, Vibrio parahaemolyticus
  source 1..321: note = Related to CP006004.1
MTNLLKEICENSEIQLTDIIKNLNTASISYKVYDIPKRTKGVRTIAQPSSFVKDVQKVITKVFLSEFTPSDASFAYIEGKSIVDNAAIHKDNKWILKIDFKDFFPSIKPEDLFNFLEKEEIKLSEFDKKIISSYLFRLNNSKLELSIGAPSSPVISNLVMKELDQEIIHFCEEKSIAYSRYADDLTFSTNNIAYFSDLLPYIYELLSYTQSPKLSINDKKTKIIGKGRSQRITGVVITHEGKLSVGRYFRKKIRAMLYSYNSNKIKKSDIPYLHGLVSHMRNVEYSYYEKLEENYGKEFFRKLAMDSYKIGKAIKLNSIKS

SEQ ID NO: 4569 - protein, 303 aa, unidentified
  source 1..303: note = Related to NZ_SRZX01000002.1; note = Marinobacter orientalis
MSTAIEKVCKDLGFTEEKFIEFCSLAPHRYKKFFIPKKNGAGLRLVAQPARPLKKVQRWLVSEYLSKLPIHEAAAAYVSEKSILDNAKKHAGNKVLVKYDFKDFFPSIKPSDFLKLISKNDVGISAYEAEIFSRLIFWSPGNRPGLELCIGAPSSPVISNAVMFDFDNAVSEFCSSESLIYTRYADDICISGYDNSIFEHVDRFIKKQVFEIESPNLLLNPNKTQFINENTVKKVTGLFITQNEEITVGRKLKRKVRAMVHNFHKGNLSAKDKERLKGYLCYLSDVDPSYLRKVAPDFQSWDL

SEQ ID NO: 4570 - protein, 646 aa, unidentified
  source 1..646: note = Related to DACSHB010000002.1; note = Legionella pneumophila
MDTIIEYFSKIDFTKVRTNQPPELIFLCGGNSDQKANNFRPKLQNELIKKQRNVVLAENAMNWQGGQVFAKDLLELEKYYAALVSIIPLICESYGAAAEFGAFVTDEFIRKKLFIIIKEQFYSGENSSSFIRYGPIKKYEDSENRETYCINNENPEEDLEDLCETLLACKPKTSKCNFDEGYFRILLLIDIINVLSISTHKEIKSIFEKVLSIIGFDQLSIDTYCVDLNEMLFVLEKLRLIKLRQKGQRSFYLSVSQEFYLEYRFIKDSNDTKLSTIRKNVLDYIYAQETRIQKTKVSILKEELKKGEIKWLQTNISLDDINIDELLKTAPLQYKVYEIPKKSGGKRTIAQPTAKLKILQREKILELENTFPVHNCAKAYKKNNNGIFENAKAHQDNSYFYKFDFEDFFESIKARDFNQYLLQFGYSLNERIDLIMLFFRFNKQSDKRKTNKIYKLLYNSDFNKSNNMSLLNVMVNEFSNEFQLSVGAPSSPFISNAILYEFDDMTQKWASEIGITYTRYADDITLSSRSKFEIADLEKEILNISSKMNFPKLKLNKRKEKYCSFKNRVSITGLNITPDHKISIGRKKKREISSMIHHFKLGKLSKDKMNRLRGWLSYCKAVENSFLDKMKIKYSEDTILEILKKN

SEQ ID NO: 4571 - protein, 646 aa, unidentified
  source 1..646: note = Related to DACVYU010000020.1; note = Legionella pneumophila
MQIITDYFKKVDFSKVRTNHPPELIFLCGGNNDEEANNFRPKLQDKLVKKQHNVILAESAMNWRGGQKFAKDLLELEIYFAALVSIIPLICESYGSAAELGAFVADQFIRKKLFIIIKEQFYSGENSSSFIRNGPIKKYEDSEGRKTYCINDKHPEQDLDDLYEALLSCRPKTSKCYFDKGYFRILLLIDIINVLSISTLKEIKISFQEVLSIIGIDQHEIESYCDDIDEMLFVLEQLNLIKYRNKGQQGFYLAVSQEFYLEYRYVKDSDDTKLSTIRKNILDTIYSQDSRINKTKVSILKEERKKGEIAWLQTNISLDDINVHELLKTAPLQYKVYEIPKKSGGKRTIAQPTAELKALQRKKISELEDKLPIHNCAKAYRKNKNGILDNAKAHKDNSYFYKFDFQDFFESIKACDFNQFLEQHGYSFSERVDLIKLFFRFNKQSSKQKTKRVYRYLTDNSFNRNNNPALLNLMIQDFANEFQLSVGAPSSPFISNAILFEFDDMMQNWANENDITYTRYADDITLSSKSKIDISSMEKEILNICSKISFPTLKLNKKKEKFCSFKQRVSITGLNITPDHKISIGRNMKREISAMIHHFKSGKLTVDKLNKLRGWLSYCKVVESEFIIKMENKYSKNTISAILRKK

SEQ ID NO: 4572 - protein, 504 aa, unidentified
  source 1..504: note = Related to DAECXU010000022.1; note = Legionella pneumophila
YIIFSDINPHDELDEICTIINNYKPETINSNFSHNYFKILLVLDLINVLAISSIDEIKIHAEAVLKKFDKNYEINRKTVKEMLFVLKKLDLVVEINKINQSFYLSKYDDLFLDYNPHQYKLFNIKKDIINSFYQSDESNTSNYRKYQIFSKYYRYYKDQENNSTKKDIEKEVKWINKTLDYEHIDTDQVIQIGPMLYKKFKIKKKNKGYRTICQPTAELKQIQRNELKKLYKQFLIHDAAKAYKKNINGILENASEHLGNNFFYKYDFTDFFSSIKADNFIGFLKRNSFEDNKILRLIKLFFVFDKNNKSEIKKAYEILKSNRSDINAFPRWFKDNLSLSIGAPSSPFISNIIMLEFDSIVFDWAKKNQLVYTRYADDLTFSSKHSFESKLIQKLINDTIKNIDYLNLRLNISKIRHFNIKEHVSITGLSITPDNKVSIGKKRKKEINALIHQYKNNDNYSLSRQQILRIKGLLAFCKNVETDFFLNLQKKYGNKVIKDILSEK

SEQ ID NO: 4573 - protein, 346 aa, unidentified
  source 1..346: note = Related to NZ_MDTU01000002.1; note = Piscirickettsia sp.
MSYLIKVPSYVEFLKKVYSLISKISNDLLISEEKIKNVIDRSSLLYHEFTIVKNNKSRVIHNPAKELKAIQIYLTNMFIKQAPIHDCAFAYREGISIKNCVEKHIDSNYFFLTDFKDFFHSIMFDDILRFLKLTNISQYLSRDEDCSDFAKVMCRYKRLTIGSPSSPSLSNALCFRLDEVINRFCCNNNLIYSRYADDICISSENKINCNLVRKSILSSIQEANVIRRLRVNPSKTRTLNRAKRVKILGLNITSDRKISIGRSKKREIKSMVNMWKYNRINNIERSYLSGYISYCLAVEEDFVMGLYQKYGSTLINRIREYNASYAREKNLLLENSLMDINHSDYN

SEQ ID NO: 4574 - protein, 307 aa, unidentified
  source 1..307: note = Related to REDP01000333.1; note = Planctomycetes bacterium
MISPFNLILKDCMITNVKIMNIAQRAKHMYKTYAIPKKNGGRRIIDHPAKPLKAIQRSIVSAVLRDLPVHQSCTAYEPGRSALLNAQTHQDSRYFYQLDFKDFFHSIKHRNVSAFLESSTRLDTEESEIISMICCKGDHLVIGAPSSPILSNRIMFRFDSEATIISQSLGCIYTRYSDDITISTKNDTTAINECIRALIDFIGSPDNNWLRINEAKTRHSSLKRRVAVTGYNITNDHRPVVPRSYKRTVRALIHKAIICNNDEIELDKVLGMVAYIEGSEPGFIESLKGKYGPEVINRLRKHNTTGH

SEQ ID NO: 4575 - protein, 305 aa, unidentified
  source 1..305: note = Related to RDXE01000040.1; note = Alphaproteobacteria bacterium
MTEIIKEIMRHTGFWPSDIVRISRDAPRSYKVFSIPKQNGSSRTIAQPTKELKAIQRAIVECLRKILPAEHTTATAYVKGKSIIDNAKPHRNSRIFLKTDFQNFFPSIMPSHFDQLLIQNEIHWEPEICNLIKRLLFFGNRTSTPQCLAIGAPSSPYISNAIMYQFDLRFSQYCASNELIYTRYADDVTVSGNGKMNQSAVLNEIDRNLASVGLSALKINPSKTRVFSHKHGVKITGIRVTSDGEIKVDRELRREIRARLHKIRIQSASTEMIAETHGLLSFVHMIDEELEENLLSQYKLDSYDW

SEQ ID NO: 4576 - protein, 317 aa, Pseudomonas sp.
  source 1..317: note = Related to JACYWS010000002.1; note = Pseudomonas syringae
MSEYNFREHLSDEFLISEHDVTRLLLRAPYAYKRYTIPKMNGGIRQIAQPAKETKIFQHFMMREWFSKMPIHECAAAYKHGASIKDNAERHAGSTYLSKFDFVNFFGSITERNIKVLLSTVFKGELSEKSIVDMARMSCIRDRATGRLVLSIGAPSSPVLSNAVMFNFDSVVHKWCVEQGIIYSRYADDLTFSCNEKGKTFLVEEFLQVTLKQLPEPLLTLNADKTIHASKKNQRRVTGLVLSNEGSVTIGRDRKRLISAMVHRFAIGALDNKSIAHLQGLIGFAQDIEPLFVAKLREKYTSKVITELMRVRGKKRN

SEQ ID NO: 4577 - protein, 317 aa, Pseudomonas sp.
  source 1..317: note = Related to NZ_JACOPX010000017.1; note = Pseudomonas neuropathica
MSEYNFREHLSAEFMISEHEVVRLLVRAPYAYKRYTIPKKNGGIRPIAQPAKETKIIQNFMMNFWFCKLPVHECAAAYKQGASIKDNAERHVGSSYISKFDFVNFFGSITEFNIQTLLSRAFQGQLSERSIADMARMSCIRDKVTGRLALSIGAPSSPMLSNAVMFNFDSVVSQWCFERDITYSRYADDLTFSSNEKGKTFLVEEFLRGALKELPEPGLLLNANKTLHASKKNQRRVTGLVLSNDGNVTIGRDRKRLISAMIHHFIQGQLDRKSIAHLQGLIGFAQDIEPLFVAKLRGKYTSKVITELMRSRCEKRN

SEQ ID NO: 4578 - protein, 317 aa, Pseudomonas sp.
  source 1..317: note = Related to CP089062.2; note = Pseudomonas aeruginosa
MSEYNFREHLSDEFLIAQHDVVRLLLRAPYTYKRYTIPKKNGGVRHIAQPAKETKIIQRFMMGEWFSKLPVHECAAAYKDGASIKDNAERHSGSIYISKFDFVNFFGSITEGDIKRILSRTFGGQLSEISIADMARMSCIRDRATGQLVLSIGAPSSPVLSNAVMFNFDSVVNQWCSERDITYSRYADDLTFSSNKKGNTFCVEEFIKGALKELSEPSLSLNSDKTIHASKKNQRRITGLVLSNDGKVTIGRDRKRLISAMVHRFAHGELDDKCVAHLQGLLGFAQGVEPLFISRLRSKYTSKVITDLMRFRSKKLD

SEQ ID NO: 4579 - protein, 317 aa, Pseudomonas sp.
  source 1..317: note = Related to NZ_CP077094.1; note = Pseudomonas promysalinigenes
MSEYNFREHLSDEFVISEHDVSRLLLRAPYAYKRYTIPKKNGGVRHIAQPAKETKIIQHFMMSEWFSKLPVHECAAAYKSGASIKDNAQRHSDCAYISKFDFVNFFGSITEVDIRNLLVEVFGSQLSEKSIADMARMSCIRDRVTGRLVLSIGAPSSPVLSNAVMFNFDSVVNQWCREHDIVYSRYADDLTFSSNRKGVTFLVEDFLQGTLKELPEPSLSLNTEKTVHASKKNQRRVTGLVLSNDGNVTIGRDRKRLISAMVHRYALGELDNRSIANLQGLLGFALDVEPLFVAKLRGKYTSKVITELMRVRAKKDD

SEQ ID NO: 4580 - protein, 315 aa, Pseudomonas sp.
  source 1..315: note = Related to JACGDE010000010.1; note = Pseudomonas mosselii
MSHYNFRKQISEEFMISEHDVSRLILRAPYAYKRYTIPKKGGGVRHIAQPAKETKIIQHHMIHEWFSKLPIHHCAAAYKTGASIKKNAELHSNSTYISKFDFVNFFGSITALNIKNLLQNEFNNIISEASIEDMSRMSCIRDKATGRLVLSIGAPSSPILSNAVMLNFDTVVHQWCSERGIIYSRYADDLTFSSNERGATLKIQDFIQGTLKELPNLNLILNTDKTIHASKKNQRRVTGLILSNDNKVTIGRDKKRLISAMIHRFSHNELNSKEIMHLQGLVSFAQHIEPLFVAKLRGKYSTKLITELLRSRGDK

SEQ ID NO: 4581 - protein, 315 aa, Pseudomonas sp.
  source 1..315: note = Related to NZ_CP035088.1; note = Pseudomonas viciae
MSLYDFRKHMSEMLSLSEHDVARLIVRAPYAYKRYFIPKKSGGMRPIAQPAKETKVIQNLLVNSWFSQLPVHECAAAYRQGSSIKANAERHKQNSYIAKFDFSNFFGSITESDLVNHLSYVLCGKLSVQSIKDIARVSCIRDRATARLALSIGAPSSPILSNSIMYYFDLAVESWSLERNIVYSRYADDLTFSTNDKGATSEIEKFILETLESIPYPRLHINSEKTVYASKKKQRRITGLIISNDNEVSLGRDRKRLISAMIHRYAHHELDEKSILHLQGLMGFAQDIEPLFVAKMRGKYTGRLISDLLRQRGKK

SEQ ID NO: 4582 - protein, 317 aa, Pseudomonas sp.
  source 1..317: note = Related to NZ_CP014205.2; note = Pseudomonas glycinae
MILYDFRKHISEVLSLSEHDVARLIVRAPYAYKRYFIPKKSGGMRPIAQPAKETKVIQGILIESLFAQLPVHECAAAYKQGSSIKDNAERHRQNSYIAKFDFSNFFGSITELDLIKHLSYVLCGKLTAQSIKDIARVSCVRERSTSRLALSIGAPSSPILSNSIMYYFDLAMEGWCRDRSIVYSRYADDLTFSTNDKGVMFDVEAFILEVLENIPYPRLKINSEKTVYASKKRQRRITGLIITNDNNVSLGRDKKRLISSMIHHYVQNKLDEESILHLQGLMGFAQDIEPLFVAKMRGKYTGKIISDLLRQRGKRIK

SEQ ID NO: 4583 - protein, 317 aa, Pseudomonas sp.
  source 1..317: note = Related to NZ_CP031641.1; note = Pseudomonas parafulva
MSLYEFRKQISVALSLSAQDVARLIVRAPYAYKRYTIPKKGGGVRPIAQPAKETKIIQSILISDWYCRLPVHENAAAYKSGASIKANAERHKNNTFVAKFDFKNFFGSITYSDLVNHLSYVFVNEVTKQSILDMARVSCVRDRSSGDLTLSIGAPSSPVLSNSIMYNFDLAVVEWCAERDVEYSRYADDLTFSAKDRGVLFSVKDFLLSTLEEIPYPKLSLNEEKTIYASKKNQRRVTGLIISNENKVSLGRERKRLISAMVHKYSHQDLDEKAVTQLQGLLAFAHDIEPLFIAKLRGKYSSKVIMDLMRKRGKKIK

SEQ ID NO: 4584 - protein, 316 aa, Pseudomonas sp.
  source 1..316: note = Related to JAGPVQ010000174.1
DVYDFRKYVSDTLAIPIHDVLRLLVRAPYTYKRYEIPKKSGGSRSIAQPAKETKIIQRLLMDAIFSQLPVHECAVAYKHGASIKTNAQQHRYNQYLSKFDFSNFFGSITSEDIAAHLGQCLGDELSEQSVADIARISCIRNKINSGLCLSIGAPSSPVLSNSILYNFDVSVSAWCLEKGIVYTRYADDLSFSSNQKGLSGSIEPFLRQTLKDISYPSLVLNERKTIHVSKKHQRRVTGLVISNDGSVSLGRERKRLISAMIHRCINDKLEEADIYILQGLLGFAQDAEPIFVARMRAKYGSLVIREILRKRVKLPR

SEQ ID NO: 4585 - protein, 315 aa, Pseudomonas sp.
  source 1..315: note = Related to NZ_CP019428.1
MDIYDFRKHVSETLAIPSHDVARLIARAPHTYKKYEIKKKDGGSRSIAQPAKETKVIQRLLMEALFCDLPVHECAVAYKLGSSIKKNAQLHRQNQFISKFDFSNFFGSITEKDVAAHLRHVFIGKISEQSILDIARTCCIRNSLTGILCLSIGAPSSPILSNSILYYFDIAIQTWCNERDIIYTRYADDMTFSSNERGVTSLVEKFLTHTLKNIKYPHLILNEKKTIHLSKKHQRRITGLVVSNDGLVSLGREKKRLISVMIHHYLLKKLDHKDIPILQGLLGFAQDAEPLFVARMRGKYGSPAISEIMRGRIKK

SEQ ID NO: 4586 - protein, 325 aa, Pseudomonas fluorescens
  source 1..325: note = Related to NZ_CABVJA010000003.1
MSIFDFRKHLSESLAIPTHDVVRLIVRAPHTYKKYEIPKKSGGVRLIAQPAKETKLIQRLMIQEIFTELPVHECAAAYKEGASIKANAEQHKNNQFISKFDFVDFFGSIKEADVASHLAYALPGKVSEQSIKDIARISCIKNKTLGGLQLSIGAPSSPILSNSIMYYFDVAVAAWCADKGVIYTRYADDLTFSSNVKGLPAQIEPFLTEILKEIPYPTLSLNKKKTVHVSKKHQRRITGLIINNDGAISLGRERKRLISAMIHRFILGTLEVEAILNLQGLLGFAQDAEPLFVVRMRDKYGHQVITELLRHRGVSKDKPKAYLKN

SEQ ID NO: 4587 - protein, 318 aa, Pseudomonas sp.
  source 1..318: note = Related to NZ_JAAQXL010000002.1; note = Pseudomonas proteolytica
MSVYDFRGNISNALVVSSNDVSRLIIRAPHTYKTYEIDKKNGGKRSIAQPAKETKYIQRLLMTQLFSRLPVHSCAVAYKDGASIKKNAELHKNNQYISKFDFTNFFGSIKEPDISAHLASVFGDELSDETIKDISRISCIKHKDLPGLCLSIGAPSSPVLSNTIMYLFDQIVHEWSVERGITFTRYADDLTFSSNTKGLFSEIEPFLSQVLKKLPYPVLSLNSKKTIHVSKKNQRRITGLVLDNDGRVSLGRDRKRLISTMIHHYSCGRLSDEETMRLQGLLGFAEDAEPLFVSRMRGKYGILVISELFQKRGKKLEK

SEQ ID NO: 4588 - protein, 320 aa, Pseudomonas sp.
  source 1..320: note = Related to BPLZ01000028.1
MSSYEFRQDVVEFFSVSEHDVFRLLQRAPHTYKRYEIDKKSGGKRLVAQPAKETKILQRYLMRVVFNDLPIHECATAYSSGSSVRKNAELHVVNPYISKFDFVDFFGSIKESDLILHFSRFLGGKVSEQSIKDIARVCCIQHKGRADHCLSIGAPSSPVLSNSIMYDFDEQVEAWCKERGITYSRYADDLTFSTSGKGVSAEIEPMIRGLLNDLPYPRLSLNDKKTLHLSKKVQRRVTGVILNNEGKLSLGRERKRKISSMIHRFSLGQLDEKDVFQLQGLLGFAEDVEPLFVSRMRGKYGIGVISALFQKRSEGRINKL

SEQ ID NO: 4589 - protein, 321 aa, Pseudomonas sp.
  source 1..321: note = Related to CP041771.1; note = Pseudomonas aeruginosa
MSKFELRLRLCRELLLTDKEVARLISRAPYTYKVYSIPKKNGGRRVVAQPARETKILQNFLIENVFKELPVHECATAYKAGSSIAINASAHVGNSYISKFDFSNFFPSITMLDLVRHIKSFFDGRLDDLEIIDIARVCCIKDRVTDRFHLSIGAPSSPILSNSIMYFFDVAVHKWSSERGVSYTRYADDMTFSTNEKSMSREIELFLVRQVEAMKSPRLSINHEKTIHLSKRNQRKVTGLVLSSEGKVSLGRNRKREISSLIHRFALGQLDPTDVFRLQGLLGFANDAEPDFVVRMRKKYGDLVIAALFEKRKAPSVISDG

SEQ ID NO: 4590 - protein, 316 aa, unidentified
  source 1..316: note = Related to LASC01000001.1; note = Burkholderia contaminans
MTINLRESLQESLGLSEAQLNRLIVRSPHTYKVYTIPKRTGGKRTIAQPAKETKFIQNWLIENIFNSLPVHSCASAYQPGSSIKRNADAHKAQRYLTKFDFKNFFTSIKSDDLIEHMRVHLGEVLDLDAIHDIARVSCIQLKAGEKLCLSIGAPSSPLLSNSIMFEFDSLVNEWCSRERVVYTRYADDMTFSTNERNKSAVIEKFIRGVVRDVGYPSLRFNNKKTISLSTKHSRRVTGIVINNQGQLSLGRDRKREVSALVHKFMLSELPQAEVYRLQGLLGFACDVEPDFLARMKRKYSDELIRTILEIRKKSDA

SEQ ID NO: 4591 - protein, 316 aa, unidentified
  source 1..316: note = Related to NZ_CADEWJ010000002.1; note = Burkholderia gladioli
MTIHLRGALRDSLGLSDAQLNRLIVRSPHTYKVYTIPKRTGGKRTIAQPAKETKFIQHWLIRNVFCHLPVHACASAYQDGASIKKNADAHRLQRYLAKFDFKNFFTSIKSDDLIIHMRRHLGSILEESAIDDVARISCIKLKAGGKLCLSIGAPSSPLLSNSIMFDFDSLVNGWCKKEGVIYTRYADDMTFSTNERDKSREIEEFIRSAARDVEYPALRFNTKKTVFLSTKHSRRVTGIVINNQGELSLGRDRKREVSALVHKFSFEELPEKEVYRLQGLLGFAKDVEPDFLERLKRKYSDELIRQILAIRKERDV

SEQ ID NO: 4592 - protein, 313 aa, unidentified
  source 1..313: note = Related to NZ_FSRV01000001.1; note = Burkholderia sp.
MTIALRKELQESLGLSEAQLNRLILRAPHTYKVYTIPKRTGGVRVIAQPAQETKFIQNWLIKRVFGELPVHSCATAYQAGSSIKKNAAAHKDHQYLAKFDFKDFFTSIKADDLVAHMSRHLAGLLSRSEILDAARISSIQQRQSESLCLSIGAPSSPLLSNSVMFEFDSLVSNWCVDRGIIYTRYADDMTFSTNRKGRSGEIEEFIRNIARGLDYPRLRFNSKKTVFLSKKHQRRITGIILNNDGELSLGRDRKREIKALVHKFTCDELPGEEVYRLQGLLGFALDVEPTFLQALNVKYSDQVIETILSIRKE

SEQ ID NO: 4593 - protein, 314 aa, unidentified
  source 1..314: note = Related to NZ_CP017757.2; note = Cupriavidus necator
MKIALRKALHDSLGLPEDQLNRLILRSPYSYKVYTIPKRSGGLRVIAQPAKETKFLQHWLMANVFRNLPVHECATAYQAGSSIKKNAELHKNNSYLVKLDFKNFFPSISARDLISHMRRHLDGSLDEEAQRDIARISCIRLPDAPGLCLSIGAPSSPMLSNSVMFEFDTAVHGWCNERGVRYSRYADDLSFSTNERGASGDIKEYVLSVVERLEYPRLSLNDKKSVFLSKKHQRRITGLIINNENQISLGRDRKREISALIHKFSVGALPDSEIFRLQGLLGFARDVEPRFFVSMSKKYTSDTISNILSTRKKP

SEQ ID NO: 4594 - protein, 317 aa, unidentified
  source 1..317: note = Related to QFXG01000005.1; note = Candidatus Nitrotoga sp. SPKER
MTDHLRHGLQESLGLSDCLLNRLIQRAPHSYKIYTIAKRTGGQRTIAQPAKETKFIQRWLIQNIFNKLPVHECASAYKDGASIKKNANAHKNHSYVIKLDFKDFFPSITFSDLVKHIAKHLGHILRTQDIQDIARISCIRLHGKSDLCLSVGAPSSPVLSNTIMYNFDSEVSAWCTQQCITYTRYADDLTFSTNFKGGSSEIEAFVRSITQKLTYPSLRLNNNKTTHLSKKHQRRITGIIINNEGNLSLGRNRKREICALIHKFSLDLLPESEIFRLQGLIGFAKDVEPLFVARMRGKYSSKLIEEVLQKRKPGRLC

SEQ ID NO: 4595 - protein, 312 aa, unidentified
  source 1..312: note = Related to JABFOH010000005.1; note = Acidithiobacillus ferrooxidans
MTDHLRHDLEESLGLSDYLINRLIDRAPYSYKVYTIPKRSGGQRTIAQPAKEIKFIQRWLIQNIFDKLPVHECASAYKDGASIKKNANSHKSHSYIIKLDFKDFFPSITSSDLVMHISKHLGRTFGAQDIQDIARVSCIRLHGKGDLCLSVGAPSSPVLSNTIMFSFDSEVSAWCAQNGITYTRYADDLTFSTSTKGICSEIESFVKGVTQELDYPNLTLNFNKTTHLSKKHQRRITGVIINNFGALSLGRNRKREISALIHKFSLDMLPESEILRLQGLLGFAKDIEPLFVARMRRKYSSRLIEEVLKKRK

SEQ ID NO: 4596 - protein, 321 aa, unidentified
  source 1..321: note = Related to NZ_RJUK01000001.1; note = Marinimicrobium koreense
MMIGLDISEQISKDLYVSAFQVDRLINRAPHAYKIFFIPKKTGGQRKIAQPAREVKYIQRWLVDNIFNQLPVHEAVKSYREGLGIKDNATWHKKNKYLVKLDFKDFFTSIKEAGLFDFLLRKLSDSYSDESLRKIARASCIKYKHREDLCLSVGAPSSPAISNAILYAFDEAVNNWCFENSISYTRYADDLTFSTSVPNVSSLIEPKVRQISSDFPYVNLRFNNAKRTHLSKKYQRRVTGIVLTNQGELSVGRLRKREVKALIHKFKTGLLPMNEVHRLQGLLGFVSDVEPMFLERMRVKYSSATIDDILKSVKQDKLVNS

SEQ ID NO: 4597 - protein, 314 aa, unidentified
  source 1..314: note = Related to MVDH01000001.1; note = Cellvibrio sp.
MNKSLLQEISESFFMSEIQIERIFVRAPYAYKLYTIPKRSGGLRNIAQPAKETKYVQSWLIHNVFSSLPVHDCAMAYKSGSSIKENALAHVEKPYLVKFDFKDFFTSIKEANLIAHFQLYLGGRFSSEEIKYLARISCIKYKHATEKCLSVGAPSSPILSNSILFEFDKSVHEWCVSKNIVYTRYADDLTFSLREKGMASTIEAEVRNFAKTKCVVNLRFNQKKTTHLSKKCQRRITGLVITNEDKISLGRDRKREIKALIHQHLLGMLNADQVSNLQGLLGFAKNIEPSFLFSLYKKYTFEVVNGIIRSRKTK

SEQ ID NO: 4598 - protein, 314 aa, Pseudomonas sp.
  source 1..314: note = Related to NZ_BQIK01000019.1
MTNSPLVNICADTLHISTSQVMRLILRAPHTYKVYSIPKKSGGRRIIAQPAKETKYLQDVIIKRYLNLLPIHEAASAYKIGSSIKNNANAHKHNKYFVKLDFKRFFESITLDDLVTHFEKYLPTPLSKEDTVYLARICCRSSDGRAALTIGSPASPVLSNTVMYDFDKIIESWSSQNGFTYTRYADDLTLSTSTPGASAQVIPAVLNALEKIEYPKLLLNNEKTVFLSRKNNRRITGIVINNDGRLSLGREKKRLISAMIYHYQQGRLSEENQFKLQGLIGFALDIEPIFVSRLNSKYGRDVISKILQRRQPKQ

SEQ ID NO: 4599 - protein, 310 aa, Pseudomonas sp.
  source 1..310: note = Related to JAFFZW010000005.1; note = Pseudomonas alliivorans
MIAHKTLEKMLADLSLSSEQLVRVVSRAPYSYKTYSIPKKNGGLRIISQPARETKYVQHWLIHNVFHLLPIHEAASAYVKGASIKKNAEAHRTNEYMVKLDFKDFFPSIKIDDLIAHFQKSLPFLDLLEIRYIARLSCINRGNGGALSIGSPASPILSNSIMYEFDSVVADWASQNKFVYTRYADDLTFSTSLPYASESVVPVIKDLLSSLKYPRLSLNVDKTIHLSKRGSRRITGLVITNDDKVSLGRDRKREISALVHKYGLGLLEQKDVFRLQGLLGFAADVEPLFLSRLGKKYGMKTILNLLRKRQ

SEQ ID NO: 4600 - protein, 316 aa, Pseudomonas sp.
  source 1..316: note = Related to MSXW01000061.1
MSNNPLIDALLSDLALSKEQFLRIASRAPRTYKIYPILKKNGGIRVIAQPARETKYIQSWLANNVFGLLPVHDSATAYRKGSSIKVNAQMHAANPYIVKLDFTNFFPSIKSSDVFAHLKQFLIGATDSELKIFTLLSCFNNNGELCLSIGSPLSPGLSNSIMYEFDSIISDWAAGNNFIYTRYADDLTFSTPIKGASEAVVDKVREVIGKIAYPRLSLNEKKTIHLSRKGCRRVTGLVLSNSGSVSIGRDKKREISAMVHRFSIGKISHDDLRRLQGLLGFVQDVEPLFIARLRAKYSSAVVVDLLRRRVKKESDK

SEQ ID NO: 4601 - protein, 318 aa, Pseudomonas sp.
  source 1..318: note = Related to POUU01000009.1; note = Pseudomonas stutzeri
MSNQSTLSRLLDELALEPHQFRRIALRAPYTYKTYTIPKKNGGARVISQPARETKYIQSWLIENIFKKLPVHSAAAAYVKGASIKKNANAHKDNPFLVKMDFENFFPSIKSLDLHLHFRKHLSFLSEEEILLVARLCSVRGMVHDGLSIGSPASPILSNSVMYEFDSLVAEWSQRNGFVYTRYADDLTFSTSTKEASAAVEPMIRDVIGAIGYPSLTINNRKTLHLSKKTNRTITGVIINNQGQLSLGRTKKREISSLVHRYTLEQLDVSRVHKLQGLLGYAYDLEPKFINALSKKYSLGVINEILRRRPPRQEANTD

SEQ ID NO: 4602 - protein, 323 aa, unidentified
  source 1..323: note = Related to SDYH01000002.1; note = Alphaproteobacteria bacterium
MTIALIEEIQASLGLSSEQMVRLIVRSPYTYKTYTIPKKSGGFRVIAQPAKETKLIQRWLISNLFNKLPIHDCATAYKEGSSIKLNANKHRENEFLSKFDFIDFFQSIKEEDIKAHLMECLGGFLSEKEVAWVARLSCIKTQTSKNLCLSVGAPSSPLLSNSAMFQFDSKLNNWCQENGIIYTRYADDLTFSSSIKGASAEIEGAIQNVLTEMARPKLLLNNKKTIHVSKKHQRRITGIIINNEDELSLGRERKRMISALIHKFTLNQLASFEIFRLQGLLGFSKDVEPAFLIRMRDKYGSGVIEMILKIRKDNNGKNGDFNS

SEQ ID NO: 4603 - protein, 313 aa, unidentified
  source 1..313: note = Related to JACVPK010000010.1; note = Polynucleobacter wuianus
MNSNDLIGRLISHLGLNEKDVLGLIRRAPFTYKVYTIPKKTGGNRVIAQPARETKYIQNWLIDHIFLALPVHERSMAYKKKIGLINNVLPHKNNKYLAKFDFKDFFHSIKFLDLVNHFNKHLHHLLSEAEIQYVARVACIKQRDSGSLCLSVGAPSSPLLSNSFMFEFDSAMDEWCQENEIIYTRYADDLTFSTNISGATNKIQQTIVGILSLKYPNLFLNHDKSIQLSNKNRRRVTGLIITNQQRISVGRDRKRMVTSMIHKFSIGELRAEDVFYLQGMLGFIKSVEPTFLVSMNRKYGHDLLTKIISIRKE

SEQ ID NO: 4604 - protein, 317 aa, unidentified
  source 1..317: note = Related to JACYMM010000001.1; note = Janthinobacterium sp.
MIDNLSGLIHLSLGISTTQLDRIIQRSPFTYKIYTIKKRSGGYRTIAQPAKETKFIQNWLIENIFSTFPVHECASAYKNGASILKNAELHKKGEFLSKYDFKDFFSSIKVKDLVLFFTHQLAHRFSKLDILRMAQISCVRHTELSGLCLSIGAPSSPILSNAIMYDFDAKIYEWCNKNNISYSRYADDLTFSTNELGRSDEITSLVNAAILENKIVKLQINKKKTVHLSKKYQRRITGLIITNSNIVSIGRSRKREISTLIHKFSLNMLSDDEKYRLQGLLGFSKNIEPLFIERMNVKYGKDLINQIFKIRKSTDTA

SEQ ID NO: 4605 - protein, 315 aa, unidentified
  source 1..315: note = Related to NZ_CP033019.1; note = Janthinobacterium agaricidamnosum
MKYSLPQLLQENIGLHPSQFERLIRRAPDTYKHYTIKKRTGGDRWIAQPAKETKYIQHWLIDNIFLKFPVHRCAMAYKAGTSIAINAAAHSKNSYLAKFDFSNFFNSIKYHNVNDFLSLLLEDSFSPDDIDNMARVSCVREPDFGLCLSVGAPSSPLLSNAILYEFDSRIEYWCQERSITYTRYADDLTFSTNEKGACSEIHKFLVDSLIDFDCPVLRLNDKKTIHSSKRFQRRVTGLIINNDGMVSLGRGRKREISAMIHKFRCKDLAESESYRLQGLLGFARDAEPSFVESMNKKYGNEILSSIYSLRKPKES

SEQ ID NO: 4606 - protein, 318 aa, unidentified
  source 1..318: note = Related to NZ_WNKY01000042.1; note = Duganella radicis
MNSKLLTQIRAELGLPVAQIERLIERAPYTYKVYTIPKRSGGDRTIAQPARETKLIQKWLIEHIFCTLPIHDAAAAYRPGASIKKNAERHANSKYMVKLDFKEFFPSIKYQDLVNHFCVHLSDAYEDDDIKRMALISCLHIGGRDFALSIGSPASPCLSNSIVYELDKKIKSWCKENKVAYTRYADDLTFSTNRPDISSEVEKMVSLTLKEIEYPQLKLNKKKSIHLSKRHKRVVTGVIINSENNLSLGRDRKREISSLIHKYSIGLLSKGDTYRTQGLLGFARDIEPDFVARLNTKYGNKLLEEIFTLRKAEEEDDL

SEQ ID NO: 4607 - protein, 315 aa, unidentified
  source 1..315: note = Related to LRON01000007.1; note = Duganella sp.
MSSKLLTQIRAGTGLPITQIERLIVRAPYTYKIYTIPKRSGGERIIAQPARETKLIQNWLVENAFGSLPIHKAATAYRSGASIKHNAEMHAKSRYMVKLDFKNFFPSITYNDLVAHFSRHLSEQYEIEDIKRMAIISCLNIGRLDLALSVGSPASPCLSNTVMYELDNIIQNWCDDKHITYTRYADDLTFSTNQKDISTEVEIMIASSIATVQNPRLSINSEKTVHLSKKFKRMVTGVVINSQNNISLGRDRKREISALIHKFSIGILSPDEAFRTQGLLGFAKDIEPDFVVRMDKKYGNQLLEQIFKLRKVTEI

SEQ ID NO: 4608 - protein, 321 aa, unidentified
  source 1..321: note = Related to NZ_CP016442.1; note = Burkholderia stabilis
MKIDLSQRLQESLGVSSDQLARLVARAPYAYKVYEIKKRSGGMRTIAQPARETKFIQIWLIENIFKELPVHESATAYGKGSSILKNAVAHKDNRFIAKFDFRNFFPSIKYEDLVEHFTRHLSGVVSDADVKMMARIACMRSKTNGRMQLSIGAPSSPILSNSIMFEFDSQISAWCVEQGIVYTRYADDLAFSTDVIGATAKIEPIIRQALRGINYPALQINNKKTVQISKKFQRRVTGLVINNEGDISLGRDRKREISSLVHKFTLGGLADDDIFRLQGLLGFAKDVEPQFIVRLSAKYTAEIINVILKLRKPPKLKSDFN

SEQ ID NO: 4609 - protein, 316 aa, unidentified
  source 1..316: note = Related to NZ_CADEZN010000001.1; note = Burkholderia gladioli
MNLSLKMQEELGITGEQFTRLVARAPYAYKIYEIDKRSGGTRTIAQPARETKFVQSWLIEHVFGALPIHECATAYGKGASILKNVDAHKENSFLAKFDFRNFFPSIKYDDLLLHFSIHLSNIASVEDVKMMARIACMRSKASGQLQLSIGAPSSPIISNSVMFEFDCRVAAWCAEQRIVYTRYADDLAFSTNVKGATVKIEPIIRKVLREIPYPLLQLNNKKTIHVSKKYQRRITGLVINNADEVSLGRERKREIGALVHKSTLGLLNDDDVFRLQGLLGFAKDVEPQFVIRLRAKYTCEVIDAILQLRKPSKAKS

SEQ ID NO: 4610 - protein, 326 aa, unidentified
  source 1..326: note = Related to JAGMZN010000009.1; note = Acidovorax sp.
MSILEGLAMASSIFSRMQEAYALSDEQLNLLVKRSPHSYKVYSIPKKSGGNRQIAQPAKETKYLQYWLIENVFSLLPVHECASAYHKGASVKSNAAAHSKNQYLSKFDFRNFFPSIVFSDLVRHFEKHLNDHVQAADILLIARLACIRPKGTSNLCLSIGAPSSPILSNSIMYEFDERISGWCKDHGIVYTRYADDLAFSTNIKSISYAVEKELREVLAGLQYPKLVLHAEKTIHVSKKYQRKITGVVINNQNALSIGREKKRIVSSLIHRFALNGLSDADISRAQGLLGFAHDVEPLFVVRMRQKYGFRVIDQLLSFRVQSEEKK

SEQ ID NO: 4611 - protein, 313 aa, unidentified
  source 1..313: note = Related to NZ_KI911557.1; note = Methylomonas sp.
MSTNLRREITGSLGISDLQINRIITRSPYAYKTYSINKKSGGKRIISQPAKETKFIQRWLVENVFSKLPIHQSVTAYRAGSSIKKNASIHKNNKYFAKFDFKDFFTSIRSDDLIAHLNKYLSDKYSYEEIMDIARISCKKNKRSGKLFLTIGAPSSPIISNTVLFDFDTLLYSWCCQNNITYTRYADDLTFSTNEKESTKNIEKNIRSIIRAIEYPRLIINSKKTVHLSKKSQIRITGLIIDNNKNVSIGRKRKREISSLIHSFSLGALPNDEVYRLQGLLGFANDSEPQFLERMRSKYSSEKIDNILKIRKQ

SEQ ID NO: 4612 - protein, 314 aa, unidentified
  source 1..314: note = Related to NZ_BMXS01000014.1; note = Halomonas qijiaojingensis
MDESRFRQLLKDELSISFSESARLIARAPHAYKVYRIKKVGGGYREISQPAKETKFVMHWLVGRFFEKLPVHECATAYSSGSSIKKNAIIHAEKSYIAKFDFKDFFPSITKFDVEKHLGCFNREELDGKSLSEIARLCTVAKGGSDNLCLSIGSPASPVLSNSIMYAFDRRIYEWCCDNSVVYSRYADDLTFSTNVKGLSFELPELVRTVLDGIEYPSISLNNEKTVFASKKGHRRVTGLVLSNPGKVSLGRKRKREISALIHKFSVGALSKEDLLRLQGLLGFVKDVEPLFVEKMISKYGYRVIVKILSFRKD

SEQ ID NO: 4613 - protein, 312 aa, unidentified
  source 1..312: note = Related to NZ_BJOC01000041.1; note = Halomonas halmophila
MDESKFRRLLKEELSISYSESARLIARAPHAYKKYRIKKADGGFREISQPAKETKFVMHWVIDRFLKPLPVHESAAAYRKGASVKKNAAMHSSNSYLAKFDFKNFFPSIKISDIERHLALHGDRGLDERSVSEIARLCTIAHMEGKCLSIGSPASPFLSNSIMYDFDEKVSRWCAENALTYTRYADDLTFSTNVKNLSFEVQGFLIEVIQSLEYPAIELNENKTVYASKKGHRRVTGVVLSNAGNVSLGRERKREISSLLHKFRIGELSREEVYRLQGLLGFANDVEPVFVERMRKKYGHDLLWRIMSLSRE

SEQ ID NO: 4614 - protein, 315 aa, unidentified
  source 1..315: note = Related to JABJWH010000040.1; note = Alcanivorax profundimaris
MDETVFQSLLQKELAISTSESGRLIARAPYAYKTYSIKKANGGRRTISQPAKETKFVMRWLVDRIFSKLPIHECASAYQKGSSIKRNAITHSNNGYIAKFDFKDFFPSIKREDIETHLYQYLPKDLELDRKSISQIARLCTISTGGGRLALSVGSPASPALSNSIMFDFDTIIANWCFSNSIFYTRYADDLTFSTNRKGLSFLILEQIHNTLSEVNYPQLSINDRKTVYSSKKGHRRVTGVVINNNGKLSLGRERKRKISSMVHKSCLGVLSDDETRHLQGLLGFAKDVEPLFIIRLKNKYGKRAIQEIFNSQII

SEQ ID NO: 4615 - protein, 319 aa, Pseudomonas sp.
  source 1..319: note = Related to VOJF01000050.1; note = Pseudomonas aeruginosa
MTLQEFLLKISSALAISNSELLHLIAKAPYSYKSYKIKKKSGGDRVISQPAKEIKYLQNIIMEAFLNKLPIHECATAYKKGGSIKKNAAAHTSNTYISKFDLKDFFGSIKANDVSQHLEKHLNGDLPPASYQLIARICCIKHKGLEELCLSIGAPSSPLLSNSIMYEIDQKISQWCRENQVTYTRYADDLTFSSNIKGISFEIEGLLSDILSTSQSPRLKINEKKTIHVSKKGTRRVTGIIITNDNKMSLGRERKRLISAMIHRNLVQRLEEKDIERLQGLLGLAKDIEPIFCARMRKKYGAAAISEILQYRREELKED

SEQ ID NO: 4616 - protein, 319 aa, Pseudomonas sp.
  source 1..319: note = Related to NZ_UATW01000001.1; note = Pseudomonas aeruginosa
MTFQEFLLNISSALAISDSELLHLVAKAPYSYKSYKIKKKTGGDRVISQPAKEIKYIQHVLIEFFLNKLPIHESATAYKKGGSIKSNAAAHRENTYISKFDFKDFFSSIKAADISLHLEKHLGDDLPPESYQLISRTCCIRHKGAEELCLSIGAPSSPLLSNTIMYELDQKISEWCQENQVIYTRYADDLTFSSNIKGKSFEIENVLRSILSATPSPKLSINNKKTIHVSKKGTRRVTGLIITNDDKISLGREKKRLISSMIHRNLTQGLKSKDIEKLQGLLGLAKDIEPIFCSRMRKKYGAATISEILQYRREEPEED

SEQ ID NO: 4617 - protein, 316 aa, Pseudomonas sp.
  source 1..316: note = Related to NZ_CP015992.1
MSHHDFLHDIASTLTLSLQELVYLIAKAPHSYKVYRIEKKTGGKRIIAQPARQIKYLQRALIHSVFKELPIHSCATAYAHGSSIKKNAEPHKNNKFISKFDISDFFGSIKEHDLIKHFNRHLAENINPDYFRYIARSCCINYKGTQELVLSVGAPSSPILSNSIMHEFDCIIHDWCTSKNITYTRYADDLTFSSNTKGVSFEIEKAITEALNSLDYPTLKLNTKKTFHASKKSQRRITGLIISNEGKISLGRDRKRTISAMIHKFSNGALPEEDIPKLQGMLGFAEDVEPVFSSRMRAKYGVKAISEIFQYRKQKK

SEQ ID NO: 4618 - protein, 314 aa, unidentified
  source 1..314: note = Related to PBYC01000020.1; note = Oceanospirillaceae bacterium
MKQESPIIAALCSELGFSSNQLMRLIARAPHTYKTYKIPKKTSGFRTIAQPARETKILQNWLIHNVFKDLPVSESASAYKKGASIKKNASHHKDSSYLLKMDFKNFFESIDIEMIKNHLISCLDVSRLDASAIARICSIDTQSSPNHHLSIGAPSSPILSNSFLFNFDLEAEQWCKENNCIYTRYADDIFVSTNAKSKTKEAEQLIEKLVNELLPGLKLNHKKTKHLSKKFNRTITGLVISNDNEVTLGRDRKREVRKSVFLYTKGLLEHEQVEKLQGTLSFAKHIDPVFLSSLQEKFGSDIIGEIFNARRKTK

SEQ ID NO: 4619 - protein, 311 aa, unidentified
  source 1..311: note = Related to JALE01000028.1; note = Thalassolituus oleivorans
MTTTPSFLSKLAKAYKLTETDIKRLVARAPHTYKTYEIPKKSGGKRTIAQPAKETKIIQNWLIKTEFKGLPVSNSASAYKPGSSIKINALKHRKNRYLLKMDFKNFFESIDETMVKEHLFKYLQIPESDAATISRVCCFQKKHSKKLSLSIGAPSSPILSNSIMYEFDAEIENWCRLNAAIYTRYADDLFISTNQSGRTADAEQFILTLTKELLPKLDINKNKTKHLSKKCNRTITGLVITNEGGVSLGRDKKRNIRKSLFLHQKGLLDKKQLSTLQGELGFAKHIDPDFITTLNDKFGNQFIHAIFTHRE

SEQ ID NO: 4620 - protein, 314 aa, unidentified
  source 1..314: note = Related to DNYL01000221.1; note = Halomonas sp.
MKSKLREIIKKKFALSDAEVAILISRAPVSYKSYKIKKKNGGHRKIHQPAREIKALQRWILDAVFSKLKVHPSSTAYEPGSSIKENAKRHLDNSYFIKLDFKDFFHSIKSEDIIQFLTDKGIKLNNRDLSDLVRILCIKDGESLCLSIGAPSSPKVSNVILYDFDEAVTNWCSENEVTYTRYADDLTFSTKRKGIGHLIEKQVLEIISEIQYPKIELNLSKRVSVSKKDWVSITGLTITTQNSISVGRKRKRFVKSLIYKHLSDGLQEKKLGELNGLISFIENIEPGFKDKMLEKYGDVPGLNLKKAKDEVSDL

SEQ ID NO: 4621 - protein, 314 aa, unidentified
  source 1..314: note = Related to NZ_SOCZ01000001.1; note = Halomonas alkaliantarctica
MENKLREIIKKQFALSDTEVAILISRAPVSYKGYRIKKKNGGHRKIHQPAREIKALQRWALDAVFSKLKVHPSSTAYEPGSSIKENANRHVNNDYFIKLDFKDFFHSIKSEDIVQFLSDKGIKLNSKDLTDLVRILCIKHEDSLCLSIGAPSSPKVSNVILYDFDEKVTSWCNENNVTYTRYADDLTFSTKQKNMGHLIEERILKIIYDMNYPKLELNISKRVSVSKKDWVSITGVTITCQKTLSVGRRRKRFVKSMIYKHMSEGLKQHNLSELNGLIAFIEHIEPGFKRKMIEKYGNVAGLNLKKESDEDPEI

SEQ ID NO: 4622 - protein, 309 aa, unidentified
  source 1..309: note = Related to NZ_ONZI01000001.1; note = Kushneria phyllosphaerae
MSESKLRQLISSSLFIPEKDLSLFIARAPVAYKSFFIAKKDGGFRKINQPAKETKKLQRWVIEKVFSHLDIHDCAMAYRAKVSIKDNALVHSNNKYFLKLDFENFFGSIKSEDIQNFLHDKKIKLDDDDVRDLARILCIKDEGKLCLSVGAPSSPAVSNAILYAFDEEISFWCLERKIAYTRYADDLTFSTKEQEACYSIKEKVKSILESMAYPRLKLNESKTLSLSKKNNIKVTGITVTSDNKISIGRKRKRFIRSQVYKYKKGELKPSSVPRLRGLIAFFEHIEPGAISKLEMKFGKELMVRVVKGS

SEQ ID NO: 4623 - protein, 326 aa, unidentified
  source 1..326: note = Related to NZ_NGUT01000002.1; note = Paraburkholderia caledonica
MHILERISHDLLVPQSLLEDALRRAHVRFRKIKIPKRSGGERVLLQPAAELKLILSWADSYVLRKAPVSNVATAFEPGTSIVRNAQIHSKSDYSVRVDLSNFFPSIRSHDLLRALSKARQHFPEWVFERDFEDMLRKACFDRADSLPVGYMTSPRIANIVMLDVDTTLQTTISSNPERFGRAYITRYADDFVFSTNRKGACNEFVEELRTLLASRPSPKLAINEAKTRFMSRKGGTTLITGLRVNNDGDVGVHANYRDHIRLLLKLFATGRLEQAENESLRGHLAFIEHADPSLFTRLSYRYHAEIAKLRGHAGLTALPAPQKLSS

SEQ ID NO: 4624 - protein, 318 aa, unidentified
  source 1..318: note = Related to NZ_SMRP01000003.1; note = Paraburkholderia silviterrae
MNIVERMSNELSVPQSLLESALLLAHVRFRKIKVPKRSGGERVMIQPASELKLVLSWLDSRVLSNAPVSPIATAFEPGTSIVKNARTHSKSLYSVRIDLSNFFPSIRSRDLLLALSRSRELLPEWASGGDFETLVRNACFDRADRLPVGYMTSPRIANIVMLELDTALATAVSRDTVRFGQAVLTRYADDFVFSTDKKGACNEFLSEMRSLLASTPSPKLSINEAKTRFMSRKGGTTLITGLRVNNDGDVGIHANYRDHIRMLLKLFSTGRLKPAENEKLRGHLAFIEHADPDLFTRLSFRYHAEIAKLRGHPSLNPA

SEQ ID NO: 4625 - protein, 306 aa, unidentified
  source 1..306: note = Related to MTZU01000087.1; note = Burkholderia ubonensis
MLDDAIQAAYFRFKKFTIKKRSGEDRHLIQPAAELKLVIAWLDAVVLSKLPVSDLATAFQPGTSIVMNAEAHRKSAYSVRLDVSGFFPSIRSKDLIRAINDAKPRFEEWVFTPAFEQLVRKACFDRSDRLPVGYPSSPRIANAVMYELDMRLNQLIAAAPERFGQAVLTRYADDFVFSTDKQGACRTFADELQTILARCASPKLSINVAKTRYMSRKGGSTLITGLRVNMDGKVGVHANYRDHIRLLLKLFSVGKLDFEEHEKLRGHLAFIEHADPRLFTKLSFKYYKEIASLRMKKAVPEQESPQ

SEQ ID NO: 4626 - protein, 317 aa, unidentified
  source 1..317: note = Related to NZ_JAALCQ010000007.1; note = Rubrivivax sp.
MTDFPALIGEKTNVPTEIIKSAVDLAHIRFRKIKVKKRSGGERIIIQPAAELKLVLAWLNNEVISKLPISPIATAFRKDASILKNASEHKASLYSIRVDIKEFFPSIRSSDLVLAIKSSPIELPPFTAEAGFFDFIQRCCFDRDGRLPIGYPTSPAIANAVMRNIDVALLNKINIDPTKFGQARLTRYADDFVFSSDKPGACRSFLDTLQETLIRTTSPRLAINSKKTRFMSRRGGSTLVTGLRINQDGLVRVHPKYRDHVRLLLKHFANGSISADDVPRLVGHLAFVQHADPRLFTRLSFRYFEEIARLRGKQENT

SEQ ID NO: 4627 - protein, 313 aa, unidentified
  source 1..313: note = Related to NZ_QXJC01000004.1; note = Simplicispira sp.
MTNFPVLIADQMKVPVVLVEDALKLAFIRYRKIRVPKRSGGYRTIIQPAAELKLVQAWLNEKIFKHLPLSSVATAFRPGASITNNAAIHRNSLYSVRVDIKDFFPSIRSVDLIRIVRSNRSALPPFVMETGFTNLVRQACFDREGRLPIGYPTSPSIANAVMHQTDKMLINEITSDVSIFGNTQLTRYADDFVFSTDKSGACHEFVRKLERLLSTLESPRLKLNTSKTKFMSRRGGSTLVTGLRINQEGLVRVHANYRDHVRLLLKHFAAGSLQSDDVIRLVGHLAFVEHADPRLFTRLSFRYFEEIARLRGK

SEQ ID NO: 4628 - protein, 316 aa, unidentified
  source 1..316: note = Related to JABMJG010000023.1; note = Variovorax sp.
MDSIVSKISGDLKIPIATLEIAIRLAKTRCRKFSILKKNGDTRQIIQPSVKVKPILSWLSLNVLNSLPVHDAATAFRRGKSILDNTSKHKEADYSVRLDLKDFFPSIKPEDLWRVMLDSRHLIPEWSIKEDAFWLISNVCFDQNNQLPIGYSTSPAIANAVMHRIDTTLANAVMDDSRFGAATVTRYADDFVFSTNKRGACKNFSDLLHDVIKTTNSPSLQINENKTRYMSRAGGSTIITGLRVNNLGAVVVHGNYRDHVRLLLKLFDSGRLALDQVPQLAGHLAYIEHVDPALFTKLSFKHYKRIEEIRSLRLVE

SEQ ID NO: 4629 - protein, 311 aa, unidentified
  source 1..311: note = Related to JAJTEM010000008.1; note = Burkholderiales bacterium
MLAKISDDLNIPRPLLENALALAATRFRKITFKRRSGPPRVAYQPAVELKPILEWLDITLISKLPVSRIATAFCAGSSIVQNAQVHRDSLFSIRVDISNFFPSITSSDLVTAIEATSHLPEWSNAPTTLRVLKQACFDINDRLPIGYSTSPRIANAVMFSLDNLLIQAISDERRFGNSLLTRYADDYLFSTNQRGACAEFLKEIRKILNSVQFPKLQINNEKTRFMSRAGGSTLITGLRIKQTGEIGVHAHYRDHVRLLIKLYAANRLRAEEFDSLRGHLAFVEYADPKLFTHLSFHFSDEITRIRSTDSL

SEQ ID NO: 4630 - protein, 312 aa, Achromobacter sp.
  source 1..312: note = Related to NZ_CP054569.1; note = Achromobacter denitrificans
MSNIIDLIADDLQLPKTLVKSAVDFARSNNRKIIFPKKTGGKRTALQPSVESKPIMHWLRLKLIELLPIHMIATGFRANHSILTNADRHRQSAYSVRIDIENFFESISFNDFKKTLESNKATLPSWALEEATLSLVEKICFDRDGRLPIGYPTSPGIANATMFEIDSALESLILDTTTFGQAIVSRYADDFTFSTDLRGSCRAFLEKLELLLASQTSPTLRINAKKTRFMSRGGGSTLVTGLRINNCGVVVVHPEYRDHIRLLLKLYSRNTLKQEDIPRLLGHLAHIQNVDPGFFTKLSYRYHEEISRIRKK

SEQ ID NO: 4631 - protein, 312 aa, Alcaligenes faecalis
  source 1..312: note = Related to NZ_LQAS01000005.1
MDDILELMAADLSLSKTTLKSTIFSTKRKYRKFSIEKASGGQRVIHQPSIELKPILYWIQINILDKLPVHKISTAFKKGSSILNNASLHQESLYSIRVDIDNFFNSIQPQDLISAIRENQANLPEWTKDGYVDELVTLSCFISRSYLPIGYLTSPQIANSVMFKIDSLLDEEFSNEGKYGVAKISRYADDFIFSTDKKGACKDALEKLKSIIEESKHPNLAINKKKTTYMSRPGGSARVTGLRINNQGKIIVHACYRDHVRLLLKLYKENRLNEEGGKEKLVGHLAHIQNVDPGLFTKLCLKYSSEIHELRK

SEQ ID NO: 4632 - protein, 312 aa, unidentified
  source 1..312: note = Related to CP009585.1; note = Burkholderia pseudomallei
MSSLATLAAAECCVPESWVNDVVRQGPSRVKTLRIEKSTPGKFRIISRPSAELEILQRWLVLRFFEKMEVHDSAMAFRRGRSILTNAQAHAKSRFFVRVDFSNFFPSIRYADFSFALGKSKNLGYFFSEYADAGNFIQRICFDSNLRLPIGYISSPTISNAVMFEFDVRMEGMVAANGGDLGNAKVTRYADDIVFSTDKKGGCAKFVELLRELVKTWASPLLSINENKTIFSSSSGGSAIVTGLRVCSDSHITITREYKDKIRLMLSLHAKKCLRPEDLPKLKGHLNYIRYVAPAFFSTLCAKYTSVIDKLI

SEQ ID NO: 4633 - protein, 312 aa, unidentified
  source 1..312: note = Related to CAJNBA010000001.1; note = Paraburkholderia aspalathi
MPSIVTLAAAECCVQESWVNDVVRQGPSRVKTLRIKKSTPGKFRVISRPSAELEILQRWLVLRFFEKMEIHESAMAFRRGRSILTNAEVHAQSRFFVRVDFSNFFPSIRYADFAFALGKSTELAYLFKEYSDIGNFIQRICFDSNLKLPIGYISSPVISNAVMFEFDARLENIVAANGEDLGSARVTRYADDIVFSTDKKGGCTKFVEILRSLVKSWASPSLSINEDKTNFSSSSGGSAIVTGLRICSDNHITVTREYKDEIRLMLSLLVKNSLRPEDLSKLKGHLNYVRHVAPAFFSTLCAKYTSVIAELI

SEQ ID NO: 4634 - protein, 312 aa, unidentified
  source 1..312: note = Related to NBSN01000004.1; note = Paraburkholderia fungorum
MSSLVKLAATECCVQERWVNDVIRQGPSRVKTLKIKKPKSAKFRIISRPSAELEILQRWLTIRFFEKMEIHDSAMAFRTGRSILTNAQFHAKSLYFIRVDFLNFFPSIRYADLNFAIGKSKIIRNIFTDYADAGSFIERVCFDSNLRLPIGYISSPIISNAVMFEFDVQLQKLVTANTNELGDGRITRYADDIVFSTDKKGGCAKFLELIRSFVKTWASPSLSVNENKTTFSSRNGGSAIVTGLRVCNDSHVTITREYKDKVRLMLSLRGKQVLRPEDVRVLKGHLDYIRHIAPAFFSTLCAKYTGVISEFI

SEQ ID NO: 4635 - protein, 312 aa, unidentified
  source 1..312: note = Related to NZ_PVFX01000143.1; note = Burkholderia gladioli
MPNFASLAATECHVPEDWVANVVRQGPRRAKILRIKKKNSDKFRSIARPSAELEMLQRWLLLKFFNQLELHDSAMAFRDGHSILTNAVRHKGSAYFIRIDFKDFFSSIKLQDFIMAMSQTKFFGFHLTEYSDYMEFIGKICFDSRGRLPIGYVTSPIISNAVMYRFDVALSNAISARTKEFGVSVLTRYADDIVFSTDLKGGCAAFLKFFQEFVSAWASPSLVINTEKTIFSSKAGGSAMVTGLRICNDNHITVTREYKDKIRLMLSLYQKSKLNEDELPALRGHLSYVKHVSPAFFSAICSKYLTAIEKLI

SEQ ID NO: 4636 - protein, 312 aa, unidentified
  source 1..312: note = Related to NZ_CP046674.1; note = Ralstonia pseudosolanacearum
MPSLITLAATECFVPEIWVRDVIRLGPSRVKRLRIRKKSSASYRVIKRPSAELEILQRWLTLKFFENLEMHDAAMAFRRGRSILTNAQHHVDSKYFLRIDFTNFFPSIKYDDLKKSVDKSSKNKGTFDAYHDADLFIKRVCFDENERLPIGYISSPAISNAVMLEFDEKVHRLIESNEEKLGAGKFTRYADDVVFSTDKKGGCTEFLKIFSSLVDGTTSPKLSINEKKTIFSSKLGGSAIVTGLRVCRDSHITVNREYKDQIRLMLSLYEKGKLDKEEHKNLKGHLSYVRSVAPAFFSRLCAKYFKSIEEFM

SEQ ID NO: 4637 - protein, 323 aa, Pseudomonas sp.
  source 1..323: note = Related to JAHYXH010000009.1
MSNLVKLAAKDCYVSEEWIKSVIDSGPNNVKIIHIKKKGDPNKTRIIHRPSAELETLQRWLTLTIFNQLANHEIAMAFLRGKSILSNAERHRKSKYFIRVDFKDFFKSIKADDLFKTIKFYNKSNSLISLSESDQFFIKRVCFDKLGRLPIGYISSPAISNAVMYDFDTRLLSLVNDNKAKLGAGIITRYADDIVFSTDTKGGCLEFLNLFKIMVNKNLSPRIFINEKKTIFSSRAGGSAIVTGLRVCQDSHITITRDYKDKIRLMLSLFEKGKLMQEDTATLRGHLSYIEHVAPAFFSKICAKYLYGISKILDPTPSPQQNN

SEQ ID NO: 4638 - protein, 316 aa, Escherichia coli
  source 1..316: note = Related to JAKLOK010000001.1
MEIYSIIDFETLMRSGFTSEVMRSPEPPKKWDIPKKNGGVRTIYHPASKVKLIQYWLINSVLINLPIHEAAYAFIKNRSIKKNALRHASARNKYYVKIDLKDFFPSIHYDDFEYAFKKYRDHIDYPEKLDSELLPLIKGVCFISDLTLPIGFPTSPFIANFVAREFDEKLTKNLNSIDRLNATYTRYADDIIISTNKKGASKQIINSVKSTLRNIKPDFKINPKKIKICSASGGSIIVTGLKVCDDFHITLHKKTKDNVRLLLSLLSKGNLKKDDYNKLSGYILYTKSIDPHFYTKLNRRFFKEIKFLENYHNKKN

SEQ ID NO: 4639 - protein, 316 aa, unidentified
  source 1..316: note = Related to SISW01000095.1; note = Hafnia paralvei
MEIYNIIDVETLMRKGFTGEVMRSPEPPKKWDIPKKNGGVRTIYHPSSKMKLIQYWLINRVLTNLPVHDAAYAFIKDRSIKHNALRHATTKNKYYVKIDLKDFFPSIKYNDFEHAFKTYRDRIDFPNNLDTEVLFLIKGACFIPDLSLPIGFPTSPIIANFVAREFDEKLTVKLNSIDRLNATYTRYADDIIISTGKKGCSKQIINAVKSTLKDIKPNFKINLKKVKICSASGGSIIVTGLKVCNDFHITLHKKTKDKVRLLLSLLAKDKLKIEDYNKLSGYIAYTKSIDPHFYTKLNRRYFKEIKMLENHHNKSE

SEQ ID NO: 4640 - protein, 316 aa, unidentified
  source 1..316: note = Related to CP026050.1; note = Serratia marcescens
MEIYKLIDSETLMRKGFTSEVMRSPELPKKWHIPKRNGGVRTIYHPSSKVKLIQYWLISNIFSNLPIHNSAYAFVNGRSIKSNALLHATAKNKYYVKVDLKDFFPSIKYSNFEYAFKLYRDRIEFSDVYDAELLQLIKSICFISDESLPIGFPTSPIIANFVAREFDEKLTLKLNSIDRLNAVYTRYADDIIISTNLKGASVKILNAIKSTIKRIEPNFKINNDKIHICSASGGSIIATGLKICHDFHVTLHRSMKDKIRLYISLLSKGRLKQEDYNKLSGYIAYAKSIDPHFYTKLNRKYFQEIRGIENSHNKVI

SEQ ID NO: 4641 - protein, 316 aa, Escherichia coli
  source 1..316: note = Related to CP010200.1
MRIYSLIDSQTLMTKGFASEVMRSPEPPKKWDIAKKKGGMRTIYHPSSKVKLIQYWLMNNVFSKLPMHNAAYAFVKNRSIKSNALLHAESKNKYYVKIDLKDFFPSIKFTDFEYAFTRYRDRIEFTTEYDKELLQLIKTICFISDSTLPIGFPTSPLIANFVARELDEKLTQKLNAIDKLNATYTRYADDIIVSTNMKGASKLILDCFKRTMKEIGPDFKINIKKFKICSASGGSIVVTGLKVCHDFHITLHRSMKDKIRLHLSLLSKGILKDEDHNKLSGYIAYAKDIDPHFYTKLNRKYFQEIKWIQNLHNKVE

SEQ ID NO: 4642 - protein, 316 aa, unidentified
  source 1..316: note = Related to OCMY01000001.1; note = Enterobacteriaceae bacterium JKS000234
MSLYTLIDKEVMMRDGFTQSVIDSSEPPKKWSIPKKNGGYRSIHHPSSKNKLLQYWLLTKVFDKLPQHDASYAFVKNRSIKDNALRHAKEKNNYYVKLDIKDFFPSIEFSDFEKCFLRYRELISIPTTWDESLLFLIKETCFLKPQKNLPVGFPSSPAIANFVARELDELILGELASYEKYNPIYTRYADDLVISVAEKGLSKEIIKAVKKAIKNCTCNFSLNEQKIKICSASGGSIIATGLKICNDHHLTLHKKMKDSIRLKLSLYSKGKLNIDELNKLSGYIAFAKSIDEHFYTKLNRKFFKELSSLENVHLKE

SEQ ID NO: 4643 - protein, 315 aa, unidentified
  source 1..315: note = Related to CP034474.1; note = Pantoea agglomerans
MILYKIIDTDIMMRDGFTESVIKSSEPPKKWTIPKKSGGVRSIHHPSTKNKLLQYWLLTKVFNNLPQHPASYAFIKGRSIKDNALRHAESKNNYYVKLDIEDFFPSITYDDFERCFVKYRDLITTPTKWDKDLLPLIQDVCFLKPQKILPIGFPTSPAIANFVARELDDIINAEMASFEKHNPVYTRYADDLIFSVADKGLSKKIITAVRKSLRKCSSNFKLNANKIKVCSASGGSVVVTGLKICNDHHLTLHKKMKDSIRLMLSLHSRGKLKEEDFNKLSGYIAFAKSIDEHFYTRLSRKHFKELRTLENRHLL

SEQ ID NO: 4644 - protein, 325 aa, unidentified
  source 1..325: note = Related to NZ_CP059959.1; note = Pectobacterium brasiliense
MMLYDLIENDLKMKTGFVSDILSSPEEPRRWTIPKRNGGIRFIYHPSAKRKVLQYWLLQRVFCLIPLNDAAFAFIKNRSIKDNALRHSKSKNKYFVKADIKDFFPSINFDDFLYSFNRYRADINFPKEYDNDLLRMIREVCFIGPKKTLPIGFPTSPFIANFIARELDEIIHLELKNINDANPIYTRYADDLVISSCKKRMHSELISIIRKSINKCNASFSLNEKKLKICSSSGGSAIITGLRICHDGHLTVHKKMKDKIRLYLSHINKKGLEESEINILSGYLAYVKNADANFYTKISRKHFKEIKEIENHYTYADLKPHDEVS

SEQ ID NO: 4645 - protein, 313 aa, unidentified
  source 1..313: note = Related to NSKB01000007.1; note = Halomonas sp.
MSIISEVSRELDMVEDSFREQIRLARGKIKHIKIKKKNGKGFRRIVIPPWEFKIVQYWTILNYLRNVKIHRSATAFHEGASIRTNALCHRKGNYFVKMDLSDFFPSVGVDDFKNALYKYHPEFIWLEKELSDSEFLESMFHKGVCAIGFPASPYIANICMIEIDELIESKLKNNVERFGRFSYTRYADDLTISIERKGFKREVEGVVYEAVREASLKNIKVNKEKTKYGSKSGGSAFVTGMRICKDGHITLHRKYKDHVRLLLSLYSKGKLKPEDKGKLLGHLNYCKSSDPEFYNKLVLKYFQSIEKLKNSNG

SEQ ID NO: 4646 - protein, 311 aa, unidentified
  source 1..311: note = Related to NZ_FNES01000010.1; note = Halomonas gudaonensis
MGIIKSIAKELGMPEPVFREQLNTAAGKIKHIRIPKKSQKGYRKLVIPPWEFKIVQYWLIYNHLKGFPIHPSSTAYKPGASIRKNALKHAEGKYFVKMDLSDFFPSIGAEEFRNIIEEYYPKHNWLIKELEDSDFVSSIFYDKKCAIGYPASPYISNIIMFGVDQHIDRALQDKQQTFGNYSYTRYADDITISIENKGHKKEVVRLVHDSIKKSGIKNLKVNQNKTKYGSKKGGSAFITGMRICPDGHITLHRKYKDNVRLLLSLYNRGKLDVAERSKLAGHLNYCKDADPLFYNKLALKYFSSIKKLQES

SEQ ID NO: 4647 - protein, 310 aa, unidentified
  source 1..310: note = Related to JAJNRC010000001.1; note = Halorhodospira halophila
MSEESVRNQIHEGRRQIKIKKIPKKDGNFRKITIPPRIFKLVQYWTIKNILHSLPVHEAATAFKPGSSIRENAFRHRDGQYFVKMDVTNFFPSIKSDDFFSVLSRMQHAEADPLLDSKDDEDFLDAMFRNRACEIGYPASPHIANIVMFEKDTRIDNALRDRKQEFGNSTYTRYADDITVSIDQKGYKDEITRLVSGVVEDDSEPTLKINPNKTRFGTRRGGGAFVTGLRVLPEGRLTLHKSYKDDVRFLLKLYEQDRLERWQISALQGHLNYCSFADPDFYTRLMIKHLDSIEEIKGEGLRSTDGTTEN

SEQ ID NO: 4648 - protein, 314 aa, unidentified
  source 1..314: note = Related to CP043420.1; note = Kushneria phosphatilytica
MKLIRDFCHEMGLPEEEFTVYVDDARERVKKAKIKKKDKTTREIIIPSWELKIIQYWVILNYLRKLPASESATAYYKGASIIKNAQAHRKGSYFVKVDIESFFPSLTLDIFITSLKKDLESNPENEVIRYLLEATNDASFNQSIFYNGTCVIGYPASPYIANYILKAFDENVVAELNEISGKLGIFNFTRYADDIVVSCENKGNKTEVLKILHNCLEQKFDGALKLKATKTKSTTRSGGSTIITGVLICSDGRTTLPRKYKDKVRLLFSLYAKEILEKEEIPALTGHLNYIRSVDPVFYNKLYSKYYTQIKKLS

SEQ ID NO: 4649 - protein, 317 aa, unidentified
  source 1..317: note = Related to NYUH01000011.1; note = Marinobacter sp.
MEKEMSIIDEIAKELRINKKIIESQLFASRKQVKKIRVPKKNGAHRSIYVAPKSYKIFQYYILNNYIKHVKKSHAASAFWKGSSILKNAKKHRERTYLVRIDISNFFPSIHINDFISVLDDSENNIIDLFSNPENAEVIMETCLSDEGYLRVGYPISPFIADIAMREIDQEIAKYLEEKFQEGTFSYSRYADDLVIGFDEKCGKEIEIAISEIIEKRDHPKLSINHSKTRYFNRNVGNAIVTGVRICQDGRLTLPKQFKDDLRFRLSLLNKGNLANEELSSLEGCLNHCRDIDPSFYTKLQTRYFKSIAELKNRNKN

SEQ ID NO: 4650 - protein, 313 aa, unidentified
  source 1..313: note = Related to NZ_CP031416.1; note = Gallaecimonas sp.
MHIKKAIANDLSIPDGLIDEAISVARAHVKIFHIQKRSGGSREICHPSKKLKTLQYWLIHSVFSQMQVHDASMAYRDGVSILHNAEKHRSNRFFLKMDLENFFHSISFEDFIPILRSWHRKSNPKWILDAECEDMIRRICFYKNDRLAIGYPSSPIISNIVMNEFDSKVSTLISDRKYGKVIYTRYADDLVLSTDKKGACSEIIKEIINLIQGTSSPNISVNHSKTKLGSSTGGSASVTGLKICSGGHITIHRKQKDHIRLLLSLYRKGKLEQEEENSLLGHLSYCHYVAPDFYTKLSKKYFKEIYDLRSKDL

SEQ ID NO: 4651 - protein, 313 aa, Vibrio sp.
  source 1..313: note = Related to MCXN01000048.1; note = Vibrio breoganii
MHIKRTIANELSIPDNLIDEAIRVARSHVKIFHIEKKSGGSREIFHPSKKLKTIQYWLIHSVFSQIPVHDASMAYRNDISILDNARKHRSNRFFLKMDLKDFFPSISFNDFIPILRDWHAKAKPNWVLDEEAEHLIKKVCFYKNDCLAIGYPSSPTISNIVMRDFDSKVSTLISAEKYGKVVYTRYADDLVFSTEKKGVCSEIKKELQTLIQATTSPNIKVNNLKTKLGSSTGGTASVTGLKICSDGHITIHRKQKDHIRLLLSLYRKGKLRPEDEKSLLGHLSYCHYVAPDFYTKISKKFFKEIHELRTNDL

SEQ ID NO: 4652 - protein, 313 aa, unidentified
  source 1..313: note = Related to NZ_JAAORA010000005.1; note = Candidatus Chlorobium masyuteum
MHIRDAIAIDLSVPVSIVDEALKESRIYVKKFTLPKKSGGSREIFHPSKKLKTVQYWLIFNILSKLPIHSSAVAYRDGISILNNAKKHCHNRFFLKLDLKEFFHSIVFSDLLPLIEDWYQNISVDWVFGPEEKDLIRKSCFYKEDRLAIGYPSSPVISNVVMYQFDLNVESLVSSGRFGDVCYTRYADDLIFSTDKKGGCKVLLREISDLIGRHKSPDITLNSAKTRLGSSTGGTASVTGLKVCNNGYITVHRKQKDHIRLLLSLYAKGELKPDEYRSLLGHLAYCHYVAPSFYSRLAQKYFKEIHELRASVF

SEQ ID NO: 4653 - protein, 313 aa, unidentified
  source 1..313: note = Related to NZ_LASA01000253.1; note = Endozoicomonas arenosclerae
MNIKSIISNDLGIPEKLIEEALSSSRTYVKVFKIKKRNGGFREIHHPSKKLKTLQYWLIHNIFKNLSIHKSSVAYQDGVSILDNAKMHSSNRFFLKIDLENFFPSIKYTDLEPIVDKWHSENKISWELDQEAKELIRKSCFYKEDLLPIGYPSSPIISNAVMHDFDTAINQIILDNRFGETVYTRYADDLVFSTNKHGACSKLKDVIRTFIGGYNTPNIKINTSKTKMGSSTGGSASVTGLKVCENGHITIHRKQKDHIRLLLSLYAKGKLPESEKSSLAGHLAYVQHVAPSFYSSISNKYFKEIFELRATNV

SEQ ID NO: 4654 - protein, 313 aa, unidentified
  source 1..313: note = Related to NZ_LT670847.1; note = Halomonas subglaciescola
MRIEEVISRDLKVPESLINEAISGARVRVKKFQIPKRSGGSREIFHPSKKLKVIQYWLMHSVFCNMPLSDAAMAYREGISILHNARVHSLNRYFLRMDFKDFFPSIRFEDVESHIKAWHRNFKPEWDLNDKSLEFINQSCFYKDARLAVGYPSSPAISNIVMRDFDSKILNEIGSEKYGDVVYTRYADDMVFSTNQKGACKEIIKAVKEIVSVCKSPVLEINESKTRLGSSTGGSASVTGLKICSDGRITINRKHKDHIRLMLSLFSKGKLDPKEVPSLAGHLAYCHYVAPDFHSGLSSKFFKEIHQIRTMDL

SEQ ID NO: 4655 - protein, 314 aa, unidentified
  source 1..314: note = Related to RJLR01000016.1; note = Dickeya undicola
MNIKQLISESIDVPLSMVDNAIILARSHVKKFELKKKNDKFRIIHQPSKKLKVIQYWLIYNIFKEMPIHAAAVAYRNELSILDNAERHKRNKYFLKIDFKDFFPSLTFNDLLPFLESWKSSRTDLFINNELKEIIRKSCFYTNDKLVIGYPSSPIISNIIMFDLDENIQSIISDNKYGNVIYTRYADDIIISTDKAGACKEIYKEISTLIKSTITPSLSINVEKTKFSSSSGGSATVTGLRVCHDQHITIHKKQKDHIRLLLSLYAKGILNEKDEKSLIGHLAYCHHVDPAFYSKLSKKYFKEIATIRSSHMKN

SEQ ID NO: 4656 - protein, 322 aa, unidentified
  source 1..322: note = Related to NZ_JACHTE010000007.1; note = Lysobacter penaei
MRDLVEVCSADLGISRQETLHLAKSAPYRMKRFELSKRGGGRRTIWRAAIETKGLQYSLIKNYLEHLPVHAASQAFSPGSSIKKNASIHVGNHYFLRVDLKDFFPSLTFENLRKATLSSNAKFDFSLEGSDSFALIQGACFDRDGKLPIGYSTSPFIANVVMFEFDESLEVTLQSEFGAGNFNYTRYADDMVFSTSTRGVCRKAYRKIKNFVADFDGASLSVNDRKTHFGSTGKGTAFVTGVHMLPNGKLAATRQLRERVKFLLYLLTKKRIPEKEYSQLIGLLAHLRSVDPAYHTKLSTDFYSVFPRLGKDRTATTSSERT

SEQ ID NO: 4657 - protein, 311 aa, unidentified
  source 1..311: note = Related to NZ_LMUE01000002.1; note = Dyella sp.
MLDLLDICSSALGTTRENALVIARTAPYRLKRIEIPKQDGSKRITWQAAIETKGLHYPLIQYYLRQLPAHPASQAFSPGSSIIKNAGIHLGNKYFLRIDFSDFFPSIKFNSFKKIINQTKSIFENFNTATPESMLLLEKACFAKDSSLPIGYATSPYIANCTMFEFDREIIDLLRAKFASANVTYTRYADDLVFSTNIKNACRDIYDVIVQFVKKYRAIDLTINHKKTHFGSVPKGTAYVTGVHMLESNRTAATKTLRSEARFLLSLRKKNKLDDDEQKRLFGLLAHIRQIDPAFYTKLASDFHVAFPHTK

SEQ ID NO: 4658 - protein, 313 aa, unidentified
  source 1..313: note = Related to NZ_JAJOYU010000020.1; note = Proposed Pararheinheimera soli
MDLKSRICKDLQIPETLFDSSVSNARRAVYQFKIPKKNGDERTIYQAAAKTKTIQYWLLKNIFEKVKSHPSSMAFSQGCSILKNAECHRNNRFFLKIDLLNFFPSVTFEDVKGALIKNWEQIDSLPPDKDLFELIRTVCFFKGDILPIGYPTSPILSNIAMLNFDEMVMSTLESSFGGDVTYTRYADDMVFSTNVPGRTHEVFKLIRQLITTNTSPKISINPDKTTSGSSSGGSAIVTGIKICPNHLTITKKQKDEIRLLLSLYSKGRLRSSDYERTIGLISFARNVDPSFFTRVSERFFREIRAIKKELSDT

SEQ ID NO: 4659 - protein, 313 aa, unidentified
  source 1..313: note = Related to JAHLLK010000006.1; note = Deltaproteobacteria bacterium
MKFWEQIETSFGLGKPEINRIINDSRRCVKHIKIPKHNGGFRLVVQPTRKVKLIQYWLIDNVFSKMEVHSSAMSYRPNISIRRNAEVHKNMRYFLKLDFIDFFWSLNYSDFVVVFDSFLGRKKILWSDNKFDRNLMRCCCFYKDDALPIGYPSSPIISNIIMYNLDVAIKNKLEVLEEKIGGKIVYTRYADDLVFSTNIPGACEEIKNSIISLVSGCNSPKLKFNYNKLKMTSSSGGSAVVTGLRICHDGHITLRREYKDQVRFFLNLMAKDGLKKEDIFVLRGHLAYVQDVDPVFYTKLQEKYFKQIEGVEK

SEQ ID NO: 4660 - protein, 306 aa, unidentified
  source 1..306: note = Related to JAHJTB010000019.1; note = Proteobacteria bacterium
MSEELNIPVDSLSDTIEQSRSFVKRIKINKKSGGERIVYQPARKIKVIQYWLMRTIFSKITIHSASMAYRKEGSIKENALKHSNGGYFLKLDFKDFFPSIKFSDLNKSIIAFRKNNNAIFKYTKADQELIRRVCFYKNDKLPIGYPSSPIISNIVMYKFDIRVTDEMPKFRKYGNVVYTRYADDMIFSTDRKGGCEKIFSFLSVLINSWSTPSLLLNEAKTRFVSSSGGTAIVTGLRICYDGHITLHRHYKDIVRLLLSLYKKGNLKEEDVYVLKGHLSYIQNVDSVFYTKICKKYFDIIDEIKTK

SEQ ID NO: 4661 - protein, 317 aa, unidentified
  source 1..317: note = Related to NZ_KB906230.1; note = Thioalkalivibrio sp.
MNIRERIAADLHVSHELIDRAVWESHSKVKKFRIKKRNGGTRPIFHPSKKTKLIQQWIIHNILNHLPVHDAAMAYRKGLSTVDNARKHRQNRYFLRIDLTNFFPSITYNDLEPLIREWHSHAETDWTLDPTSELLLKHTCFSQDETLRIGDPSSPSISNAVMASLDETISNTVRALSKNPIAYTRYADDLIFSTNERGLCKPIHEHTVAVIEESTSPLLSVNRRKTRFLSRSGGSAIVTGIKINPDGSLTLPKSYRNEIRFKLDLYRKGKLGDSDVRELRGHLAYCKHAAAGYYSRLCGKHYREIEEITTSLQDHSC

SEQ ID NO: 4662 - protein, 321 aa, unidentified
  source 1..321: note = Related to NC_016620.1; note = Halobacteriovorax marinus
MIYREISKFYNIPQEEVQDFISSNKTKYFRFEIPKRNGKFRTITHPRHELKIVQYWLVEKVFSRMNYVSCSSYAYIKERDILKNARKHQRNSHFLSVDFSNFFESITFKLLEPFLEKFYHSTEVEYSLEELKNVVKRSCFDSYGRLPVGFVTSSIISNIVMFDFDLRINVLLMSRKMLGRVVYTRYADDVTISTNKEGAIREIYELFCKGLISEFNSEITLNASKTKVRHKRCGNVLVTGLRITKDSRITIHKNYKERVKKLIHDNYKSEDLSVVSRIIGHLNFIKYVDANYSHKLNIKYFSEINELKLRYQALFSAKSYI

SEQ ID NO: 4663 - protein, 323 aa, unidentified
  source 1..323: note = Related to JADHXY010000004.1; note = Phycisphaerae bacterium
MAKSLIDMVATYLGHTREQVLHLSYRAPMTYRRYTIPKKKGGRRLINHPAKQTKSLQYALMNIFLSQLPIHSCAAAYKKKTASEHIPSPLLKNAILHAPYSYSVRIDFTDFFHSISSLDLFNRISNNDINLSISDKEFIENCLFVRVPEGQKGLAIGAPSSPIISNIVMYSLDEQINAIANGISDRVAYSRYADDIIFSTNLRGGCNYFYRAMSELVTRTSSPKLVINRSKTMFSSRASRRVVTGLFIRPDGGTSLGRQNKRYIRKLLFDLKRDNIEPRKLTYLSGYLAFALDVEPDFYNRLAHKYGAELLAVAIGKTHHDVS

SEQ ID NO: 4664 - protein, 323 aa, unidentified
  source 1..323: note = Related to MSYB01000011.1; note = bacterium B17
MSRIINLKNDVAKYVGITLERVESLAAVAPKSYRRDEGSKRSGRGSRVIFHPSKKTKALQYGLIKILLDDLPVHASAYAYRKGLKAPLLKNSMLHQKYSFSIRIDFKDFFPSIVPEDLFKVIDESGLFPAALDSADKRFLENVLFIRHHGLMHLAIGAPSSPSISNAIMHSLDVLFSAFARDKDSVYSRYVDDIIFSTNRKGMCDEFLRFLSTTLSGTPSPILQVNATKTLVMSRGTRRCVTGMFITPEGGVSIGRTRKRKLRTLLYRYSKHLKGEDVLSKEDLNYLKGNLAFVLDVEPDYYNRLVQKYTATMVNSALHASVS

SEQ ID NO: 4665 - protein, 313 aa, unidentified
  source 1..313: note = Related to JACKDE010000001.1; note = Deferribacteres bacterium
MDLIEKIALYLGFSKEQIVKHSKRCSKTYRLYKIPKKGKLTGFRTIYHPAKETKAIQYALMEILLGDFKVSESAIAYKRGLSSPLRENALLHAPYKYSVRIDFENFFLSLQPRDLARMAKSKFDLNDKEIDFLIKSLFVDLGSGRSGLGVGAPSSPMVSNIIMYELDEEIQKIALKIDPKSVYSRYADDIIFSTDQKGACKQFYDQLASVIKSSKSPRLKINDLKTIFSSRGSRRMITGLIVTPNGDVSIGRRNKRYIKKLLFDFSKSKISDKNKSYLKGYLSYIEDVEPDFLNSLSLKYGAALLEKIRMDQF

SEQ ID NO: 4666 - protein, 305 aa, unidentified
  source 1..305: note = Related to PAAX01000026.1; note = Ignavibacteriae bacterium
MSLIENVSRYLSFNESELLSFAQKAPTTYRTYQIPKKNGRLRTIHHPAKETKSLQYALINLIFKNYPIHSSAVAYRKGVKSPLKLNAESHSKYLYTIKMDFKDFFHSIVFEDLKNILDSPYTQQELEFLKNVLFLNYQGIYCLAIGAPSSPILSNIVMHGYDESILKIVTKIDPDATYTRYADDITFSSNKKSHCLNFAKELNKLTKDKLTPSLKLNSKKTILLSKANHRMVTGLVITPQGNVSVGRHNKKYIKKLLNDLKYDKISPIAFKYLKGYFAFVRDVEPKFVNSLTNKYGAALINKIII

SEQ ID NO: 4667 - protein, 304 aa, unidentified
  source 1..304: note = Related to NZ_CP021235.1; note = Pontibacter actiniarum
MKIIEKISNIYGLSFNETKNLINTAQNNYRIYKIPKKTTGTRTIYHPSKQVKAVQYILIDLILKKLQVHNAAVGYIKGVKAPIKRNAEQHAKFPYSIRIDFKNFFSSISFSDLKKVLENSSLELSLDDYKVLELVLFKNGLPIGAPSSPLISNIVMFELDELLAREALKVDSNSLYTRYADDIVFSTSKKNGCKDFLKKLKSVLINYNHPKLTINSSKTKFMSRKSKRMVTGLIITPQGKVSIGRENKEFIKMLLYQYNKKLLNPEQVSYLTGYLSFIIDVEPAFFNTLVIKYGAVVSNLLKKI

SEQ ID NO: 4668 - protein, 313 aa, unidentified
  source 1..313: note = Related to NZ_FNGA01000002.1; note = Maridesulfovibrio ferrireducens
MPDKLNLVGKLSFFLGASEEDIKTSANSMSRKYKQYKIPKKNGGSRTILHPCRPLKALQYAIHEVLLNKLEVHPIAHAYVPNQKSPLKQSAKAHTNYKYTIRIDFENFFPSIRPEDLELQINKNFILSKTDKYLLRTVLFYQKNRGSRPILPIGAPTSPTISNIVMFNLDELLLKTSKEHDRDSALTRYADDIYFSTNIKGCCKLFYDEIFQLLKRIDSPRLKINTNKTLFLSKGTKRVVNGLFVTPNGKVSIGRKRKTQIKSLIYKHSQTALMGKELLQTRGLLAFIQDCEPEFYNTLALKYGVHFYSIKES

SEQ ID NO: 4669 - protein, 309 aa, unidentified
  source 1..309: note = Related to JAFGSW010000031.1; note = Spirochaetales bacterium
MSRIIDIISKYTGLDPHKILKITYDSPTNYKLYYIKKKNGDSRAIFHPSKETKMLQYALMEKFLKKIPVHEFAMAYKKGIKSPLKKNALYHLNTQYTLHIDFTNFFPSIIPEDFWRAVSVAFPGKEFETSDIELINNILFIKVKGKCFLSIGAPTSPIISNIVMKEMDAQFLKLCKTLDEYSVYTRYADDINISTNIKGFSQKIYYSIKQHLSETESPKLTINEKKTYFLSKKGNRLITGLCITNMNSVVIPRNKKRIIRSLIHTELTSNKKDKTRLSKIKGYLAFIKDIEPDFFNKLVIKFGDGINDL

SEQ ID NO: 4670 - protein, 316 aa, unidentified
  source 1..316: note = Related to NZ_JAALLS010000018.1; note = Aliifodinibius halophilus
MSILKGLLSKYTSLSIDNISNIIKKAPASYKTYRIEKANGGYREINHPAKETKTLQYALMEIIFKKNDVHPIAMAYKRGVESPTFENARLHKDYEYSLRLDFKNFFPSIKPDDIISIVKDSSKYEFDDTDYSDLKRICFRKNHIKGYQYGLAVGAPTSPIISNIVMYDFDEAMEKISKELDKSSTVTRYADDIVFSTNEKGICAKFYSSVRDHLNDQDLSLEFNEEKTAFMSRGTKKVITGLVISNKGNVSIGYDKKEKVKRKVYKYSKGDLEDSDILSLKGYLAYIQDVDPDFFDKLNIKYGADILDDIMSFENE

SEQ ID NO: 4671 - protein, 313 aa, unidentified
  source 1..313: note = Related to NZ_RCTY01000045.1; note = Lysobacter enzymogenes
MHKLFDAMYHGKYRFDEFLALSPEENYSPVHWKARTIYKPSRTLRDFHTFLSGFVLEQLPINTSVSFAYRKGTTLAQAVAPHAKSRAFFQTDLERFFDSITTPLIRRILIENQTPVLDLQAHLDHILKLLTIDDKLPIGYSTSPLVSNACMHSFDQRLAQISHDRGWIYTRYADDIMLSTQDRADLSDASTVITGCLATELGYGFNLNPGKSKLTTIGRKVKLLGLVILPSGDIAIDRDVRNRIESWIYFYLRDRARLSKIFEETYKDGLEEGLERLSGLISYAHAADPGYLEKLRSKFGTTVIDSLLHRSAQ

SEQ ID NO: 4672 - protein, 318 aa, unidentified
  source 1..318: note = Related to LDJG01000003.1; note = Stenotrophomonas nitritireducens
MTPQPLHKLFDAMYHGKYRFDEFLALSPRENYSPVSWKSRTIYKPSRMLRDFHTFLNGFVLEHLPVNTSVSFAYRKGATLIQAVEPHAKSRAFFQADLERFFDSITTPLIRRVLLESETPVADLHDHLDHILGLLTIDGKLPIGYSTSPIVSNACLLSFDHRLAQVSQDRGWIYTRYADDIMLSTEDRANLSNAGAVIETCLASELGDEFKLNPAKSKLTTVGRKVKLLGLVILPTGDIAIDRDVRNRIEAWIHFYLRDRARLLKIFEETYSQGMEEGLERLSGMISYTHAADPAYLEKLRRKFGTTVIDSLLHRSAQ

SEQ ID NO: 4673 - protein, 318 aa, unidentified
  source 1..318: note = Related to NZ_LNSU01000266.1; note = Xanthomonas translucens
MTPQPLHKLFDAMFHGKYRFEEFLALTPEENCSQVRWKSRTIYKPSSTLKDFHVFLSRVALDHLLVDTSVSFAYRKGATLIQAVAPHAKSRAFFQTDLERFFDSITTPLIRRVLVENETPVTDLLDHLDHILRLLTIDGKLPIGYSTSPIVSNACLLSFDQRLAKISDDRGWIYTRYADDIMLSTQDRADLSDAGAVVEDCLASELGDGFNLNQAKSKLTTIGRKVKLLGLVILPSGDIAIDRDVRNRIESWIHFYLRDRAKLLKIFEETPNQGMEEGLERLSGLVSYAHAADPAYLDKLRSKFGTTVIDSLLHRSAQ

SEQ ID NO: 4674 - protein, 318 aa, unidentified
  source 1..318: note = Related to AM920689.1; note = Xanthomonas campestris
MTPQPLHKLFDAMFHGKYGFEDFLAISAEENHSLVRWKSRTIYKPSSTLKDFHVFLSRVVLDHLPVDASVSFAYRRGASLIQAVEPHAKSRAFFQADLERFFDSITTPLIRKVLVESQTPVTDLHDHLEHILKLLTVEGKLPIGFSTSPILSNACLLSFDQRLAQISHDRGWIYTRYADDIMLSTLDRSKLSDAGTVIEDCLSAEIGDEFKLNPAKSKLTTIGRKVKHLGLVILPSGDVAIDRDVRNRIESWIHFYLRDRAKLLRIFEETPNQGMEEGLERLSGLVSYAHTADPTYLDKLRSKFGTTVIDSLLHRSAK

SEQ ID NO: 4675 - protein, 318 aa, unidentified
  source 1..318: note = Related to LOKH01000144.1; note = Xanthomonas campestris
MTPQPLQKLFDAMFHGKYRFDEFLTLSPEDNYVPVRWKTRTIYKASRTLKDFHTFLSSFVLEHLPSDTSVSFAYRKGAALMQAVEPHAKSRAFFQADLERFFDSITAPLIRKVLTENQTPAADLQEHLEHVLNLLTIDGKLPIGYSTSPLLSNACLLPFDRRLAQVSLERGWIYTRYADDIMLSTQHRTDLSEAKTVIEECLATELGAGFNLNPAKSKLTTIGRKVKLLGLVILPTGHITIDRAVRSRIESGIHFYLSDRARLGRIFERENDEGMEEGLERLSGLISYANAADPAYLEKLRRKFGTTVIDSFLHRSAQ

SEQ ID NO: 4676 - protein, 318 aa, unidentified
  source 1..318: note = Related to FPCI01000001.1; note = Pseudoxanthomonas sp.
MTPQPLRKLFDAMYHGKYRFEEFLALSPEENYSPVHWKNRTIYKPSRALKDFHLFLNGFVLEHLPVNTSVSFAYRKGTTLLQAVEPHAKSRAFFQTDLERFFDSITTPLVQKALAENETPVADLSDHLDHILKLLTIDGQLPIGYSTSPILSNACLLSFDQRLAQISAERGWVYTRYADDIMLSTQDRAELLDARTVIEDCLTTELGDGFNLNPAKSKLTTTGRKIKLLGLVILPTGKIAIDRDVRNRIESWIYFYLRDRSRLSRIFEETYDEGMEEGLERLGGLVSYAYASDHAYLEKLRRKFGTTVIDSFLRRSAQ

SEQ ID NO: 4677 - protein, 318 aa, unidentified
  source 1..318: note = Related to CP076254.1; note = Xanthomonas translucens
MTPRPLQQLFDAMYHGKYRFEEFLALKPQEHYSLIRWKTRTIYKPSKTLKDFHFFLNGFVLEHLPVDTSVSFAYRKGSTLMQAVEPHSRSRAFFQTDLERFFDSITTPLIQGVLQRNQSPVADLADHLHHVLGLLTIDGKLPIGYSTSPLLSNACLLGFDQRLAAISQTREWIYTRYADDIIVSANDRATIADASAVIEECLASELGDGFNLNKGKSKLTTIGRKIKLLGLVILPTGAIVIDRDVRNRIESWIHFYIRDRSRLAKIFEEERGEGMEEGLGRLSGLISYAYAADPGYFEKLRSKFGTTVIDSLLHRSAQ

SEQ ID NO: 4678 - protein, 306 aa, Achromobacter sp.
  source 1..306: note = Related to NZ_FNYM01000002.1
MYHDKYRFEEFLTLYAGDHYSQVLWKNRTIYKPSAKLKDFHHFIGGFLLEHLPVDQSVSFAYRKGATLLQAVQPHSRSRAFYQTDLERFFDSITNNLIRSVLEQAATPVSDLSDHLDHILSLLTIDGRLPIGYSTSPILSNACLYGFDKRLAAISHERGWIYTRYADDIIVSAADRLAIEDAPQVIEDCLGTELGDGFKLNSSKSKLTTIGRKIKLLGLVILPTGAIVIDREVRHRIEAWLHFYVSDRPRLAKIFQEERKEGLEEGLQRLSGLIGYAHAADPLYLEKLRAKFGNTVIDSFLRRSAQ

SEQ ID NO: 4679 - protein, 306 aa, Alcaligenes sp.
  source 1..306: note = Related to NZ_CP032153.1; note = Alcaligenes aquatilis
MYHEKYRFEQFLELKPEEHYSSVLWKNRTIYKPSSILREFHYFLNGFLLEHLPVDTVVSFAYRKGATLLQAVEPHANSRAFYQTDLERFFDSITSDLIRSVLSRYETPVSDLSDYIDHIIGLLTINGSLPIGYSTSPILSNACLLGFDKRLAAISDERKWVYTRYADDIIISADDRLSIKDADQVIKECLKLEFGDGFSLNESKSKLTTIGRKIKILGFNILPTGAISIERGVRNRIESFLYFYVKDRPKLARIFEEEQGDSMEDGLLRLSGLISYVYAADPAYLKKLRVKFGNTVIDGFLHRSIK

SEQ ID NO: 4680 - protein, 318 aa, unidentified
  source 1..318: note = Related to NZ_PKQQ01000003.1; note = Stenotrophomonas sp.
MTPQPLEQLFDSMFHGKYRFIEFMELKPEQHRVRVSWKGRTIYKPTGVLKAFHRFLNHYVLDHLQVDETVSFAYRRGTTLLQAVEPHAHSRAFFQTDLERFFDSITTDHIRTALETSDIPVEDLGQHLGHILELLTIDGKLPIGYSTSPILSNACLLGFDSRLKSQSRDRGWVYTRYADDIILSAADRESLADAVAVVEDCLSSELGDGFALNPTKSKLTTIGRKVKLLGRVIVPTGVIVIDREVRNRIESYLHFYITDQSKLARIFREDREEEWEDGLQSLSGLISYVHVADVAYLDKLRAKFGATVIDSFLHRSAK

SEQ ID NO: 4681 - protein, 318 aa, unidentified
  source 1..318: note = Related to NZ_PKQP01000016.1; note = Stenotrophomonas bentonitica
MTPRPLHQLFDAMFHGKYQFDEFLALKPEEHRTRVSWKGRTIHKPSGILKNFHRFLHSFVLEHLLVDEKVSFAYRKGTTLLQAVEPHAQSRAFFQTDLERFFDSITSDLVRNVLKQAEVAVGDLDDHLEHILALLTIDGKLPIGYSTSPILSNACLSGFDARLSSISIDRDWIYTRYADDIIISADDRTALIDAAAVIEECLASELGEGFTLNLAKSKLTTVGRKVKVLGRVILPTGTIVIDREVRNRIESWLHFYTSDRPRLAKIFREERNEEWEEGLERLSGLVSYVHVADPSYLEKLRAKFGTTVIDSVLHRSAK

SEQ ID NO: 4682 - protein, 318 aa, unidentified
  source 1..318: note = Related to NZ_VLLB01000004.1; note = Massilia lurida
MNPQPLHQLFDAMYHDKYRFDEFLALKPEEHYSPIPWKSRTIYKPSPTLKDFHKFITGFLLDYLPVNDSVSFAYRKGASLLQAVTPHAYSRAFFQTDLERFFESITSSLIRRVLDQASTPVADLAEHVEHIVRLLTIEGALPIGYSTSPILSNACLLGFDARLAATSCARNWIYTRYADDIIISAGSRAAINDVGQVVEECLRAELGDSFRLNQDKTKLTTIGRKVKLLGFVVLPTGGIVVDRNVRDRVETLLYFYVTDRSRLAKIFAEENDEVMEAGLERLSGLISYVHSVDEAYLEKMRIKFGSTVIDSFLHKTAR

SEQ ID NO: 4683 - protein, 318 aa, unidentified
  source 1..318: note = Related to SZUV01000002.1; note = Acidithiobacillus thiooxidans
MTPRPLRQLFDAMYHGKYRFEEFLELRPQEHYNIVRWNSRTIYKPSKKLKAFHYFLNGFLLEYLPVNQSVSFAYRKGATLQQAVAPHARSRAFYQTDLQRFFDSITSDLIRSTLEGASTPASDLPEHIDHILDLLTINGKLPIGYSTSPILSNACLLRFDERLAAISKDRQWIYTRYADDIIISADDRKTIGDAKELIESCLAAELGGNFALNPSKSKLTTIGRKVKLLGLVILPNGAVAIDRDIRNRIETLLHFYISDRSRLAKIFEEERSEGMEEGLQRLSGLVSYTYAADPLYLEKLRAKFGATVIDSLLHRSAE

SEQ ID NO: 4684 - protein, 318 aa, unidentified
  source 1..318: note = Related to NZ_CP028901.1; note = Orrella marina
MTPRPLHQLFDAMYHGKYRFEEFSELNPREHYTSVQWNNRTIYKPSKKLKDFHSFLNGFLLEFLPVNQSVSFAYRKGATLLQAVMPHSRSRAFYRTDLERFFDSITSGLVRSALERAVTPISDLAEHIDHLLDLLTINGKLPIGYSTSPILSNACLLGFDERLASISRERQWIYTRYADDIIISADDRSAIEAASDVIKSCLSTELGDEFALNSSKSKFTTIGRKVKLLGLVILPNGTIAIDRDVRNRVESWLHFYVSDRSRLAKIFEEERSEGMEEGLQRLSGLISYVYATDPRYLEKLRAKFGTTVIDSFLHRSAQ

SEQ ID NO: 4685 - protein, 318 aa, Pseudomonas sp.
  source 1..318: note = Related to CP053705.1; note = Pseudomonas aeruginosa
MNPRPLHQLFDAMYHGKYRFEEFLALNPEEHYTPVPWNRRTIYKPSPTLKEFHRFLSDFLLDYLPVDQSVSFAYRKGATLLQAVTPHAHSRAFFQTDLERFFDSITLNLIRPVLNRAAHPVSDLPKHIEHILRLLTINGKLPIGYSTSPILSNACLFGFDKRLTVISNERHWIYTRYADDIIISAGDRLAIEDASSVIENCLSAELGKGFVLNQSKSKLTTIGRKVKLLGLVILPTGAITIDRDVRNKMESWLYFYVTDRSRLAKIFQEERNESMEVGLQRLSGFISYAYTADPAYLEKLRTKFGNTIIDSFLHRSAQ

SEQ ID NO: 4686 - protein, 318 aa, unidentified
  source 1..318: note = Related to JADMJL010000080.1; note = Methyloversatilis discipulorum
MTPRPLHQLFDAMYHEKYRFEEFLALKPQEHYSPVSWNRRTIYKPSPKLKEFHHFLSGFLLEFLPVDRSVSFAYRKGATLLQAVAPHAQSRAFFQTDLERFFDSITSDLIRSVLDQAETPVSDLGDHVEHILDLLTIDGTLPIGYSTSPVLSNACLFGFDKKLAAICHSRQWIYTRYADDIIISADDRLSIEDADQVIENCLVAELGGGFKLNQKKSKLTTVGRKVKLLGLVILPTGVIVIDREIRNRIETWLYFYIKDRSRLSKIFQEDRGEGIEEGLQRLSGLISYASAADPIYLDKLRAKFGNTVIDSFLHRSAQ

SEQ ID NO: 4687 - protein, 318 aa, unidentified
  source 1..318: note = Related to PNKA01001725.1; note = Cyanobacteria bacterium PR.023
MTPRPLRQLFDAMYHEKYRFEEFLALKPAEHYSPVHWNRRTIYKPSSKLKEFHRFLNGFLLDYLQVNESVSFAYRKRTSLLQAVAPHAHSRAFFQTDLERFFDSITSNLIRSVLERADTPIADLADYIDHILDLLTIDGKLPIGYSTSPILSNACLLGFDKQLAALSAERQWIYTRYADDVIISANDRASIEDASQVIENCLAIELGDGFKLNQKKSRLTSIGRKVKLLGLVILPTGAIVLDRDVKNRIETWLHFYVTDRARLAKIFQEEKNEGIDEGLQRLSGLISYAFSADPAYLEKLRAKCGSTVIDSFLHRSAK

SEQ ID NO: 4688 - protein, 318 aa, unidentified
  source 1..318: note = Related to CP086344.1; note = Halomonas sp.
MTPRPLHQFFDAMYHGKYQFEDFLELEPKEHYTPVPLSGRTIYKPSKVLKEFHTFLNGFVLVHLPVNTTVSFAYRKGVSLLEAVTPHADSRAFYQTDIQHFFESINVKLIKSALIKADTPVTDLNDFFDHILDLITVDGSLPIGYSTSPILSNACLHGFDERLAYISYKNEWIYTRYADDIIISGADRKSVQNAQSEIKNCLLEELGEGFKLNLNKSKLTTVGRKVKILGLVILPNGDISIDRSVRDKIEARLFFYINDRKKLAKIFVEEKNDGMEDGLQRLSGLIGYVHTIDPLYLEKLRMKFGTTVIDSFLHRSAQ

SEQ ID NO: 4689 - protein, 341 aa, unidentified
  source 1..341: note = Related to NZ_JAKPBV010000013.1; note = Lysobacter sp.
MPDLKASCRVGHFVCAPISTMTDPSVSVKARSLEYLFEMMHHGRHSFDDFLRLPVDKHFQRVDWRTRTIYKPSKTLRAFHSFLNVFVLGYLPVNERVCFAYRKGATLTDAVAVHAESRAFFQTDLAKFFDSITSQMVHDALARASTPAEDLPQFIDRIVELTTIDERLAIGFSTSPLLSNSCLIAFDNMLEDVCRDRQLIYSRYADDIVVSGQSPDKLDGIERLIAQLLDKALGPTFQINTAKSRMLRVGRKVKILGLNILPSGRITVDREIRDKVETQLHFYLTDRARLMRIIDAEPDEALQKLSGYIGHIHSADPLYLEKLRRKFGATVIDSFLHRSAQ

SEQ ID NO: 4690 - protein, 328 aa, unidentified
  source 1..328: note = Related to LPEM01000032.1; note = Burkholderia cepacia
MTKKPLQILFDAMYHNKQNFEDFANGDIASHFSRKPVTDDSGKTRVVSVPDKVLRKYHSFLNLFVFNQLPVNEEVVFSYRKGTNVAAAVQKHAASKHFYQADFSNFFESITSDIVRHSILRGEDKIPVADIHQYLDRIVDLVTFEGRLPQGFSTSPVISNTALLPFDKDLATYCQNKHLVYTRYSDDITISSNDKEPLFELDHVIAEILSSCGYSEMKLNENKTKISSKGRKIKILGMVILPNGQVSLDAKIKNRIETLLHLYVNNQQGLSDITESDLEDGLAKLSGLLNYANTVDQGYLDKLRRKYGVTVVDILIHQPKKTDAKKAD

SEQ ID NO: 4691 - protein, 328 aa, unidentified
  source 1..328: note = Related to NZ_UWYX01000002.1; note = Burkholderia gladioli
MTKKSLQTLFNAMYHNKQNFEDFATGEIKQHFSKMPVTDASDKARLVFIPDKVLRKYHSFLNLFVFNRLPVYNDAVFSYRKGTNAAAAVRKHSASKHFYQADFSNFFGSITSDIVRRSILHGAEQLPVADLHQYLDRIIDMVTVEGRLPLGFSTSPVISNTALLPFDEDLAIYCRRRQLVYTRYSDDITISSNERESLLELDDAISDILSSRGYSEIKLNEKKTKISSKGRKVKILGMVILPNGQVSLDAKIKNRIETLLHLYVNNQPGLSDVTKSDLGDSFEKLSGLLNYANTVDQTYLDKLRRKYGVTVVDILIHQNKKTDSKKAS

SEQ ID NO: 4692 - protein, 328 aa, unidentified
  source 1..328: note = Related to NZ_BBJH01000023.1; note = Paraburkholderia heleia
MTKKPLRVLFDAMYHNKQNFDDFATGEIDRHFTKKTIKDDAGKERLVFITDRTLRKYHSFLNLFIFNRLPVNEGVVFSYRKGTNAAAAVRMHAGSKHFYQADFSNFFGSITSDIVRQIIINGEDVLPIADTNQYLDRIVDLVTVDGRLPMGYSTSPVISNAALLLFDKELARYCQSKQLVYTRYSDDIIISSDEKEPLMDMSQVIADTLSDCDYYDLRLNEEKTKISSKGRKVKILGMVILPNGQVSLDAKMKNRIETLLHLYVNNQDRLSDATKIDFEDSVVQLSGLLNYANTIDQDYLDKLRRKYGVTVVDILIHQPKKTDSKKAE

SEQ ID NO: 4693 - protein, 328 aa, unidentified
  source 1..328: note = Related to VZQP01000011.1; note = Paraburkholderia sp.
MTKKPLHVLFDAMYHNKQNFEDFAAGQISHRLSSKTVTNESGKTRLICIPDKVLRKYHSFLNLFVFNRLPINEEVVFSYRKGTNVAAAVRKHSAGKHFYQADISNFFGSITSDIVRRSILRGEEQLPVADMHRYLDRIVDLVTVEGRLPQGFSTSPVISNTAMFPFDKELVTYCLKRQLVYTRYSDDITISSQEKEPLLDLDRVIADILCDCAYPEMKLNENKTKISSKGRKVKILGMVILPNGQVSLDSKIKNRIETLLYLYVNNQPGLSDITKSDLGDSFEKLSGLLNYANTVDGNYLDKLRRKYGVTVVDVLIHQPKKTGAKKAN

SEQ ID NO: 4694 - protein, 327 aa, unidentified
  source 1..327: note = Related to NZ_JAAVUQ010000005.1; note = Caballeronia sp.
MTKKPLQILFDAMYHNKQDFADFATGDIIRRVSSKTVTNDSTKERLVFVPDKVLKKYHSFLNLFVFNYLPINEDVVFSYRKGTNVTAAVRKHRNSKHFYQTDISNFFDSITVDIVRRCILRGEEQTPVSDMGEFIDRIVELVTMEGKLPLGFATSPAISNTALLPFDDSLAAYCSHKNLVYTRYSDDITISSSEKEPLFALDDALRDILSAHGFPNMQFNEHKTKISSTGRKIKILGMVILPNGQVTLDSKIKNRIETLLHLYVNNQSALFDLTKSDLDGSYETLSGFLNYANTVDQSYLDKLRRKYGVTVIDTLIHQPKKSESRKG

SEQ ID NO: 4695 - protein, 328 aa, unidentified
  source 1..328: note = Related to NZ_CYGX02000017.1; note = Paraburkholderia ribeironis
MTKKPLQFLFDAMYHNKQSFADFATGDIGRHLSARQITDDAGKKRDVFVPDKVLRKYHSFLNLFVFNYLSVNTAVVFSYRKGTNAADAVRSHASSRHFYQADISSFFPSITADIVRRSILRDEAQTPVEDLGDYLDRIIDLVTIDGTLPIGFSTSPVISNTALLPFDDAFAAHCLRNGLIYTRYSDDITVSSQEKAPLLALDAVIQDLLCRCNLPEMRLNERKTKISSTGRKIKILGMVVLPNGVVTLDAKVKNRIETLLHLYVRNQLALQEVMKADLVESAETLSGLLNYANTVDQGYLDKLRRKYGVTVVDTLVHQPKRTDSKKDK

SEQ ID NO: 4696 - protein, 328 aa, unidentified
  source 1..328: note = Related to NZ_CP045094.1; note = Burkholderia sp.
MNKKPLETLFNAMYHGKQSFQDFATCDVAQRVTRKTISDNSAKERIVYAADKVLAKYHSFLNLFIFNHLPIREDIVFSYRKGTNAADAVKKHVNSRHFYQADIANFFPSISADSIKKAILRGIHQVPVSDVAEYLDRIIDLVTVESALPLGFATSPSISNAALLLFDDALSNVCLEKGLVYTRYSDDITISAQEKESLLGMDATITRLLAECDYPQMHLNDRKTKLTSIGRKIKILGMVILPNGQLTVDSKIRNRVETMLHFYVRNNDALVDLTNTDLDESVDVLGGLVNYINTIDQRYLDKLRRRYGVTVIDTLIHRQKNTDSKRNK

SEQ ID NO: 4697 - protein, 313 aa, unidentified
  source 1..313: note = Related to JAHYBY010000004.1; note = Janthinobacterium sp.
MEQLRNLFDEMFGGELSFDDFLHGDISNRVIKKIDGTRVVYSADQTLRSYHRFLQRHVISYLYLNSDVVYSYRKSFNVADAVRQHAQSKYFFQTDLSNFFNSITSKLIHSTLFKSSERMKFLNSTEYFDRIVILLTANDRLPPGFITSPSISNACLSELDDVFQKFCIHKNLIFTRYCDDVIVSGQSQDDLRIAAQELSNLVEICYKGEFSFNVRKSKFTKIGRKIKLLGMVILPNGLVTIDSSLKKKIEVLLHYYITDSFTFLRMVDNDLGKGTRSLCGYISFVNAVDPTYFLKLCSKYSSAAIENLLRMPK

SEQ ID NO: 4698 - protein, 322 aa, unidentified
  source 1..322: note = Related to NZ_QUBS01000013.1; note = Trinickia diaoshuihuensis
MTKKPLAELFRAMYHGKYDYRDFIGEALSSRYKPLNVGGAQVSKERLVYAPDKTLKIYHSFLNLFLFEYLDVNEEVVFSYRKGVNVVGAVRKHAHNKHFFQADLQDFFLNINSTMVRAVIENVAARTPISDVLDHVDRIIELVTIDGTLPIGFPASPLISNAVLRSFDDRFEDYCALRGMVYTRYSDDLIVSSQNRDELTNLAAVIEEMLQSVGLAQFKLNPEKTKITSVGRKIKLLGLVILPNGVVSVDIKLKQQIETMLHFYITDNAKFRDFSEKDLTKATEQLSGYVNYVNTVDPAYLDKLRKKYGVTVIDTLMHQGSK

SEQ ID NO: 4699 - protein, 322 aa, unidentified
  source 1..322: note = Related to JAJUBG010000007.1; note = Caballeronia sp.
MTKKPLAELFRAMYHGKYEYRDFICEALDARYKPINVGRTQTSKERLVYAPDKTMKIYHSFLKLFLFEYLDVNERVVFSYRKGVNVVEAVKKHAHNKHFFQADIQDFFPSIDSMMVRLVIESAATRTPIADLMDHVDRIIELVTIDGALPIGFPSSPLISNAVLHRFDDSFEEYCVNRGMVYTRYSDDIIVSSQNRDGLNNLATAIENTLKSVDLGHLTLNPEKTKITSIGRKIKLLGLVILPNGTVSVDIKLKQQIETMLHFYITDRAKLRDFLETDLSKATEQLSGYVNYVNTVDPGYLDKLKKKYGVTVIDTLIHQGSR

SEQ ID NO: 4700 - protein, 317 aa, Pseudomonas sp.
  source 1..317: note = Related to JAEKFF010000008.1
MVNRDFKSAFEAMYHGKYDFEDFKSGDISEKFRKLDLNKKNVYEADQTLKIYHKFLNLFVFQWLEFNENCVYSYRKGMNVADAVKKHAHSKHFYQTDLNNFFGSIRSDFVKGSIIASIDRMPITDVLLYVDRIIEICTVSNKLPVGFSTSPLISNACLLHFDNEVERYCEESGLIYTRYSDDIIISGGDKKLYGTGEIIAEVLYRQFEGHLSINSSKTKYSSAGNKLKILGMMILPNGTITIDSKLKADIEVLLHFFTKDKQKFLDKIEADSATALAKVSGYLNYINTTDKVYLNKLRKKYGASVVDMFVRGSVKSL

SEQ ID NO: 4701 - protein, 317 aa, Pseudomonas sp.
  source 1..317: note = Related to NZ_UUGY01000017.1; note = Pseudomonas viridiflava
MANRDFKSAFEAMYHGKYDFEDFKVGDIADKYRKLNLNKKNVYEADQVLKTYHKFLNLFVFQWLSFNEDCVFSYRKGINVADAVKKHSQSKHFYQADLNNFFGSIRSDIVRSCIGASIDKVPISDISLYVDRIVEMCTVADRLAVGFSTSPLISNACLFRFDNEIEHHCHANGLIYTRYSDDIIISGVENKLYGMGDVVESILFQHFNGVLSINLPKTKYSSAGNKVKMLGMMILPNGTVTIDSKLKADIEVLLYFFIKDKQKFLDKIDTDSATALTKLSGYLNYINTTDKIYLDKLRKKYGSSVIDMFVRGSVKSL

SEQ ID NO: 4702 - protein, 306 aa, Pseudomonas sp.
  source 1..306: note = Related to NZ_JABWRD020000002.1; note = Pseudomonas shirazensis
MYHGKHDFEDFKSGEILSKYRALVFKKKKVYEAGADLKVYHKFLSLFVFQWLEFNERCVYSYRKGMNVVDAVKKHANSKHFFQTDLNDFFGSIQGDLVKLCIRGSLDRIPISDASSYIDRVVDLVTVENKLPVGFSTSPLISNACLLPFDNALEAYCNHSGLVYTRYSDDVIISGGDSKLYGIEKVVEYTLAQCYGGDFTINSAKTKFSSAGNKVKILGMMILPNGTITIDTKLKSDIEVMLHFFIKDKQRFMDKVDAEGTAAALAKVSGYLNYINTTDPAYLNKLRKKYGASVVDMFIRGSVKSL

SEQ ID NO: 4703 - protein, 318 aa, Pseudomonas sp.
  source 1..318: note = Related to CP047592.1; note = Pseudomonas aeruginosa
MASRDFKSAFEAMYHGKHDFEDFKSGDVSSKYRTFVFNKKDVYEAGAELKVYHKFLSLFIFQWLEFNERCVYSYRKGMNVVDAVKKHAGSKHFFQTDLNNFFGSISGKLVRECILRSLDRVPISDAGLYIDRIVELVTVEDKLPMGFSTSPSISNACLLPFDNAVEKYCEEQGLVYTRYSDDVIISGGDNKLYGTEKIIESILEELFQREITLNASKTKFSSVGNKLKVLGMMILPNGSITIDTKLKSDIEVMLYFFIKDKHRFIDKVDAEGTAAALAKVSGYLNYINTTDQVYLNKLRKKYGASVVDMFIRGSVKSL

SEQ ID NO: 4704 - protein, 303 aa, Pseudomonas sp.
  source 1..303: note = Related to NZ_JACYNP010000006.1; note = Pseudomonas lutea
MYHGKFDFKHFISWPAAELFKPIQIKDRVVYDADKNLKAYHKFLNLFVFEFLEINTDVVFSYRKGVNVIDAVKKHATSRHFFQTDLKNFFGSISSGMIRRCLEENIANFPVSDIGEHLDRILDLVSVENILPPGFSTSPLISNACLYHFDNKLELLCDSRGLIYTRYSDDILISGSEKKLYGLDVEISAMLETSFGGRFQINRGKSRYNSVGGKVKMLGVVILPNGEITIDTKLKSKIEVLLHFFTSDRAKFNSMLEAEDVNGLLKVSGYLNYINTTDPLYLNKLRSKYGATVIDMFMRGSVK

SEQ ID NO: 4705 - protein, 315 aa, Pseudomonas fluorescens
  source 1..315: note = Related to NZ_CABVHI010000016.1
MAKQKLESVFEAMYHGKFDFKDFISGPTSELYKTIKFKNRTVYNADKKLKAYHKFLNLFLFEFLELNTRVVYSYRKGVNVIDAVKKHATSRHFFQTDLKNFFGSIDLDMIRAAIQENTENFPVSDVNENIERILELVSVSGVLPPGFATSPLISNACLYHFDNLVENFCLNSGLIYTRYSDDIIISGSTNKLYGLDTHIESMLKKTFGEKVLINGSKSKYMSIGGKIKILGVVILPGGGITIDTKLKSKIEVLLHYFTSDRQKFNVMLDDKDVNGLLKVSGYLNYINTTDPAYLNKLRTKYGATVVDMFMRGSVK

SEQ ID NO: 4706 - protein, 315 aa, Pseudomonas sp.
  source 1..315: note = Related to FNTC01000002.1; note = Pseudomonas jessenii
MAKQTLESLFEAMYHGKYDFNDFIEAPLSMLCKKIPLKNRIFYKADEKLRAYHKFINLFISDFLKINTNVVYSYRKGINVVDAVRQHAHSRHFCQVDLKNFFGSIDAALIESCILQNIVNLPASDIATHIGRIVSLVSLDGTLPPGFSTSPPLSNACLFEFDNQVENYCHKKNLIYTRYSDDIIISGSSERLYGLDSIIEEFIKEYFNEKLEINPAKTKYTTVGGKIKLLGLVILPNGEITIDTKLKSKVEVMLHYYLTDRPQFNKILEKDSTKGISTLSGYLNYINTTDPSYLDKLRLKYGATIVDMFIRGSVK

SEQ ID NO: 4707 - protein, 323 aa, Pseudomonas sp.
  source 1..323: note = Related to NZ_CP052862.1
MAKKELSSIFDAMYHGKHDFQDFLAGDITTRYKVTTLKGMELYKTDEKLKAYHKFLNLFVFEFLKVNENVVYSYRKGVNVASAVQKHAGSRHFFQTDLKSFFNSIDSALVRETVKNNFDSIPVSDIDRYLDRIIEMSTVNDMLPIGFSTSPIISNACLQKFDSILEDYCIAQNLIYTRYSDDIILSSSGDTRLYGIDTTVGEMLKECFGEKLNLNFSKTKFSSVGNKIKILGMVILPNGAVTIDSKLKNTIEVLLHFYASDKTKFNDRLESESSKLKGDNSVGLLQISGYLNYVNTTDPHYLNKLRKKYGTSVVDAFIRGTVK

SEQ ID NO: 4708 - protein, 323 aa, Pseudomonas sp.
  source 1..323: note = Related to NZ_LT629777.1; note = Pseudomonas asplenii
MVKKELGSIFEAMYHGKHNFQDFLTGNIEPHYKITTLKGMKIYRPDEKLKAYHKFLNLFVFDFLKINKDVVYSYRKGVNVVSAVKKHANNKHFFQTDLKNFFNSIDKELVRNTIHSNLEHIPISNLDKHLDRILELSTVEDKLPIGFSTSPIISNACLQKFDSVLEDYCASEDLIYTRYSDDIILSSGGNTRLYGIEAKVSEILRECFGGKLNLNPSKTKFSSVGNKIKILGMVILPNGTVTIDSKLKNTIEVLLHFYASDKEKFKDRLASESSKLKGENSIGLLQISGYLNYVNTTDPNYLNKLRKKYGSVVVDAFIRGTVK

SEQ ID NO: 4709 - protein, 322 aa, Pseudomonas sp.
  source 1..322: note = Related to NZ_LT607553.1
MAKKSLSLLFDAMYHGKHDFLDFIEGDVADKYKVAIVKGMEVCKPDDKLKVYHKFLILFVFEFLRVNQDVVFSYRKGVNVASAVQKHAGSRHFFQTDLRSFFRSISRSLVKQTLLNNLDSIPVADLQENLERILDLVTVNGGVPIGFSTSPIISNACLYDFDNQLELYCKAHDLVYTRYSDDIIISGVENKLYGVDGVVGEVLGKCFGEMLSVNVSKTKFSSVGNKIKILGMVILPNGVITIDSKLKNTIEVLLHFYSSDKVKFNDRLETESAKLKGDNSLGLLQISGYLNYVNTTDPAYLNKLRKKYGAAVVDSFIRGSVK

SEQ ID NO: 4710 - protein, 316 aa, unidentified
  source 1..316: note = Related to NZ_CP089507.1; note = Luteimonas sp.
MNKQPLRDLFDAMYHGKHQFADFMSCDVTARATAFQLNERTMYSPDKRLRAYHSFLTLFLFDYFPVESEVAFGYRKGSSAYDAVSPHARSRHFFQADITSFFGSLDSGVVANVIDEHKERSPIEDVEKYTARVRSLVLLNGSLPMGFSTSPVLSNACLYKFDRALRERCQTAGLHFTRYADDLIISSGDLELTRSAKAIVEEVLLHEFDGKLQLNAEKTKLTSIGRKVKILGMVILPNGRITVDQRTKDRIEVLIHFYRVDQERFLALVKNDRAGGLEHLAGLVSYVNTVDQEYLGKLRRKFGVTIVDSLLHKTIL

SEQ ID NO: 4711 - protein, 318 aa, Pseudomonas sp.
  source 1..318: note = Related to NZ_QPDS01000008.1; note = Pseudomonas cichorii
MNRRPLEQLFFATFRGKQELNELLELDVRAAYSEKDFDGRVVYSPDKKLKLYLGFLSRVLFDRLPVEADVVFSYRKGVNVVNAVEKHSEGKYFFQSDIKNFFGSIDREMIRRSVLAALELCPISDIEHWLDRVLDLVTVDGVLPPGFPTSPVISNACLYEFDKKFLSWCKQNSLTYTRYADDLIVSGGVEEKMHLLIPCITQLLDTEFGGRIKLNTQKTKFIRPGEKVRMLGVAILPNGKVSVDGRLKKHSETAMHCLLKDKQIFTSFLKEKDFEKALKKFSGQLNYINTVDPSFLDKLRRKYGATAVDKIVHISVGS

SEQ ID NO: 4712 - protein, 318 aa, Pseudomonas sp.
  source 1..318: note = Related to NZ_JACVHC010000006.1; note = Pseudomonas anatoliensis
MNKRPLEQLFFAMFRDKQRFADFLEIDVNSAYTKKDYDGRVVYSPDKLLKQYLGFLSRVLFDRLPVESDVVFSYRKGVNVVNAVEKHSANRYFLQSDIENFFGSISRSTIRKSILSALDTCPISDIEQWLERILDMVTVNDVLPPGYPTSPSISNACLYSFDKRFLDWCKKNNFIYSRYADDLIISGGGEDEMHLIAPKIIELLNCEFEGQIKLNTGKTKFLRPGEKIRILGVAILPNGKVSVDGRLKKHSETAMYCLLNDKDKFISFLKESDFDKALKKFSGQLNYINTVDPSFLDKLRRKYGATAVDRVIHVSVGS

SEQ ID NO: 4713 - protein, 318 aa, Pseudomonas sp.
  source 1..318: note = Related to NZ_CP023969.1
MNRRPLEQLFFATFRGKQDFADFSNLVVNEAYSKKEFDGRTVYSPGKALKLYLGFLSRVLFDRLPIEKDVVFSYRKGVNVVDAVEKHSGNKYFFQSDIANFFGSITNKMIARSVLAAVDQCPISDIEAWLDRVLELVTVDGVLPPGYPTSPAISNACLYKFDRVFLAWCHDNSLTYTRYADDLIVSGESEDLMHQACKKVIEFLYAEFGGDLKLNPKKTRFIKPGDKVRILGVSILPNGKVSVDGKLKKDSETAMHFLIKDKKMFTSFLKEPDLERALKKFSGQLNYINTVDPSFLDKMRKKYGAAAVDKMIHVSVAS

SEQ ID NO: 4714 - protein, 318 aa, Pseudomonas sp.
  source 1..318: note = Related to RHQR01000004.1
MNKRPLDQLFFATFRGSLDFSEFASLNVSQAYSRIEFEGRAVFSPGKTLKNYLSFLSRVLFDRLPVEKDVVYSYRKGVNVVNAVEKHANNKFFFQSDIENFFGNITKEIIKKTILSAIDQCPITDIETWIERILDLVTVEGALPPGYPTSPAISNACLLSFDKRLLAWCNEHSLTYTRYADDIIVSGTNDIWMNSLSYKVTELLNEEFNNFIKLNPQKTKIIRPGEKIKILGIAILPNGKVSVDGKLKKRTETAMHLLLKDKKMFQSFFKEADLDKALKKFSGQLNYINTVDPSFLDKLRKKYGTATVDKIIHISVAS

SEQ ID NO: 4715 - protein, 318 aa, Pseudomonas sp.
  source 1..318: note = Related to JAEKED010000001.1
MNRRPLEQLFYATFRGKQEFADFSKVNVNTAYSKKDFDGRSIYIPDKTLKLYLGFLSRVLFDRLPVAKEVVFSYRKGVNVVDAVEKHSENKYFFQSDIENFFGSINRELISNTILAAVELCPIADIEDWLDRIMELVTVDGVLPPGYPTSPAISNACLYAFDKKFIGWCDSNSLTYTRYADDIIVSGKSEEQMHLLIPKITELLDAEFGKGMKLNSNKTKFIRPGEKVRILGVAILPNGKVSVDGRLKKHSETAMHLLLKDKKMFASFLKEEDVEKSLKKFSGQLNYINTVDPSFLDKLRKKYGAAAVDKIIHISVAS

SEQ ID NO: 4716 - protein, 318 aa, Pseudomonas sp.
  source 1..318: note = Related to LIHT01000076.1; note = Pseudomonas syringae
MIKRPLEQLFFATFRGKQDFQDFIKLDLAASSIKKNFEGRSVYAPEPKLKLYLGFLSRVLFDRLPLAEQVVYSYRKGVNVVNAVEKHSSSKYFFQTDIESFFGSINREMIRRSILWSLDFCPISDIDIWIDRILDIVTVDGLLPPGFPTSPAISNCCLVKFDEEFLSWCDSQGFIYTRYADDLIVSSKVDPGVDLLISKITEILNKMFDGDFKLNLNKTRVVRPGSKVKLLGVVILPNGKVSIDGNLKKNAETAMYHLLKNKEKFVSFLKEQELDRALQKFSGQLNYINTVDPDFLDKLRRKYGATAVDKIIHVSVAV

SEQ ID NO: 4717 - protein, 317 aa, Pseudomonas sp.
  source 1..317: note = Related to PGRY01000001.1
MIKRPLEQLFFATFRGKQDFAHFSSLDLSEMYEAKKFDGRTVYSPNRTLKSYLTFLSRILFGRLPVAEDIVYSYRKGVNVVNAVEKHAHNKYFVQTDIKNFFQSINRQQIKQTIEDSEHTCPISDLNESLERILDIVTIDGVLPPGYPTSPAISNACLYKFDQELASVCKEEKIIYSRYADDLIFSANAISVTESIIPKATKILDEVFMGHLKINESKTKVTLPGQKIRILGVSILPNGKVTIDGKLKKNIETCIYYFLRDKSVFIKLMKEADNEKSTKKISGQLNYINTVDPSFLDKLRKKYGIATIDQLLHYSAE

SEQ ID NO: 4718 - protein, 324 aa, Pseudomonas sp.
  source 1..324: note = Related to NZ_LDSV01000038.1; note = Pseudomonas psychrotolerans
MIKRPLDVLFSAMYRGKLSFDNMKAASADQMFESFTVSGREVVRPNPELKSYLGFLGRVLFNKLPVDVESVFSYRKGVNLLNAVEKHAASKFFLQVDIADFFGSIDSSLIEQTVLRSMDACPISDVEEHLEMIVKLVTVNSSLPAGYPTSPAISNACLYEFDRKFKDICGNRNLIYTRYSDDLIVSGTTSESINGVYGLLQNKLADEFGGKLQVNQSKTKFTRPGQKVKLLGINILPHGAVSVDKKFKKDAEVKLFYYLKDRSIFIKMSGSTNLDKAVKNLSGTINYINTVDSVFLDKLRKKYGSTLVDMFLHRSAKLVDENKI

SEQ ID NO: 4719 - protein, 318 aa, Pseudomonas sp.
  source 1..318: note = Related to CP017149.1; note = Pseudomonas aeruginosa
MKKRPLEDLFFAMYRGKQSFEHFANCSVEGLYEPVMVNGRLVYKTDKDLRAYHRFLNKFLFERLPVVDDVVFSYRKGVNAVDAVEKHAGSKFYFQTDLRDFFSSLTKSDVRRTLEWAKDVCVISDLDVWVERILKLVTIGDSLPMGFSTSPAISNACLYSLDGILKTHCLSNGVIYTRYADDLIFSSSNKQALDPLFGVVCRTLQSEFSGRMGINSQKTKYLRKGGKIKLLGLNVLPNGRVTVDMRHKKEIEVRLFYYVKDRARFLKIMGEVDDEKAIKKFSGLINYVNTVDPAYLDKLRKKYGLTIVDMFIHKSPKL

SEQ ID NO: 4720 - protein, 317 aa, unidentified
  source 1..317: note = Related to JAHTGR010000011.1; note = Duganella sp.
MNAKPLKILFEAMYHGKYDFQDFLQGDICSDFDMFTVGERTIYRPNKKLKTYHSFINLFVLEKFPVNAEVVFSYRKGVNVYDAVSKHAFSKHFFQTDISKFFPSIGVDLVRDTFLQNKNCTPVSDFDTCIERIVELVMVDGFLPVGFSTSPLISNVCLFGFDNLVQKYCSENGIIYTRYSDDLIFSSLEKSKLIGIFEFLQRTMLDLFGGLISLNISKTKFTHAGSKIKLLGMVILPNGKVSVDKKFKDNIEVLLHFYVKNRTKFFNLVESDLKGGMEKISGYLSYVNTVDKDYLNKLRKKYGMTVVDMFLHYTPKK

SEQ ID NO: 4721 - protein, 317 aa, Pseudomonas sp.
  source 1..317: note = Related to LIRD01000002.1
MNKRPLKELLAAMHQGKFEFPELDTGDVSDLYEKKIYNDREIYIPNKRLKTFHSFLSLFLLEYLHTNNEVVFSYRKGVNAVDAVSKHTSSKYFFQTDITNFFNSIDADLVTSTILNSIETCPISDIQSHITNIVKILTINNSVPVGFSTSPLLSNACLFNFDNELQKYCIENKLILSRYSDDIIISSLEKAPILEAEIYVERLLSKHTNNKLSINTKKSKHTQTGNKIKLLGMVILPNGKVSVDIKFKKDTEVKLHFYLTNKEKFNEISGPDLDSAIEKMSGQLNYYNTIDPSYLDKLRKKYGATIVDMFLHKSDKL

SEQ ID NO: 4722 - protein, 317 aa, Pseudomonas sp.
  source 1..317: note = Related to NZ_MUNM01000090.1
MKKRSLKDLLDAMYQGKFEFPELDTGDISTLYETKNYNDRELHIPNKKLKTFHSFLNLFLLEYLQTNKEIVFSYRKGVNAVDAVSKHAHSKYFFQTDITNFFNSIDADLVTSTIINSADRCPISDIDNHITNIVKTLTVNGSVPVGFSTSPPLSNACLFNFDNKLQKYCLDNSLTFSRYSDDIIISSLDKTPLLEAEKYVAQCLSKHTDNKLSINTTKSKHTQTGNKIKLLGMVILPNGKVSIDIKFKKDTEVKLHYYLTNKEKFTAITGPDFDNAIEKISGQLNYFNTVDQDYLDKLRKKYGATIVDMFLHKSDKL

SEQ ID NO: 4723 - protein, 317 aa, Pseudomonas sp.
  source 1..317: note = Related to AKJS01000163.1
MKKRPLKELLSAMYQGKFDFPELDTGDISALYETKNYNGRKIHIPNKKLKIFHSFLNLFLLEYLQTNNDIVFSYRKGVNAVDAVSKHAHSKYFFQTDINNFFNSIDIEMVTSTIFNNIGLFPISDIERYIPNIVKILTVNDSVPVGFSTSPLISNACLLSFDNKLQKYCLANSLIYSRYSDDIIISSSEKASLLEAEQRVTTYLAENTNNKLSINLTKSKHTQTGNKIKLLGMVILPNGKVSVDIRFKKEAEVKFHYYLTNKDKFTEVTGSDFDSAIEKFSGQLNYINTVDPSYLDKLRKKYGATIVDMFLHKSDKL

SEQ ID NO: 4724 - protein, 317 aa, Pseudomonas sp.
  source 1..317: note = Related to NZ_FYEA01000001.1
MNKRPLIDLLTAMHQGKFNFPELGTGNINDLYETKIYNNREIHIPNKKLKTFHSFLKLFLLEHLSTNEEVVFSYRKGVNAVDAVSKHSNSKYFFQTDINDFFNSIDEELVKTTIIRDIEKCPISDINLHIDNIIKTLTIKNSVPVGFSTSPLLSNSCLFIFDNSLKEYCDKNSLTLSRYSDDIIVSGKKKEPILEAERYIAQLLSDTTKNKLSLNIKKSKHTQTGNKIKLLGMVILPNGKVTIDIKFKKDTEVKLHYYLTNKEKFIEIVDSDIETAIEKLSGHLNYYNTVDPSYLDKLRKKYGATTVDMFLHKSDRL

SEQ ID NO: 4725 - protein, 317 aa, Pseudomonas sp.
  source 1..317: note = Related to NZ_CP062253.1; note = Pseudomonas gozinkensis
MNKRPLKELLVAMHQGKFEFPELDTGDITSLYETKKYNDREVHVPNKKLRTFHSFIKLILLDHLDTNEDVVFSYRKGVNAVDAVSKHSRSKYFFQTDIKNFFNSIDEDMVKETILKNIEQCPISDIQDHIEKIVKTLTVNNSVPVGFSTSPTLSNACLFTFDNTLQEYCKSNSLVFSRYSDDIIISSMEKNSIFEAEKYISQKLSEITKNKLSINDAKSKHTQTGNKIKLLGMVILPNGKVSIDIKFKQDTEIKLHYYLTNKETFKKIVGSDFDGAIEKISGHLNYYNTVDPSYLDKLRKKYGTTTVDMFLHKSDKL

SEQ ID NO: 4726 - protein, 317 aa, Pseudomonas sp.
  source 1..317: note = Related to NZ_CP077087.1; note = Pseudomonas monsensis
MNKRPLKDLLNAMYQGKFEFPELETGEISSLYETKKINDREIHIPNKRLKTFHSFLRFFLLEHLKTNNDVVFSYRKGVNTVDAVSKHAHSKYFFQTDIRNFFNSIDTELVISTIENNLTNTPIEDIQLYIEKITKTLTVNNFVPVGFSTSPPLSNACLFDFDNKLQKYCLEQKLIYSRYSDDIIISSREKQAILDIDEYISQTLQTTTKGKLTINTSKNKHTQTGNKIKLLGMVILPNGKVSIDRKFKKDTEVKLHYYLSDKKKFYELTGPDTNNAITKISGQLNYYNTIDPSYLDKLRKKYGATIVDMFLHKSDKL

SEQ ID NO: 4727 - protein, 318 aa, unidentified
  source 1..318: note = Related to NZ_MPIO01000005.1; note = Atopomonas hussainii
MKTKPCALLFEAMYHGKYDFQDFIQSDISNYFDVIYVKDRKIQKPNRKLKAYHSFLNLFLFEYLRTNERVVFSYRKGVNAYDAVSAHANNKHFYQTDISDFFSSIDSQLIKETIIASAELSPIEDLNEHLERVLSLVTVDGRLPMGFSTSPLISNACLYKFDAALEEYSISRHLTYTRYADDLIISSKNREDLEGIQEKISELLLKTFNGRLSLNHSKSKLTHTGRKVKILGMVILPTGKVSVDIKFKNKVEVLLHFYMKDREKFLDKVDGDMRGGMEKISGYLNYINTVDKSYLDKLRKKFGGTIVDMFLHLPTKKP

SEQ ID NO: 4728 - protein, 317 aa, Pseudomonas sp.
  source 1..317: note = Related to NZ_JAHSTU010000002.1; note = Pseudomonas azerbaijanoccidens
MIKKPLKTLFDAMYHGKYEFVDFAQCDVSLCYERVKFKKREVIRPNKRLKVYHSFLILFLLEYLKVDDEVVYSYRKGVNTYDAVSKHAASSYFFQTDLSNFFKSIDVEMVRAVINEGISRAPILDGEDYIDRIIELVTVDGSLPVGFPSSPVISNSCLYAFDEKLKSYCRQRGLIYTRYSDDIIVSGKDKDELLGVKESITAFLNDCFQGKLSINHGKSKFTHTGNKIKLLGMVILPNQKVTVDIKFKKDLEVMLHFYINDREKFLDKVGGGYREGVEKITGYMNYVNTVDKDYLNKLRKKYGATVVDTLIHHPTKK

SEQ ID NO: 4729 - protein, 317 aa, Pseudomonas sp.
  source 1..317: note = Related to SCFF01000003.1
MTKKPLKDLFDAMYHGKLDFTDFAECDVSLCYERTRIKNREVVRPNKKLKTYHSFLNLFLFEYLKIDEEVVFSYRKGVNAYDAVAKHSGSSCFFQTDLTDFFKSIDARLVKDVIGDSLHLAPILDADNYIDRIVELVVVDGALPVGFPSSPLISNSCLYGFDKKLKSYCDKRNLIYTRYSDDIIISGGSRDALLGIKESVAGLLDECFQGKLSVNCDKSKFTHSGNKIKLLGMVILPNQKVTVDIKFKKELEVMLHFYINDRERFVDKVGGDFRVGVEKITGYMNYVNTIDKDYLNKLRKKYGSTVVDTLIHHPSKK

SEQ ID NO: 4730 - protein, 318 aa, Pseudomonas sp.
  source 1..318: note = Related to NZ_CP039631.3; note = Pseudomonas veronii
MTRKPLKILFDAMYHGKFEFEDFAEGNVSRNYERIKLKNREIFRPNKKLKTYHSFLNLFLFEYLEIASDVVFSYRKGVNAYDAVSKHSANSYFFQTDISGFFTSIDSTLVKKTIAESMHLSPILDIEEYLERIVDLVTVNGILPIGFPSSXPLISNACLYGFDKELSSYCKSKDLIFTRYSDDIIISSLSRDSLSNIKDDVAGILHDCFEGKLSINESKSKFTHTGNKVKLLGMVILPNKKVTVDIKFKKELEVMLHFYATDREKFLDKVGGSYSEGIEKITGYMNYVNTVDKDYLDKLRKKYGATVVDILIHHPARK

SEQ ID NO: 4731 - protein, 329 aa, unidentified
  source 1..329: note = Related to JADMKF010000239.1; note = Aquabacterium sp.
MSTTQTHSLPRRQPVEVLFNAMYHGKWRFADFAGASVEANISSKTFTQAGKTRNLLVPSEKLKSFHDFLRLFLLDFLPLNNNVVFSYRKGLSAYDAVAQHAASKSFFVCDIADFFPSIRRPRVKSTLLTAKDLCPIQDLDTWLDRIVDLVCVGNSLPVGFSTSPAISNAVLMAFDNALQTYCTSKELVLTRYSDDIIVSAQDSASLKGIQEQVAASLQDAMKGEFSLHPGKSRFLHSGSKIKLLGMVLLPNGAVSVDASVKSEIEVLIHFYLRDRDKFADRVEGDQRKAEARLSGLLNYVNTIDKAYLDKLRKKFGVTVVDYFLHRSFS

SEQ ID NO: 4732 - protein, 330 aa, unidentified
  source 1..330: note = Related to NZ_FOKN01000013.1; note = Delftia tsuruhatensis
MSTQPTPQFSIKKQRIDVLFEAMFHGKWSFGDFVSASVQTNTISKSFTHGGRTRNLLVPSEKLKSFHEFLRLFLLDFLPFNEDVVFSYRKGMSAYDAVIKHAASKSFFVCDIANFFPSIKRDRIRTALLRAKECCPIEDLESVIERILDLVCTDSGLPQGFSTSPVISNSVLLDFDNAFHAYALGEGLEFTRYSDDIIISSRNSEAIQGIEAIVSHCLHDTMGGDFSLHYGKSRLLHSGVKIKLLGMVLLPNGKVSVDANVKDEIEVLIHFYLHDRSKFADKVDGDTRKAEARLSGLINYVNTIDQSYLDKLRRKFGVTVVDYFLHRSFS

SEQ ID NO: 4733 - protein, 330 aa, unidentified
  source 1..330: note = Related to NZ_SZVI01000009.1; note = Rhodoferax sp.
MSTPISPLPASPKQPIEALFNAMYHGKKSFSDFANLSIDENFTRKSINRSGKTRELLKPSDKLKGCHEFLRLFLLDFLPLNDEIVFSYRKGSNAYDAVARHAKSKSFFVCDIEHFFPSLKRTRVKSTIATARDSCPIEDIDTWLERIVDLVCVDDALPMGFSTSPNISNAALLPFDNALQSYCESRNLILTRYSDDLIISGENFASLDGIEAQVATHLQETMNGELNLHPKKSKFLHGGVKIKLLGMVLLPNGTISVDAGVKEEIEILIHFYLRDKSKFADRVEGGLQKAEARLSGLLNYVNTVDQAYLDKLRKKFGTTVVDFFLHRSFS

SEQ ID NO: 4734 - protein, 328 aa, unidentified
  source 1..328: note = Related to NZ_BADL01000521.1; note = Ideonella sp.
MSIAASPTTAKRPMADLFRAVYHDKRDFRDLIEMDVLLNCKREQYTKAGQVRAILVPNDVLAGCLEFVRLFVVDYLPINEDVVYSYRRGMSAFDAVARHRDGKHFLVCDISHFFPSLNRGRVRLTIDQGNDRTPIADFGHWLDRFVDLVCPESSLPVGFSTSPGISNAALKPFDDAMSIVCESRGLTLTRYSDDIIVSGQSKDALDGIEQIVAGTLQQVLPGEFTLNRAKTKRMHRGTKVKLLGMVLLPDGGVSVDAAVKDEIEVLLHFHSRNRSRFLERVGNDLAKGERRLSGLINYVNTIDKAYLDKLRRKFGAASVDYFLHRSFS

SEQ ID NO: 4735 - protein, 327 aa, unidentified
  source 1..327: note = Related to JACUZW010000001.1; note = Comamonas sp.
MSTPLKTVAKRPLEDLFNAVYHDKYRFQDLAQLDVLLNCKREQYTKAGHTRAILAPNEILAACLDFTRLFVVDFLPINEDVVYSYRKGMSALDAVVCHKDSKYFFVCDISHFFPSITWERVGLTLAQAKDRTPISDFDLWLDRFVHLVCPETGLPVGFSTSPGISNSALKPFDDAMKRNCDDRSLRITRYSDDIIVSAKTKEPLHEIEKLIEGTLQETFSNDFTLNQSKSKHLHRGTKVKLLGMVLLPDGSVSVDASIKDEIEVLLHFHATNRSRFVEYVGHSLTKGERRLSGLINYVNTIDKAYLDKLRRKFGVATVDYFLHRSFS

SEQ ID NO: 4736 - protein, 329 aa, unidentified
  source 1..329: note = Related to JAEQNE010000002.1; note = Ramlibacter monticola
MGAKTALLPSGPRSLEELFTAMYRGKRKVSEFASLNVAASCTRKSFTHKGRTRGIVIPSDKLRGCHEFIRLFLLDFLPVEIDLVFSYRKGVGAFDAVKQHASSRHFFVTDIADFFPSIKRDRVLSIIQTGRGISPISDLDAWMERIVELVCLDGELPVGFSTSPAISNAALRPFDQAMRKECGALGLVYTRYSDDLVISGGDAGVVERAQAFCECHLREAMHGEFQLRPEKSKFLHVGRKIKLLGMVLLPNGRISIDGATKSEIEVLLHFYLRDRAKFAAMGEGDERKVEARLAGLLNYANTVDQSYLDKLRHKFGAAPIDLFIHRSFG

SEQ ID NO: 4737 - protein, 308 aa, unidentified
  source 1..308: note = Related to CP039287.1; note = Cupriavidus necator
MYHSKRSFDDFARGPVAQKYVRHRFCKQGKTREVLSPDDKLRAYHEFLRLFLLDFLPQNEEVVFSYRKGVSAYDAVSRHAQSKFFFVCDIADFFPSLKRHRIRQTILSGKDSSPVADLDQWLERILDLVSVDDCLPMGFSTSPTISNAALLPFDNAVQWYCASRGLIYTRYSDDMVVSAKEFASLDGIEETLGAFFVEYMDGDLALHPGKSKLLRTGSKIRLLGMVLLPNGTISVDASIKSEIEVLIHFYIKDRAKFADRADGDAQKVEARLAGLLNYANTVDQSYLQKLRKKFGAAVVDLFLHRSFG

SEQ ID NO: 4738 - protein, 322 aa, unidentified
  source 1..322: note = Related to CP035708.1; note = Sphaerotilus natans
MPIVKKPLKTLFEAMFHGKRSFADFMREASEDDLGRTHIRQGAKRRELVSPSERLRAYHSFLRLFLVDFLPVHEKSVFSYRKGVSARAAVEQHAPSRHFFVTDIESFFPSLTRGIVRETITNAMAEIPIADLSDHLEHVLDLLCVDDAVPIGFSTSPGLSNAALYPFDAAFHARCQQLGVIYTRYADDIVLSSGERSAVQEGEVALNELLDRMFRGELRLHRGKSKYLHVGGKIKLLGMVLLPNRTISVDTSVKDEIETMLHLYLRDRERFNKMLEVGSAKTEARLAGLLNYVNTVDQSYLEKLRRKYGAAVVDMFLHRSFG

SEQ ID NO: 4739 - protein, 313 aa, unidentified
  source 1..313: note = Related to NZ_JPOQ01000093.1; note = Proposed Ferrovum myxofaciens
MLFEAMFHGKRDFTDFMRKVSEDDFGRAHLRQGTKQRVLINPSERLRAYHNFLRLFLVDFLPVHEEAVFSYRKGVSARAAVEQHALSRYFFVTDIESFFPSITRDIVRKTITSAMAEIPIADLSDHLEHVLDLLCVDDALPIGFSTSPSLSNAVLYPFDIVFHARCQELGAIYTRYADDIILSSGERATVESGEGSLNDHLDRMFEGGLRLHRGKSKYLHRGEKIKLLGMALLPNGTISVDTSIKDKIETMLHLYLRDREKFNTMLDAGTAKTEARLAGLLNYVNTVDQLYLEKLRRKYGAAVVDMFLHRSFG

SEQ ID NO: 4740 - protein, 311 aa, unidentified
  source 1..311: note = Related to JACORU010000006.1; note = Ramlibacter sp.
MFHGKQKFADFIGADVTSLYTTTTPRIGSKRRTLHMPSDKLRAYHEFLNLFVFEFLPVNTGVAFAYRKGVSAADAVRIHKHGRHFLVSDLADFFPSIDVSLVRATLVGGAMASPVEGLESNLDRILQLVCIDDALPLGFSTSPVLSNAVLFAFDTALQKECESRSLVYSRYSDDLIISGSDRDEVHGAGQIVEGLLREHFGEKLRLNPFKSKSLHVGSKVRLLGVVLLPNGKVTVDAKLRANIEVLLHFYLKDRAKFADFAKKVTGEPDKAEARLSGWINYINAVDQEYLDKLRMKYGSALVDRFVHRSFG

SEQ ID NO: 4741 - protein, 348 aa, unidentified
  source 1..348: note = Related to VSWE01000008.1; note = Herbaspirillum sp.
MQYSPVLYERQHILTMTKQPLQKLFDAMYHGKYSFEDFLQSPVEKNYEVIAPTEPGGRRLFKPKENLKTYHRFLNLFLFEFLPVNDRVVFSYRKGFSALHAVQKHAKSKFFYQTDIQAFFDSIDRALTEKAILSGQANCPISDLDIHLDRIVDLVCIDNSLPVGLPASAPLSNAVLLDFDNELERSCLERELCYSRYADDIIISGHRQVDVQEIGQSVQEKLHQFSSKNFSIHEGKTRYFHVGGKIKILGMTILPNGKISIDSKKKKDLEVLLFFYLNDKERFRKIVNQAKNRTETSRELSDDDYVAYLSGTINHVDSIDPDYTDKLRRKFGTATIDALKHSGFSKEK

SEQ ID NO: 4742 - protein, 333 aa, unidentified
  source 1..333: note = Related to NZ_KV880769.1; note = Herbaspirillum camelliae
MTKQPLQKLFDAMYHGKHSFEDFLQSPVEKNYEVIGTSDFGGRKLFKPKENLKLYHRFLNLFLFELLPINERVVFSYRKGFSAVNAVQRHTQSKYFFQTDIQSFFDSIDQALTKRTILAGEPYCPIADLTAHLDRIVDLVCIDDSIPVGLPASAPLSNAVLLNFDNEMERLCQERDLSYSRYADDIIISGQNQGAVQEAGNAVQEKLHQFSSEKFFIHQGKTRFFQVGGKIKILGMLILPNGRISIDTKKKNELEVLLFFYLNDREKFKNIVNQAKQRTDAKRDLVEDDYIAYLSGNINYVDSIDPDYTDKLRRKFGAATIDALKYSGFSKEK

SEQ ID NO: 4743 - protein, 333 aa, unidentified
  source 1..333: note = Related to NZ_SDQC01000001.1; note = Pusillimonas soli
MTKQPLQKLFDAMYHGKFSFHDFLHSPVEQNYEIVGGSTSGSRTLFKPKENLKTYHRFLNLFLFELLPINERVVFSYRKGFSAVNAVQKHTQSKYFFQTDIKAFFGSIDRLLTQKTILAGHEYCPIEDLHEHIDRIVDLVCVGDSIPVGLPASAPLSNAVLVNFDNEIERICKQQGLIYSRYADDIIISGQKHESLLGLKMLVQEKLHQFSSEKFFIHHGKTRFFQVGGKVKILGIMILPTGIISVDTKKKNDLEVLIHFYLNDRGRFKDMVNKTKKRSGADEELSEDDYIAYLSGNINYVDSIDPAYTDKLRRKFGSTTIDILKYSGFAKEK

SEQ ID NO: 4744 - protein, 335 aa, Chromobacterium sp.
  source 1..335: note = Related to JAGKRE010000004.1; note = Chromobacterium violaceum
MNKEPLQKLFDAMYHGKIRFEDFLYSPMEQNYEQGLPNHNGRRRILKPRENLKTFHKFLNLFLFELLPINERVVYSYRKGFSAVNAVEKHRDGKFFFQTDISAFFESIDVSLAKRVILSGAEFTPISDVDSYIDRIIDLVFVNDSLPVGFPVSAPLSNAVLFDFDNVMESYCLNKGLVYTRYSDDIVISGNEREWYNGVDDFVQRSLHESASDRFYINRKKTRFFQVGNRLSILGVMILPNGKVSPDTRKRREIEVLLHFYLTDKDKFKKMIAEKRVKSGKISKIDDGVSDDECLDVLSGNLNYIDSIDPDYTNKLRRKFGVATIDMLKHRGFSK

SEQ ID NO: 4745 - protein, 332 aa, unidentified
  source 1..332: note = Related to NZ_JAGSPN010000010.1; note = Undibacterium luofuense
MMEKQPLRALFNAMYHEKFNFDDFLTYSVSDSYEISSKEKLFERKFKKPKDMVKNYHRFLNLFVFDYLETNPRVVFSYKKGLSALNAVERHSLSKFFFQTDISSFFESIDKKLIRETIVAGCSACPVSDIDLYIDRIVDIVCIDNALPVGLPCSAPISNAVLLLFDNEIEKICAQRNLIYTRYSDDIIISGMERSSLDGIDKQVRGSLEVIYNNKFSINIAKTKFFKVGNKISILGVNILPNGKVTPDKSKKEELEILLHFYLTDRDKFISRASEMKRGNKNTLSEEDCLNLLGGNLNYVDSIDKDYTDKLRRKFGVVTIDKLIHRGFPVKK

SEQ ID NO: 4746 - protein, 323 aa, Vibrio parahaemolyticus
  source 1..323: note = Related to NNGJ01000068.1
MKKHTLERLFDMITHGKYDFSDFLHCNLDDEVKIFEISSKKLSSQSRIVYSASAKLKDFHSFLNMVVFEQLSSNEDVVYSYRKGVNALDAVIDHRNSKYFFQTDIRKFFPSIDRELIAKTINRNKERIPVSDFDNYFDRVLDMVCYGGSLTTGFSTSPLISNSVLIEFDDYFYKYCKSNHLVYTRYSDDLIVSSSKPFEIDIESTIIEKLDKLYRGNFGINKNKSRYSHIGQKVKLLGMVILPNGDITIDRKQKKEIEVLLHYYKEDKKRFDELIDGDYLKGMARISGILNYIKMIDEEYLNKLMKKYGVTLIDTLIRKAASK

SEQ ID NO: 4747 - protein, 323 aa, unidentified
  source 1..323: note = Related to MAJX01000042.1; note = Aliivibrio fischeri
MKKHTLERLFDIIMHGKYNFSDFLFCKLDDEVQVFEIGSKKLSSQSRIVYSSSTKLKDFHNFLNMVVFEQLPSNNNVVYSYRKGVNILDAVIDHRNSKYFFQTDIRKFFPSIDKKLVSETIKKNKEKIPVSDFDKYSDRVLDMVCHGDHLTTGFATSPLISNSVLIEFDDYFYNYCKNNHLVYTRYSDDLIISSNNPFKEDIELLITKSLDEIYQGSFSINKSKSRYSHIGQKVKLLGMVILPNGDITIDRKQKKEIEVLLHYYKEDKNRFNELINDDYQKGMARISGILNYIKMIDEEYLNKLMKKYGVTLIDTLIRKAASK

SEQ ID NO: 4748 - protein, 315 aa, Vibrio sp.
  source 1..315: note = Related to NZ_LNQW01000024.1; note = Vibrio jasicida
MKKSSLEQLFTLILHGKYSFSEFLECDLESELTEMTVRSRTLYSPSNKLKSFHYFINMVIGEQLNINGKVVFSYRKGKNALAAVQVHRKSKYFFQTDIRAFFSSINKQLIKEALLRSRDNIPVLDLDIYLDRIVDMVSVGNSLATGFSTSPLISNSVLVEFDDALVNYCTTNNLIYTRYSDDLIISSQNTIDHSIENVIESFLSQYYSDTFSLNDRKSRYSHIGQRVKILGMVILPNGDITIDRKQKKEIEVLLHFYREDKNKFRELLNDDMDKGFARISGILNYIKVVDEGYLHKLMRKYGVTVIDTLMRKASL

SEQ ID NO: 4749 - protein, 315 aa, Vibrio sp.
  source 1..315: note = Related to CAOA01000134.1; note = Vibrio nigripulchritudo
MKKFPLESLFDIILHGKYKFSEFENCQLNEEVTRIQVRSRTVYSPSSKLKSFHYFLNMVLCEQLALNEFAVFSYRKGISTLDALKFHVSNKYFFQTDITSFYSSITRSIIDRVIEVNKPNLPISDIDKFHKRILDFISYDGILPTGFSTSPLISNSVLIDFDNLFAQYCMNKGLVYTRYSDDIIVSSKNEFDIDVEKVISGFLKELYGDTFNLNSSKSRYSHIGQRIKVLGMVVLPNGDITIDKKQKKEIEVLLHFYREDYSRFRDIIGDDLDKGMARISGILNYIKNIDESYYHKLMSKYGVTTVDILTKKAGN

SEQ ID NO: 4750 - protein, 327 aa, unidentified
  source 1..327: note = Related to NC_018012.1; note = Thiocystis violascens
MTNAVTSGPKMPLESLFRAMYHDKFDFQDFVNGEISRNYERTQYLDREKTREILKPNQKLKTFHTFLNLFLFEHLPVNRDVVFSYRKGVSTYDAVIPHAKSRHFFQADISSFFTNINREMVNKTISFGYDSVPISDIDFYKERILDLVCVGDTLPTGFPTSPTITNAVLRPFDDQLQAYCNSNSAIYTRYSDDIIISALDRELPSDIKDYVTQTLSVITAGRLQLNERKCRHFHIGGKVKILGMLILPNGQISVDSKIRRETETLLYFYVRDKDKFLNKTGLDFDKGMKRVSGFLNYINTIDQRYLEKLRRKYGATVIDMFLHRSFD

SEQ ID NO: 4751 - protein, 316 aa, unidentified
  source 1..316: note = Related to NZ_CP014222.1; note = Janthinobacterium sp.
MKKQSFEHMYNAMFHGKYSFSDFLNCDIDSEYTTINLRDRVIYSSSKKLKDFHKFLNLFIFDFLHISIDSVFSYRKGYNVVDAVQMHKNGKYFFQSDIVDFFPSIHENLVKSTLKHSLESTPILDLDKYLDLIIKLTMINNNLPIGFSTSPLISNAVLLDFDEEILSYCRKKNIQYSRYSDDIIFSAENIEEIIEVPIVVEKCLISHYNNTFKINKSKSKIKHIGGKVKILGMVIMPNGSLTIDSKLKNIIETLLHLYRTDKQKLKEISENDLENGIKKITNYLNYINAVDANYLLKLKKKYGPAIIDYFIHKKRN

SEQ ID NO: 4752 - protein, 316 aa, unidentified
  source 1..316: note = Related to NZ_CP081150.1; note = Deefgea sp.
MKKPDLESAFNSMFHGKYKFSEFINLNTIDEYTIIQHNNRIVYSTTKKLKDFHKFLNLFVFEYLRINEEVVFSYRKGHNVVDAVKIHAKGKYFYQSDIIDFFSCINEQHIDHSLKISLSSIPVSDIEKYAMQVKNLILIDGKLPIGFSTSPPISNSVLFDFDKIIKQHCTLNDIKYSRYSDDIIFSANSLNLLDDIEKITEETLLKTSGNAFHINTKKSKIKSIGEQVKILGMVIMPNGELTVDSKIKNKTEILLHHYRTDKEKFKKISENELEKSILNLGSLLNYINAVDKPYLYKLKKKYGATTIDFFIHKTRG

SEQ ID NO: 4753 - protein, 333 aa, unidentified
  source 1..333: note = Related to JACJDS010000010.1; note = Pseudoalteromonas sp.
MFDENQKRSLREIFISTFHEKMSFQDFIQLDVGSEFQKFNLKRRTLYAPSSKLKRIHRFLNNTIFEFADYNTDVVFSYRKGVNIRDAVEKHAGNNFFFQTDLSNFYSNIHESDVRRALSNQLTNTPVLDIEKYIDKIIELVVFDNHIPAGFSTSPILSNICLFEFDNQLNKYCNEHHLTYTRYSDDLIISSKTDHFSEDIESVVSNLLSEYINAGITINKLKTKLHKKGHNFKMLGFNVLPNGVVTIPSVDKKEIETLLYFYLTDSNKFENYFQSTFCNTEAELGEKSLRELAIGTLSGKLIAFNSMDKQYVSKLRRKYGNTMIDMFIRKSVK

SEQ ID NO: 4754 - protein, 311 aa, unidentified
  source 1..311: note = Related to LAZL01000002.1; note = Catenovulum maritimum
MFKDFMQIDVNGEFQKINLKKRTVYAPTPKLKLLHRFINNTVLEFADYNADVVFSYRKGVSIRNAVEKHSHNNFFFQTDLSNFYGNIHQSEVQTALMNQLKNTPVLDVEKYIQRIVELVIVDDHIPAGFSTSPLLSNICLFSFDNELLKYCQAHDLTYTRYSDDLIISGQTNEFAGDIEPVINNLLAEYVNTGISINKSKTKLHKKGHKFKLLGFSILPNGVVTIPSADKKEIESLLYFYLTDNNKFENHFKNTQNPKDIESYDKSLREHALGTLSGKLIAFNSMDKQYVSKLRRKYGNTVIDMFIRKSVK

SEQ ID NO: 4755 - protein, 333 aa, unidentified
  source 1..333: note = Related to LKDV01000028.1; note = Pseudoalteromonas sp.
MNENNINRNLKDIFNSTFHGKMSFEDFLSLDVQSEYGTIALKKRLVYVPSPKLRLVHRFINKTILEFADCNKNVVYSYRKGVSTRDAVEKHSGHTYIFQTDLTDFFNNIRKSNVVNSLKKQLSSVPIKDINTFIDVIADLVVIDDHIPAGFSTSPLLSNICLFDFDNELEKYCLSNNLKYTRYSDDLIISGSSIDFTTTIEAIIETFLKKNVNNALSINEAKTKIHKIGHNFKILGFNILPNGIVTIPSADKKQVESLLYFFLTDEKKFEDFFLGFTNKIKQGSDDKTVREKAISMLSGKLIAFNAMDKKYIAKLRRKYGNTVIEMFIRKSVT

SEQ ID NO: 4756 - protein, 333 aa, unidentified
  source 1..333: note = Related to NZ_QNQN01000070.1; note = Pseudoalteromonas sp.
MNNESTKRSLKDIFSSTFHDKMSFDDFLRLDVNREFKTINLRKRLVYAPSAKLKQVHRFINKTILEFADCNTNVVFSYRKGVSTRDAVERHSHSNYIFQTDLSKFFNNIHRDDVMTALKSQLSNAPVSDIDLFIEKIVDLVVIDDHIPAGFSTSPLLSNICLFRFDNALEAYCEANELKYTRYSDDLIVSGSLNDFTESIETVIDNLLIEHVNNSLCINKAKTKTHKVGHSFKILGFNILPNGVVTIPSPDKKEVESLLYFFLTDDQKFEDFFKKCADSKTPETDDKTIRERAIGMLSGKLIAFNAMDKQYVAKLRRKYGNTVIDMFIRKSVT

SEQ ID NO: 4757 - protein, 333 aa, Vibrio sp.
  source 1..333: note = Related to JAATOR010000004.1; note = Vibrio diazotrophicus
MDNNDKNRSLEEIFVSTFHDKMSFKEFLSLDINNEYHTIDLRKRVIYAPTPKLKQIHRFINKTILEFADYSKDVVYSYRKGVSVRDAVEKHSNNTIFFQTDFSDFYSSIHAENVKTSLYKQLSNTYISDIEKYIDRILELTVIDNHIPAGFSTSPLLSNICLFDFDQELLKCCNDIGLTYTRYSDDIIISGSDKTFTDDILSIIKDLLGKHVNSEISINDSKTKINKKGHDFKLLGFSILPNGIVTIPSEYKKEVELLLYFYLTDNEKFEDYFKKLNENKKLELEDKTLREHAINSLSGKMIAFNSMDKKYISKLRRKYGNTVIDMFIRKSVK

SEQ ID NO: 4758 - protein, 312 aa, unidentified
  source 1..312: note = Related to SAAR01000301.1; note = Erysipelotrichia bacterium
MSFEEFLRLDVKNEFHRIDLKKRIIYAPSLKLKQIHRFINKTVLEFADYNSDVVFSYRKGVSIRDAVEKHSSNNIFFQTDFSNFYRSIHLSNVESSLNNQLSDTLISDIGFYINRIIELTVVDNHIPAGFATSPLLSNICLFDFDKELLKYCNDNNLTYTRYSDDIIISGVNDVFVESIKDLIKNLLAKYVNKDIHLNDSKTRINKKGHSFKLLGFSILPNGMVTIPSRDKKEVELLLYFYLTDNSKFENYFSTIADNKKLGSGDKSLREYAINSLSGKLIAFNSMDKCYISKLRRKYGNTVIDMFIRKSVK

SEQ ID NO: 4759 - protein, 333 aa, unidentified
  source 1..333: note = Related to NZ_RSEJ01000003.1; note = Photobacterium alginatilyticum
MEANQKRPLIDIFISTFHDKMSFNEFLTLNVSNEFKRIQLNKREVYAPSPKLKTIHRFINKTILEYADYNTEVVFSYRKGISTREAIEKHSASNYFFQTDISNFYNNVRLENIYTSLRKQLNNTPVLDIENYIDNIVNLVVVDEQLPTGFSTSPLLSNICLLDFDNALLKYCKDNFLIYTRYSDDIIISGSDDGFAVEIESIVSNYLNNFVNEKIKINSAKTKFHKRGHDFKLLGFSILPNGIVTIPSSDKKEVESLIYFYLTDNEKFEDLFKKISVNKKLENTEGKPIRDLAISSLSGKLISFNSMDKDYISKLRKKYGNTIIDMFIRKAVK

SEQ ID NO: 4760 - protein, 328 aa, unidentified
  source 1..328: note = Related to JADWMP020000001.1; note = Shewanella sp.
MEKRSLDKVFLSIFHDKFSFNDFIVFDLSSNYKKLMVNNREVFSASKELKYIHKFINSSILAYAKYNKDVVYSYTKGVSIRDAIEKHSGSKFFLQTDISNFYGSLNRDNIEISLRYQIDNFPISDIEDYIDLIVYLTVVEDKLPAGFSTSPLLSNLCLLDFDTALLKYANENKLVYTRYSDDLIISSVNDRLDNDIVLKIESLLCEHVNDSISLNQSKTKFNHIGNSFKLLGLNILPNGTVTIPSSEKKKLETLIYLYFTDKDKFIDFTNNNIKYNKESKERTVVEVGTRYITNKLVAFNSMDPEYVNKLRRKYGNTVIEMFLRQSVN

SEQ ID NO: 4761 - protein, 345 aa, unidentified
  source 1..345: note = Related to CP027188.1; note = Idiomarina sp.
MKHYEEKPQEFVLTSIQKKRSLQEVFLSTFHSQLTFDDFLNLNVAHEYKKVEIQKRVIYIPSYKLKRIHKFLNNTVFNHARFNTDVVFSYRKGISVRDAVTPHAKNKFFFQTDIVSFYQSIKTNDVERALKNQLSDVPISDIDRYIDHIVNLVVVDDHIPAGFATSPVLSNICLVNFDDALLEYCKTQHLTYTRYSDDIIISGEYELEHKVIEIFVTELLKANLGRAAELNIQKTKRYKRGHDFKLLGLNILPNGVVTIPRESKNEIEVMLYLYLTDAKGFDDYVKHTFFSSETDIDSSTLRERGIAKLSGKIISAKSMDNNYISKLRRKYGNTIMEMFIRKSVK

SEQ ID NO: 4762 - protein, 330 aa, unidentified
  source 1..330: note = Related to NZ_JAJEWQ010000006.1; note = Planctobacterium marinum
MPEKRQFIEVFRSTFHEKISQEELITLETENEYKIFQHKSRKTYAPTPKLKNIHRFLNNTVFEYADYNKEVVFSYRKGKSVREAVELHAGSKIFFQTDISNFYGSITRENVEHSLREQLNNVPISDIKEYIPLILKLVVVDNHIPAGFSTSPVLSNICLYEFDNALQVHCENNGLIYSRYSDDIIISGESSEFVDRVTKTTEDLLHKYINTNVSLNPDKTKVHKKGRYFRLLGFTILPDGKITIPSQDKKEIETSLYFYLTDSSKFVDLFTKTNQVALNEVDSVSIRERAIASLSGKLIGVNSMDKNYISKLRGKYGNTVIDMFIRKAAK

SEQ ID NO: 4763 - protein, 333 aa, unidentified
  source 1..333: note = Related to BMQW01000002.1; note = Shewanella ulleungensis
MELSKERRSLEEVFISTFHEKVNFDDFVNFSINKEYKTFEVNRRKIYAPSKKLKQFQRFINSSILEYADYNRDVVYSYRKGVSIRDAVEKHASSNFFYQTDISDFFGSITGDDIMKVINTSLLNVPVSDVLEYKQLLFELMVVDNNLPAGFATSPLLSNITLVDFDNALKKYCDRSNIIYTRYSDDLIISSVNEGFVDNINEVIKSFLHEHMGERFNLNYNKTKVRRKGQKVKILGFTILPNGIITISKSYKEEVESLLYFYLNDTDKFSDYVKNKINPRDNQIGDRTFEEFGISSLSGKLIAISSMDSLYISKLRKKYGNTIIEMFLRKTVN

SEQ ID NO: 4764 - protein, 326 aa, unidentified
  source 1..326: note = Related to CP031769.1; note = Salinimonas sediminis
MKRSFEEIFISTFHNKVSFDEFLTLDIESEFKKIPLQKRTVYAPSSKLKQIHRFLNHAVFEYAEFNKDVVFSYRKGESTRTAVEKHANNRVFYQADIKDFFGSLKKENILHTIEAQLENTPVLDIVDYRDRLLDLTVVDDHIPAGFATSPILSNLCLFEFDNALDNICKKEELTYTRYADDIIISSQTDAFLPEIEEKIQKLLSKKVNPEIFLNLAKRKVQLQGQRIKILGFNILPNGIVTIPNKDKKSVETMLHFFINDEEKFKDYVSKNIKSNSDGEPSLRDIGISSLSGKLISLNSMDKNYISKLKKKYGNTVIDMFIRKSVK

SEQ ID NO: 4765 - protein, 356 aa, Vibrio sp.
  source 1..356: note = Related to DACQGG010000011.1; note = Vibrio vulnificus
MSSTGYAFKIVIHFNLSINIGLALLIKIQKQRTLKEVFKSTFHDKISFKEFINLNLDEEYTISTFKKKKIYSPSDKLKKIHRFINSSILEHADFNREVVYSYLKGSSVRDAVELHSQSQYFFKTDIHNFFGIITTRNIKKSLEEQFSNVPISDIDMYKEFLFKLMVIDDVLPVGFSTSPLLSNICLFEFDNHLQAYCSSNNFKYTRYSDDIVISSNKSFDIEEMSENIQALLSKHVNEGAKLNKSKTKVHSKGERINILGYNILPNDEITISSKDKKETEILLHFYLNDLDKFDDYVTKNIINRFRNSDKKSIRDIGLSSLSGRIIGINTMDKKYLIKLRKKYGNTLIDMLLRKTV

SEQ ID NO: 4766 - protein, 332 aa, unidentified
  source 1..332: note = Related to JAAEYZ010000024.1; note = Vibrionaceae bacterium
MSYIKNQRTLEEVFKSTFHDKITFEDFINIDLNSEYKITIFKNKEIYSPSDKLKKMQRFINGSILEYADFNKDVVYSYLKGNSVRDAVELHSKSQYYFQTDIHNFFGTITGYNVKKSLEEQFSNVPISDLDNYKDFLFNLMVVDGKLPVGFSTSPLLSNICLYNFDNALYKYCESNGFLYTRYSDDIVVSSDSHISIDEISEKIQSLLLIHVNESAKLNKRKTKAHSKGEKINILGYNILPNDEITISSKDKKETEILLHFYLNDLDRFDNYVRNNISPRFRNVDDKSSREIGISSLSGRIIGINAMDRKYLTKLRKKYGNTLIDMFLRKTV

SEQ ID NO: 4767 - protein, 335 aa, Vibrio parahaemolyticus
  source 1..335: note = Related to JWSV02000003.1
MLLLSYIKHRRTLEEVFKSTFHSKLAFEDFIGINICDEYSVSTYKKREIFSPSDKLKKIHRFINGSVLEYADFNRDVVYSYLKGRSVRDAVEVHSKSQFYYQTDIYNFFGSISPSNVKKSIENQFSNVPISDIKDYQGFLFSLFVVDGKLPIGFSTSPLLSNICLRDFDNALNQYCIENSYRYTRYSDDIIISSDNQFCIDKLSKHIQNFLLQYVNENTKINKSKTKVHTKGDKFNILGYNILPNDEVTISSKDKKEAEILLHFYLNDLDKFDDYVRKSIYPRFKTSSDKSMREIGTSSLSGRLIGINAMDKKYLTKLRKKYGNTLIDMFLRKTV

SEQ ID NO: 4768 - protein, 334 aa, unidentified
  source 1..334: note = Related to NZ_LVDX01000004.1; note = Shewanella algae
MENNRNFRTFEEVFNSTFHNRVSFDDFVNGSINTEYSIVKFKNKSIYSPSLNLKKIQRFLNKSILEYALTNERVVFSYRKGASVRDAVEVHSKSKYFFQTDIKNFFGQIKKDVVENIIGTQLGCVPIIDIEEYHDVLLRYLIVDGHVPIGFSTSPIISNLSLFYFDNDLEEYCLKNDFKYTRYADDIIISSTDYEIDLHKTKSLIKSFLLRNNFVGELINDKKTRIQVRNGVIKLLGFNILLDGTVTIPSKDKKEVEIMLNFYLNDKSKFDDYVSKLKTRSGRLNEGKSLRENGISSLSGRIIGINAMDKKYIGKLKSKYGNAVIEMFLRKTVK

SEQ ID NO: 4769 - protein, 335 aa, Vibrio sp.
  source 1..335: note = Related to NZ_CP091185.1; note = Vibrio anguillarum
MENIEQKRSLEEVFNSTFHSKLPFSALTELTIDSEFKHKIFNNRDIYLPTDKLKKIHRFVNGSILEYAEINRNVVFSYRKGVSIRDAVEKHTCNKFFFQTDIKNFYGSISKKNISDIFDHRFDMVPISDLDNYRKKLLDLMVINDQLPAGFSTSPMLSNICLFDFDNELEQYCNESHLTYTRYSDDIIISSSEKENLTDLSEFIQSLLYKHVNKETLINDNKTKIVKHGSNVKILGFSILPNGELTISSKDKKEIEILLHFFLNDAEKFNNYIESKLSFKHDDSSDRNAYDSALSSLCGRIVALNSMDKKYLDKLRRKYGNTLIEMFLRKTVLKN

SEQ ID NO: 4770 - protein, 333 aa, Vibrio sp.
  source 1..333: note = Related to AAXNPA010000001.1; note = Vibrio cholerae
MNIANYNRTLEEVFKSIFHDKLKFEEFLKLDVKNEYQVFDIKGRKVYSPSKKLKKIHRFINGSIFEYADYNKNVVYSYLKGVSVRDAIEKHAKNNYFYRTDIKDFFGSITGENVIRSLENQLGNVPISDISNYVNHIFNLVVVNGRLPAGFSTSPILSNICLFSFDKELEVTCQRDDMVYTRYSDDMIISSINEIDEEKITGLIQSLLFRFVGDNVFLNDKKTKIHKKGTQGTLLGFNILPNGEVTIPSRDKKEIEILLHFYLSNSDSFVNYVSKNIQPRYANSDNKTLNEIGVSYLSGKLIGINAMDKKYLTKLRCKYGNTLIEMFLRKTVL

SEQ ID NO: 4771 - protein, 333 aa, unidentified
  source 1..333: note = Related to JABXGE010000012.1; note = Raoultella terrigena
MDRTNNNRTLEEVFTSIFHDKLKFKEFLELNITKEYEVFEVKGRRLYSPTKKLKQIHRFINGSIFEYAEYNKNVVFSYLKGVSIRDAIEKHALNQYFYQTDIRDFFGSINGENINHSLSSQLDNTPISDISDYINLIYNIVVIDQKLPVGFSTSPILSNICLFNFDNELEKICISNNMTYTRYSDDIIISSGNEINELETTSIIQSLLFNFVNNEFIVNDKKTKTYKKGSGNSLLGFNILPNGYVTIPSKDKKEVEILLHFYLTSPKSFEDYIIKNIVNRYKNQEGKSIDEIGKSFLSGKLIGINAMDKKYLTKLRGKYGNTLIEMFLRKTVL

SEQ ID NO: 4772 - protein, 328 aa, unidentified
  source 1..328: note = Related to NZ_CP034660.1; note = Colwellia sp.
MSEKRSLEDIFLSTFHNKYSFKEFIELDISKEYEIFNINDRTIYSPSAKLKAFHRFIISCILEYAEFNKDVVFSYRKGTTIRDAVERHSNNSFFFQTDIKSFFTSISTNDVKSTLLHQLVDIPVSDVNHFIDLLIKYCVVDNILPTGFSTSPILSNLCLFKFDNQLEKLAKEKHLHYSRYSDDLILSSKSLDTLNEIELTIQRYLTQYINSTIKLNQSKTKITKKGQRIKLLGLVILPNGIVTIDKKTKRQMETLFHLYLTDDEKFENYISTHFKNKKDQQTSLKEYGISILSGKLMAINSMDKGYLNKLRTKYGNTVIEMFLRKTVK

SEQ ID NO: 4773 - protein, 334 aa, unidentified
  source 1..334: note = Related to NZ_CP041170.1; note = Alteromonas mediterranea
MKTNTNESYRTFQEVFVSNFHNSLLFDDFLNLSVDNNIAVTQVKEREIVQPSKRLKRILHFLAKNVFDYGNIANEVVFSYRKGVNVRDAVLPHSKNRFFFQTDIANFFGSITKPLVSKSIRNGLGSVPIADIHEYADVILNIVSYKNCLPLGFPTSPAISNMCLLNFDKELLIQANELDVSYTRYADDIILSANNDEVLRMLAARVGGLLQEFLGAEIKINEAKTRYLQQGQKIKLLGLVVLPNGQVSIDRADKIEIETLLHHYLTNDDKFLGYGVVLKNKKAKNDKVLTRENVISMLSGRLIGANAMAPEYLLKLRQKYGNTIIEMFLHKSAK

SEQ ID NO: 4774 - protein, 322 aa, unidentified
  source 1..322: note = Related to CP033381.1; note = Methylomonas sp.
MPFGIVQMKKTSISLREAFDSTFHQKFNFDDFLSLNISQEYKQLSNEKVNPSLKLKKYLRFLNSFVFDYAKINENVVHSYRHEKSTYTAVVPHCHSKFFFQTDIKDFFHKISKQDVEKIVDTALDKAPIYDINRYKSELLNITTIDDVLPVGFPTSPNISNSFLSSFDDTLEGYCIKNNIIYTRYSDDVILSSEYKNSLINIQDVISNYLKEIYDGRIEINTYKTKHTHKGSKIKILGMVVLPSGKISVDIKFKQHLEILFHFYINDKNKFADYLKNHYQGDFSKISGQLNHINTIDKSYLDKLRKKYGNFIVDSFHHQSID

SEQ ID NO: 4775 - protein, 315 aa, unidentified
  source 1..315: note = Related to NZ_CP022129.1; note = Methylovulum psychrotolerans
MKKTSLSLQEAFDSTFHHKLNFDDFLNLNLPQEYQKISNAKVNPSPKLKKYLRFLNSFVFDYVKINTNVVHSYRHEKSTYTAVVPHCHSKFFFQTDIKDFFHKITKQDVEKILDTALDNVPIYDIHQYKSELLNITTIDDILPVGFPTSPNISNSFLSDFDDALEGYCIKNEIIYTRYSDDIFLSSNAKDSLMSIQNTISDYLNELYDRRVKINAYKTKHTHKGSKIKMLGMVILPSGKISVDIKLKQQIEVLFHFYINDKDKFADYLKNHYQGDFSKVSGQLNHINTIDKSYLDKLRKKYGNFIVDSFYHQSID

SEQ ID NO: 4776 - protein, 316 aa, unidentified
  source 1..316: note = Related to MGYX01000019.1; note = Gammaproteobacteria bacterium RIFCSPLOWO2_12_FULL_47_76
MKKLLLKEAFNSTFHKKLNFDDLLNLEIINEYTSFNIRNKQILNPSEKLKKYHRFLNSFIFDYAKINTSVVHSYRKEKTAYTAVSVHANSKYFFQSDINDFFNSITATDIKNVLNSNLDDSPISDIVNYKDQLINIVTVNNILPIGFSTSPNISNTCLYNFDNSLETYCNERDINFTRYADDIILSSNTKESMVGIEEIVSKILNEFFNDRFVLNQHKTKRLRKGNKVKLLGMVILPSGKVTVDMKLKKQLEILLHFYINDKDKFSDYLGKVYSGKLSTISGQLNYINTVDKNYLNKLRKKYGNYIVDLFFHSTVK

SEQ ID NO: 4777 - protein, 312 aa, unidentified
  source 1..312: note = Related to JACUUH010000036.1; note = Gammaproteobacteria bacterium
MPLQDVFTSTFHQKLDFNDFLNLDVKSEYEPLKNTQKLILKPSPKLKKYLRFLNSFIFEYAKINTNVVFSYRKDNSAYTAVRKHANSKYFFQTDLSSFFYSITAEDVKNVLENYMGNSPINDLREYQEIIINMVTVDGVLPVGFSTSPKISNSCLYEFDNELEQYCLDDGIIYTRYSDDIILSSKDNDLKTVEKVISGMLNKFFGARFQLNPNKTKHTHTGKKIKLLGMVILPSGKVSVDIKLKKQIEILFYFYINDKTKFTDYLVNKYQGDLGKISGQLNYINTIDKSYLNKLRKKYGNFIVDSFIHQTVS

SEQ ID NO: 4778 - protein, 329 aa, unidentified
  source 1..329: note = Related to PJBZ01000069.1; note = Psychromonas sp.
MNEITHTNFKKNTLQTIFESNFHDKFSFHDFLHFNQEKEYTKVNIGREKIGSKEILKASDKLQSYLRFLNNYIFQYADINKNVVYSYRKGANTYQAVKKHSDNNFFFQTDIKGFFKNVKSADIKFILENNLHNTPISDLKKYEERILSIVTVNDTLPVGFASSPILTNSLLKDFDNELENYCTQNDIVYTRYSDDLILSSKVKDSLIDIEKMISNILNKFFNDSFQLNKEKTKLTHKGNKIKILGMVILPTGKVTVDIKIKKQIESLLHFYINDKDIFIDLVGGNYDDGLAMVSGKINYINTIDPEYLIKLRKKYGNYVVDLFFHQSFK

SEQ ID NO: 4779 - protein, 326 aa, unidentified
  source 1..326: note = Related to NZ_WTKU01000003.1; note = Psychromonas sp.
MNDITHSEKKSLQSIFKSHYHEKYSFEDFLNFDQEKEFSTIEIDTKKGAKKEIFKPSDKLQDYLRFLNNYIFQYADTNTNVVYSYRKGTNPYQAVVKHSANNFFFQADIKGFFSSVKRQDIEYVLNNKLAQSPISDLNIYINRILNLIMVNDSLPIGFASSPILTNSLLNDFDNELEKYCLDQDVIYTRYSDDLILSAKTKTPLINLEDYISEMLVKFFNERLKLNEEKTKLTQKGNKIKILGMVILPTGKVTVDIKVKKNIEILFHYFINDKNKFVDISGGNYEAALDKLSGKINYINTIDPDYLIKLRKKYGNYIVDMFFHKSY

SEQ ID NO: 4780 - protein, 316 aa, unidentified
  source 1..316: note = Related to JACUUF010000373.1; note = Methyloprofundus sp.
MALTLKNAFEATFRSNYRFEDFLALKLEQTATRKKLGGREIVQPNAELKAYLRFLNRFIFSYADVVDEAVFSYKKDASPKQSLIKHCQSRCFYKTDIARFFESITFDDVLQVFTNKLSQAPITDWPDYQAHLQSLVLVDGRLPIGFPSSPVISNSVLYEFDQAALAWAQRHDIIYTRYSDDLIFSAQHDEVLKSLPQRIEKWLNDFYDGRFKPNPYKSFFTHTGEKVKLLGLVIQPNGHISVSRSLKNKIESLLHYFIEDQAVFDRLLAQHFSGNAVGLMSMLSWVQSIDQPYIEKLRKKYGNYTVDLFLHGAARL

SEQ ID NO: 4781 - protein, 329 aa, Escherichia coli
  source 1..329: note = Related to CP028745.1
MKPLSLEKAFNIAFFEKDSFQNFLSFEPFQQTKFITFDERLIAEPTSKLKEYHKFINEFVLSYLKVNKDVVFSYRKGSSTYDAVKLHACSKIFFNTDIKSFFPSITREYARSVLVDNLSNVPISDLNIHLDKILDYIIIDNSLPVGFPTSPAFSNACLYDFDVEMQQYCINHEYIFTRYSDDIIISSENDEGFENIHSVVSDLLGEFGKGHFKLNSAKTKLIKKGSKIKLLGMVILPSQIVSVDIKIKRKLEHLIHFYVTDKDKFIDSIIKDPKVKTSGLNDSEILEKGVNTVSGLLNHINTIDKSYLDKLKRKYGNTIVDMLFYKNVN

SEQ ID NO: 4782 - protein, 329 aa, Enterobacter sp.
  source 1..329: note = Related to NZ_CP006580.1; note = Enterobacter ludwigii
MKPLSLEKAFHIAFFDKDSFHNFLSFQPFQQTKFSTFEERLIAEPSSKLKEYHKFINEFVLSYLKVNKDVVFSYRKGSSTYDAVKLHAKSKVFFNTDIKSFFPSITREYARAVLFNNLSNIPISDLNVHLDKILDYIIIDDSLPVGFPTSPAFSNACLYDFDVALQQYCAEHDYIYTRYSDDIIISSENDEGFDNINSVVIELLGEFGKGHFSLNPTKTKLIRKGSKIKLLGMVILPSEIVSVDIKIKRKLEHLIHFYITDKDKFLDSISKDPKIKTTGLNDSEILEKGVNSVSGLLNHINTIDKKYLDKLKKKYGNTIVDMLFFKNVN

SEQ ID NO: 4783 - protein, 328 aa, unidentified
  source 1..328: note = Related to NC_014562.1; note = Pantoea vagans
MKALTLEKAFSIAFFEKDTFENFLTFEPLSQIKFSSKNERLITEPGSKLKEYHKFINEFIFSYLKVNKDVVFSYRKGASTYEAVKLHAKSRVFFNTDIKSFFPSVSREYARYVLDDNSSSVPITDFSSYIEKILDFIIIDDALPVGFSTSPSFSNACLYHFDLGMQSYCFEKGYLYTRYSDDIIISSEHELDDDIYAVVSGFLNKLSSANFELNPSKTKLIRKGSKIKLLGMVILPTGVVTVDIKVKRKLEHLIYFYLNDKEKFVDSVKKESGNKQKYLNEGEVLDKGISMVSGLLNHVNTVDKSYLDKLKKKYGNTIVDLFFHKNLN

SEQ ID NO: 4784 - protein, 353 aa, unidentified
  source 1..353: note = Related to NZ_CQDT01000017.1; note = Yersinia frederiksenii
MSDQFVNVDDNILPTNSSSPIKPKKSLPLEKVFNIAFFEKDTFENFLNFDVASGYECADFKGRTLLKPSPKLKDYHKFINDFIFPYLSVNETVVFSYRKGSRTYDAVSRHSESKVFFNTDIQNFFPSITRDFAKLVLLDNLKNIPISDINNFIPKILDFVVVDNVLPVGFSTSPSFSNASLYTFDCRMFDYCQEINAVYTRYSDDIIISTNNDSDLNDIYRIVAHFLSQVNDGKFLLNKRKTKIVRRGNKIKLLGMVILPSGKISVDIKTKNKIEHLIHFYLTNKESFKNAVLKYDKDGKIKNLPENEIIIKGVGMVSGILNHINTIDQEYLNKLRRKYGNVVIDMFFHQNAS

SEQ ID NO: 4785 - protein, 328 aa, unidentified
  source 1..328: note = Related to NZ_JXSK01000013.1; note = Photorhabdus luminescens
MNTPDNPIIPKSKKILKLETIFSIAFHEKTKLDDFLSFNIKSEYKKLEYNGRIIYHPSTKLKSYHKFINDFILFYLNINKEVVYSYRKGSSTYEAVKKHSDKKWFFNTDINNFFSSITKNFAREVLEDNTSAIPIIDIQEYYDKILDFIIVDDILPIGFSTSPAFSNACLYKFDNNIQYYSSENNLIYTRYSDDIIISSDNKEIIHSIYTTVSNFLSKENNGNFSLNKYKTKIVNKGNKVKLLGMVVLPSGKVTVDIKIKKKIEYLIYFYITDKDKFKDAIGKDIDKGIEMISGNLNHINTIDKSYLNKLRKKYGNVIIDMFFHKNVF

SEQ ID NO: 4786 - protein, 327 aa, Pseudomonas sp.
  source 1..327: note = Related to NZ_LR733826.1
MNKKKLEVLFEAMYHGKYSFKDFIESDISAEYASFKAKERTIYRTTKKLKTFHSFISLFILEYLNINPRVVYSYRKGFNSLDAVSKHAQSKYFFQTDIEHFFENLTTPLIRKTILNNSDNSPVLDIENHIDRIVELTTLNNSLPLGFSSSPVMSNACLYDFDNELEKLCIQNELIYTRYSDDIIISSQNQEKIEPIESTIEFILNKHHNGQLNLNKQKSKHTRKGNKVKLLGLAILPNGKVTIDIKIRNEIEVLLFHYVNDRDKFLDHEKIKQDMTKGVDLLFGYLNYVSTIDKNYLEKLRKKFGATVIDMFLHRTKKKEDRHANNF

SEQ ID NO: 4787 - protein, 323 aa, unidentified
  source 1..323: note = Related to NZ_JAJOYU010000011.1; note = Proposed Pararheinheimera soli
MKDNSLESVFNAYFNNKKNFSDFYTLRTEEEASLIPLSKSKVELYRCSEKLKVIHTFLSLFIFNEMPLRKDIVFSYRKDVNITDAVRPHCNSEFIFKTDISKFFNSISAECVYHSLSKYCENIRTVNSGEIRENIERIVYLCTINNHLPVGFSCSPSISNFCFYDYDNIIDAYCNENGYIYSRYADDLIISSQDEMNKDKITDDLTAILSSDAFLRLSINHKKTKLITKKFERQILGISILNDGKMTVSKATKTDIEVKLHLLKTNREKLVDYTGMEEKSSILSIAGVLSQINNIDSDYLFHLRKKYGNAIISKLLKGKELLK

SEQ ID NO: 4788 - protein, 323 aa, unidentified
  source 1..323: note = Related to CP048043.1; note = Serratia liquefaciens
MKDNSLENVFNSYFNNKKDFADFHTLRTEDEASLIPLSKSKVELYQCSARLKVIHTFLSRFVFSEMPVRKDIVFSYQKDVNIADAVRPHCNSEFIFRTDISKFFSSISAEAVSHMLSKYCENIRTVDAKEVRENIDRIVYLCTIDNCLPVGFSCSPSISNFCFYDYDNIIEAYCNEKGYIYSRYSDDLIISSQDEMDKDTITGDLTTILSSDVFLKLSINHKKTKVITKKYERKILGISILNDGKMTVSKVTKTDIEVKLHLLKTDRKKLMDYTKMDEMASILSIAGVLSQINNIDKDYLFHLRKKYGNAIISKLIRGKELLK

SEQ ID NO: 4789 - protein, 323 aa, unidentified
  source 1..323: note = Related to FWGN01000003.1; note = Klebsiella pneumoniae
MKNKSLENVFNAYFNNKKDFSDFHKIRTEEEAHLIPLKRNSAELYQCSDKLKAIHNFLARFVFSEMPVRKDIVFSYRKEVNITDAVRPHCESDYIYKTDISKFFPSISADAVSEKLKKYCAHISTVDAEDVRENIGRIVYLCTLNNQLPVGFASSPSISNFCFYDYDNLIESYCREKNYIYSRYADDLIISSQSEIHKESITADLSVILTSDALLRLSLNHKKTKVITKKYERKILGVSILNNGKMTVSKTTKKDIEVKLHLLRTDRVKLVDYTGMDEMSSILSIAGVLSQINNIDKDYLYHLRRKYGNAIISKLLRGKELLK

SEQ ID NO: 4790 - protein, 323 aa, Escherichia sp.
  source 1..323: note = Related to LR134270.1; note = Escherichia marmotae
MKDNSLESVFNSYFNNKKNFADFHTLRTEDEVRLIPLSRAKTELYQCSARLKLIHTFLSRFVFSEMPVRKDIVFSYRKEVNITDAVRPHCNSEFIFKTDISNFFPSISGDVVSDKLSKYCATIRTVDAEEVRDNIKRIVFLCTIGNRLPIGFSSSPSISNFCFYDYDNLIDSYCHNNNYIYSRYADDLIISSQHEISKDTITTDLKSILSSDPLLKLSINHKKTKVITKKYERKILGISILNDGKMTVSKATKTDIEVKLHLLKTDRNKLVNYTGADEMSSILSIAGVLSQINNIDQDYLFHLRKKYGNSIISKLLKGKDLLK

SEQ ID NO: 4791 - protein, 323 aa, unidentified
  source 1..323: note = Related to NITI01000005.1; note = Cronobacter sakazakii
MKNNSLESVFNSYFNHKKNFDDFHNIRTEEEVRLIPLSRTKADLYKCSDRLKLIHTFLSRFIFSEMPVREDIVFSYRKEVNISEAVKPHCNSEFIFKTDISNFFPSISSEAVSNKLSKYYDYLSTIDIEDVKKNIERIVYLCTFDNRLPIGFSSSPSISNFCFFDYDNIIESYCKDKKYIYTRYADDLIISSQHEILKKEITNDLIGILSSDPLLKLSINHKKTKVITKKYERKVLGISILNDGKMTVSKATKTDIEVKLHLLRTDRGKLMNYTGMDEMSSILSIAGVLSQINNIDQDYLFHLRKRYGNAIISKLLRGKELLK

SEQ ID NO: 4792 - protein, 335 aa, Escherichia coli
  source 1..335: note = Related to NZ_ADJG01000004.1
MDADIVLPIGGCNDRKKTLEALFNSYFNFKKEFSEFNSIQTINEVEKIALLKNNKIIYKCSDRLKSIQSFLNKFIFNEMPIRKDIVFSYRKDVNIADAVRPHSHSNFIYKTDISNFFPSIKPQIIKNRLLKHRDKIEFIEREEIEKYCDRIIDICTIDDHLPIGFPSSPSISNFCFYEYDSIISDFCIKNSLIYTRYADDLIISSTDELDKDNLSQTLEQILHSDDQLRLKINYKKTKLITKKYERHLLGISILENGKLTISKKMKRDIEIRLHLLKTNRDKLVDYTNSNEMDSILSIAGTLSQINNIDKDFLYQLRKKYGNAIISKLLKGKDLL

SEQ ID NO: 4793 - protein, 317 aa, Escherichia coli
  source 1..317: note = Related to ABBXOP010000094.1
MKIKDAFDFYYNGKFNFDLFSDLVFSDHVKEVILNKKLFFSASDDLKVIHNFLSKFIFDSLGVRDDIVFSYRKGVNVFNCIEPHKFSNFIYKTDIESFFPTITKPAIEEAIKKSVCNISYIDHEDIINNLDRILELTTVSERLPVGFSSSPSISNFIMYDFDCDIYKYTTDHGLVYTRYSDDILISSDKEIDKNEMTRIISDILSKKKGLNFKINNKKTKIITKKYERIIFGISISPVGTLSVSSKLKKEIEVKIYYLLNNREKLSMFSNMDEKNAILSLSGSLSYVLGIDPGYVTKLRGKYGNAIITKLLSNKEDL

SEQ ID NO: 4794 - protein, 317 aa, Proteus sp.
  source 1..317: note = Related to CP021694.1; note = Proteus mirabilis
MKLEEVFNFYFNGKESFEQFYTLSLNDHIKEFNFNNKKCYSISDELKTIQLFLSKFIFENIEFRKDLVYSYRKGVNVVDCISPHRFNNYIYKTDIENFFPSIGYDLIKNKIIEKVKDISFLDTNDVMVHLSRILELVTIDKKLPIGFSSSPAISNFVMYDIDCKIDCFAKNNDLIYTRYADDIILSGKNNLDKNSINQEINNILNYNQDNIFHLNDKKTKIITKKFERNILGISISPVGTLSISRQLKKEIEVKIFFLINNKDKFVKFSEMDEMSAIFSLAGKLSYALGVDPVYINKLRRKYGNSIINKLIKNKGDL

SEQ ID NO: 4795 - protein, 315 aa, unidentified
  source 1..315: note = Related to ALIV01000029.1; note = Pectobacterium atrosepticum
MNKNRFEDVFKAYFNGKLNFSDMLNLNIDENIEILSLGNREVIKCSEDLKKIHSFFNLFIFDYLEIQADSVFSYRKGVNVVDAIRPHAKNKFIFKTDIKRFFPSISHSLIHNCIFSQIENIPFLDFPTYLDRVCDLVTYNGKLPVGFSTSPNISNAIFNPLDIKIKEYCSYNKLTYTRYADDLMISSNNYLDKEDYIKIISNIIKLDDGHHFTINIEKTKLIKKSKNMDVMGVKIHPDGTLTIGKKLKNEIETKLYLFSKNQDDFVKFSKQEKESSKAKLTGQLNYINTIDPDYIVKLKTKYGNSLVELFFRKAI

SEQ ID NO: 4796 - protein, 315 aa, Enterobacter sp.
  source 1..315: note = Related to CP029126.1; note = Enterobacter hormaechei
MNKSKLDEIFNAYFNGKLDFSEMLTLNITNNINTISVGSRQVVKCSSNLKRIHSFLNLFIFDLLEIQTDCVFSYRKNVNVVDAIRPHSNNKFILKTDIKNFFPSITRMSIYECINRQIEALPFSDLCDYLDKICDLVTYNGHLPMGFSTSPQISNAVFNLIDIEIKSFCIKNNLTYTRYADDILISSNNYLDKEEYIDKLTKILSFDDHQCFTINTEKTKLIKKGKNTDIMGVKIQPDGTLTISKKLKNEVETKLYLFSKNQDDFVKFSKQDKNQSKAKLTGQLNYINTIDPDYIVKLKSKYGNSLVELFFRKAI

SEQ ID NO: 4797 - protein, 315 aa, unidentified
  source 1..315: note = Related to CP077366.1; note = Pantoea agglomerans
MDKYYLEHTFNAYCDGKIDFNDFLNIELKTNIEEIKVEKREVVKCSEKLKRIHSFFNQFIFDNLEIQEDCVFSYRKNVNVLDCIAPHSKNKFIFKTDIHSFFHSISKKTIHNCIFTQIDNQPLSDIESYLDRICNLVTYKDRLPQGFSTSPVLSNAVFNNFDIKIKKHCNRNNMIYSRYADDLLISSNNYLDKEECIHDIDNILNSCFEQKFKINTLKTKLIKKGKNMEVMGVQIHPDGSLSIGKRLKNEIETKLYLFLKNQNDFVSYSSLDKNHAIARLSGQLNYINTIDPKYIDKLKYKYGNSLVDLFFRKAI

SEQ ID NO: 4798 - protein, 316 aa, Escherichia sp.
  source 1..316: note = Related to NZ_CP042942.1; note = Escherichia fergusonii
MISENKFESIFNLYFDGKLNFSDMLSLNKEKELKHLTIENREVIKCSEKLKKIHHFLNLFIFDNLSIQSDVVFSYRKNVNVVDAIIPHAQNKFIFKTDLNNFFKSIKRSEIYNNLISQTDQIPIIDIVDYIDLICDLVTYHDELPLGFSTSPNISNAIFNQYDIKIKEYCLSKKIAYTRYADDILLSSDNYIDKNEYIELLNNILTIDGKRIFSLNSKKTKLIKKSKNMEIMGVKILPDGKITVSKKIKNQVETKLYLFIKNQSDFIKYTKSNKISSINKLSGQLNYINTIDPEYIEKLKSKYGNSLVELFFRKAI

SEQ ID NO: 4799 - protein, 322 aa, unidentified
  source 1..322: note = Related to nan
MAGNKSFEKIFDAYFHQKISFEEFNEIEIEKEIKRINIGSKIVYGCSSKLKKIHSFLSVFVFDRVSIREDVVFSYRKNNNVLNAIYPHAKRRAIYKTDIESFFPSIRMENVKEQLKEHCKESIFFDLEEHLDSIINVISVNDRIPIGFPTSPIISNFAFIRFDNEISSYCKKRRYIYTRYADDILISSDDFLDKEELTKDINEIFKKLHSDYKLNIPKTKILTKGRPRIIFGVSIFPDGKLSVSRKLKNEIEVKLYLYLKDKKEFLSYSKANTMEGAIVNLSGILNYVNTVDKTYLNKLKSKYGASVVGLFFRKTIENEYRN

SEQ ID NO: 4800 - protein, 316 aa, unidentified
  source 1..316: note = Related to CP096258.1; note = Providencia rettgeri
MSVQIKDIFDIYFNNSMEFNELIHLNKDDYLELKTYKGKEIIAYKKGFNKLKLLHRFLNEAVFNRIEIMNDVVFSYRKGVNVLNCVMPHRNSNFIFKTDINNFFPSFSSKFIEVKLINKFNNFIISDINQYLPEIVDIVTYNNTLPIGLSTSPSLSNILFSDIDFKIKLFSNENEYYYTRYADDIIISSNRDINKNTIFDDLQQILTSENDNFILNKSKTKLLRKGNLRKIMGVCIMPDGHITVDKKLKNNIETKLYYMSKLNNIHSKDSETTEIKRYLSGIINYVSTIDNSYINKLKRKYGSTIVEMFIRKSLIK

SEQ ID NO: 4801 - protein, 316 aa, unidentified
  source 1..316: note = Related to NC_012880.1; note = Musicola paradisiaca
MSIKIKEIFDIYFNNSMDFNDFFNLNKMEYLEKKIFRGREIVAYKKGFNKLRLLHRFLNEAIFNRVDIMDDVVFSYRKKVNVFDCVYPHRANPFIFKTDIKNFFPSFNRDFIESKLESVFKEFIISDINEYLFKIVELVSYNDFLPVGFSTSPSLSNILFSDADKKLKSFSISNGYIYTRYSDDIIISSESEIHKKDIFTTVQGIINSECDSFVLNFDKTKLLKKGGVRKIMGVSIMPDGYISVDKTIKNNIETKLHYISKLNNVNSQEPELIEIKRYLSGMINYISTIDDGYINKLKRKYGSTIVEMFLRKSLVK

SEQ ID NO: 4802 - protein, 318 aa, unidentified
  source 1..318: note = Related to LZDL01000007.1; note = Haemophilus haemolyticus
MKDRKPNLKFFFESYFNKKVSFDAFENISIEKNYHIQCINKREIYVPSNELKLILSFFSDFIFKLLPIEGDVAFAYRKGINVKDCLLPHVNSKFFYKTDIINFFPSISSYLIRENIYEDILKLSYLKKDDVDFYLDKILSLVTIDDKLPIGFPTSPFISNYVMRKYDLMLKYFCNMNGFVYTRYSDDIIISSNMNISKDFITRNIDGIFRKEKSPFYLNKSKTKIFTKKHKVKILGLTINNGEISIDREIKNNIEIGIYFFINNREKFINYFGLNELSAKKKLAGNLSYAINTEPDYLLKLVKKYGSSTIKEILRASV

SEQ ID NO: 4803 - protein, 318 aa, unidentified
  source 1..318: note = Related to NZ_CP015030.1; note = Mannheimia granulomatis
MKDRKHNLKFLFESYFNKKISFDIFENISIEESYDKLCKNKREIYIPNYELKLVLSFLSHFIFKSLPIEDDVAFAYRRGINVKDCLLPHANSKFFYKTDILNFFPSISSSLIKENIYQDIHKLSYLDQEDLALYLDKILSLVTVDDKLPVGFPTSPFISNYIMRKYDVSIKSFCSNNKFIYTRYSDDIIISSNTDIDKDYITNNIEKVFQQGENLFHLNNSKTKVFTKKNKIKMLGLIINNNQISVDRKVKDEIEVGIHFFIKDRLKFINFFNDSELSAKRKLAGNISYAINIEPDYLQKLAKKYGLLTIKEILKVNL

SEQ ID NO: 4804 - protein, 318 aa, unidentified
  source 1..318: note = Related to NZ_KV801828.1; note = Haemophilus sp.
MKDRKPNLKFLFESYFNKKVSFDIFENISIEKSYYKICKDQKDIYIPNDELKLILSFLSHFIFKSLPIENDVAFAYRKGINVKDCLLPHVNSNFFYKTDIINFFPSISTSLIKENLHQDISKLSYLDQENLMFYLDKILSLVTIDDKLPIGFPTSPFISNYIMRKYDINIKSFCNNNNFIYTRYSDDIIISSNDDIDKDYITSNIKSILQQEYSPFYLNNSKTKIFTKKNKIKILGLTINNQEISVDRKIKDEIEVGIYFFTKDRLKFIDYFSDNELSAKRKLAGNISYAINIEPDYLQKLARKYGLSTIKEILKVNL

SEQ ID NO: 4805 - protein, 331 aa, unidentified
  source 1..331: note = Related to NZ_CPWN01000004.1; note = Yersinia frederiksenii
MANLNPPIYRNNTHSSSRKFSELFDSYFYGKYSFDDFLSIDISKETKKIQLKDNKIIYSCSGKLKNIHRFINIFIINKLCIKEDIVFSYRAGKNVVDTILPHSENKFFLQTDIYNFFPSISINLIKETILRGISNLEITDIDDYVDYILKLITIDNSLPIGFSSSPPMSNSCLYDIDNKISIYCEQKRMKYTRYADDLIISSMNLFDVNHVKNSIAKILNEQKNASFILNERKTKFFSKSQKIKMLGVVILPTGRVTVDIKMKKKVESMIYFYLNDKDKLLDLSGLNYEDTLKNISGLLNHINTIDKKYLDKLRMKYGNTVVDMFFHKSVK

SEQ ID NO: 4806 - protein, 311 aa, unidentified
  source 1..311: note = Related to PYNG01000071.1; note = Photobacterium kishitanii
MKKKELKLIFNLMYHGKYDFNDLINCNIEKEYIKIKIKKRVIYKASNKLKNYHSFLNLIIFNYLDVDKDVVFSYRRGVNTVDAVRPHVNSCFFYQTDIKNFFPSLKKDLIKKTIINCKDSIPVIDIEKYIDRIVDLVTIDGVLSTGYSTSPIISNACLFNFDNEIKRKLANNNVIYSRYSDDIIISSNENIIVDDMNKIILLALKNNVSPDIEINKNKTKLSKKGCKIKILGMVITSDSVITVDNKYKREVEYLLYLYIRDKNRFKSIGKSISQVSGVLNYIQTIDPEYIKKLKKKYGSTIVDVFLHQSMK

SEQ ID NO: 4807 - protein, 327 aa, unidentified
  source 1..327: note = Related to NVXO02000002.1; note = Sulfurimonas sp.
MHKKELENIFNSYFHNQYNFQDFLNIIPKQNIHYKFNKYKNYKFISYIKENNSFSKDSMKMREYHTFIKNIFCNYMKVHAAVFSYRKHINIYDLAKIHNEHQNFFTTDIKSFFYSISTQMIHEVLIQNKVNFPFELDVKYYKNIVNITTVNNSLPVGYVTSPSISNAILYKFDELMDNYSQEHSISYSRYSDDLIFSSDDYNAIKSLPAVIESTLNSLYSSAFKLNISKTRFFDKTEKVSFLGISILPNGHITVEKWTKENISQLIYFYLNDKNKFTVLLQKRFKNNLSRAYGTLNYINDIDKQFILKLRKKYGNFIVDKFLHGVKH

SEQ ID NO: 4808 - protein, 317 aa, unidentified
  source 1..317: note = Related to QGLM01000007.1; note = Frischella perrara
MFQEKHSLEMLFNAMYHGKYSYQDFISSNIENYIQHINNKIVKTNKTFQVYHSFLNLFLFDYLPINENVVFSYRKGVNIYDLLIVHRNSKFFFQTDLKYFFPSITSEDIKKLIEKNIDMFPVVKKDIETHIDRIISLTTINNYLAVGYSTSPNLSNSILFDFDNSLSDFCQKLNIKYTRYSDDLIFSSLDKENLQKVEIEIRRLLKILFGGRIQLNTKKSKYNHQGNKVKILGAIILPNGQISVDKKIKTKIETAIYLYLNDRNKFDDFLEKNYRKGVNQISGTLNYIKTIDYDYLKKLKKKYGSTVINMFLNQSIG

SEQ ID NO: 4809 - protein, 324 aa, Aeromonas sp.
  source 1..324: note = Related to CP077210.1
MIQRTFKQAFNAVFHEKENFEEFLALDIENEVEKISVENKIKKQHRLFFRQSEKLKKYLRFVDRVILRNLAKDNDVVHSFTKDKSTLTAVSAHSNNDYFFQTDISSFYSSITKDDVLRILKRDINLIPIIDLSDYIDFLVSIMTYDGVLPVGFSTSPQISNAFLFEFDGELNEICRRRNIIYTRYADDIILSGMDLEHLKDMSSVIDSLILKLFSGQITLNKGKTKLTWKGNKVKILGLTILPNGVVTIDKKYKNTIETLLHLYTTDIDRFEKHLSVTDGFNKRSLFGLLHYANSIDPQYISKLQRKYGSLAVYKLMEDSQNDD

SEQ ID NO: 4810 - protein, 324 aa, Aeromonas sp.
  source 1..324: note = Related to JAEHHQ010000003.1; note = Aeromonas veronii
MTKRTFRQAFNAVFHDKEAFEDFLSIDIGNEIERVVILNKLKKQQRVIFKQSDRLRKYLRFVDRVILRSLARNDDVVHSFTKDKSTLTAVIAHAKNDFFFQTDISSFYSSITRNDVLMLLKRDVDLVPISDLSDYLEFLASVMTYDNTLPIGFSTSPQISNAFLFEFDRQLNDICREREIIYTRYADDIILSSMTLNVLEDMSHVIDSLLSELFLGNISLNRDKTKLIRKGNKIKILGLTILPNGVVTIDRKHKNTIETLLYLYTTDIERFHEHLSIMDGFNQRSLFGLLHYANSVDPHYISKLQRKYGALAVHKLMEDSQNDD

SEQ ID NO: 4811 - protein, 318 aa, Aeromonas sp.
  source 1..318: note = Related to NZ_MVPS01000007.1; note = Aeromonas veronii
MKKRTLEQAFNAVFHEKEQFQDFLKIDLELEVELINVKDRVVVRQSDKLKKYLRFVDRTILRSLAKDDEVVHSFIKEKSTLTAVQAHVESKYYFLADIKEFYQSIKRKDVVNILERNQAEIPIEDIVEYIDYLSYVTTYKDTLPIGLSTSPQLSNAFLFDFDREVKAYCIENSLIYTRYADDIIISGDNMDVIAMLSDRIQGMLQLYGSSCFTLKESKTRITWKGNKVKILGLVILPNGRITIDKKYKKIIEALLYFYSSDKSEYQSLLSKVMHGDEKSLFGLLHYANSVDPLYINKLQRKYGALSLHALMESDRDDN

SEQ ID NO: 4812 - protein, 328 aa, unidentified
  source 1..328: note = Related to SIHL01000004.1; note = Alteromonas sp.
MTHEADSNQTKKKTLEQAFNTIFHDKEDFSEFCSLDVISEVEPFTISDREVFKTSDRLKRYLRFIDRIILRHLSIDTDVVHSFSQEKNTYTAVKEHVGNDYFFLTDIESFFSKIKTEDVKKILYRNINNIPISDIENYIDFLSSVVSFNNQLPVGFSTSPRLSNSFLYDFDIALKTYCSRESLTYTRYADDVIISGASFEKLERLKTTIQDFLKIHASNELRLNKSKTRITHLGNKVKILGLMILPNRTITIDAKYKSRLELLLHFYSNNKEKYQSYLEENFNGSEKSVFGMLHYVQSIDPDYLDKLQRKYGIYAVRFFMEKKSNDNR

SEQ ID NO: 4813 - protein, 319 aa, unidentified
  source 1..319: note = Related to NZ_CP074570.1; note = Paraneptunicella aestuarii
MTKRTFEQAFNAIFHDSKAFVDFCGLDVASEVETFTVSGREIFKTSDKFKKYLRFIDRVILRHLAKDKNVVHSFTKDKNTFTAVRAHTDSNYFFLTDIRNFYSNIKITDVLRILERDKERIPISDIDSYINLLASLMTFNGSVPVGFSTSPQLSNGFLFEFDCAVREFCESNVLTYTRYADDIIISGKSFEELSDLKEIIQTFLNKYASSTLLLNEEKTRITHLGNKVKILGLSILPNRKVTIDTKYKKKLELLLHFYVTDESKYKSFLEEEFKGSEKSLFGMLHYVQSIDPDYLEKLQRKYGVFALRTLMEERWNESR

SEQ ID NO: 4814 - protein, 326 aa, unidentified
  source 1..326: note = Related to NMRX01000072.1; note = Methylococcaceae bacterium CS5
MTGKRRWQVGKRNFEQAFNAVFHDKQAFNDFCSLDVRSEIETFVINSRTIYRTSKKFKKYLRFIDKVILRHLDKNEQVVHSYLKEKSVLTAVKAHSSSKCFFLTDIKDFFTSVKTQNVLHLLTRDKLRIPITDFERYIETIVNLTTFAGSIPVGFPTSPSLSNSFLLEFDAVLEKYCCEHGFIYTRYSDDIIISGKSFEGFDNLENDVQSMLYKSASEDFFLNTKKTRLTQIGNKVKILGLVITLGGSVTIDSKYKKTLESLLHFYINDKEKYKDLLERTLHGKEHSLFGLVHYVKSIDQAYLEKLQRKYGAYALSALMEDRWSDK

SEQ ID NO: 4815 - protein, 323 aa, unidentified
  source 1..323: note = Related to QNFQ01000482.1; note = Gammaproteobacteria bacterium
MRWQVSKRTFEQAFNAVFHDKVAFEDFCTINVQEEVEEFFYDDRKIFRTSKKLKKYLRFIDRVILRHLANDDEVVHSFIKGKSTLTAVKAHTSSKYFFITDIKDFFSNVKTIDVLRILERDKYLVPIDDFENYIDTIVSMTTLGGSIPIGFPTSPQLSNAFLFEFDRKTKFFCADNSLIYTRYADDIIISGQEFNDVAGLKSQIQLLLSEHVSPNLSLNQDKTHITQIGNKVKLLGLVIMPNGRVTIDVKYKNRLETLLHFYVNDKDKFNDLLKKTMKGNVKSLFGLLHYAKSIDPEYLEKLQRKYGVYTIRLLMEDKLSDNR

SEQ ID NO: 4816 - protein, 317 aa, unidentified
  source 1..317: note = Related to NZ_JOKH01000004.1; note = Endozoicomonas numazuensis
MSKRTLEQAFNAVFHEKESFNDFCAMNHSQEVLSFSANSRDLFHPSPKLKKYLRFIDKVILRYLERDDVVVHSYIKGKSALTAVEAHAGSSHFFMTDIKAFFSNITDVDVREILTRNEGNVPISDIKEHISLLVEMMTWQGSLPVGFPTSPQLSNAFLLRFDQKLHRYCEGRGYTYTRYSDDIVISAKSFDGFEHLSETIQLLLNTAVSPLLRLSDDKTRYTHTGNKVKILGLVVTQGGKVTIDSKYKRQLETLLHFYVTDRERFGRVVDETLAGKEHSLFGLLHYARSIDPSYLEKLQRKYGAYALRSLMEDKWHG

SEQ ID NO: 4817 - protein, 338 aa, unidentified
  source 1..338: note = Related to LT841305.1; note = Acidithiobacillus ferrivorans
MWFVILTRQDYFYFSGNLKVDNRTLQQAFNAVFHNKESFSEFCSLEQRKHIVEFLYRGRKVYKTSAQYKHYLRFLEKVVLRHLATNANVVHSYIKGKSALTAVTTHSENSAFFLTDIKSFFPNITELNVKHVLNRDKNLVPISDFEHFIPYLAKIMTWDDSIPAGFPTSPQLSNGFLFDFDNALYDFCKTNELTYTRYSDDIIISGKYKDKLLCLKDTVQDLLHNYASKNFFINNEKTRITHAGNKVKILGLIITPKGRVTIDSKYKRTIESLLHFYTNDRSRYNDLLQNEFDGKEHSLFGLLHYAKATDPAYLEKLQRKYGLLALRQLMEDRWNGSR

SEQ ID NO: 4818 - protein, 335 aa, unidentified
  source 1..335: note = Related to NVXL01000289.1; note = Alteromonadaceae bacterium
MSINSLKSEGDEVSVTDRSLEQAFNAVFHDRESFNDFCTLPLAPEVSEIPLHLRKVYRPSDKLKTYLRFIDKVVLRHLKYNASVVHSYIKGSSALTAVQAHAKNQAFFLSDIKSFFPNIGDQDVRKVLMRDSHRIPILDFDQHIERVTKLMTLDGVLPVGFPTSPKLSNGFLHEFDNALAAYCDSTGLTYTRYSDDIIISGMDRAKLTVLREKVQMMLEEHASKSLRLNDEKTRVTHRGNKVKILGLVITPDGQVTIDVSRKHALEGLLHFYATDTEKYKNLLEKTFKGEDKERSLFGMLHYANSCDSEYLVKLQKKYGVLILRTLMEDRWSGNR

SEQ ID NO: 4819 - protein, 320 aa, unidentified
  source 1..320: note = Related to NZ_CP019628.1; note = Pseudoalteromonas aliena
MHLKSLEKAFNTMFHNPQLFEEFLCSDLSNEVEEFYIGKEKPRKVIRVSDKFKTFLRFIDKVILQHLKINEGVVHSYIKEKSAMSAVQSHVNGKYFLVSDIVSFFSNVSSEDVKKILVANVSNIPIEDIEDYIPRIVTLVCWNDCLPVGFVTSPKLSNAALFQFDSAMADYCKKQSLTYTRYSDDLIVSSQAREPLIELQTQLQSLISQNTNGQLEVNLDKTKIYTIGQPFTILGLVITQYQTLTISRKHKNHLEVALHYFVTDKLRFKDYLEEHFAGKEQSLFGLLHYAKSVEPRYINKLQRKYGAYAITDLLENKWND

SEQ ID NO: 4820 - protein, 321 aa, unidentified
  source 1..321: note = Related to JAFLKV010000025.1; note = Sulfuricurvum sp.
MTQTSLQNAFVSYFHTRYQFDDFLSILTNEHYTEIFYSKNTFSPSKKLKDFQKFLNLFLFELLPLNQDVVFSYRKGVNAQDAISPHKNSKYVLNTDIKSFFANINTSKLKKLILDNKNNFLILPSDIEKHIDTIMNIVTYNSILPVGAPTSPAISNGYLFDLDSALQSYCLRNEIIYTRYSDDFIFSSETKESLTKVLPIINDMFIHLGFETFTLNESKTRIQQRGSKIALLGLIITPQGYVTVDKNLKKEVEILLHFYLTDKEKFRDYFLKKFSSNIDKVSGLLSHINAVDSYYIAKLKKRYGSFIVNSFTHRDIHNVTF

SEQ ID NO: 4821 - protein, 319 aa, unidentified
  source 1..319: note = Related to JAJPEU010000001.1; note = Sulfurovum sp.
MNKTSLETAFNSYFHNKHSFQDFLNININNEYTQIFYSKNTFSPSKKLKQFQQFLNLFIFDHLNINKDVVFSYRKGVSTIDAIKPHKNKKFIYTTDIQSFFTHIETEKIKHIILENKNNYIIIEEDIEKYIDNILSLVTYKNVLPIGAPTSPKISNAYLLRLDNLVQEYCEKNEIIFTRYSDDFIFSSDSKEKLINLDDTLEDFLKQSEYLNLTINRKKTKLQRQGSNITLLGLTITPQGHITVNKKIKNDLEILLHFYLTDKSKFNDVFESNYSSKIEKVSGIISHINSIDKTYISKLRKKYGSYIVNSFIHRDISYE

SEQ ID NO: 4822 - protein, 319 aa, unidentified
  source 1..319: note = Related to FXLF01000023.1; note = Candidatus Thioglobus sp.
MINKKPFQEIFNLYFHGKYSFEDFINTDIKRCVTPHQFNQKTMLSVNKKLAEFHKFINVFIINKLAYNSFVCFSYIENTTIRNCLEPHKNNKYFLSTDISNFFGSIQSVDVMNTIQSNINEGSLNISDIEKYKDSIIKLITFNDSLPIGFSTSGRLSNSILFKFDQVVLDSCNAQNITYSRYADDLIFSSNDKNIKQTQLMVENALAALFNKRLKINIDKTKIYSKRAKIKILGMTITPNGSITIDKKIKSDIELAMHFYAKNTEKFCSIIENKFDGNIQKAFGTVAYINSVDKAYLNKLRKKYGNYTVESFLRKSAKQ

SEQ ID NO: 4823 - protein, 317 aa, unidentified
  source 1..317: note = Related to JACCHT010000001.1; note = Candidatus Thiodubiliella endoseptemdiera
MQKKSFQETFNLYFHGKYSFEDFINTPIKDNITQHQFDQRTVLSANKKLTEFHKFINVFIVNKLTYDDSICFSYAKNTTIRHCIEPHKNNKHFLSTDISNFFASIQSVDVINTIQHNIDEGNIGIADIDQYKDSIIKLITFEGALPIGFSTSGRLSNAILFEFDKVILTECQSKNITYSRYADDLIFSSNNKNIVQVKPIVETALSNIFDERLKINDKKTKTYSKKSKIKILGLIITPNGDITIDKKIKSDIQIAMHFYANDTNKFDSFLRKRFDGNIQKIFGIVGYINSVNKDFLNKLRKKYGNYIVDSFLRKSAK

SEQ ID NO: 4824 - protein, 320 aa, unidentified
  source 1..320: note = Related to VCHC01000138.1; note = Gammaproteobacteria bacterium
MTKTKIRPFQEIFNLYFHGKYCFEDFIATDVKKHTKKHDINNKIILSADKKLKEFHQFINVFIVNQLEFNDSVCFSYAKNTTTHTCLEPHKNNTYFLSMDIVNFFGSICNTDITRVIEHNIKQKKINISDIEKYTASIVKLITFEGVLPIGFTTSGRISNAILFEFDKKILDYCSPKNITYSRYADDLIFSGNDTNIGQVKSTVKNILTDLFDTRLNINNDKTKTYFKNTRIKILGMVITPNGKITIDKKIKSDIEIAMYFYVSDSVKFEAILEKKFNGNMHKIFGIIAYINSVDKDYLNKLRKKYGNYTVESFLRKSAK

SEQ ID NO: 4825 - protein, 552 aa, unidentified
  source 1..552: note = Related to JACOND010000012.1; note = Bdellovibrionales bacterium
MKKKLYNVVGHLPKIWFVCGAKFEGKNSIRKLFIKYIQKNHQEICTARNRNSNSLSFSPKKIILAEDVLEQSKTKDTKILDYEEHISEFSTNVIFFLESPSVFMEIGRFTKTITDPLKFLFCVDQKHKKKKNLINKLLSDPKYTVLHYTTNNDIIINSDDFFKKVLNCLNKTTPTISYYEDNIHSFYSFLISFLQKEASLEQIIRKVELERKKTGFFSNFLNKIKFHLKLLIKSGLILKQDCFYFSVIRGDILKGVKFQALTERQKELLFDVEMNYSYEHIKDLVYEPNSTLKNYQAFIKTRVFDPLEEEHKVIHKRCFSYKKKHSISNLVELHIGNNYLLNMDLKNFFNSIKREDFIKCMVTLGLFEERFRTKITDICFKTKSNEINGLPIGARTSPFISNLVMREFDNLVYNLCEKKEVVYTRYSDDLSFSCKKKGVLQDIEKEIYKVIKKLPYPQNLKINEKKTKHMSKKGRRKICGLYITPESHISIGRKNKNKVKNILKNFNKTEKIYHNKEMIKIIQESFLDSEEKGYLYYVNSVEKEFLKSQIYL

SEQ ID NO: 4826 - protein, 306 aa, unidentified
  source 1..306: note = Related to NZ_AP024849.1; note = Clostridium sp.
MKEKDFKVFYIPKKNGYRKIITYNDENRKLREFHQRVGDILYKRILPSKFAKAYIKKRSIIKNAKTHMYNDSFLLFDIKDFFQSINHNWLIEKLYYEINLNHKKKISKITCAKIVDSCSVSNRGLAVGLIPSPFLANIYLKDFDNILYGNLKKLGIKRIIYTRYADDLVISYNGIEPKNIDDIKKIVCENLKKFGLKLNDKKTRIIDFKQSNHVKITGINITKTEDDGRKLSVGRKRKDDLYVLAVELAKRKPDERKNNEILTLKGLQSFILSVEGVKYEECYSKNMISVINGLGYNALKDLIDSL

SEQ ID NO: 4827 - protein, 310 aa, unidentified
  source 1..310: note = Related to JAHHUY010000039.1; note = Clostridium tyrobutyricum
MRKIKGKIFFIPKKHGYRKIITYNQSDSDIELRKFHVKIASLLYKRVLPSKFAKAYIKNRSIIKNAKTHMYNDIFIMFDIKDFFQSINHNRLIKKLYYEINLNNRKKLSMVSCSDIIKSCSISNRGLAVGLIPSPFLANIYLKDFDNILYGNLKKLNLKNIMYTRYADDLTISYKSDTPLKIEKIEKIVCENLKKFGLKLNCRKTRSINLNKSNHVKVTGINIIKMFDNYRQLSVGRKRKDDLYNLAIKISKKNFKEHKENEINKIKVKGLQSFILSVEGEKYEQCYSENMMSVIHDLGYKSLKQLIDNI

SEQ ID NO: 4828 - protein, 307 aa, unidentified
  source 1..307: note = Related to SWQT01000003.1; note = Clostridium botulinum
MIKEADLKEFYIPKKNGYRKIVTYKDGDNKRREFHQRVARLLYKRILPSKFAKAYIKKRSIIINAKCHMYNDIFLTFDVKDFFQSINHNWMIEKLFYEINLNHKKKVNKVICSQIVKSCSVSRKGLAIGLIPSPVLANIYLKNFDNILYGNLRAMGMNHVIYTRYADDLVISYRGTDIKNIDKIKKIVCENLKKFGLKINDNKCRVIDLNKSNHVKITGINITKEIDNNRKLSVGRKRKDDLYRLAIELAQKSPEERSEYEIGKIRGLQSFVLSVEGKEYEKCYSKNMMTIVNKLGYSTLKDLIDSM

SEQ ID NO: 4829 - protein, 305 aa, unidentified
  source 1..305: note = Related to UFXA01000002.1; note = Clostridium perfringens
MDNNFKVFYIPKKKGFRKIVTYGKSNIKLRETHKNINILLYRRVLVSKFAKAYTKNRSIIKNAKTHMYNDIFIMFDIKDFFQSINHNWLIDKLYYEINLNHKKKVSKKNCEKIVKSCSISNKGLAVGFIPSPFLANIYMKDFDNILYGNLKQLELKNILYTRYADDIVISYKSNKTEKFLEIKSLIDKNLSKFGLKINNEKTTIINLNKSNHVRITGINVIKDTFNNRSISVGRKRKDDFYNLALKIAKEKKEEVNIYERKKIIGLYHFIVSVEGKGFEKCYSEKMNHAINNLGYKNFEELIKNI

SEQ ID NO: 4830 - protein, 310 aa, unidentified
  source 1..310: note = Related to CP014223.1; note = Anaerotignum propionicum
MNNDLSTFYIPKAKGYRKITTYKDRNGDLIKYHDKVNISLQKRLKQSIFAKAYIKKRSIVTNAKTHMYNDIFISMDIKDFFQSITHDRLINTLYYEINKNSVGHFTLEQCRDLVKSCSTGQRGIAIGLKPSPILANIYLKDFDGVLYGWLKKLDLDNVIYTRYADDMMVSYRSNSKDTVPINKEIISKVSELLKLSYLRLNASKTRIINLNISNHVRITGINIIKNDDNFRMLTVGRKQKDDLYYRSIGLFIKETKDDKWYLEAKKIQGMQSFILSVEGERYLNTYSKKMNIVINDLGFKNLKDLIDNLI

SEQ ID NO: 4831 - protein, 306 aa, unidentified
  source 1..306: note = Related to JAASHB010000001.1; note = Paeniclostridium sordellii
MYKEKFNIKYIPKNKGYRKIVTYKNSDCDLKKFHIKISRTIYNNTLPSKFAKAYIRKRSIITNAKAHKYNDIYIFFDIKDFFQNINHNKLIEKLYFEINIKRKKKISKLDCYRIVKSCSLSNKGLGVGLIPSPILSNIYLKELDNILYGRLKKFGLPNVIYTRYADDMVISFKKCDKYNLDEIELLVKNLLTRYGLKMNNNKTKVINLEKSNHVRITGINISKDSQNKRYLTVGRKRKNQLYHDVIKLLNIKKEDRDKKEINRVKGMQSFILSVEGISYEDSYSLGMIKIIEEFGFTNLKEAINSL

SEQ ID NO: 4832 - protein, 306 aa, unidentified
  source 1..306: note = Related to AAXVUS010000010.1; note = Clostridioides difficile
MKNNNFKIMYIPKSKGYRKIITYKDNDVEIRRYHIDISKFIYNNTLPSKFSKAYIKKRSIITNAKAHMYNDVFLYFDIKDFFQNINHNKLIDLLYHEINKGSKIKTSKIDCNNIVKSCAVSGKGLGVGLIPSPLLSNMYLKEFDNILYGKLKKMDLPNVIYTRYADDMVISFKYIESYDMSEVKNLIGILLRRYGLKLNDKKVKIINLNKSNHVRITGINLCKDENNNRRLTVGRKRKNELYYKAIETISKPAKDREDIQIKKIKGLQSFVLSIEGEMYENTYSQNMISIINNYGFKNLKSLIDNL

SEQ ID NO: 4833 - protein, 306 aa, unidentified
  source 1..306: note = Related to NZ_FMMP01000006.1; note = Cellulosilyticum sp.
MKDELLIKYIPKKKGYRKIVSYNVANQKLRQEHKHINKFICDETIPSKFAKAYIKNRSIILNAKMHMYNDIFIYMDIKKFFASINHTMMVNLLFKEINKRKPKIIITKDTCYKIVKSCAISSKGLAEGVIPSPTLSNIYLKEFDNILYGYLNKMHLENIRYTRYADDMIISFKDTENYNVVDIVNAVTTLLKRYKLELNKEKTKIISLNRSNHVRLTGIIISKDSDNNRSLTVGRKRKNELYNKAISLAKKNKDIRLQGEINKVKGMQSFILSVEGIKYEEIYSDKMISIVRELGYEKLKQLIDNL

SEQ ID NO: 4834 - protein, 304 aa, unidentified
  source 1..304: note = Related to NZ_JACOOV010000022.1; note = Blautia sp.
MIKEDLVVKYIPKHNGYRKIVTYKENSELKKFHTKAKNVLDKKIIPSKFAKAYIKKRSIISNANVHRYNDIFIALDIKDFFANIKHKKLIDLLQFELARNGRRVYKKDCIKIVKSCSNTDRGLLVGLKLSPILANIYLKEFDNILYGKLKKMNLPDVKYTRYADDLVISFKNCEANLHDIISLIQKLLKRYGLRINEKKTRIINFNVSNHVRITGINIVKDEKNFRTLSVGRQRKNELYYLAKEILDGQLNDPVKIRKVKGLQSFILSVEGVNYQKTYSYAMINEFTRRGYIDLKDFIDKLDYK

SEQ ID NO: 4835 - protein, 326 aa, unidentified
  source 1..326: note = Related to CP042243.1; note = Crassaminicella thermophila
MYRKEQIKRILFSRKVNAMDEKLFQIKYIPKKNAFRKIVTYREDNNIRVMHEKITSFIVKNTLPSKFSKAYIKNRSIVTNAKAHMYNDIFLMMDIQRFFSNINHNKLINVLYYELNKKENIISKVDCTKIVDYCSVGNKGLPIGFVTSPVLSNLYLKEFDNILYGKLKKYNLENVIYTRYADDLTISFKKNSSYANDIIVNIQNTIANLLKRYSLKINERKTKIIDLNKSNHVRITGINIIKDDNNFRRLSVGKKRKNELYWSAINYFLTDKDNRNDAELDKIKGMQSFILSVEKTGYENSFSKAMKSKINELGYNSLKELIDKLE

SEQ ID NO: 4836 - protein, 312 aa, unidentified
  source 1..312: note = Related to NZ_QUEQ01000010.1; note = Ruminococcus sp.
MNEQLTVKYIKTKNKVRKIVTYTENGELRKYHENVVKYLEKYATNSIFAKAYVPKSSIFKNAEAHMYNDIFIKMDVKNFFPNINHKYMAECLFFELNKNTQISRKECYSIVKKCSVGEKGLPLGLVSSPALANLYMKEFDGLLYGSLKTMDLNNPIYTRYADDLVISFKSGTNDIDKIDAIKQEVRRLLKKVHLNLNEKKTKSYILNKTNHVRITGVSITKDEKNYRHISVGRKLKNQIFWNAINMHDQEIKDYVQIEHLKGIFSFALSIEKKDFEACYSKNMKQLIKERGYDSLRDLIKDLGNDNKSMITN

SEQ ID NO: 4837 - protein, 317 aa, unidentified
  source 1..317: note = Related to FMEB01000016.1; note = Roseburia sp.
MKEQLVVKYIKTKNKVRKIVTYTENGELRRYHEEVVKYLEKYTTNSIFAKAYVPRSSIYKNAKAHMYNDIFVKMDIKNFFPNINHKYLAECLFFELNKNTQISRKECYDIVRKCSVGEKGLPLGLVSSPALANLYMKEFDGLLYGKLKKMELNNPIYTRYADDIVISFKTGKDDFEKIDNIKAEVQSLLKKVHLTLNEKKTKSYTLNKSNHVRITGISITKDENNYRHISVGKKLKNQIFWDAINMYDQKVKDYTKIEHLKGIFSFALSIEKKDIENFYSENMKHLIKIRGYDSLKELIKDLGSDVDKNDNKAVITN

SEQ ID NO: 4838 - protein, 318 aa, unidentified
  source 1..318: note = Related to JAGZZD010000009.1; note = Roseburia sp.
MDEELVVKYIKTKNKVRKIVTYKERGELRKYHEKVVEYLDKHVIVSKFAKAYAPKTSIYKNAYAHMYNDIFLKMDIKDFFPSINHNYLAECLYHEINKNTSISRRECYDIVKKCSVGKKGLPLGFVTSPALANLYLKEFDGLLYGKLKKMDIKRPIYTRYADDMVISFQSQEDYLEKIELIRSEIDNLLKRVHLSINHKKTKIINLEKTNHVRITGVSITKDKNNYRHLSVGRKLKNHIFWSAINQYDKEEKDYNEIAHIKGLYSFVLSIEKNGVENGYSDKMKSLLVERGYETLKQLLSSLGNDELNKNEIDDLGSH

SEQ ID NO: 4839 - protein, 303 aa, unidentified
  source 1..303: note = Related to JAFQBJ010000029.1; note = Agathobacter sp.
MDEQLVVKYIRTKKKVRKIVTYREHNDLRKYHEAVAKYLQKNTFNSIFAKAYVPKSSIFSNAKAHMYNDIFIKMDIRDFFPNINHEYMAKSLYHEINKIAQISNKECHDIVRKCSIGEKGLPLGLVSSPGLANLYLKEFDGLFYGQLKKMCLKNVIYTRYADDLVVSFKYCDDYEKYAEKIVAQAEHLLQRFCLKLNMEKLQIVNLKKSNHVRITGVSITRNSQNYRHISVGKKLKNEIFWKAIELYDNPEGHNMIEREQLKGLFSFVLSIEKRGVEESFSEGMINLLKIRGFNSLKELINTL

SEQ ID NO: 4840 - protein, 307 aa, unidentified
  source 1..307: note = Related to NZ_MJHW01000008.1; note = Roseburia sp.
MNKELFLEEKYIKTKKKYRKIVTYVDGENLLREKHERIVSLLKQECSDSIFAKAYIEHSSIVKNAKAHMYNDIFLFFDVKDFFPSINHNYLIQRLYKELNNNGNASINSCSKLVELCSVNDKGLPLGLVTSPILSNIYMKEFDNIIYGKLKKLSLDNIIYTRYADDIVISFKAEKIDPDINVNIKECVIRCLKQVHLKSNENKERVYDIRKGGHVRITGINVIVENDNYRKLTVGRKRKDRLYNDVMSYYMRRIKDREKALSIKGNESFILSVEGKEYEKCYSENMKKVIKEYGYDSLHDMIKAIKY

SEQ ID NO: 4841 - protein, 309 aa, unidentified
  source 1..309: note = Related to NZ_JADMQW010000015.1; note = Intestinimonas butyriciproducens
MNVQHPDIKIRYIRTKNKTRKLVTYSSDDCELRVRHKRINDFIEARFIPSIFSKGYVKNRSIYHNALAHLYNDYFIMLDIKDFFPHICHKQLADKLFYEMNLLSREQISMKECKNVIELCSVSSRGLPLGFITSPLLSNVYMKEFDGIFFGQLKKLGLENPIYTRYVDDITVSFKYSNRIPPIEVENQVVDLAQSLLSKYGLQLNNRKKRSYNLNISNHVRITGINITKQPDNKRLLTVGRATKNELYWGAIDCLKSRDPEKIAHIKGMQSFILSIEKNGYEKCYSKAMIQQIRNLGFFSLKELIDSLD

SEQ ID NO: 4842 - protein, 310 aa, unidentified
  source 1..310: note = Related to RKGG01000020.1; note = Clostridiales bacterium
MNVQNPDIKIRYIKTKNKTRRITTYVSDDCNLRLSHTRINVFLKENFIPSVFTKAYVSGCSIYHNALSHLYNDCFVMMDIKDFFPSISHRQLEKKLYFEINAKAPNQISMLECRELINLCSVGNVGLPLGFITSPVLSNIYLKEFDGIFYGKLKSLSLKNIIYTRYADDIVVSFKPEDVKNIDDAKSSIINIAKQILSRYNLHLNERKTRFYSLEISNHVRITGVNITKNDDGKRLVTVGRSLKNKLYWDTINYMESDNKDAETVNHIKGLQSFVLSIEKNGYEKCYSKQMIENVRKHGFRTLKDLIDSL

SEQ ID NO: 4843 - protein, 308 aa, unidentified
  source 1..308: note = Related to DNFS01000014.1; note = Ruminococcus sp.
MNINNPDIVVRHIKTKNKTRKIITYRSEDCELKTKHRRINTFLQERFIPSIFTKGYVKGRSIYDNALPHMYNDYFILLDIKDFFPHICHKQLAAKIFHEINLVKENQINKKECNYIVDCCSIGSRGLPLGFITSPILSNMYLKEFDCILYGYLKKMELNNVIYTRYADDIIISFKTDSFVEFKEIENDIVDTSKLLLSKYGLQINNRKTRAYNLDVSNHVRITGINITKSEDGYRHLTVGRKLKNELFWNAIECFETKNQENIQTIKGLQSFVLSIEKQGYESCFSEGMLKKVNDLGFESLKELIDSL

SEQ ID NO: 4844 - protein, 308 aa, unidentified
  source 1..308: note = Related to JAGAMN010000013.1; note = Oscillospiraceae bacterium
MNSTNPDVRISYIKTKNKLRKIVSYRSNDCELRTYHQQINDFLEQRFIPSIFSKGYVKGRSIYDNAQAHMYNDYFIMLDIKDFFHNICHKQLSSTLFYEINLAQANQISQKECNDIVSACSVSKRGIPLGFITSPLLSNIYLKEFDGIFYGKLKQMALSNIIYTRYADDLTISFKTDCTAKLPDVESLIASTADSILKRYGLHLNGHKTRSYSLYVSNHVRITGINVIKDQSGYRSLTIGRSVKKQLYWDALRCLESKDGELIRHVKGIQSFILSVEKQGYEDCYSSAMKRRLSDLGYKSLKDLIDAL

SEQ ID NO: 4845 - protein, 309 aa, unidentified
  source 1..309: note = Related to FMXS01000006.1; note = Ruminococcaceae bacterium FB2012
MNEQHPDITTYYIRTKNKTRKIVSYISDDCELRNTHLKINNFLERRFIPSIFSKGYIKNRSIYHNAQSHMYNDYFILMDIKDFFHSICHKQLAQKIFYEINLTKSNQINLLECYKLISLCSIDSRGLPLGFITSPILSNIYLKDFDNIFYGKLKELNLDNIIYTRYADDLTVSYKTKSTVKDVNMEAKIAETASNILKRYGLKLNNRKTRSINLNVSNHVRITGVNITKNNYNFRHLTVGRSIKNQLYWDALKCIDSDNDLLKNKVKGMLSFVLSIEKAGFETCYSDLMMAKVYSLGFSSLAELIMSIK

SEQ ID NO: 4846 - protein, 308 aa, unidentified
  source 1..308: note = Related to JAFZJT010000006.1; note = Clostridia bacterium
MTELHPDIIIRYIRTKNKTRKLATYRSVDCDLRKKHEQIEQFLTAWFVPSIFAKGYVKNRSIFHNAQSHMYNDHFVMLDIKDFFPHICHKQLSEKLYYELNRSGKNVVAKSECNDIVDICSIGSRGLPLGFVTSPTLSNLYLKEFDGIFYGKLKKLGLNNVIYTRYADDLTISFKTVTAPELSKIEESIVQIAQQLLKRYGLQLNMHKTRSYDLRVSNHVRITGVNVIVSEGNRRRLSAGRSLKNKLFWDAIECAETRDPVKTAHVKGMQSFILSVEKEGYETCFSKAMIQKVESLGFSSLKELIDSL

SEQ ID NO: 4847 - protein, 324 aa, unidentified
  source 1..324: note = Related to QPZU01000011.1; note = Clostridium botulinum
MKKSEDVIIKHIKTKNKIRKIATYVSEGCKLRKEHENILKYLNKNFINSKFAKAYVKNRSIYSNAKVHLYNDCFIMLDVKDFFNSINHKNLIEKLYYEINKPNKKIYYQIDESNRKLISKIECANIISKCSLYNKGIPLGFITSPILSNIYMKDFDGILYGQLKKFKDYNIIYSRYADDMTISFKDNQDKKEIENEIINITEDLLKRYGLKLNNKKTRSYDLTISNHVKITGINIVKEEDNYRRMTVGKKVKNKLFWDALKCYRDGNHDYKCIEGLKGMQSFILSIEKKGYEECYSENMKNIINELGFSSLKELIDSLFYIEKN

SEQ ID NO: 4848 - protein, 316 aa, Bacillus sp.
  source 1..316: note = Related to LJIT01000071.1; note = Bacillus cereus
MSEQNVFYQVKYIKTKNKLRKIVTYKDELPDIKLKHEEIAAFINKNFIPSIFSKAYVKNRSIYHNAITHMYNDVFIALDIKNYFNSIDHKLLLSALYYELNKRNKSTISKLECGKIISICSIFKKGLPLGLVTSPILTNVYMKEFDNILYGKLKKMKLKDVMYTRYADDLVISFKRDVYLDSNQIRKNTDVIVHQVSSLLSRFKLKLNPAKTKITSFEKSNHVKITGVNIIRDSSNHRKLSIGRKIKNNLFHDAIKCFEEKNKNKSDVMKIKGLESFVLSIEKRGYEEIYSRNMKKKIKDLGFDSLHDLINSLYYE

SEQ ID NO: 4849 - protein, 311 aa, Bacillus sp.
  source 1..311: note = Related to NVJL01000019.1; note = Bacillus toyonensis
MDVQTNYYQIKYIKTKKKTRKIVTYTENYPEIRVQHEKIADFINKQFIPSLFSKAYIKKTSIYHNVLPHMYNDIFILLDIKDFFNSINHKILIDLMYYELNKKKKNTINKLECAKIISRCSITKKGLPLGFITSPTLSNIYMKQFDNILYGKLKKLELTNVIYTRYADDLVISFKRDVLSSSNICVEKIINQVKSLLLRYKLQLNTSKTKVINFEETNHVKITGVNIIRDSSTNRKLSIGRKIKNDLFHKAIKCYENENTNKYDILRVKGLESFILSIEKKGYEETYSKNMRAKVKSLGFNSLHELINNLL

SEQ ID NO: 4850 - protein, 315 aa, unidentified
  source 1..315: note = Related to NZ_JAIVKS010000001.1; note = Priestia aryabhattai
MNEQNTSFRIKYIKTKKKLRKIVTYKSDNPELRIRHEKIAAFLNSNFTPSKFTKAYVKNKSIYHNARTHMYNDIFISLDIKDFFGNINHKLLINLLYYELNKKDKDTINKLECGKVVSHCSVSEKGIPLGFITSPILSNIYLKEFDNILYGKLKKLNLKNVMYTRYADDLVISFKNSFNGDSKLKSDNDENIISIVQKLLSRFNLKLNPSKTRRVSFEKSNHVKITGVNIIRDVYNQRRLSVGRKLKNDLFHMAIKCHEQEIKDMYEVMKIKGLESFIISIEKKGYEEIFSINMKDKIGELGFESLHDLIKNMRY

SEQ ID NO: 4851 - protein, 313 aa, unidentified
  source 1..313: note = Related to NZ_VEEP01000002.1; note = Cytobacillus oceanisediminis
MDYQETKKGYIVKYIKTKNKIRKIVTYGDNAQEIKKIHTEIAEFINENFMPSKFSKAYIRHKSIYQNALAHMYNDIFISLDIKDFFRNINHQKLINALFLELNKHSNNTINKLECSKIVSNCTVSKKGLPLGLITSPTLSNVYLKEFDNILYGKLKRMKVENIIYTRYADDLVISFKDIESKTKIIDDIIMLVKKLLSKYNLRLNSSKTRIISLDKSNHVKITGINIIKSPSNYRKLTVGRELKNDLFHTAVKYYEDGNTNKYELLKIKGLESFILSIEKNGYEEVYSKNMKLKIKDLGFKSLNELIKGLTSK

SEQ ID NO: 4852 - protein, 316 aa, Bacillus sp.
  source 1..316: note = Related to LR134328.1
MEKDDWYVEKFIKRKNKLRKIVTYNNSDIRNRHTIINNFLNGNLLFSKFSKAYIKGKSIYDNAYAHLYNDYFISLDIEKYFNNIDHNILIETLYYELNKTSEKKMVMNKIECTKLVNLCSTSKKGLPLGLITSPTLSNIYLKEFDNILYGKLKRLGLESIIYTRYADDITISFKYSEEDLNIVQNNIYDIVSSLLKRYKLKLNYSKSRFIDLGKSNHVRITGISIVKDENNYRKLSVGRKSKKELFYRAIDCYRTFLEDPSNVDYLEVLKIKGMESFFLSIEKRGYENFYSKGMQKELKELGFDNLNDLIRSLPHE

SEQ ID NO: 4853 - protein, 316 aa, Bacillus sp.
  source 1..316: note = Related to NUQK01000037.1; note = Bacillus wiedmannii
MKMQNEWYKEKYIKRKNKVRKIITYNDESVREKHSQINRILNEKLMFSKFSKAYIKGTSIFYNAKSHMYNDIFICIDIKKFFNNIDHKILLQTLYYELNKTEENVIKYGRVELKKLIEVCSISSKGLPLGLITSPALANIYLKEFDNILYGKLKKLQLNNVIYTRYADDLTISFKYIEDYLSIKDVIINEVSKLLKRYRLEMNDKKERIINLNKSNHVRITGVSIVKNVDNYRQISVGRKVKKELFYKAINAYLTFQENPSRMDFLEMKRIKGMESFILSIEKNGYESCYSVGMMRQLEELNFNNLHDLINSLPIK

SEQ ID NO: 4854 - protein, 318 aa, Bacillus sp.
  source 1..318: note = Related to NUNG01000033.1; note = Bacillus thuringiensis
MNTDYKVRYINTNGKKRKIVTYANEAKRKEHIEIKKFLEKKLIFSKFTKAYISKSSIYKNARAHMYNDIFVKYDIEKFFNNINHKILVEILHEQLNLNSEKNENSMLEVAELVSSCIVDKKGLPLGIITSPILANIYLKKFDNILYGKLKKLGLDNIIYTRYADDLTISFKNPDEWEIERFNDELTYIEEVITKQLKKFRLKLNLKKKSIINLKVSNHVRVTGISITKITDDKRRLSVGKKKINKLYDDALELYIKTQNKEYVLTDEDFYHISRIKGMESFILSVHKTGYNHFFSGMMQKKLEELGFSSLGELIKNLN

SEQ ID NO: 4855 - protein, 318 aa, Bacillus sp.
  source 1..318: note = Related to NZ_CP085511.1; note = Bacillus cereus
MNIDYKVRYIDTNGKKRKIVTYANEEKRKEHIEIKEFLERELIFSKFTKAYISKSSIYKNARAHMYNDIFIKYDIEKFFNNINHKILVEILHEQLNLKNEQDENSILEVAELVSSCIVGKKGLPLGLITSPILANIYLKKFDNILYGKLKKLGLENIIYTRYADDLTISFKNPNEWGVASFNEELTYIEEVITKQLKKYRLKLNLKKKSIINLKVSNHVRVTGISITKVTDDKRRLSVGKKRINKLYDDALQLYIKQQNKDYVLTDEDFYHINRIKGMESFILSVHKTGYNHFFSGMMQRKLEEFGFDSLGELIKDLN

SEQ ID NO: 4856 - protein, 322 aa, unidentified
  source 1..322: note = Related to QXJM01000039.1; note = Cohnella faecalis
MEKKINMADYMVRYIVTKGKRRRIVTYGNEEKRQEHNEIKLFLEEKLIFSKFTKAYIAYSSIYKNAKAHMYNDIFIKYDIEKYFDSINHKILVRILHEQLNLGQEKEIYTIFETSELVGNCIFGKKGLPLGLITSPVLSNIYLKTFDNILYGKLKKMKLENVIYTRYADDLTISFKNSSRKSLEDLDHVFSEIESLINLQLKNYKLKLNANKKSIISLDVSNHVRITGISITKLVTGKRRLSVGKKKVIKLFDDALQLYYKKIVDADELSNEDLYNIQRVKGMESFVLSIHKTGYNHMFSEKMQDKLLNLGFKSLHELIESL

SEQ ID NO: 4857 - protein, 318 aa, Bacillus sp.
  source 1..318: note = Related to NZ_AEHM01000023.1; note = Bacillus subtilis
MNKDYKIKYVEINGKLRKVVTYNNEAKRLEHIEIKRFLERNLIFSKFTKAYIPRSSIYNNARAHMYNDIFIKYDIEKFFNHINHKILVEILYEQLNLKSEKEIYSMLEVSELIGRCILGNKGLPFGLITSPILANIYLKEFDNIFYGKLKKMELNNIIYTRYADDLTISFKNPNNYGLVEFNEKLTVIENVITKLLKKYRLRLNSNKKSIINLKVSNHVRITGISITKISNDKRRLSVGKKKINRLFDDALQLYLKKQRTDYTLTDEDFYNIRRVKGMESFILSVHKTGYSHFFSEMMLEKLKKIGFNSLHDLIKTLD

SEQ ID NO: 4858 - protein, 324 aa, unidentified
  source 1..324: note = Related to JAFHKR010000035.1; note = Fictibacillus nanhaiensis
MNKVDATWYKIKFIRRKGKIRKIITYTDQSVIEKHTRIKEFLEERLIFSKFTKAYVKNSSIFNNAKAHMYNDIFIKLDIKDFFISINHKILLDLLFSQLNVNPDQTKVSKMEISRLISICSIEKKGLPLGLITSPILSNIYLKEFDNILYGKLKKMNFKNIIYTRYADDITISFKSEDTNEFIQGLKVEILNLVEVLLKRYKLKLNRDKISLINLNISNHVRITGVSVTKDSNNYRRISIGRKRINKLYHDALNLFIKIKVRNMSLDNHDFLKIRQIKGMESFIFSIEKNGYDTIYSEKMKLRINELGFESLSQLIKNLPEKNF

SEQ ID NO: 4859 - protein, 320 aa, Bacillus sp.
  source 1..320: note = Related to FMJM01000007.1; note = Bacillus cereus
MNEKKMWYEVKYIRKKGKIRKIITYKDESIRRLHVQIKEYLEERLIFSKFTKAYVSNSSIFYNAKAHMYNDIFLKIDIKDFFNSINHKILLEVLYSQLNLDSKQKETTKIEISKLIDVCSLDKRGIPLGLVTSPILSNIYLKEFDNILYGKLKRLGLENLIYTRYADDLTISFKSISNIPDTLLKVILELVSGLLKRYKLKINPNKVSLVDLNISNHVRITGVSVTKDANNYRKISIGRKRINNLYHDAINMYIKCRTGSLSDADYLRIKQIKGMESFVYSVEKHGYDRVYSLKMHEQIKNMGFDSLSELIKNLPENIRA

SEQ ID NO: 4860 - protein, 319 aa, unidentified
  source 1..319: note = Related to JAJJZD010000002.1; note = Thalassospira sp.
MNSDYKKIVIVKNGKKRFLVTYNNPEVRLKHEAIKRFLEDNIYYSIFTKAYRKKSSIYINAKAHMYNDIFLKYDIKNFFDSIDHKILVQLLHMELNKLNKNSFSLLDVATLVEECIIDKKGLPLGLITSPTLSNIYLKEFDNILYGKLKKMDLSNVIYTRYADDLTISFKGNLTSEELSEFNQQLIIELQKLLKKYKLTLNKNKISIINLNISNHVKVTGINIIKKNDNYRELSVGKKRVAILFDLALNIYSRIMNDDYTLNKDDYYEISKVKGLNSFILSIHKKGYENMLSQEMRNKIFEKGYSSLTDLISNLPNSNN

SEQ ID NO: 4861 - protein, 322 aa, unidentified
  source 1..322: note = Related to NZ_VEEI01000002.1; note = Lysinibacillus fusiformis
MNKSWYKIKYIRKKRKIRRIVTYSDNSTEIKNKHIGIKEFLEKNIYMSKFTKAYKKDSSIFKNAKAHMYNDVFIKLDIKDFFQNIDHKILLEILYFELNKSKSLSTIKYSKKQLLSLIELCSVSKRGLPLGLVTSPILANIYLKEFDNLLYGNLKKFGLNNIIYTRYADDLTISFKKTSQINIVNEKKNIELLVSSLLKKNRLKLNFSKSKMIDFEISNHVRITGLNIVKDTNNFRRITVGRKRINDLFHQSMNLHLKLKEYSLTDSDKLEILRIKGMESFIYSIEKKGYEYVFSNNMKESIYNEGFSNLTELIDALGARLE

SEQ ID NO: 4862 - protein, 308 aa, Streptococcus sp.
  source 1..308: note = Related to FR873482.1; note = Streptococcus salivarius
MVNNSGFAIFKLKKNKKIRKIVAYTSNSELKNIHKLINDHLKERVIYSKFTKGYREGVSIFDNAKAHLYNDIFIQFDIKNFFPSINHHKLINLLYKEVKHNGYNISKSQSYEIVKKASQGLKGLPLGFITSPLLSNIYLKKFDTILYHRLKKQGLDNVIYTRYADDITISFRCIPDKTDYSDIRSTIEKIISNLLKRYSLKLNNKKTRVTNLLKSGNVKVTGVYIVNKRDDYRHLTVGRKFKKELLWDAIQTLDNIERDESLVKQIKGRYSFVLSIEKEGIENMLSPCMRRILNEKNISSINELFSVL

SEQ ID NO: 4863 - protein, 308 aa, Streptococcus sp.
  source 1..308: note = Related to NZ_VMMH01000009.1
MRPNKEFKVFKLTKNKKVRKIVAYTTDSNLRREHVLINNYLRERVRYSKFTKGYRKGISIFDNVKAHMYNDIFIQFDIQRFFPSINHRKLTKLLYQEVKYNNYNLSKSQSYEIVKKSSQGLEGLPLGFVTSPLLSNIYLKRFDNILYGHLKKEELDNVIYTRYADDITISFRGIPDKLDYSDIKSRIEKIIFDLLKEYGLKLNNKKTRLTNLLESGNVKVTGVYIVNKQNSVRRLTVGRRFKKKLLWDAIQSLDNIESDDFLIKQIKGKYSFVLSIEKEGIENMLSPCMRRILKGKNISSIDELFSIL

SEQ ID NO: 4864 - protein, 675 aa, unidentified
  source 1..675: note = Related to QRWY01000002.1; note = Coprobacillus sp.
MKEVYMLFFKNNQEKFKPSFFIAFLCGVKYKSNSPEDKRNVLYDYLKQNRKIKPVILEKSFDIDSFDNINTLNYKDIGLNNLRDIEILTSLYSHLIFVIHESMSTASEIGMFSYDDHTAKKICVIYPDEFSINKNVIGDFFTYAFFSDRNPIINNKFPFYPRTKTVHHASNNVEAYTYFINNQITKDLENKINTYIENNSKRTYDLKLHKKFQRFQSYYLLKNKNKDKIDMNLTAEFFFYHMLALLNTNEVKEIFEENNHDFHKCVTKIGNLFLETLKMTILYNRKNITANKITCHVNNYPFKQALFYLFYVFHDIGVVEIKENKIVKIENKQYDGYISKLHKLLISYKEERTFEKINVGKNAYKQFYIKKKTGLYRKITTYNDNEEGYKLKEYHDRINDFLNENITFSQFTKAYLKDTSIVKNARCHLYNNTFIQIDIKDFFPSINHHKLLNRLYFEINRGNNMRYIISKKDCLDVLKTCYFSKKGIPIGLVLSPTLANIYMKSFDNELYGKLKKLNLNNIIYTRYADDMVISCKDKLDQEKILKIKELVSEQLSYLGLKINEKKFRNVSLYTSNHVKITGINICKVKMKGNNNYRYLTVGRSKRELLYKLAFELLELNKDSFIYQYKLKKLKGYYAYVYSVEKGKVDRLCPPKYVDKLRKYGYSSFSDLIREL

SEQ ID NO: 4865 - protein, 662 aa, unidentified
  source 1..662: note = Related to QUDZ01000002.1; note = Eubacterium sp.
MEYTLLENIKITRPILFLCGPYYNKNNKSDRRLILQEKIYEIHKNKFLPLVIDDFLTEKNIKDNTIDIQLMEEICAAVSAQTYIFLDTMSSAAELGIFANSAFFNKIKVYIPKKSDIYNKSNVGYFVRDVVLMKHSDKIECLEYRPAVERNAIATDYILEYYKFVNNQLPKNIEDDIRNDEIFNESDEHFIEYLDSNMMPDNPYQICYQIRNNKIDVNISIKILFYITISVISIEYKNDIKEKNFSVFDINKIIEQVKSIIINSLSEKTNKDLNTIDEININTVSKHKIEKIIQHIVKFAHIYYLYSQFHSVYLMEKPIGKIIRKIEVGNHPYTLLQLSDSQLDLLQDINNDKDKYYEKIVIEKNKKKREIIKYINNNDGDNAKKIHEYILKKIYSYYRFNDNSYAYQKGKSIKECVNKHIEGKSFIKYDIKKFFESIKEENLYKCLVDIFGIDKRFIGALKRIFNSCFYENTLPLGLTLSPVLSDMYLKKFDDTISRQLEEKGITYSRYADDIMISSKEIIDEKLYHEINKMVTDELVKVNLILNVKKSVFVTFNSKCNFIRYVGVNIVQGINGNYLSVGKKYIYSIAKEYLKYMDKVNVLNSELSSESDEELEELKKNVFYRRMAIIGKVSFLKQIEGDKGCKRLKKRLEKYVDIDLEKI

SEQ ID NO: 4866 - protein, 662 aa, unidentified
  source 1..662: note = Related to DXGH01000009.1; note = Candidatus Acetatifactor stercoripullorum
MEYTLLDKITITRPILFLCGPYYEKSNKSDRRVILQNMLYDTYKNKYLPLVIDDFLTEKNIRDDNISIQIMEEICAAVSYKTYIFLDTMSSATELGIFANSAYVNEISVFVPKVSDIYNRKNVGYFVHDVVLKKHEDRVKCLEYRPGLERKALATDYVVEHYKFVNDSLPSNLARHIKEDPIFGQEDSHPINLREDDVVIPQTPYQICCQRKGNNLTVSISLRLLFYVTVSIISHEYKTFLQSGDEDFSKFDIDDIVDKVNQCIKNFISGKTGKDLSACVIAKLNTVLQEEERTLVYHIAKFVHVYYLYSQFHRFYLVEKPLGNVVDKIAVGNHPYTLCGLKEKDITLLEKIQADQEKYFEQIIVRKNKKKREIIKYREDKNGDQARELHNRMLQGILEYYTANQASYAYRRGRGIKQCVQQHLDGVDFMKYDIRKFFNSIGLEKLTKCFGAALKIDERFFKELYRMLGSCFYHGTLPLGLVLSPILSDIYMNEFDRRAEGFFSSLGFTYTRYADDILVSAKEVMEEEAKEKAEEFVERELKRLSLSINREKVRKARLEKQGDQIRYVGLYIVRGEKENFITVGKSYAYETARECLDYFHKVRRLLVEELPAAEKEKLEKDTFFERRILLGKLGFMEQMEGQRGIDRVEARLKAHGLSILEI

SEQ ID NO: 4867 - protein, 666 aa, unidentified
  source 1..666: note = Related to NZ_VSLA01000025.1; note = Acetobacterium wieringae
MDYILADKLKITRPFVFLCGPNYERNKIADRRNILRENIHRIYKMQGQEVLPLIVDPFLAGKYIDFNKYSVQLLEEICAAVSCQTHILLDTMSVATELGIFANSTYSNELCVYIPKNSDVFNQGNVGTFVREVVLKNPAANIRYFEYRPRIIRRAYSSVFTAEHYAFNNDRIPKNIKEVLKEDAKGNKLICDLPIIYDDSTSIPSEVNHIAYTYKNSKLDINISIKLLFYIVTSIFQQEYPEITKGKIDDLTQAQLHNICTYTENAIINSVSFFLGIDRKSLTETHISTILKIDNKDAIQHIAKFILIYYTKSQFKFMELITSSEYTAIKMKIGEHPDVIFNLSKDQMQVVNFVVKNPELCYECVNLKLGKKVREIIKYAKSEEGDNAKKLHQSMNEMFREEYKHSIYSYAYHQGSSIRKCVDCHINSRSFVKMDIKNFFNCISKDILLKKIENDQNIDKRYEHLLNDIISSIYYNEKLPLGLVMSPIISDYYLFEFDGQVGKYCESKALIYTRYADDIMISSSSTIEEQLYMEIMDFVSNLLNRLNLKLNKDKCESVHFDKNQSFIRYIGINIVKGENGALNYLSVGKKYIYALAKDYLKYDNFCSALENITSEEKEKMQTNVFYMRTELIGKISFIRQIEGERGIERLKVRLCKYYPDIDLKAL

SEQ ID NO: 4868 - protein, 657 aa, unidentified
  source 1..657: note = Related to FPCD01000008.1; note = Butyrivibrio sp.
MKEYMLLDQISIERPIVFLCGPYYNKKDDGDRRKILKQTISNQYSNRILPLIIDDFLTEENIDDKTISIQLMEEICAAVSVKTYIFLDTLSSSAELGIFANSTFMNKIQVYIPKKNDIYNKSNVGYFVREISLKSRPDTIKVLEYRPGVKRNAIASDYIVEFYSFVGNKLPLNIHQSIINDEDLKESKGKTNIEIIESADMPQSHYQICYSITNQELQVNTSIKLMFYVTLAIVSCEYKELFDNKESDFSKISLEEVEQQVKDALYNLIESKTLINKNDLKKISVKTVLKQEQNDNLIRHIVKFLHVFNNNSDYGVLRLFKNPINKIIKQVIKGKTVFDVIKLTQEQIELLMKINSNPDLYYETIEIRTGNKVREIVKYRNDKNGDSARKIHEAINQSLKNEYMYSSNSYAYKKGENIKKCVINHLDGMGFLKYDIRKFFNSISIELLAKKMIIEFDIDPNYVYQLKSVLMACSYNNQIPLGFVTSPIFSDIFMKDVDNKICSVAEKNDCIYTRYADDILISSKQMIGDDMYKNIDLTVKATMLENGLVTNEKKNQFINFDSSHSFLRYIGVNIIHQQTGNIITVGKTYINDVAKDYIEYDQKKNNCQQQLNEELFYSRLRIIGKIAFIKQIEGDVGVERLKRRLYKYDPNIDFDAV

SEQ ID NO: 4869 - protein, 663 aa, unidentified
  source 1..663: note = Related to FR882517.1; note = Firmicutes bacterium CAG:65
MGYILRDEIIIRRPIVFLCGPYCQKTNKSDRRNILRKCFKDNFKDGVLPLIIDDFLTEENIKDPQINIQLMEEIFASISQKTYIFLDTLSAASELGLFMNHAFLNKVVAYIPKESDILNKKNVGYFVKDVILKMNSRQAKYIEYRPAITRSVIATDYAVEHYGFIDDIVPENIRRDLLDDIALKTKKVHLICLDEKETTPMDDYRICYRRKENRIFLNVSISLVFYIVASLMYEKYSAKLVTNPNASIKDFDVDDILRMTTDTFDNYLLRKGLPTNEDIEINTILKCSFRDLIYHIVTFCYIYHCFSTYMGLRLVDRHMDTILEPYADKKMGNPLEIFDISVQDYDFLIQCQKNPEEFYSKFYLLKNGKRREFIKYSETETGKKLRKIHERINDALRKNYVSSEKSYAYKKGSSIKKCVELHQNNNGFIKYDISSFFNSIDMDILLDAVMNIFSINFAYKKVMRNIISSFYYEGMLPLGLVISPVLSDIYMLKFDQQIIEYCEKKNYKYTRYADDILISKETEFETVEYDEIDDLVIKWLRQLKLKLNSKKKKRLFLQKDGQHIKYIGVNIVHFAKGNKLSVGRQYIYDVVKEYYNYREQARKLREYGIGDETHLFYEERRISGKIAFIKAIEGADGWEKVRKRIGDKEGLYIDEKLKFYHIS

SEQ ID NO: 4870 - protein, 668 aa, unidentified
  source 1..668: note = Related to MNRK01000283.1; note = Clostridiales bacterium Nov_37_41
MGYVLRDEVLIKRPIIFLCGPYFKKGNKSDRRYLLRKCFRKHYGDGVLPLIIDDFLTEDNIKDPNINIQLLEEIFAAISCKTYIFLDTLSAASELGLFMNHAFTNSVVAYVPKKSDILNKSNIGYFVKDVILKMNSEQAKYIEYRPAITRNVISSDYAVEHYGFIADIVPENIEKEIASDIIFKDKKEKLLYTEENEQYPDDDFHIFYKKRDGKMILHISIGMLFNVVMSLMYELNQSKLVTNKEATIADFNVDVIQRITKEVFLNYLIKKGIPCGKEIELYTKLSYSFDSIVYHMVTFCYIYHCYSTYRGLRLVDRHMDTVLDACEEISGNNPLQVFGISEEDYSLVECCAREQQKFYTSFTITKGGKKRELVKYVDTEMGDAMRKIHEKMASSLQGKYTSSELSFAYKKGGSIKKCVELHKNNDAYIKYDISKFFNSIEFEKLFEKIKKVFNIDSAYDVITKKIIASFYFQKKLPLGLVISPLMSDIYMLDFDEIIAEFCSMRNCIYTRYADDILISKKTMFIESEYQEINQKVELFLNDLKLKINSKKTKRVFLEKDGQHIKYIGINIVHFDTGNKLSVGRKYIYDVVNEYYQYLEDLEMLKVNDYEDERERLFYQERIIAGKLAFIQSIEGSDGWQRIRARFGKNAYLCENNRLSLNNLRDKVG

SEQ ID NO: 4871 - protein, 905 aa, unidentified
  source 1..905: note = Related to JAFVBO010000076.1; note = Lachnospiraceae bacterium
MSKTKIADIYAGLPDAKEAIQYEGIRDFMDAFVIPPEFPLDEGLARGNKMFITGNKGMGKTAALRYLNDYLSRMNKSTKSSFMLFEQDYNDRRKAEMLNQARSSLCLLGIEPDEKINQDDFSYIWRWHIFMTILRQNGENMREAIFLQDDTWKRFNKLLFSVIKPDFTPTLSGSLSVGLPFFGPIQPEITLNLPEIRLGKGKGTFEEIMEEATDCFKELIRFNSPYYLFIDELDVYRGQREEYLRDLRMVRDLIREVKFLNRLMQTAGWNNTKLFCTIRPEVIHAIDRELSGNIGRQITGFDCPLTWFRNTRETYTQPIMHLLMRRIELAEEKNGERIGSEEERYKRWFPQGETGEEPSDIFRRITWSRPRDIVRFLICAGNRCGGQKAFSETVFQAVKKDYSFGSLEEVKTELLALYTVEEVEAMFDCLRGLPACITLADVARRTESMKCKPVSVYGLQRVLGDLYRVGVIGQKKGNILRWQHEGDDGLFYSGDWEIVIHPGLCDALYIQEVETSAQEQAQLETQQHTSGTKSTNQELQVKDSATKPKDPVMSSELSHEMKAHQEEAREAPIFGLSEEQYQLLLDSRKTPSLYFQAFTLKTNGKTRELIRYKDNEYGEKIRQVHETAANDLQKQYRQHEASYAYRAGGSIEKCVSAHVGSTCFLKFDIHHFFNSIDAALLASEIRAQLHLTALSKESVEEFVQCFFIDGILPLGLVISPLLSDIYLHSLDENMETFCRQQRCIYSRYADDIMISGVGLQMDQMETVFSGRLSNLLKEKKLEINPLKTQKMFLKESGQYIRYVGINIVRAAEGNVLTVGRSYIHQLAKDFLDFARRKDDARTKNGEALSEADQQYLFYQGRRLAGKVQFVKQVEGDAGVEKILRRIQPHWIVEDEADLMRFCLGK

SEQ ID NO: 4872 - protein, 666 aa, unidentified
  source 1..666: note = Related to AP018794.1; note = Lachnospiraceae bacterium KM106-2
MCKIMILVLKKKIKIDRPIIFLCGPFYKASDKNDRRNILKDFLLTESDKKCIPLIIDDFVTEENIKDTTISIQLLEEIFAAIALKTYVFLDTMSAATELGLFTNNAFINKVQAYIPVENDIIYKNIGYFVKDVVLDNKSGRVAYMEYHPRIKRVPIATDYVVEHYEFINNILPLNIQEGVRKDLHSSLWNEKEVEINESAELPSDHYKINYKYDVEDNILRVNLSVQYLFYIVGGLIYSEYSDELVKNETIDFDDSCIEILEEKIKLMLRMFIQMNIFCGINQRTYVQVNTVIKDKMSNIIRHMVKFIFLYHQKSRLNGYFLVNKKSILKEVIVGKSPIDFFHFTENDISYIKDINSNKGKYYECLNLKLKGKKRELVTYSENDREGKANYAKYIHKKVVSIILENYQYSNSSYAYRKGYSIKDCVAMHKNSTFFLKFDISKFFNSIDLDILVMTIMEEFSIGKSFKMHVEEIVSTCFIDNEMQLGLILSPILSDIYMKKFDQVLERMGKECGFIYTRYADDILISSSNIIADQDIQIIKNAIQSELKLLKLKENSKKYKKIYLKSIGQHIKFLGLNIVRMMDENKITVGKEYKNYIAKEYLQFIDMKVNDEEDKKCKFYWGKRIIGYLSFVKMIEGEKGENEVYIRILKSTGGRIAFERERLQGE

SEQ ID NO: 4873 - protein, 681 aa, unidentified
  source 1..681: note = Related to SWPB01000023.1; note = Clostridium botulinum
MYVIDDKIRIDKPIVFLCGPYYDPKDKCDRRTILKKYLIDKGNFLPLIIDDFLIDDNIKDKNINIQLLEEIFSNISVKTLIFLDTFSTSAELGLFANNSFSNKITVFLPQKSDILGVDNIGFFVSDIILKQDPNRINYLSYRPKILRVPVASDYVKEFFGFINNEVPKNIKNELDKNLISKRENYYINIEFDDLNLRNNSSNINIEKISVNDNGRDITFYISIHMLFYLVVAIVYKNYYEKLDGDKKLSKGKNISNKKDNTKIKNNKNFTVNQVKNVERLVREYIFNTYCNHKGSYNKNTNVVIETKLERKLFEIIKHMMKFIYVYHAHAKYMSNNFISDPNNIIKDVSEENPVKMFNISKEDFGLINDIKNNPDRYYEKRIIITNKKKREIVKYRNNDFGMQIRKLHTKIANVLEKIYIFHESSYAYRKRKSIVDCINTHRINNYFLKYDIKSFFNSINKKILLAGVCHELKIDIKAYGKEIESIFSTCFYNNKLPLGLITSPILSDIYMKVFDVKLTNYLTEKYNTCVYTRYADDILISNGEMLEKEKEDEIDNYIINELKGISLKLNDKKIRKVKISETGDHFKFLGVNIVKGEEDNYLTVGRERINDVAKLYLKYRHIKDTYLNDKTNDKWIFYTQKRIVGQIAFINQVEGIIGYKKLENRILKCSKGNVILTNNIQ

SEQ ID NO: 4874 - protein, 659 aa, unidentified
  source 1..659: note = Related to JAGZEQ010000023.1; note = Firmicutes bacterium
MGENKMAYILKDEIKINKPIIFLCGPYYNDLDKSDRRKILQDFLLENFPKKCLPLIIDDFLTKENIGDNEISIQLFIKIFAGISFKTYIFLDTMSSAVELGLFTNSAYNNSLYIMLPYEKERNCGNIGVFTSNVVLEDNADRITVRYYHPKIERIAFSTDNVGEFYKFINDCLPEKIRKDILQDYAENINLEHEIQIAHKEDYPQNDYCVNYQYNNTENSLIVFISVKLLFYIICGIVYSEYTENLRKKEKLDFDSYNIYTTVAHLKSLIMAFLMKHTFVGINSKTKVDIQTVLTRNIEDIVKHIISFIFTYHKNSRLKGYFLVGKNEIIKELELQISPVDFFDLTVKDIEILNLFKNKPDDFFSTFEIKTGYKKRKITTYKNNIYGNAMRELHQKICLVLNKQYVFDIHSYAYQKNKSVKKCIECHKKSKSFLKFDIHKFFNSIDKRKLSQKLLYEFELDEIYEEQLLNVLDICFDEEKMPIGLITSPILSDIYMKKFDVEFSNELGENYIYTRYADDILVSSANNISLEEEIRITRLLVSKLKVLGLKMNNKKYMKRNLKAIGDYVKYLGINIVVAKNGNIITVGKTYKNYIAKTYLRYIEIDDENREEKFYLGKKIAGYLSFVNMIEGEDGLKKIYTRIEKSTKGEIKIEGKITDL

SEQ ID NO: 4875 - protein, 587 aa, unidentified
  source 1..587: note = Related to FMEJ01000011.1; note = Clostridium sp.
MVYALNDKIKIERPIVFLCGPYYKSGDVSDRRRILNKVLLDEYKCLPLIIDNFLTPDNIGDDTISIQLLEEIFAGISFKTYIFLDTMSSAVELGLFTNNVYNNSISVFVPHLEDRNCGTIGVFVNDNVLTNNKNVKKICYHPKIERVAFSTDYVGEYYKFVNNQLPTVIKNSIDQDFEEIGDREFKIKLKCFNDYPKDDFVINYRFNEKENTLIVFISVKLLFYIVGDIIYAEYSNNLASKKNLRITSDHIRLVMAQLNSLIRILFLKNSLVAINGKTNIVIQTVLKRNIDEVVKHIVSFIFTYHINRRVKGYYLTHHGDILKELNLKLSPQDIFKFNDIDIDLIRKIDKSFYKEFEIKSSRKKRKIVTYNDDENGKKLRELHKKMALNLQKKYKFSEYSYAYQKGKSVVNCIERHINSVHFLKFDIHKFFNSIDIHRLSKQISNLYQLDKFYEKQLLEILKTCFNDEKMPIGLITSPIISDVFMHDFDVEFASKLNKDYVYTRYADDILISCSHAISQDELDNIILILKIMLNRKGLSLNEKKTANVLLKDKGDYIKYLGLNIVKCEKSNRITVGKNIKMILLRII

SEQ ID NO: 4876 - protein, 328 aa, unidentified
  source 1..328: note = Related to JAFVYW010000089.1; note = Clostridia bacterium
MFGYLTLYFKDMERALSVANGYLADPDKYTKVHVVPMNGKVRKLRAYADNKEGKRLRELHEAVARFVWDAFQSSNMSYAYKKGRSIVDCVRAHINGKVFLKTDIHAFFDSTKLSTFLQMFLRSPKFMADKPKLTTILSACFYDGTLPLGFVSSPAISDFFLHEVDRRMQMLSGIVYTRYADDFLISSINVGAQFVLENALKVLKGEIQKLGLELNERKTFYRPLKNIGDSIHFLGLNLVRTSYPFNRVTVSNSYIRETSIDLAAALQKSDQKAYEAARGKISFVSMCSPESFEKLKKLVMIKFHLDLEEMLDSKTVQEAKLAIHLNRK

SEQ ID NO: 4877 - protein, 308 aa, unidentified
  source 1..308: note = Related to DXFX01000070.1; note = Candidatus Borkfalkia faecipullorum
MKMPEKCFSTAKEYQCNPAEFVREHVVTINGKKRTLRAYAYGSGGEELRALHTAVAQIISSGYMPSNASVAYKKGDNIVKCVSRHLSGCVFFKSDIVSFFESITLEKFMDRLKDSLLDKNSDLKKLLPACFYENMLPLGFCCSPILSDFYLSDIDKKYENGQGYVYTRYADDFIVSSRVESGEEILEELREKLWDDMESVGLDLNEKKTYIRRLDHDGDHFHALGLNIVRREKGKNIITVGDAYLRETCKQLTAIVGGETNNEEDICAVRGKIEFIRMASQDSYRKFERLVKVKTGSSLQAISERLSD

SEQ ID NO: 4878 - protein, 319 aa, unidentified
  source 1..319: note = Related to JAFSFB010000001.1; note = Clostridia bacterium
MKKIDKLIRVAEGYIANEDAYIRHFVVVINGKRRKLATYANSENGNALRELHTYMASFIRRLYQQSNASFAYAKGKNIIDCIKVHIRSDVFLKTDIHSYFNSITFEGAERVLNRHKTYQKNSDSMGILLKACFYNGRLPLGFVSSPVISDIFLVALDRKYSKRKDILYTRYADDFIISARGENSVSVLDEVRETLSDDLGKQGLFLNTKKTYIRTLKQAGDAIHLLGVNLVKTENEENRITVSDRYIRETSKGFSDLMNFNGDIEEKTELCNTVCGQISFIQMCSQDSLNKLQKMVRVKCGYSGSLQAKAICRACGLEK

SEQ ID NO: 4879 - protein, 331 aa, unidentified
  source 1..331: note = Related to JAFWGQ010000010.1; note = Mogibacterium sp.
MRGKYSKSWSIDTMYTDARSTVEQYNEDPEKYVRSFTVRINGKKRNIITYTPDRNGAALRNIHSRFAFTISHCYQSMPDSFAYKKGSGILTCLSQHLQSDTFFKTDIHDYFNSIKFETLLSMFQEDKTCKRRMKKIKALLSLCFYNDHMPIGFITSPVLSDLYLHKVDESFLGRYDVIYTRYADDFIISGKNNMSSLEKAKNELEESLSEYGLSLNAKKTYFRTLHRPGDAIHVLGVNLVNNDPDPNRITVSDRYIRETSKDICRFLSEYQDQTKEENEIALSSAIGKIEFIRFVSPSSYSKLEKMVRIKHGEAVDLSRAMLEGLIKKNNS

SEQ ID NO: 4880 - protein, 700 aa, unidentified
  source 1..700: note = Related to JAFUFH010000088.1; note = Bacilli bacterium
MALSFFLFMYITNFICSLDSRRPLVFLCGPAYSPNPQDRRWILSHYIQSKWSEKEKDKYVHAFPIVVDELFKPDEIKEKKLDIRLNILEEIVSKISYKTYIFLDTMSTSYEMGQFTNFAYNNDSVTIFVDKKYRGRKNNAIGEYIRLSIDKSFVEYTASYDNNGLIYFPEKDGKGKTRIPKEILKVLEDDNPVKKGCFLNKILFSTYINDLNKPGYIVYHRSKDLLSFNFCIRNLFYYISSVYKLLSKSSQALLNEIPQSPRDYRFKEFVKFFKQELLKTFVCVNNSSNISFLLTADFSIEVNVENLDCDELIYHMLYISYKLFNIKSSSSRYLIPEASDQSSFDSIYFVDGLEMFGLFDNETMCALDKNRYLPHKQCISFRTLKIKNKTRNILAYRNNFFGERLRGLHQTILDSFLSKLPTSKSSYAYKKGKNTLVCLKQHEGNYYFAKFDIHKYFESIRLKMLGNKIQNYFYKKINALLSNLSLSYSNKKRINSKLTSILKPLFYKYQLPIGFVSSPKISDFYLFECDERMNKQKGIIYTRYADDILISSKSKGELDEGIRLLKSLLREEELVLNEKKTRFAVLNHENDSFKFLGINIVRRKGDLFDYTISNTYLVQTCKMFFKVFEEWEWKKDINEVIKVNGRISYIKNISNNSFKRFLHLLKVKFKDGTTISDLYWRLIWMDCPLYLELPKDIIMS

SEQ ID NO: 4881 - protein, 610 aa, unidentified
  source 1..610: note = Related to CP074575.1; note = Tenericutes bacterium
MEEILAKVSASTFVFLDTLSTAAEYGMFTNAQANNFTYTLLPYEEDIINDAVGYYVKKSIRENRDIREIVDLVRYHPKVNRYAKSSDVVDEFFGFIKDELPISIEESVKKSLLRNKEKYEIDFSITNESSSDFFIKLTSDVLEPQRYNILCSTKLLFYIIEGFLKDEYGNKSEILINQFKYNLDDYVSSVIGNVNSLVINSLVTHNTITPLEAVNSKFDIDVDLSESIFDVVKHMIEFLILFRNGGNKYSKRRSLISNPNEIFTRFKSKISKNDSSFTNMITNDKQLINFTKIALQKPSYEYNKLAYSSFIVSSPKKKRRIVTYSKTEYGQNARVLHKNIVAFLNNHVLSDSNSYAYKTGRSTYDCVLPHLNSQYFFKADISSFFNSINSDILVSKIVNHIEDFNVQQSTIRDILHTQIENMVNNCYYLNKLPIGFVSSPKLSDIYLFEFDKEIGEYCKNRNRIYSRYADDIMISSENEIDIESIKKSVIDSLSKVKLTINSKKLENKKLLSIGDNVKFLGLNIVKKELGNTISVGKSYVSEATIEFCDIVLNKDINQRVKKVIGKLKYIIYQDPTKSKQIERIIKSKLLSSYNFTSSNDFMTLYKQLSE

SEQ ID NO: 4882 - protein, 690 aa, unidentified
  source 1..690: note = Related to JAIWZC010000001.1; note = Enterocloster clostridioformis
MLVPSFPISIALPVSQSSFIKWLFFVWEKMMNRTPEEVINLRPLVFLCGPLYDPSDKKDRRKILRQYLTRYKTTLSYNGKDYVIEPFALIIDKVFNTEDLENNQNIALIEEVIAACAYKNYIFIDTMSTALELGLFANSYSQNRTTALLPKDFRSFKPSIGYFVQQTIKKSDNIALCIYGNKRINKFIDGGRQVIENLVAFKSHQIPREIERDIKKDFSKGIESFILRIEFTTNIKDAEKILYQVNTEGIRMVIPPRILFYLVETFGSINNIKNALLDYFEYYECEKDKELVIMSILIRKGLCILELDSPFEYSIIDVIGSMSYFIEKLKTRVAFHQNYERLRYAPIKRWRSRKRFSACELLGLDIIEMRQMQSLFGYNKKKSVISKNLLINGKKRKIKMYSCTSEGFALRNFHLRLMKQLQKLFELQPYSYAYRKDRSILMCMNQHIDSKFFLKIDIRDFFNSISKGKMNKIIKCHLCYDPKQAYEDNVIWRKSRYLGEYVKEWLGIKEITDICFVNGRLALGMVTSPILSNIYMDFFDARFHDNYPELVYTRYSDDILISSGKWFDYKSILNFIAKELCYLGLEMNEHKVGFYKLKQAGDHIKFLGLNIVHGPAEENYITVGKQYIKDVCSNISQYEKKIGLFKKSQIIGQIEYIKFISTRDYLQLQKIYRIKNHKDLNVEELNRVGL

SEQ ID NO: 4883 - protein, 1740 aa, unidentified
  source 1..1740: note = Related to SVBB01000024.1; note = Erysipelotrichaceae bacterium
MAKFSYEQYKKVVGKATVKPEINVESVKGYLDNPNQYVFPFAINEKNGKTRTIITYNESSDGKNLRKVHELLAKDFEDNFAERNQYSYAYHKGIRCYNALEAHLKSNYFIKLDIHHFFESITLENFLDIYGEYFNKNWREILQYLFYFGSLSIGFVTSPLLSDFYMKKFDNAIEEYLKDYPELHFSRYSDDIMISSESKDNDTSLEALFIFIKEQLKQLRLETNESKTKKIKLNLEKHNSFSFLGLNLSKIDEENNKVTISKRYILFILFLIAKQKRYKNNCTPLDNEIKSRVAYLAYNSEISFERFQKKHINIYGEPYNFIPKVLEKREVGQTTDTIKDYSEYKDEFEFNIHSKADGANTSGYQIKNGITLTKYLGKKEEVIIPDFVDIIGDYVFMGHKIKKVILGNNVKIIGNDAFRNSTIEEIVMNDSLRHIGNGAFQNCKNIKKVVIPSYIKYVSNNTFAESGLEEITLPEGLIKIKMGAFAQSNIQNINFPTTLEAIEYNAFTECTKLSRVDLSKTNITSLGVGAFSNCVQLKEAILPEGLSTIENNLFSNCSLLKEINIPAKVGYINNSAFSNCYSLSSIKVSDGVAFLSRKDNASIVKKNHELLFTLKDKIDEDIQIIGRGLFAGVAIKNIVIPEGVKIIKEDAFKGCLWLKSITLPESLEEIGNNAFEKCISLEEIVIPSKVKALPNGLFANCSNLVKVVMGEEVTSIGDNCFANDKKLSIKLPKELMLIGEGAFKNCYNIKDLYIPYKVKEIKKNAFIGMSKHLNSIKVDNKNLVYSSGEDNNILFLQKKGSLILGTNHSTIPGGIKSIGNYAFAYNSELEEIDLPETVTTIGESAFKGCTNLRKVNLHYVSKIEKHAFENTPNLKDIFLPNSLTHIEECAFLNSGLTSITLPNSLVKLDKKAFRGCRNVKDIHIPASYTRSLSALLTTGSEEINYIEIDPDNSMYRCVDNKVIIIKAINNDPEKILFVCNGVKEIPNVPVIMDMAFKGVKGLKEIVIPNKVCVIGSNAFESCPDLEKVTFKYDDDIEIKDNAFKNCPNLKEVVLPKLLTIISANLFYNCPNLKKVKIPEGVKVIGDRAFSYTGLEKVTIRKDLVNIGNDAFASTNLKDVIIEEGVKKLSYGLFTETKISNITLPNSLEAVPGNLFAGCKELTSIVIPDKVASIGSSSFSNCTSLKEVKLPDNLEIIEESTFYKCVNLENINFPTKLKEIKSFAFYHCHKLNVPAFNEGLESIFSNSFNSVETLKDLALPSTLKYFNNSAFAYCPIESIKVSPGGMYQSNNNALTYHNKNAFNELILGCKNTTLDDSINFIAPYAFNNIDSLLEVVLPKNVTTISSNAFSDCHNIKRIILNDKLESVQSGAFDSNLCIDELKIPANTKYFGYLPKEVNKIAIDKNNILYSDFGIGVFATKDGKILMTTPTSSLPVEGITSINRDCYNNRKFTKVELPSTLISLGGFNNCEIDELFIPDSVKTISLFAINSIIKKITVSENNPYYIASEDGTMILTRSKKQIVYLGENTVIPEGITVATTNDLITSIHYPSTISDRALSLEPRGIKQIDIAKDHPTVAANNNTLYRKLDGGLIYAVNGEEIADEVTKITNLNLGKFDNVIIPKNVNLILPRALGGLIIDNIAAHKDNKMFDSRDNCNAIIHTSTNTVLFIARNGRVPDGCVVTPTTIDQRVKDVTSIEIENNYSGYETLSYNVIQRLNNNPQTTTKSSFSTIAFDSDDDLPF

SEQ ID NO: 4884 - protein, 332 aa, unidentified
  source 1..332: note = Related to JAFSUM010000023.1; note = Bacilli bacterium
MIEVVAYSLSFSPQFVAECAGSSPWSRSFYRRVSIPKKNKPNERRIIYLPSPEIKLMQHFLVERYISKLPVHGSATAYRRGSSVVKNAKAHTGNSHFLLMDIESFFDSIQRGRVKRMLLNNGVFVNPADAEMLISLCTYDGHFVQGCVSSPSVANAYLYEFDNKMDMLARGLPNGVYTRYSDDIVLSSSERIPGQIAAEVAAALAEFGLRINHKKTHFISNRQRIHITGIRLKDNKKLGLNTLFKKELKNDVYQFWKKCSLSGADLKDKNRLYGKLAYLKMADPSYYNTIITKYRFGCRTLLDFLHCLVLENDHLMLPPDKRFTDCSSNRIE

SEQ ID NO: 4885 - protein, 319 aa, unidentified
  source 1..319: note = Related to NC_022549.1; note = Paracholeplasma sp.
MGIVREDISDTFNMDMKRVSIYVNKSNQFYKKIAIPKRKGGTREVYLPSSDIKMLQHYISEKYFSKIQLSSNATAYIKSKSIIDNARPHIKNKHFLFTDISNFFDNIKRNLFSEILLKELPFLSPYDVEDILSICTYKNRFVQGAVTSPIISNIYLKSFDEFLQGVVKNIPNGVYTRYSDDITISSSEFLNENITKIIADELSKLGLFVNNTKTYFSSFVDEIEITGLKISGNRISLSNKKKREIKNMIYHKFNKKSNSSETAEQIIGHMFYLRQIEPQYYNTLNLKYKKKKKLLIDRLFLLKNEENIQKCTATSNIQT

SEQ ID NO: 4886 - protein, 322 aa, unidentified
  source 1..322: note = Related to NZ_NFJF01000003.1; note = Olsenella sp.
MIPVSTAIARGVGVSTDYVLGLPERVDSLYRSRIIAKDRSGQGKARVISVPDPSLQLVQEWIADFVRENTSELPPYVAAYETGRSIVQNALIHASHRHLLTLDIHHFFPSCTREMVVVKVFSGMSARDGETGQRHQLGADDVDLLASLSCYKGALAVGSPCSPFIANRIMLPVDGEIIAALPDGYAYSRYSDDISISSDSRINTGLITQIVEKILSDHGFSLNRSKTHCRGTGNARRVTGVFLTSDGSLSIGRDRKKELCRQLYALLKKQEGSPSRVLGMLFFCKQVEPEYFNTLVAKYATYGLANDYGGVIPALQALRRKM

SEQ ID NO: 4887 - protein, 313 aa, unidentified
  source 1..313: note = Related to VOWY01000007.1; note = Collinsella sp.
MSIVEEIASDLGFSKSYIKEIAEGAGGRYRKVLLNGRRIDVPSSDLKLVQGWIACLLQECMPCDAGYITAYEPGRSVISNALLHSENAHLITLDITGFFRSCTTEMVKSVFSQLRFVSHGSNNKTAVSKKDIELLTQLSCYRGSLPMGSPCSPGIANRIMVPVDQEIIRVLPPDCSYSRYSDDIAISSSQWLDIQGIVGLLEVVLAEYGFNVNHKKVHCYGKGDARKITGIYIHPDGTLGIGKSRKALLSRSLYLLLTRQTGSASELLGHLNFCKQVDPDLFVRLIAKYSSYGVAVEYGGVMPALVEMANREG

SEQ ID NO: 4888 - protein, 303 aa, unidentified
  source 1..303: note = Related to JABZGZ010000043.1; note = Atopobium sp.
MSIIKMISSDLSMGQNEILSIANSADSSHYHKFISGGRRIDAPDQMLKLLQFWVADFVCMETPELPDYVTAYEQGRSIKNNASMHAQNAHVINLDIHHFFQSCTKDMVKNLFASIEGYNLTSEDLKLLVSISTYKGHLTIGSPCSPFIANRIALPIDYDIKLKLPNDMEYSRYSDDISISSNNYIDYEVIVDIIGNVLSSHGFEINRKKTHCFGKGGRRHVTGIFINPDGTLSLGHRRKKQLESMLYKYLMRSKGNPNEILGFINFCNYVEPDFTRRTLLKYSKYGFARNYSSVVDYLRQIKG

SEQ ID NO: 4889 - protein, 312 aa, unidentified
  source 1..312: note = Related to NZ_QVPV01000001.1; note = Adlercreutzia equolifaciens
MTKTSISALIQSDLGLETGYIESLAERASALYSRIKLKGRRIDAPSPELKLVQCWSSDFLHSADGDLPSFVAAYEPSCSVIRNASMHADHAHIARLDISDFFHSCKHAMVETVFRGIRFQPLPDGEWLKLEEADVTLLARLSCYKGALSVGSPCSPALANRIMLPFDRDIEANIPSSCRYSRYSDDMVFSSNCWIDIAALESTVDEILSTSGFRLNRRKTRCSGKGDRRRVTGVFVTPEGELSIGSKRKHEIKRLLYDYLTKGQGDADVILGLIQFAIQVEPKWASVLLAKYAKYGEARQYGVIGALRNASE

SEQ ID NO: 4890 - protein, 318 aa, unidentified
  source 1..318: note = Related to QSBV01000001.1; note = Collinsella sp.
MEALPVSIADRICFDLGMTNRQLLGLVSSTADRYHCFSAGGRKIVAPRPDLKLVQCWISDYINTEFDIDLPYATAYKKGSSVCRNAGLHAKSSHFLLLDICHFFESCTQQMVRNLFSGGTYRPTNAEFRSRLTADDVDLLVALSCYRGSLATGSPCSPFIANRIMASFDHEIAARLGERFVYSRYSDDICISSTEWIDSAEISTFVGSRLRQKGFDLNSDKTRCFGRGHLRKITGIYLDCDGVLRLGPQRKAELKRSLYQVLMRECDRECALRVLGHLSFCKQVEPDFCNALLAKYASYGKAVSSGGVMPALVELAYG

SEQ ID NO: 4891 - protein, 302 aa, unidentified
  source 1..302: note = Related to JAAXUU010000117.1; note = Actinomycetia bacterium
MADDLLLDEEYVTKLVNSSARYYLTHLLEIKGKKRKVHKPLPDICLLQYWVIENILSQAPTPARCATAYEKGSCILANAAVHKDNSHIMQLDIKHFFDSITSDMVFDYYIGLDARLSDADARALQRISTYRGTLTVGSPISPFLANRIMIPVDIEIQECLPSGITYTRYSDDMCFSSPEFIEPQLIDAIQEVLSRYSLRLNTAKTHFSGRGDRQKVTGVVLIAGGKLSLGSMRKSALKKMLYEFVRYGKGNPSKILGHINFCKSIDPESVESILMKYSTRGPAVELLKAAIARSESERISEG

SEQ ID NO: 4892 - protein, 306 aa, unidentified
  source 1..306: note = Related to DMNP01000113.1; note = Eggerthellaceae bacterium
MSVLDLMAFDLLLDRDYLESILHNKRGQYRRIRLQNDRVVWQPSATLALMQYWLVDWISEMDKRELPFATAYEPGMGIVVNAKRHIGAKHALAMDIHKFFPSIGAHMLGGYFASTIEESGASAGIEDRDIGLLLDIALFNGGLVMGSPCAPYLANRVMAPVDERIWLEVANTRGLTYTRYSDDLFFSSPEWIEPSIVGEIAILLQECGLQVNSSKTRFMSEGTGINIAGVYVGQKRITLGQKRKRELKERLYQFCTNDNPTPDSARSLLGFLSFCKSVEPSYVGFMLTKYSTYGGDIMLRIKDACS

SEQ ID NO: 4893 - protein, 321 aa, unidentified
  source 1..321: note = Related to JABLXJ010000013.1; note = Firmicutes bacterium
MSLIERISRSLDIDENLIKTIARTSNKYYRVFSISKKFGGVRSIYHPSPILKVFQYWLVQNLISHLPVSEHATAYGLGCSIKRNAQLHAAAKHIVRMDVKNFFPSIRFQLLADRINAFRDTIPGGASLTEEDLQLINGICFVRGRLVIGSVCAPAISNAVMYPFDCEVSQQARALHLTYSRYADDIVFSSNEWIHPSIVEDIDGRLGKFGMKLNREKTIFMGGSDRKMVTGILLNTGRLSIGRARKESIKKMLYQKLRTGAGDNRKILGYLNYLRDIEPDTFNRMVVKYNSFFGRNIMRVLTEAPADTRKAQAEAAPTKKP

SEQ ID NO: 4894 - protein, 303 aa, unidentified
  source 1..303: note = Related to SVEQ01000005.1; note = Lachnospiraceae bacterium
MGIENRIANNLGLDPQYIINISKRNDLYRKFYIKKRNGKLREILHPSKELKIIQIWLVKNIFDEFPVSEYSYAYSKGNSIKNNAKEHCYSNYIFQADISNFFPSIDRAKLETYFDENKFIVDKLGLTDEDIDFILDVCLYKGEYLVVGSCASPCISNLIMYKFDNELNKKLLKEGKYIYTRYADDIAISSKNYISVTIRDIVESELKKMGFSINNQKTHFSNKKSRRRITGVVLDNNSCKMTIGNKKYKGFQRKLYNYLVKGEGDEGYIKGYLSFIKDLNIEQYKQLKKTYKRYDKKKKFFTD

SEQ ID NO: 4895 - protein, 307 aa, unidentified
  source 1..307: note = Related to QVFD01000002.1; note = Coprococcus catus
MRLSERIAKGIGIDESYVIIIASRNNLYAKYYIPKKNGRYRLILQPSKELKVLQHWLLRNIFAYFPVSEYSSAYSKGNSVRKNAAVHKEGRYLLHTDITNFFPTISRTMLKQYFQSNESLTRKLGMADEDIELILDICLYRGENLVVGSVASPQIANMLMYAFDLELKQMLDGFGSFRYTRYADDIVISSMSFIDEQVLKQTEQLMIKYGFKMNHEKTYYMGKNGKRQVTGIVLDNNRNALTIGNKKYKKFQRMLYDYLVKGHGDLGYIKGYLAYIQEVSRQQYDQLAEIYKRYDIENVLFHNANGR

SEQ ID NO: 4896 - protein, 300 aa, unidentified
  source 1..300: note = Related to JAFTQC010000025.1; note = Clostridia bacterium
MNLLEQMNRDLGIDKQYIRNCAKRNNLYARYYIKKKNGGRREILQPSKELKVLQYWLINNFFNQFPISPYSSAYQKGCSIRKNADCHKYGKYILHTDIVHFFESITSKSMNSFFLRNKDILGDMHLTFDETRLILNLVLYKGAYLVVGSVASPMISNCFMYEFDMKLGEIITKRNMKYTRYADDIVISSDNYIDNSILDEIDILLNEYGFKRNIDKTYFMCKRKKREVTGLVIDNNDNSLSIGHKKYNQLKRDIYNYLIKKQGNCNQIKGKLAHLKNVNIDKYIAIKKIYSKYDKSHEIF

SEQ ID NO: 4897 - protein, 307 aa, unidentified
  source 1..307: note = Related to JACSRA010000017.1; note = Clostridium sp.
MSLLQRMSSELRLDPDFIMSTVNSTKKYRIYKKGSKFIYNSSGELKTLQYWLNSKIFSILEYSKFTAAYQKGCSIKKNASIHSKSNYILHTDIENFFNNITEYHINILLEEINQLGKSDKELIKKIILYKGHLVIGSVSAPHISNCVMYKFDIELYDTIINNTNMKYTRYADDITISSKEYITHDVIKKVEALLVKYKFSINNNKTYFSSRATRRRVTGITIDNSTNELSLGHKKYKFIKKEIYNFLVKEQGCKDKILGNLAFIKDINSKKYDELKSVYLKYDKEGIVFSKEEKDIELKDEHEISSY

SEQ ID NO: 4898 - protein, 312 aa, unidentified
  source 1..312: note = Related to NZ_CP022106.1; note = Halobacillus halophilus
MSMLERISNDLNLKVSFIENVLKHPKKQYRIYYIRKRNGGQRKIYHPSPVLKTLQYWLVNNVFNEFNVSIYATGYIKGKSIKDNAEAHKDSNFILNMDIENFFESINKKHVNELVNANGEYSSLDIYHLNKICFYGDFLPVGSVCSPHISNCIMYKFDNEVVEKLPNNFRYTRYADDITVSSSSYINDNVQVILEELLEKYEFRVNHNKTRYMSKKQSQMITGLNVNDGKVTIGTDIKKQLKKDLYNNLTKGTGDSEVILGKLNFLKSIEPDYFNKLIIKYSKYANVLNKLKNDVKEQKNIPIEINKSIEHT

SEQ ID NO: 4899 - protein, 304 aa, unidentified
  source 1..304: note = Related to JAFRUO010000020.1; note = Clostridia bacterium
MNIIDIMADDLKLDSSYILKIANRSDFYYKDYTIKKKNGGFRHISQPSPELKTLQYWIVKNILCKLPISNIASAYNKGNSIKKHAQIHSGAKHILHTDINNFFPSIHFSHLSSILFKHKYIFENLSIDINDSLPYISKICFRGDGLSIGAVSSPIISNIIMNSFDERLYDYCKANNYLCSRYADDIYISSNSYINDSVVVFISNLLDDLDMSINSSKTRFYSTKYRMSVTGLIITNDSRITIGSKRRSEIEKMVYNKIVNGIGDKYSIMGYLAFLKDIEPNTYNNLIIKYSKYCDGDVINKILE

SEQ ID NO: 4900 - protein, 307 aa, unidentified
  source 1..307: note = Related to JAGBXM010000051.1; note = Clostridia bacterium
MTLIEKISLDLNLDKLYLARIISRSGFYYKDFIIPKKNGGFRRISQPSAELKTLQYWITKNILCKIPISKAACAYKKGDSIKKHALLHCKSRHILHTDIKDFFESVDSSKLIKILEKNHSVFEDINLDYNSSIDDIRKICFRKNKLCIGSVSSPIISNIVMYDFDNALTGYCKENGLIYSRYADDIYVSSDKFINHDILEFISNELNKCGLSINRSKTRFYSSKYKRSVTGIVITNDSHISVGTKRRTMIKNMIYNKLVNSEGDSNEILGYLSFLKDIEPDTYQRYLIKYSKFCTTDVLTALSDKNT

SEQ ID NO: 4901 - protein, 305 aa, unidentified
  source 1..305: note = Related to JAGAZX010000174.1; note = Oscillospiraceae bacterium
MNILEKISLDLKLDLTYISRIADRSSFYYRKYTIEKKSGGFREIYQPSAELKTLQYWVVHNVLCALPISEEACAYNKGNSIKKHAEKHQKSKFLFHTDIRNFFPSIHMSHLAPILRANKGIFDKLGLDLEQSIQNIGKICFKSDSLCIGTVSSPIISNIIMYAFDVQMAEYCKAKNYIYTRYADDIYISSNNFIPIDIVSFIASNLSQNGFTINSGKTKFYSTKYRRKITGLIITHDGKVSVGLQKRNEIKKMVYDKLIHNKGDSLKILGYLAFLNDVDPKAYNDIIIKYSQYCSGDIISALNKS

SEQ ID NO: 4902 - protein, 304 aa, unidentified
  source 1..304: note = Related to JAFRDB010000067.1; note = Clostridia bacterium
MNIIARMAQDFKIDHSYLSKIVYRSAFYYKDYYINKRDGKTRRISQASPQLKAMQYWIVENILAKIPVSKGAYAYKKGDSIKRHADIHRLSKHIFHTDIKDFFFNIHFEMLRCALSNHSHIFDEIGIDSSEAFSDIKKICFRNDELCIGTVSSPIISNIVMYNFDEKMIDYCNRNGWIYSRYADDIYISSNYYIPKEVKNFVSAELSDNGFKINTKKTSFISNKYCRKVTGVVLSNDGRVSVGTKQRNAIRKMVYDKIIHKKGSPETILGYIAFLKDIEPQTYNNIIIKYSKYCAGDVIDEISK

SEQ ID NO: 4903 - protein, 303 aa, unidentified
  source 1..303: note = Related to JAFTXX010000014.1; note = Clostridia bacterium
MKMVDKIAADLCLDPDYIASVIKRSRFYYRDYYIDKRDGGRRKISQPSPELKTLQYWVVNNILNKFPISNSAHAYQKGSSIKRHAQFHQNSKHIFHTDICKFFPSITYEHLQPILLSNPKLFEDLEIDLDSVETIRDICFRENSLCIGTVSSPIISNIIMYQFDVIMLGYCKKNHLKYSRYADDIYLSSNSYIDLAHVSFVSDTLRKFGFSINESKTYFSSPKYRRKVTGLVIGTDSSVTIGSEKRAFIKKLVYDKLVHNKGDGNSILGYLAFLKDIEPQTYNNIIAKYSQYCKEDIIEALKK

SEQ ID NO: 4904 - protein, 320 aa, unidentified
  source 1..320: note = Related to FMGM01000006.1; note = Clostridium sp.
MSSLITRISSNLQLKDDYISSIIRRSNYYYKDYYIPKRNGGRRKISQASPELKTLQYWVKTNILSLLPISKAAFAYNRGNSIKKHATFHKESYFIFHTDIKDFFPSITSEHLVAELAANRGIIEAANLWDDDILDVVSSICFRRNHLCIGTVSSPIICNIVMYAFDEHFTNYCNRRNWKYSRYADDIYISAQEYLPSSLQSEVNEKLHEIGFSSNAYKSWFCSKKCRREITGLILTETGKVSVGLEKRLAIKKMVYERIMHGRGDPDTILGNLAFLKDVEPNSYNSLLIKYAAYCDGDVIDAIKTGPKPHRVITLDLPDI

SEQ ID NO: 4905 - protein, 307 aa, unidentified
  source 1..307: note = Related to QUIJ01000008.1; note = Butyricicoccus sp.
MNSIIDRIARDLSLDRDYIASIIRRSSFYYKRFTIPKRNGDPRVIYQASPELKSLQYWVREKILKFLPVSNAAFAYQAGNSIKKHADFHKEARFIFHTDIKNYFPSIHEKMFTDILIAHQDKLQAQGMWFDDMCDVIAKICFYRGRLSIGTVSSPMISNIVAYRFDELIIAYCRERGYRYSRYADDIYISSNRYISQSTKKFVEVSLYECNFKMNISKTWFRSKKSRRKVTGLIITDTGRVSVGLETRKKIKNMIYNRLVNGNGSPESILGYLAYLKDVEPPTYNKYIIKYSTYCDGDVISAIRRGS

SEQ ID NO: 4906 - protein, 309 aa, unidentified
  source 1..309: note = Related to NZ_PDCG01000001.1; note = Bifidobacterium aemilianum
MSKSLVEEISASLRISTERTQEIIINADKLYKIYSIPKHSGGNRLIYQPSSQLKAIQYWTLDNIISLFPVSDRAFAYVKGRSIASNAKAHRQSKYLFHTDIHNFFPSITSSLFDKQCLNRFSSILEETGFSFGDTNSVLHKILFRKDKLTIGAVSSPAISNAVMHDFDQSLTNYCLISGYVYTRYADDIYISSKSLLPKQIKEDIFAEMHKFGFSPNYKKTSFWNGSSHLKVTGVNVLAGSGRLTIGTRNKKMIKGMLYEYLMHGKGDPTKILGYLAYVKEIEPSFYNTLIIKYSEYRNEHIIKYLKDS

SEQ ID NO: 4907 - protein, 310 aa, unidentified
  source 1..310: note = Related to JAKKPP010000007.1; note = Aliarcobacter butzleri
MNFLNYLQATGYHNNLLIEVINNLDRYVYKFKFKGKWQIAPKWELKILQKILKEYLTKYYGSIISENATAYIVGKNLSYNVSKHQGNSYFFVTDFKNFFPSIEFEKVKYILKSNLNKETEDSIDLILKIVFYDNKLQYGFPTSPIISNLILIDFDKKIEQYLLNYFKGNNIKYSRYSDDITISAKYKINKNDILSIIENLINSEYTYLKLNLQKTRFFEKYSHSPYITGLVPLNQRISIGKKKFNIIKLNTYLILNNKAIENDNFFRKENQLQSYLNYLYLVDKHNYIKLKNYFSKNYINSDIFNSLFRK

SEQ ID NO: 4908 - protein, 309 aa, unidentified
  source 1..309: note = Related to PDKF01000002.1; note = Arcobacter sp.
MSFLEYLEEKGYPNTLLRKIFDKHEDYVYHFRIKGKLQIAPKWELKILQKILKDYITDNYASYISNFATAYIKKENISYNVSKHFGRNYFYVTDFSNFFPSIKLTNIKDYLSSIFKDEDSSSLDIIFNIGFYSDSLQFGFPSSPIISNIVMTKFDNLLFEELKTKFPKNNIAYSRYCDDLTISSKYEISPKIINNIINSLLIKEYTYLSINKRKTRSFEKYSQYPYITGLIPLKDRTTIGKKRFNILKLNIYLSLKNKKIKNTDLFDTDIALSSYLSYVYLVDPHNYNRLKEYFSKRFKPLEIKNLFKK

SEQ ID NO: 4909 - protein, 304 aa, unidentified
  source 1..304: note = Related to NZ_SCFT01000021.1; note = Erysipelothrix sp.
MGNKSDIIELISIRTGISSKKIEETISSSKCEYSVVHAKIKKKKRIFYIPSPQLKIIQLHLIKIVLEGFEVSSHAHAYIKNKSIKTNVNCHIGNTFFFQTDIKSFFPSIKANHIKNVLSKDDSISKDDIGLILSAVVPFESLDLGSPTSPIISNIIMLEFDQKIESLIQENYKGAIYTRYSDDITISSKQPILGIDKIVDKTLEEFGFEINKSKTKYTQLIDKVKITGIFLHADKRMTVGTNFKRNLKQQLYLLSNGLDPQIDNIQIMGMLSYIRDIEPEYYLSLVQKYSSSTKSIIDIIKSGM

SEQ ID NO: 4910 - protein, 517 aa, unidentified
  source 1..517: note = Related to MW349128.1; note = Staphylococcus phage Machias
MYRFKEIQGKDNFERLELVNVMDIFYLQHKKPFFKDIVKFDFGYTLVFTDGVNDFVSIDHPSRLWGKNFIPIKNNEEISYIHNDKVKMSLDIFNNNENVIDNLNDLEEKIENYLCSNYYNKISYRTVYNKFTIKEFDNTFTVFKLLSETKSIRNTVKIQNLIKIDKDLINKKDLNLIVDIINNFTNQKTSDAEKNNSYLKNIIKLLLKSFELKYSNKNKFETFYIPKTDGTKREINSPIEEIRPILKSQSKKLNAILEYRISKYNIEDNIIAYRDGKSIKNNADYHKENDTIIKFDVSKFFDNCHFDYWKENLFFILNDNKNLMKRFEKEMEGFLFRKDNKGLYMGSPLSPAASNLIVVPVMRYIKNVISKFKSDIKVSIYSDDITFSSKEINDEFNPSRLKNLVNHAFEIYNLDFKIKEEKSLVMKNRKRKVTGLSINQHNQVTISQRRYRELRTILHLLSNGMEFKDIKGFDNEIELTSLINYYLDVDMTGKISRLINKYEKTFNELKSFESGEK

SEQ ID NO: 4911 - protein, 501 aa, unidentified
  source 1..501: note = Related to MW218148.1; note = Staphylococcus phage vB_StaM_SA1
MFKFNKVNNLKMIGENEIHNDLMLERMMFVMKPVFRRLEKNNKGKLVMLFSDGRKNYLLSTSDKRYYSSPLLSYEGDEYKELESASYIESNIDSLKLLKVKISDILSDNQNIRIRKNLMFTVYEDVDDIKLVQLLTRGDKKIQSAFNIENVISISKDKIKLDDFNLIKDLLNHYIIKGIKDVYISNTIKLLIEALELKYSGKKAFDTFYIPKSDGTKREINSPIEEIRPILKEQSKILNAILKFRIDKYKLDENIIAYREGKSIKDNASLHKENKVIIKFDISKFFDNCHIDYWKENLFFHFKEDEDLMDRLMKEFEGFLFRKDNKGLYMGSPLSPSASNLIMVPVMRYISNILKKFKTDIKVSIYADDLTFSSKVINDEFNAKRLKNMVNHAFKANGLDFKLKEEKSLVMVNNKRKITGLTVNHRDEVTISQKRYRQLRTVIHLLSNGVEFKNIKGFNTELELVSLINYYLDVDTTGKVRRLISRNERAFNELKRKSEVK

SEQ ID NO: 4912 - protein, 500 aa, unidentified
  source 1..500: note = Related to MZ779063.1; note = Staphylococcus phage vB_SauM-UFV_DC4
MFKFNNVERINLIGNRKMNYIELQESLYTLKPKFKKIVKNDKGDFVLIFSDGRKEYIGNTNAGSMFRPKMMVVNSIDDYNLFSGDGQPYRVEISSMSSLNKHLRRIIDQNYTFNIITKKFRIYEEDKIINLIKLKSTTENDKDIFKIEAILKIKKDLISIEELELIKDILNDCLTSQGKYEYILNSLELLIKSIDLKNRNVNTFYTFYIPKSDGTKREINSPIEEIRPILKKQASILNAILDLRIDKYNLDENIIAYRDGKSIKDNADYHKENKTIIKFDISKFFDNCHFDYWKENLFFSFKDEDYVMERFEEYMKDLLFREDNKGLYMGSSLSPAASNLIMVPVMRYINNILSKFKTDIKVTVYADDITFSSNEINDEFNSKRLKSMVNHAFKVNGLKFKLKEEKSLVMKNHKRKITGLSVNHNDEPTISQKRYRQLRTIIHLLSNGVEFKDIKGFETPLQLVSLINYYLDVDTTEKVKRLMDNNEKIFNELKKEAGVN

SEQ ID NO: 4913 - protein, 509 aa, unidentified
  source 1..509: note = Related to MZ422438.1; note = Listeria phage LPJP1
MLSLILIDNVLIDINGEIVSEIDIRMKKNIISDKKVLAKLVKYNIRNKLIQSIKDISYLEENNKFENNEEFNDIHLENIEKIIKTYDLLSNDEICINEGYPDLPVVTYDKTLITEFINNISIKLSYRNLNISHRYIEMNDGYLYIITNTNDIYNKYNIYKITDDKEMIKMIKYLLDISISPDQPNNKPLLLELLLTRILIQNNNEKLYQHFKINQGTKIRDIYAPHNDIKDISRKFNNIFNGMLETQLSNKGVEKHLFAYQKKKGILDNALVHKNNKYIIKMDIASFFDNCRYEDISKYFKLLVLGKENFKKKNNKDSVMDTLFKEIFINPETGGLYQGNPASGSLSNLLMSNVAKYLKNVLIDSGITFSIYADDITFSSNEKSEFFNRKYLKFILNKAFEVYNYSNLSIKDEKTIKMSNNKRRITGIRINHNDQCTLDRKMYRLLKTIFFKLSKNKNNINNISMTFNELKGRISYYRYIDNTNKMENLVNEYQNTLIKLKLINEPKVD

SEQ ID NO: 4914 - protein, 454 aa, unidentified
  source 1..454: note = Related to MZ422438.1; note = Listeria phage LPJP1
MNDLLIISKNPLRILTNKGIFYPYDKDIKIISRFDNSEKKLVQLNNILFKDSYDLLIKIMNYYKTSNSIDFNYSKKYLLENSIELREYSEFFSMYRSFSSTPLVSVSKGYILLYPNSKISNSKYLIYKLKSKYASDIKLLLKRRMSLEIIQLYCIIKDLEDNNIELFKKIKIEKNGKEREVIDPNIKIKNTLKEISKILDKRLDRKISNLKYPNIMAYRKNVSIKDNALMHLNNKYIIKVDISNYFPSIDWKLINSRFILLLFHGVTDKYMDTIKKGFVDENDKMFLGNPVSGVISNIIMVDIINHIQTIFHKYGIICSSYSDDITFSTNIDNNKLFNKKFIIKICNQAFKIYNDKFKINDSKTVYLKGNMRNITGITINHKNQLTLSSEKYDDMRNNLYSYMKTGSCYYDDYELLGKMSYYLHIDETGKFRKLYDKYINIFESIKRGDEKIEE

SEQ ID NO: 4915 - protein, 329 aa, unidentified
  source 1..329: note = Related to NZ_BCXJ01000007.1; note = Alkalihalobacillus clausii
MNRANQYNLPLIQDGQKFLSVADDQLIRRFKVKDKGKLRDVNDPIPELKNVLRAWNAVITDHYAKKLKDSDTSQVAHAYLPHKSIQTNARAHLHSPVIQFDFKGFYDSCKFEYFKKELRELDPRLDDQNEHIVKRLLIDPQTGGVTQGLPVSGALAGLSLIPFWVELGKNLPDNIRFTQYSDDLTFSYVGRMPPGFTIPSLTQKIYEALKKTGLDFKLNPDKTRRQKDQYRKVTGIRINHHNQTTPSRNDYRFLRHALYVLSKSDNLDKELTKWGFTSKSAFVGKVSYMRSIDSTNKINRLIMKYRMTCRKHDIFTTWIDQTYKRSAFA

SEQ ID NO: 4916 - protein, 329 aa, unidentified
  source 1..329: note = Related to NZ_MTIV01000022.1; note = Evansella clarkii
MNNNNPYSLPLLQDGRQLLHLADDRLIRRFKIKNKGKLRDVNDPVPELKTILKAWNGPLTDYYVRQLQLNGVSHVAHAYLPNRSIQTNAQAHLYSPIIQFDFKGFYDSCKFDYFRESLRDLDPTLDDQNEYVIKRLLIDPNTGGVTQGLPVSGALAGLSLIPFWVELAKSLPDNIRFTQYSDDLTFSYTGQTPPGFTVPALTQKIYEVLKKTDLSFKLNADKTRTQKEQYRKVTGIRINHHNQTTPSRDDYRFLRHALYILSKSDDLDKELAEWGFASKSAFVGKVSYMRSIDSTGKIDRLIMKYRTACRKHDIFTTWIDQAYKRSAFA

SEQ ID NO: 4917 - protein, 381 aa, unidentified
  source 1..381: note = Related to JAFUWL010000024.1; note = Prevotella sp.
MIYITVKQPPMYHQMTLEEFLFQTETRPAVINENLTNTRTYEMEYVSQRFMDKFRFNIPALIRKLDAFNDSTAELRVKPRHSLYREFHIPKKSGGLRKIDAPEPELMDALRRLKTIFEEDFHVLYHTSAFAYVKHRSTLDSVKRHQANESKWFAKYDLSNFFGNTTLDFVIKMFSMIFPISEVVKDEHGKEALVTALELAFLDGGLPQGTPISPLITNVMMIPVDHKLANSFRDFNRQRYIYTRYADDFLISSRYDFSFREVEQHIVDVLKSFDAPFTIKSEKTRYGSSSGSNWNLGVMLNKDNQITVGYKKKRQFQAMLASYVMDSKNGILWDKNDIQVMEGYRNYYRMVEGEAIDRIVEHVGEKYGVNIVKMIKSDLRT

SEQ ID NO: 4918 - protein, 366 aa, unidentified
  source 1..366: note = Related to JAFUJH010000080.1; note = Ruminococcus sp.
MTLEEFLFEVDTKPQAMINPNLTNTRTYEVERISEKFLERFDVAKLVTKLSQFNASTEELRAKPRHDLYRTFHIPKKSGGLRKIDAPEPELMDALRRLKTIFEEDFKALYHTSAFAYVKHRSTVDAVKRHQANESKWFGKYDLSDFFGSTTIDFAIKMLGMVFPFSEVIKSTVGERELRKAIELAFLDGGLPQGTPISPLITNIMMIPVDYKLANGFRDFNHQRFVYTRYADDFLVSSKYTFSFREVEKFIVDTLKSFGAPFTIKSEKTRYGSSAGSNWNLGVMLNKDNEITVGHKKKRQFQAMLASYIMDKKNGKDWDKSDVQTMEGYRNYYRMIEGDTIDKMVAHIGEKFGVDVVQLIKDDLRA

SEQ ID NO: 4919 - protein, 379 aa, unidentified
  source 1..379: note = Related to JAGCWK010000209.1; note = Lachnospiraceae bacterium
MVYITVKQPPMYRQMTLEEFLFATEAKQEIINPNMTNTRTYEVERVGNKFLEKLDVAELITKLSQFNASTDELRSKPRKSLYREFHIPKKSGGLRKIDAPEPELMDALRRLKTIFEEDFHALYHTSAFAYVKKRSTIDAVKRHQANESKWFGKYDLSNFFGSTTLDFVMKMFSMIYPFSEVVRYDTGREELRKALELSFLDGGLPQGTPISPLITNVMMIPVDYKLANGLREFNHQRFVYTRYADDFLVSSKYTFSFKEIENYIVDTLKSFDAPFTIKPQKTRYGSSAGSNWNLGVMLNKDNEITIGHKKKRQFQAMLASYVMDKQHGTEWDKSDIQTMEGYRNYYRMVEGEAIDKLVEHVGNKFNVNIVQLIKADLRT

SEQ ID NO: 4920 - protein, 379 aa, unidentified
  source 1..379: note = Related to QTXN01000002.1; note = Ruminococcus sp.
MYYITVKQPPSYHQMTLEEFLFGGNTQTRLINENLTNTRTYEVENISERFLQLVNVDKLIEKLIWFNERTDYLREKPRRDWYYEFHIPKKSGGLRKIDAPEPELKEALSTLKTIFEVDFQALYHTSAFAYIHKRCIIDLLKRHQANESKWFEKLDLSNFFGSTTMEWVLQMFSMVFPFSEVLKDERGRAEFAKAIELGFLDGGLPQGTPLSPIITNIMMIPVDFEIARTLREYNHQRFVYTRYADDFQISSKYSFSFTEIQNVIVSILKNFKAPFTINSTKTRYGSSAGQNWNLGLMLNKDNEITVGHKKKRQFQAMLSSYVMDRKNGIAWDKSDIQTMEGYRNYYRMVEREKIDGIVKHLSDKFGVDIVKAIKEDLAA

SEQ ID NO: 4921 - protein, 392 aa, unidentified
  source 1..392: note = Related to JAJPXI010000169.1; note = Oscillospiraceae bacterium
MVYQTVERGGFVYYITAKQSPRYHQMTLEEFLFGERESSKHYSLEFDPTGTKTYEVEHISDRFLSTVNVDWLISKLSMFNEQTKDLRQKPRRSLYSEFYIPKKSGGLRRIDAPEPELMTALSVLKTIFEQDFRALYHTSAFAYVKGRGTVDCMKKHQKNDSRWYGKYDLSNFFGSTTPEFVLHMFSMIFPFSEVLKNERGREEFKKAIDLAFLNGGLPQGTPISPLITNVMMIPVDFELTRRLRNFNDQAFVYTRYADDFQVSSKYTFSFRQVENLIAEVLRGFGAPFQIKSSKTRYGSSAGSNWNLGVMINKDNELTVGYKKKKQFRAMLSSYIMDHRNGVLWDRHDIQVMEGHRSYYKMVEGEAIDRIVDHINQKFGVNVVSMIKQDLAM

SEQ ID NO: 4922 - protein, 380 aa, unidentified
  source 1..380: note = Related to JAGHVH010000015.1; note = Oscillospiraceae bacterium
MYYVTVRQSPMYKQMSLEDFLFNTTASTATINANTANTRTYAVQSISGKFLKTVDVDVLVTKLAWFNSITKELHSKDRQDLYHSFCIPKKSGGLRQIDEPNEELMSALRMLKDIFENDFGALYHTSAFAYVRDRCTIDAVKKHQDNESKWFGKYDLSNFFGSTTKEFVMHQLEMIFPFCEVLKREDGRRELETAIDLAFLNGGLPQGTPLSPTLTNIIMIPVDYKLYNTLRNYNNQTFVYTRYADDFIISSRYSFSFKEIENLIKSTLEEFGAGFSINSKKTRYGSSAGSNWNLGVMLNKDNEITIGHKKKKQFQAMVASYIMDSKNGKSWDINDVQRLEGLRNYYHSVEPERIDEIIEHANEKFGVNFRKLIADNLKVA

SEQ ID NO: 4923 - protein, 382 aa, unidentified
  source 1..382: note = Related to JAFZDJ010000019.1; note = Bacteroidales bacterium
MTTYITVKQLPQYRQMTIEELLFGTEPADTCVNDGIGNTRTFVTENYATVDEYMKFIDPAHLIEVLRNFNDKVDCLRQVPRSSLYHSFSIPKRTGGLRRIDAPNEQLMEALRELKTILETEFHALYHTSAFAYVKERSTISAVKRHQMNESKWFAKYDLTNFFGSITLPFTMQILAKIFPFSVILRSRDGKIELEKALELGFLNGGLPQGTPLSPMLTNLIMIPIDHTLANALRDYNGQRFVYTRYADDFQISSRFTFQFREIESLIVRVLHDFNAPFRLKPEKTRYGSANGANWNLGVMLNKDNEITVGHRNKKIFQAMLHNYIHDRANGIFWELNDVQTLEGYRNYYSMVEKDTINKIIEHTDRKFNVNVRRMIAEDLRR

SEQ ID NO: 4924 - protein, 388 aa, unidentified
  source 1..388: note = Related to HF991826.1; note = Clostridium sp.
MYEQISIEEFLFNDNITNKVITQNSSNTHTYKLKYINEKLQDLCRVEDLILELDKFNSDYKSLRGISRENLYNTFFIPKHSGGLRRIDAPNAELMNALRRLKAIFEEDFHALYHTSAFAYVKKRSTIDAVKRHQQNGSNWYGKFDLSNFFGSTTIEFVMNMLSMIFPFSEVVKTKHGKDALEHALDLAFLNGGLPQGTPISPLITNVMMIPIDFKLSNTLRSFPCSQPNNLGETENYQRFIYTRYADDFLISSKYEFDIKEIEKFIVDTLSEFDAPFTLNSKKSRYGSRAGRNWNLGIMVNKDNNLTVGYKKKKQFQNMLASYIMDKHNGKEWDKNDVQVMEGYRNYYRMIEGEVIDRMVEHIAKKFGEEIIHRCNGSNLKLVLEDLR

SEQ ID NO: 4925 - protein, 378 aa, unidentified
  source 1..378: note = Related to BK025872.1; note = Siphoviridae sp.
MVYITVRQSPIYHQMTLEEYLFQSYQTPPVVNANIANTRTYEVENVSEHFSSKIGVEALIGKLVRFNNDTAELRAKERSELYETFYIPKKSGGLRRIDAPKAELMDALRRLKTIFEDDFHALYHTAAFAYVKKRSTVDAVKRHQKNSSKWFAKLDLHDFFGSTTLDYAISMFSMVFPFSEIVKEPQGEAALRTAMSLAFLNGGLPQGTPISPLITNVMMIPVDFKLSNTLRNFEKQSFIYTRYADDFIISSKYDFDVRSVEELVVSTLNSFGAPFTINASKTRYGSSAGRNWNLGVMLNKDNEITVGHKKKKQFQSMLYNYITDKNNGVAWERNDVQVMYGLHSYYRMVEKETIDAIVAYINKKMNVDVIRMMKDDLR

SEQ ID NO: 4926 - protein, 378 aa, unidentified
  source 1..378: note = Related to BK047352.1; note = Siphoviridae sp.
MVYITVMQSPIYHQMTLEEFLFQNFQAPTILNTNVSNTRTYAYETVSEHFTSRIDTDALICKLVRFNEQTEALRAQERSTLYETFHIPKKSGGLRRIDAPKPELMNALRNLKTIFEEDFHALYHTSAFAYVKNRCTVDAVKRHQKNNSKWFGKLDLHDFFGSTTLDYVIKMLSMVFPFSEIVKFPNGEAELRKALDLAFLNGGLPQGTPLSPLITNVMMIPVDYKLANAFRDFDKQRFIYTRYADDFIISSKVDFDVHRVEKLVVDTLHEFGAPFTINESKTRYGSSAGRNWNLGVMLNKDNEITVGHKKKRQFQSMLYNYITDKRKGISWPREDVQTMQGLHSYYRMVEPETIDAIVKHTNEKMETDVLRLIKDDLR

SEQ ID NO: 4927 - protein, 405 aa, unidentified
  source 1..405: note = Related to BK027304.1; note = Siphoviridae sp.
MESSHQWALTSIIYVGYNSRLRKGGFTLVYITVKQSPIYHQMTLEEFLFQTFQGPAVINENMTNTRTYEFESASAHFTKSIDVDALAWTLARFNQSTEELREKERISLYNTFYIPKKSGGLRKINAPNPELMNALRRLKTIFEEDFKALYHTSAFAYVKKRCTVNAVERHQQNNSKWFGKLDLHDFFGSTTLDFVMDMFSMIFPFSEVVKTVNGKTELRKALELAFLDGGLPQGTPISPTITNIMMIPVDFKLSNALRNFDNQRYVYTRYADDFIISSRYEFDVHKVEELVVFTLQNFHAPFSINASKTRYGSSAGRNWNLGLMLNKDNEITVGHKKKRQFQSMLYNYITDKKRGIEWSREDVQTMQGLYSYYRMVEEKPIDAIIKHIDDRMGVDVIRMIKKDLR

SEQ ID NO: 4928 - protein, 378 aa, unidentified
  source 1..378: note = Related to NZ_JADPFI010000030.1; note = Flavonifractor plautii
MVYITVKQSPMYHQMTLEEFLFKTFENDKLISKNTGNTRTYEFERISDRFMSRIDVNELVGYLAHFNESTAQLREKNRQDLYSTFYIPKKSGGLRRIDAPKPELMDALRRLKTIFEEHFHVLYHTAAFAYVPGRSTIDAVKRHQKNESKWFGKYDLSNFFGSTTLDFVMQQFSMIFPFSEIVKYELGKNELERALELAFLNGGLPQGTPISPLITNVMMIPIDYKLANKFRDFERQSYVYTRYADDFIVSSKYGFNVRTVERVMIETLAEFNAPFTINEAKTRYGSSAGRNWNLGLMLNKDNEITVGKRNKRQFMGMLHNYVMDRKKGIAWDKHDVQTMDGYYNYYRMVEKETIDRIVEYINKETNANVLQYIREDLR

SEQ ID NO: 4929 - protein, 373 aa, unidentified
  source 1..373: note = Related to BK039125.1; note = Siphoviridae sp.
MQSPMYHQMTLEEFLFNTYDAKSPVINQNAGNTRTYEFERVSNRFLSRIDVNELVGHLVRFNESTEELRNVNRQDLYTTFYIPKKSGGLRRIDAPKPELMDALRRLKTIFEEKFHALYHTSAFAYIKERSTLKAIQRHQNNESKWFGKFDLSNFFGSTTIDFVMQQLSMIFPFSEVVKYELGKNELRTALELAFLNGGLPQGTPFSPLITNVMMIPIDYRLANKFRDFGRQSFVYTRYADDFIVSSKYSFDVRMVERAMIDVLTEFNAPFTLNEEKTRYGSSAGRNWNLGIMLNKDNEMTVGHRAKKQFKNMLHSYALDRKKGVMWDRHDIQVMNGYYNYYRMVEKDTIDKIVEYINKETDCDVLRDIHEDLK

SEQ ID NO: 4930 - protein, 388 aa, unidentified
  source 1..388: note = Related to JAFVFT010000122.1; note = Paludibacteraceae bacterium
MVYITVKQGHHERQMSLEELFYEEYNPRRFSPRNTSDTRTDIRSAPSAEMMRYVDVIGLIHKLSEFNTQTKELRECNRQELYNTWFIPKKSGGRRRIDAPKPKLMLALRNLKSILEEDFGALYHTSAFAYIKNRSTLDAIKRHQQNESRWFLKLDLHDFFGSTTPEFVMKMFSMIFPFSEVVKSAYGKTQLETALGLAFLNGGLPQGTPISPTITNIMMIPIDHRLSNSLRGFSTERVNPKTLEPFKEHLLYTRYADDFLISDAYSFDWKKVQEYILNVLKEFDAPFTVNTKKTRYGSNSGRNWNLGVMLNANNEITVGYKRKKEFQRLAYQYITESRGGNKWPLEEVQHLQGLYSYYHMVEPETFDRIVKFMNEKYNADILTMIKRI

SEQ ID NO: 4931 - protein, 381 aa, unidentified
  source 1..381: note = Related to JAFUKZ010000113.1; note = Muribaculaceae bacterium
KEHDMPYITLQQSPIYYQLSLDDILDGAVDVSKMVVPNATNTRTRYKEILSEKFLNKFDFDAMIRVLEQFNEQHENLFNVERKTLYETFYIPKRTCGLREINAPVPELMDALRQLKTIFEVNMFALYHTSAFAYVKGRSTIDSIKRHQHNESKWFGKFDFSNFFGNTTEEFVFSMFSMIFPFSEVVKSQREANALRRALSLCFLNGGLPQGTPISPIITNVMMIPIDHQLCNELRAMDEHYVYTRYADDILISSKVNFDITKVQEFILSVLRKFNAPFSLKKEKTRYGSSAGRNWNLGVMLNKDNEITIGHQKKKTFKAMCCNYVEDKRKGITWDLHDVQVFAGLISYYRMVEREYIDYVIEHCNTKFNTNIELLIKQDLS

SEQ ID NO: 4932 - protein, 377 aa, unidentified
  source 1..377: note = Related to JAFSCV010000034.1; note = Clostridia bacterium
MPYITIQQSPIYYQMSFDDILDGTVDLSRMVVPNVTNTRTHFREFLKPSFLERFDFDLMIAVLEKFNEQHANLFNVERKSLYETFYIPKKSKGLREINAPVPELMDALRQLKTIFETNMFALYHTSAFAYVKGRCTIDCIKRHQQNESKWFAKLDFSDFFGSTTEEFVISMFSQIFPFSEIVKRKDGLEALKKALSLCFLNGGLPQGTPISPTITNIMMIPIDHQLCNELRKMDEHYVYTRYADDILVSSKVGFDCNKLQDYILGVLKKFNAPFCLKKEKTRYGSSAGRNWNLGVMLNKDNEITIGHQKKKTFKAMCCNYICDKKKGVAWDLHDVQVFAGLISYYRMIEKDYINYVIDQNNKKFGVNLEALIKEDLS

SEQ ID NO: 4933 - protein, 379 aa, unidentified
  source 1..379: note = Related to JAFXMP010000165.1; note = Clostridia bacterium
MPYITVRQPPPHQQITFDDLFFSTSVQDHFQPVRRDMSGTITRFVKEPKKELLQRTDINSMISCLEMFNQRHADLLAAERRSLYHTFFIPKHSGGLRKIDEPNENLMNALRELCSIFVNKMGVLYHTSAFAYVPGRSTIDAIKRHQANESRWFLKTDFSNFFGSTTEDFLYRAFSVMFPFSEIVKTKRGSEALKKALSLCFLDGGLPQGTPISPMLTNAMMIPIDHRLFNGLTKQGFVYTRYADDIQISSKYSFDYKEMVAHINGVVKDFGAPFVIKDQKTRYGSSSGRNWNLGLMLNKDNNITVGYQRKKQVKAMTNNFIVDHLNHIPWPKEDVRHFDGILSYCKMVEKEYFEHMIKAFEEKYKVNFKIMMKAALEQP

SEQ ID NO: 4934 - protein, 377 aa, unidentified
  source 1..377: note = Related to JAFTFD010000232.1; note = Lachnospiraceae bacterium
MPYITVRQRTEFRQITFEELILGIAPAPTRKHTSKGGTITRYVRNVDPSIRATVNMNALISSLERFNNLHQNLFDAKRESLYRTFYIPKKTGGLRRIDAPNDELMDALRELKTIFTDQFGALHHTSAFAYVENRSPVDAIKRHQVNGSRWFLKTDFSNFFGSTTEDFLYTMVSMIFPFSEVIKSRVGKEELKKALSLCFLNGGLPQGTPISPMLTNLMMIPFDHKFCNELSKKGFVYTRYADDIQISNEFDFNYHEIVQYISDTLKSQHAPFVIKPQKTRYGSSSGRNWNLGVMLNKEGDITVGHEKKKVFKAMVNNFIVDTLRCVPWSIEDVRHMDGLLSYYKMVEPDYFDHIIKSFNEKYKVDYHTMVRAVLKGK

SEQ ID NO: 4935 - protein, 379 aa, unidentified
  source 1..379: note = Related to NZ_JADNGR010000005.1; note = Intestinimonas butyriciproducens
MPYITLMQSPAFHQITFDEIISGVVDIPTMILPNESNTRTYFATRVNQKFLERFDFSEMISDLDKYCERHAGLYDKKRKSLYTTFYLPKKSGGLREINAPVPELMDALRELKTLFETKFFALYHTSAFAYVPHRCAVDAVKKHQSNQSHWFLKTDFSNFFGSTTHDFLMRMLSMIFPFSEIIANEHGKAVLEKALDLCFLDGGLPQGTPISPMLTNLMMIPIDHRLFNCLRDFKGHSYVYTRYADDILISARHHFDYAEIVDFINSTLKEFCAPFKIKDEKTRYGSRAGSNWNLGVMLNKDNEITIGTKNKQRFRAMLCNYTLDRKNGKPWELHDIQVLNGIMNYYKMIEKDYIEGVIKAMNEKFKTDIVSNMREDLGQ

SEQ ID NO: 4936 - protein, 373 aa, unidentified
  source 1..373: note = Related to JAFXEH010000357.1; note = Alistipes sp.
MQSPIFHQITFDEIISGNVNLANMVNPNETNTRTYFSKVLNPKFLERFDIDAMVVTLEEFCKQNAKLYEAKRSDLYDKFYIPKKSGGLREINAPQPALMNALRNLKTIFETQMFALYHTSAFAYVPGRSTIDAVKRHQKNESHWFLKTDFSDFFGSTTPKFLMSMLSKVFPFSEIVKSQRGFDALEKALDLCFLNGGLPQGTPISPMLTNLMMIPIDHRINNCLRDFNGNHYVYTRYADDSLFSSRKGFDKDEIIGFINSTLAEFGAPFKIKDEKTRYGSRAGSNWNLGVMLNKDNEITIGYKNKQRLRAMICNYILDRQNGRRWDLHDVQVLRGLVNYYSMVEKEYVDSVIKYNNEKFHTDVMKSMSEDLNQ

SEQ ID NO: 4937 - protein, 381 aa, unidentified
  source 1..381: note = Related to JAGCXD010000256.1; note = Paludibacteraceae bacterium
MYYITTMQHRKPRQLSWEDVIMDKLVMNDYVNDKSNSTATITRKYENIPDEVIKKINVELMVRWLHNFNEESKELFERKRESLYSTFRIPKQSGGFRRIDAPCEELQNQLRKLVTFISDDCGVLYHTSAFAYIKGRSIVDCVRKHQKNESNWFLKTDFSGFFPNTTLDFTMKMLSMIFPLSEICKRKDGYSELEKAISLGFLNGGLPQGTVLSPMLTNMFMIPIDHKLFNELAGRKLVYTRYADDIHISGQEHFPFKEIVTLIENTLAEFNAPWVIKKEKTHYGSRKGKNWNLGLMLNKDNDITIGWKKKQYFKAALCSFILDTKNKKYWDLGDVQHLRGQLSYYMMVEKEYFEKIIIQQNKKWNVNVKEMFKEYLNGTFA

SEQ ID NO: 4938 - protein, 375 aa, unidentified
  source 1..375: note = Related to JAFUNX010000245.1; note = Clostridia bacterium
MPYITVMQSPRFHQITLDEILSGEVQVSDIAPRSVTGTVTHFSERLNDRLTRLAQVDELVAVLETFIQKNESLYEQKRSKLYNTFYIAKRSGGLRKINAPLEELMSALRELKEILETKFSALYHTSAFAYVKCRSTVDAVKKHQTNNSRWFLKTDFSDFFGSTTPEFLMKMLSQIYPFSEVVKLERGRVVLSKALDLCFLDGGLPQGTPISPMLTNLMMIPIDHRIANELRRNNFVYTRYADDIIISHKFDFSFTEKCDFINQVLAEFEAPFKIKPSKTRYGSSSGNNWNLGVMLNKDNKITIGYQKKKTFKAMCYGYITSKQNNQPWDRHDLEVFNGLISYYKMVERDYIAYTIDHYNQKYGVNMMAMIREDLR

SEQ ID NO: 4939 - protein, 382 aa, unidentified
  source 1..382: note = Related to BK054953.1; note = Siphoviridae sp.
MPYVTTFMTRAKKQLTLEDVLFGVKNLSPYINGVDFGTSTRTYEYKKLPQELKEMARVPYLIGKLKSFNRTYQPKFDANNMREHYNSFKIPKKSGGWRQIDAPDDELKQALYSLKAIFENDFKVLYHTAAFAYIKGRSTTDALKVHQRNNSNWYLKTDLSNFFGSTTLEFTMRMLSVIYPFCEVVKYEDGEKALRDAISLCFLDGGLPQGTPISPLLTNVIMIPIDHEISRRLRASETNDFVYTRYADDATVSSKKGFLFMGVIEMMNDVFKKFDAPYTIKKEKTHYGSRAGRNWCLGLMINKDNKITVGHENKKVFKAMLNNYIVARKDGKGWPPEEVMTLRGKLSYYSNVEPEYFDYVISWYNKKYHCDVIKMMADDVAA

SEQ ID NO: 4940 - protein, 390 aa, unidentified
  source 1..390: note = Related to BK046396.1; note = Siphoviridae sp.
MIYVTVRITEPYKQIALEDIMLALFQGENVRERTPRSPYTRTFTYERLPERILAGFDVEKKIGLLRTFNKKHHNLMESDIREHYHKFFIPKKSGGMREINAPDDELMNCLRELKLLLESEFYASSHAAAYAYVKNRSSVDAAKVHQWNKSKWYLKTDISGFFPNTTPEFVWNALSMIYPFCLIMECKSGREELRKALSLCFLDGGLPMGTPISPMLTNLIMIPFDFEFSKFLRSLQNPENNPDKKGRRFAYTRYADDMNISCGIEFDKSFIIRKIENLFRLFGASYIIKDEKTHYGPSYHKNWVLGVMINKDNQITIGYKKKRNFEAMLFNYAKDRESGTYWPLEQLQYALGLMSYYRMVNKESIDGVIIRYSQKFGFDIEAAMKKDLKN

SEQ ID NO: 4941 - protein, 376 aa, unidentified
  source 1..376: note = Related to JAGZNC010000011.1; note = Firmicutes bacterium
MPYVTTPLSPVTRQLTFEEIIMGEVDVSRPVYSNATNTRTVFVKSISNEVAQKARVASLTKQLQEFAENFRGLYEVDRRSLYDTFYIPKKSGGLRRIDAPNDALMAALRVLKTILEGAMPADHHTAAFAYVKGRSAVDAVKRHQRNDSHWFLKIDFSNFFGSTTKEFVVKTMMEIFPFCLLGEDGRTALETALELCFLDGGLPQGTPISPLLTNIVMIPVDHQINKRLAKDEGNSWVYTRYADDMLISAHKSFDPKRVMDLISAALQHVEAPYIFKREKTRYGSRAGSNWNLGVMLNKDNEITIGHKKKERFRAMIHNYMTDRQNGTAWDPHDIQVLCGHIAYYRSIEPSWVCDLLERYSQKFGRNVEDTMKEDIR

SEQ ID NO: 4942 - protein, 464 aa, unidentified
  source 1..464: note = Related to JAFVSI010000063.1; note = Clostridia bacterium
MPYITIPVRQKEYQISFDDILNGINESFFAMMMDDTCDTRTVYRDHTPPRLLEKINIGAMVGMLEKFNNRHREYFDVPKENLYETFYLMKKNKGFSVVVREIFKTHNANSGISYSGKDVYADVFAILKGLLTNHPCAEHNRIEQETLAKCVQYLTPLGFEVNEEKIKSFIKAGFRRIDAPRAEFKSVLTDLKITFENKLFGSYHTSAFAYVKGRSTIDALKRHQRNNSRWFLKLDFSNFFGSTTHEFVLRQLSSIFPYSEIVKSERGREALSKALSLCFLNGVLPQGTPFSPTITNIMMIPIDHAIAKMCREHSPHLCYTRYADDILISSDLSFTWEVDKEGSVQNEILDILRRFNVPFSLNTEKTRYGSSAGRNWNLGLMLNKDNEITIGHEKRKAFKAAVYSFLNDYTHHRVWDVEEVQVLGGQIAYYRNVEKENIDAIILAYNQRFGVDMMQIIKDIISNR

SEQ ID NO: 4943 - protein, 369 aa, unidentified
  source 1..369: note = Related to JAFTOK010000250.1; note = Clostridia bacterium
MRQITIDDILNGIDESKLALQKDTRDTTTWKVDAISRELIEKTDFYAMQVALMEFVEKYKDLIAVEDKSTLYRSFKIPKRSGGLRQIDAPNDELKKALYELKFIFEKKFYMSYHTSAFAYVHGRSTIDSVKRHQQNNSRWFLKTDMRHFFPSTTPEFLMKMLCMTFPFCEFIRYDFGCKELLEKALSLCFLNGGLPQGTPTSPMLTNALMIPVDHAINKMCHEYAPHLCYTRYADDILISSQYNFKWSDVQGRLISILETFGAPFTLHPEKTRYGSSAGRNWNLGVMLNAENKITIGHEKKKVFKAMVFQFMTDDAKGNHWSLDDVQHFLGLISYYRMVEKDCINEILQTYSQKFNKDVEATAKALLKP

SEQ ID NO: 4944 - protein, 410 aa, unidentified
  source 1..410: note = Related to BK028778.1; note = Siphoviridae sp.
MYITYWNPPKTRQITFDEIIAGVQNVEALHYGGSTTSTITVCRNDLTPRLQKITNIPDMIAKLTEFNQKYAGLEACDLAAHYEHFEIPKKSGGWRPIDAPDKELSDALVELREMLRTFMIADYHTNAFAYIPNRSFIDAVRKHQAGHVKTKKNEETGVQTTVTFENHWAVKFDLHGFFPSTTPDFLLGMLSIIYPFALIMKDERGHEQLANALKLCFLHGGLPQGTPISPWLTNVMMIPFDHLITRKLCYGYKAKDGIEREFTYTRYADDMMFSCYHSFDPMEIQQIVIDGLNFIHAPFTLNEAKTHYGNRHSSKNWCLGLMWNKDNQITVGWRNLKMFRSAMKNYIDAKKRGETWELEDLQKFMGKLNYYHMVEPEVIDDLVHRYNEKFGVDVMAMLKDDLRLKDGEAA

SEQ ID NO: 4945 - protein, 410 aa, unidentified
  source 1..410: note = Related to NMTT01000002.1; note = Faecalibacterium prausnitzii
MYITYLNPPKTRQITFDEILAGVQNVEALHYGGSNTSTMTVCRNDLTSKLRAITNVPEMIEKLVDYNVKYTALESSDIPSHYSHFEIPKKSGGWRPIDAPDETLSDALIELRELLKSFMIADYHTNAFAYIPNRSFIDAVRKHQAGHNKTVVDEATGMKKVVNYQNHWAVKFDFHGFFPSTTPDFLLGMMSVIYPFALIMRDARGRDELAKAVNLCFLRNGLPQGTPISPWLTNVMMIPFDHCITRKLCYGYKAKDGIDREFTFTRYADDILISCYHHFDPMEIQQIIIDALNFFHAPFTLNETKTHYGNRHSSKNWCLGLMWNKDNQITVGWRNLKMFRSAMTNYINAKQHGRTWELEDLQKFNGKLNYYHMVEPEVIDELIRRYNAKFGTDIIAMLKEDLRPKEGVVA

SEQ ID NO: 4946 - protein, 410 aa, unidentified
  source 1..410: note = Related to BK028800.1; note = Siphoviridae sp.
MYITYWNPPKTRQISFEEILAGVTDISNLSRGGDNTSTMTICRDNLTPRLEQITNIDSMINQLAAFNRKYAELESSNLPSHYYHFEIPKKTGGWRPIDAPDKELSDALSELQRLLKSFMIADYHTNAFAYIPNRSFIDAVRKHQAGHVKTKTDPETGEKKTVCYENNWSVKFDLHGFFPSTTPDFLKGMFSIIYPFALIMKYPRGQAELDKALNLCFLNGGLPQGTPISPWLTNVMMIPFDHLITRKLCYGYKMKDDIEREFTYTRYADDMMFSCYCSFDPMEIQEIVVNALEFIHAQFTLNAEKTHYGSRHSSKNWCLGLMWNKDNQITVGWRNLKNFRCALTNYVEAKSHGRTWELEDLQKFMGKINYYYMVEPDVIEDLIQRYNKRFNVDIIAMLKDDLRPKEGVVA

SEQ ID NO: 4947 - protein, 410 aa, unidentified
  source 1..410: note = Related to BK021062.1; note = Bacteriophage sp.
MYITYWLPQKTRQISFDEIMAGILNVNQLKNIGDKTATVTVCRNDLSDRLFRITNTPEMIAQLYAFNEKYVALEQCDLKTHYRHFSIPKKSGGWRPIDAPDKELSDAQTELRELLNGFMIASYHTAAHAYIQNRSILTAVRKHQAGHIKKKFNPELGYSETIVYENNFAASFDFHGFFPSTNPEFLLHMFSQIYPFALIMRSQNGDEQLRKALSLVFLNGGLPQGTPISPWLTNVMMIPFDHLMSRKLTRGYTMKDGVEREFTYTRYADDIDISCPLSFDPLEIQQIIIDALHFINAPFTLNEKKTHYGNRHSCKNWMLGLMWNQNNEITVGWRNMKYFKAALANYIDAKKHGRSWELEDVQTLNGKISYYKMVEKNVVDYIIATYNEKFKVDIEEMIRADLRPVDGYAA

SEQ ID NO: 4948 - protein, 411 aa, unidentified
  source 1..411: note = Related to BK018054.1; note = Siphoviridae sp.
MYVTYWNPPRTRQITFDEILSGVVDVNQLKYAGDETSTQTVQREGLNDRLVAITNVTSMITQLTEFNQKYARLEAVRDLSTYYYHFEIPKKTGGVRPIDAPTNELSDALVELRTLLKSFMIADYHTAAHAYINGRGTLSAIKKHQAGHRYTVKDRETGKEKIVTYENNWAVKFDFHGFFPSSTPEFIYSMFSKIYPFSLIMKDRNGYNQLTKAMRLCFLNGGLPQGTPISPWITNVMMIPFDYMLNKKLSYKYTMKDGISRTFTYTRYADDITISCYLSFDPMEMQDIIKETLDAINAPFTLNEEKTHYGNRHSSENWMLGLMWNANNDITVGWRNFKDFKKMASNYIVCKKEGKTWDLEDLQQFNGRLNYYRMVEKESVDTVISRYNKKYRVDMMAMLKADLKPKEGVVF

SEQ ID NO: 4949 - protein, 410 aa, unidentified
  source 1..410: note = Related to BK018962.1; note = Siphoviridae sp.
MYITYKAAPKTRQITIDEILAGIIESEKLKYREDVTSTVTACRDELTPRLRAMTDINRMIRELEAFNKKYEQLESEPDMSVHYTHYEIPKKTGGMRPIDAPDKILSDALNELQTLLKSFMLADYHTAAHAYVPHRSTLTAVKKHQEGHVRTKTNPTTGKKEQVIYENNWSVKFDFHGFFPSSNPEFVMGMLSVIYPFALIMQDPFGGHEALSDALKIAFLRNGLPQGSPLSPWLTNVMMIPFDHLLSRKIRHGFKMKDGIARDFTYTRYADDITISCYLSFDYMEMQDVIKNILAYIHAPFTLNEEKTHYGNRHSSKNWVLGLMWNQDNEITVGWRNIKTFKIMMSNYIRCKKENATWTIEDVQELNGLISYYKMVEKDKIEALISKANNKYHVDVMAMIKDDLRPKDAA

SEQ ID NO: 4950 - protein, 444 aa, unidentified
  source 1..444: note = Related to BK018504.1; note = Siphoviridae sp.
MLAQKLIKTSPEAHQSNERPIGNRRLELLRQPTSLSEHKHNPHIRSTHMVYITYNCPERFREMTFEELLRGDFNLANLSTGGHGATRTVICNKVPPRIMRITKVEQMIFQLQAFNQQYESLRLTTPRSSLYNHFSIPKASGGLRWIDAPNPDLMKALKELKTLFQSWMFADHHTCAFAYVEDRSVLSAAKRHQKFNAWWFAHFDFHGFFPSTTPEFVLSQFELIYPFNLILASPIGHAELFKALDLCFLNGALPQGTPISPLITNIMMIPFDHAFAKAVNHFESGKHNPDGTPITDRLCYTRYADDIEVSCKVIFNYHAVERLIVQLLSQMNAPFTLNETKTQFHSRAGRNWILGVMLNKDNQITVGYRKNKIFKATIDTYFRDKQKGKKWPDEDLQSFQGNITWFKDVQPDTTKYIIQKYNAKYGLDLESCIKADLAPPSVTA

SEQ ID NO: 4951 - protein, 396 aa, unidentified
  source 1..396: note = Related to BK037618.1; note = Siphoviridae sp.
MVYITYNTPETVRQITFEELMLGVDIPLDSLRSGGHGSTRTVVCSKVPERIMKITYLDAMISQLKMFNTCYKDLIDYPNKWELYDHFEIPKKTGGKMRPIDAPHPELKKALAQLKDMMSGWMFADHHTCAFAYVNGRSTKDAVIKHQRFRSWYFCHFDFHGFFPSTTLHFVLKQMEEIYPFNLILADPIGRRELRRALSLAFLNNGLPQGTPFSPFITNVMMIPFDHKFARLLNQFQSGKCNPDGTPITDRICYTRYADDIHISCRVFFNYRKVERELIAMLHELGAPFTLNTEKTHFGTRAGRNWMLGLMLNKDGDITVGYRNHKILKSTIETYFKDRRNGKKWDEEDLQKFRGNISYYLSVEPATIAGVIQKYNAKYGADLLTCISNDLKPKAA

SEQ ID NO: 4952 - protein, 384 aa, unidentified
  source 1..384: note = Related to BK023886.1; note = Siphoviridae sp.
MPYIVVKAPPRYRQVSVDEFLFEDEARTSYVALCETETITRFRDHIPGNVRDAYNIPLAIRALQSFNETHSELFEPDRTALYHTFYIPKRSGGGVRRIDQPLPELMNALYELRRIFESMFHADMLYHTTAHAYIHKRSTVTLVRKHQQNASKWFAHYDFHNFFGSVTPEFLSKMFSMIYPFSAVMQSAGGKAALEKALSLCFLNGGLPQGTPISPMLTNILMIPFDHKFSNHLEAFGERNYVYTRYADDISISSRSPFDYKKVEAEIAASLKTMEASLELNRKKTSYGNNTGSNWMFGMMLNSKNNITVGWKNVKAFRSTLNTYLYERSQGRFWPLEQVRSLSGTISYYKMIDEQWLNSILDIYNQKYKTSVRYCLKQDQKRKQ

SEQ ID NO: 4953 - protein, 381 aa, unidentified
  source 1..381: note = Related to BK050993.1; note = Siphoviridae sp.
MCYYVCLPKTESKPNIWSWLEGDIHSPQWLWGTKSAAATVTRRVDFISASVKDKYNVNFIIGTLDAFNKKWSYLGQEIEKHYSHFYIPKKKLDEYGRVKWREICAPDDELSEALKDLKEIFEAAGVSLHHTNAYAYVRHRTASDAVSKHQYNHSRWWITTDFQNFFGNTTKDFLMSMMAQIFPFSAVIERDFGKECLSRALDLCFLNGGLPQGTPISPMLTNIMMIPFDYIMTKKCREKDYIYTRYSDDIQVSHRRKFNPDEVLRFIHETLTQIHAPFTIEKEKTKFKSGNQFVLGVMYNQNCDITVGHKNKKEFKATLFNYMCDRLSGKVWALPQLQQMMGKYAYYSMIEKEYFENVMKEYSRKFKQDVMKCIKADLRRC

SEQ ID NO: 4954 - protein, 398 aa, unidentified
  source 1..398: note = Related to BK019042.1; note = Siphoviridae sp.
MPYVTLQMNPVYTQLSLEDILDGDLDPKRFMPVRNAPSSTRTVYRTQLRQDFINRFNVPGMIRILKEFTTKYAALYDRNRKDLYYHFEIPKNTIDPATGRYGMRPIDAPEPELKLAQYELKSILENQCGASYHTNAFAYIHNRCAVDAIRRHQANHSKWFLKTDFHNFFGSTTPEFLKYMLSMIFPFSEIYQDPEGEAALDKALDLCFLNGGLPQGTPISPMLTNLFMIPIDHRLANVLRDHDGVHYIYTRYADDMQISSKVKFNYGNIVQYINQTLAEFHAPFRLKDSKTRFGSANGHNFNLGVILNENNDITIGYKRKMAFRSQLYDYIQHHLRHDPIPMHDLQVMAGLLSYYTSIEPDYWRQTIERINSKNHVDLNKIILADLGTAARGGEDVPF

SEQ ID NO: 4955 - protein, 410 aa, unidentified
  source 1..410: note = Related to RAYA01000099.1; note = Butyricicoccus sp.
MQFTSLARPSLQWTAHIKVTEKKGFVMYITYKVPPRYRQMTFEEMLSNETNLSEFKYSSNSMTRTIVRKVLPSKLVDFTDIPRLIKQFEDFCEKHKALYEVPRASLYDTWRTPKKKKGPHGETKYRTICRPNSQELRDAHTELQRILEDSMIASYHTRAYAYIKNRRTKDAIQVHQKWKSKWFSDFDFTDFFGSTTLEFLSQMIFMSYPFCLIPEEHRETVRKALDLCFLNGGLPQGTTISPMLTNLMMIPFDHMVSNELHKHDGDRFVYTRYADDIRISCRVQFDVKQMESYLIKKLRQFDAPFTINPEKTGYGSINGKNFCLGYMLNKDNQITIGHERKKRCKAMVNNYILDRMSGQPWSLHEVQVLNGQLNYWRYDNEDGTYAVMINFYKRKYGCDVEKWIKADLSA

SEQ ID NO: 4956 - protein, 444 aa, unidentified
  source 1..444: note = Related to BK053663.1; note = Siphoviridae sp.
MVIRVLAIYDLSQPNKAFIPVISPSHRIQNPTQITETTHRKEYMMIYITYSQPARYHQLTFEEMMAGITVNDIAELRTGTVSGTRTVCLKRVPKKFRDAANIPELRARLQMFTDTYNTMISNPNRQSYYYKFFIPKKSGGLREINAPLPDLRAALVQLHTILSGAMLADHHTAAFAYVTGRSTLDAVKQHQKWESMWFVKFDLHDFFGSTTLDFLMSTFSKIYPFCILCEDKSGEDLLRKALSLCMLNGGLPQGTPISPFLTNVMMIPFDHRMFNTMRNFRLSENRTDRFVYTRYADDMCISCRAGFRYKTVEDYIVSTLKWMNAPFELNREKTHYGSRCGRNWILGVMLNKNNEISVGEREKKYFESMLTSYYMSHGRGTYRGHFDKALTKPWPMEDVRRLHGLYSYYKMVEPARIAEIIEEYNKKFGMNFEALLKMDEQLIA

SEQ ID NO: 4957 - protein, 389 aa, unidentified
  source 1..389: note = Related to BK018887.1; note = Siphoviridae sp.
MENKIMITIPQPERFRAPTFDDYLRGLNSFDQLKTYDATGCVTRMVNVEAVRGKFDLSAFKLVLNNFLTATEKLRADDIHTHYHSFKIPKKSGGLRQINAPDDELKFALQMLVNILSNVMPRTYHTNAYAYVTGRCTYDAVAKHQRWESNWFGHFDFRKFFDSTTKEFLMSQMAKQYPFALIKEDVETWTKLSQALDLCFLDGGLPQGTPASPLLTNIMMIPFDYEVTQDIKSMPNRKCPNGTDRFIYTRYADDIHISCRVEFDIKEQERYLIKKLREQNAPFTINAEKTHYGNRSGQNWMLGYVLNASNAISIGHQNKKHIKAMIHTYAMDKRNQIMWDKDDLMTMLGKIQYWRFSEKELVDYTLERLSQKYGFDVLEEIKTDMGNAA

SEQ ID NO: 4958 - protein, 384 aa, unidentified
  source 1..384: note = Related to NFKQ01000002.1; note = Anaerotruncus colihominis
MPYITLRALPNYHQVSFEELLTNSIDLKQFFYNKTPSNTRTHYVQNVNKKLITSINFDDMKKSLYHFIDLNQQFFNGTISSLSTMYDTFYIPKSSGGLRRIDAPNDELMRTLKDLKRLFEDKLLAIHHTCAYAYIPGRCPLDAIKRHQSNESKWFGKFDFNNFFGSTTQEFLESQLKQIFPFSELLNDAQISGLFHQVLSLCFLNNCLPQGTPMSPMLTNIMMIPIDFHISKWLRSLDKHTFVYTRYADDMQISSRSPFNIGKVQNLILDVLNSFHAPFRLNDEKTRYGSTSGSNWNLGLMLNSQNEITIGYKRKKQLKIMLNNFLYDYSNGKFWDASEVRHLQGQLQYYLSIEPDYISYLVDRYSQIHNVKIYDTFSKILKSN

SEQ ID NO: 4959 - protein, 388 aa, unidentified
  source 1..388: note = Related to JAGOJH010000182.1; note = Thermoclostridium sp.
MLFTFYKKEAETNVNFTDLLDQFYKGTMPLYHPEEIKSYKKTITVTLPAPITDEAANEKYHVDKMVEALKEFEVAIDLLNNIPRKDLYRFFTIPKRSGGLRQIATPCPELMATLRDLKNVFEYKIKCLPHNAAFAYIKERNCKHALEVHQRNKSRWFLKLDIHDFFGSVTVHNMMTEFGKIFPLQTIMERVPELFVKILDICTLPNEQGQCVLPQGTPMSPLLTNLYMIGFDHTIQNTLRDYNHQQFVYTRYADDLLISSQYDFDYKELTAYIASVLQLYHLQLNPDKTRYGSNAGRNWNLGMMLNKDNQITIGHQQKERLKAMLHNFLRDFTLGKPWSIIDTQVLVGQVSYYRNIEPTYVRELIKKYDEKLNTDFKQCVKKILRPKT

SEQ ID NO: 4960 - protein, 397 aa, unidentified
  source 1..397: note = Related to RZYM01000024.1; note = Bacteroidia bacterium
MLYTYKIKYVEERHNVENLLDVLYGDAPAQTETVRSKTNKVYNDFSYDRFKTTETTPERFILTSPHVNSDEQTLRQIYNLTAEIESFLNNNPSPATMYHNFKIPKRTGGFREINAPNETLMKFMRDIQPWFTYKLNALPHDSAYAYVYKRDCNKAIQRHQAIKSNWFLKLDIKKFFDNCDPAFLRQQLKMIYPFGIMRDQDYHRFMDALILLITLNNGLPQGTPLSPVITNLIMVPIDRDINKKLGTYFKDKQQSFMYTRYADDMLISSNKEMNVQEVVGIIDTILHTYTNKLQINPDKTRYGSKAGSNWNLGIMYNKDNKLTVGYRRKKKIKTMLFQFYSCYNEGTRDKEYAQAILGELAYLHNIEPEYTRELVRFMDDKYSTDFYTILHKTVKEN

SEQ ID NO: 4961 - protein, 354 aa, Bacillus sp.
  source 1..354: note = Related to NZ_JAEHBI010000004.1; note = Bacillus cereus
MYYTHNTKNQNDSKYQRFSTTKLKSEEITIEQYREFEAINKQILGLTKKIKDWLTNNQSAIKYSIFNLPKMTGGFRTIKAPEEKLKSFMREIKFDLESIGIVPHDSAYAYIPNRDCLKAIQCHQRNKSNWFLKMDLEKFFNNCSEQVIAIQLKKLYPFSLMTETDYTSFISSLCGLACHENELPQGTPLSPILTNWLMISIDTQINNALAERSEESFIYTRYADDLLVSSKQPFRHEEIVELVKGVLEQEGTPFTIKDTKTRYGSRSGKNWNLGIMYNKDHNLTVGHKRKRRIKTMLFQFYRGQRDRGYALELNGELAYLKNIEPDYHDYLIGFMNSKYRFNFKKAINIAIKQN

SEQ ID NO: 4962 - protein, 382 aa, unidentified
  source 1..382: note = Related to JAFPMR010000005.1; note = Bacilli bacterium
MYITSIKKNTGPGNSKAQLNLIDSLFGEYQEPDIIIDAGRFIRTRTTSASTNALMDLNNYDNNVRYLYRKISNFLYGHEIPSMYYEFKIPKKSGGLRTIDAPNDELKTFMSEITHEFGNKFKLLTHDSAFAYVKNRCVVDAVKEHNNNGSRWFLKIDLHNFFGSCTKDFIVQQLKQIYPFAKHEAETPTKDLLNALADLATLNNGLPQGTPLSPMLTNWIMIPYDYRINLLLNTLVKQEKLLKQRYIYTRYADDIIISAKEKFDKDIIVKEIKKLFEHSPLEINETKTRFGSNAGRNWNLGVMLNKDNNITVGHKRKRYIKDNIYYFIKFKETWDKEQCRWLLGNLSWLQNVEPEYCIGLLNYYKNKYSFDVLRELHLVLKR

SEQ ID NO: 4963 - protein, 365 aa, unidentified
  source 1..365: note = Related to JAGCTX010000238.1; note = Pseudobutyrivibrio sp.
MYLTFYTNAAPKQLTWADILNNPYITRQTSDITKKKVTKEIPDDYAEILWAKRRVMYNPNLIPTDVTAIDTSEHYRHFQIPKKSNPTKMRQIDAPDDFLGNIQTMYKNQIENELQVLSHKAAHAYVAKCSTVTAMQTHQRNDSKWYLQIDLKDFFNSITGEWLKTQLLQVFPFPLIEERELDKIIHVSLLNGTLPQGSHLSPLLTNLAMVPIDYVLTEKLHNLNGHHYVYTRYADDITISCKEKFNEHMILGLIKHIFREFNVPFRVNNDKTKFGSIAGRNYHLGIIVNKDNQLSVGHEKNQKFRAMIFNFCTIGDEWELHDVQKMLGLISYYKAIEPDFVNKVINKYNEKFNIDIMSKAKAMLT

SEQ ID NO: 4964 - protein, 394 aa, unidentified
  source 1..394: note = Related to BK022447.1; note = Siphoviridae sp.
MRHLNSSDLQRLPVITVMEETKMYYTIHREKINYPEVTLRKILLNKPIPEKTKLREYTTVEIPDTTNFTLTEDAIRFRDYILNSWESLSKSSIQLYSSFKIPKKSGGLREIDAPVQGLKTIQSTLAYWLQDELRILPHDAAYAYVKGRSHIESLKKHQNMQAKWFLKIDFSNFFPAHNKEYILNMLEQVYPIGALIKNDRAVISKMLDICLLNDKLPQGTPVSPALTNICMVPIDYAITNLCVTLGKKYNTFFTYTRYADDIIISAGKSFKWTGVIKEIENILNNFNAPFKINNKKTRYGSNTGRNWNVGLMLNKDNRITLGHKNNKILNAKINRFCYENIVEKKTWTVPEIQELQGNIAYAKAVDPDYTNYILHKYTVKYKTNVEQCMKNMLY

SEQ ID NO: 4965 - protein, 384 aa, unidentified
  source 1..384: note = Related to JAFQSJ010000047.1; note = Clostridia bacterium
MYISYINKKNNQIETRDTSGPTEKNIQELGKRLQCFYYLYEEALKILQNGDVSSRYRTEDRLKKNKTRRRIDVPDEELMKYQKKVVDIFNNHLALVFPQSVYGYVKGRSPKAMAEVHRNQYQVIKMDIKDFFPNCTLDFIMKSMSTVYPFCLLDSELIETIIKPCMIFYDGQYRLPQGAPTSPILSNIAMIPVDYELESGALNGRGYNYTYTRFADDIIISHGEFDFSSSISAEERILSLIFGIEYEEPPKSLEEKYSEIKKITCNVINTIKDCLHNQNPNFKINSEKTKVLNTECGNVWMLGVTVGQDVKIGNQRKQGLKATLWTFLNDCKNGKPWSQKDTRHMLGILGYAKYIEPNFVNELIAKYEQKTGTSFRKEVKKILC

SEQ ID NO: 4966 - protein, 376 aa, unidentified
  source 1..376: note = Related to JAFQSS010000025.1; note = Clostridia bacterium
MYITYIDQDKMQKVTCSTNIITERNIAYAERENGSLISLAEEARELLKKGVNSKYTTYYKKKSNGQKRQINVPDDELKAFMRKVVKTFTAMSGFMWPDNMYAYIEGRGIKQHAELHKNAAVIIRMDIKSFFDNCTFKFVTESMKEVYPFCLMDWNLLEPIVKACMLKGRLAQGAPTSAILSNIAMIPFVTHANNWTKAKTITLGLAPRGKYFKMTKGTRRKATSIVAKRIIFSMYADDIIISTNIKAPFGENAWKTIRIIQKLLNWYTPLQVNPRKTKYVDIRRKGGAWVTGLMVNKEHNVTVGREKKEKLKATIFSFLADCKNGKPWDEHRVRQMMGTVSYIRHIEPEFVDMIIQKYNQKLNIDYHEQIKNIIYS

SEQ ID NO: 4967 - protein, 386 aa, Desulfovibrio sp.
  source 1..386: note = Related to NZ_JABAFY010000049.1; note = Desulfovibrio piger
MRENVVEITRTHITGGAANPVSHIENWYDLAAVLGLKTGTLSYALRERDKLQTKIRLGDRTVYKSGRALKVIQSRLTTLVEPLFDALPGNECALAYRTGVSATDRIREIPHARMLVTFDIRKYYDNVTLRHIEECLRGCGFRTLGARLVGRYCVVRREGRCTLQQGSPVSPAISNIVGHFYFDTPIRAWLGSEFPDVRATYVRYCDNIALFLHDGVPEGFTDKFKSFVRETFRSGGFRTHKWNCITDSNPVKNQKFLGVVLNAEARVELVVVDRLRAILFNWCLFGGQCTADRFMSEEGIQLRDFMFDGMKVGKLRQIMRGHINYVKRINSKHGLWLDKLLGAALYLDEKGMPACANEEMFRRVKKYKDCNESYDDFMAGITSITG

SEQ ID NO: 4968 - protein, 382 aa, unidentified
  source 1..382: note = Related to BK057640.1; note = Siphoviridae sp.
MQILRTYVEDQRTNSVRHIRDWYGLAAVLGLKTNILAYALKERDKLQTRIKLGDRTVYKSGRALKVIQSRLTTLVEPLFDALPGNECALAYRKGVSATKYIRESIPHARLLVTFDIKKYYDNVTLKHIEECLTKCGFQVLGARLVGRYCVVRKGNRSTLQQGSPVSPAISNIVGYFHFDVPIRSWLTSEYPDIEATYVRYCDNIALFVHSDVPDGFTEKFKSFVKRALGDGGFRTHKWNCITDSNPVKNQKFLGIVLNSQARMELCIVDRLRAILFNWCRFGGFAAAERFMAEEGIQLREFCIDGMKLAKFRQVMRGHINYVKSINEKHGLWLDKLFEAATYLDARDLCACNNAELFRSIKKYKNGNEPLDEFMRGVEASAG

SEQ ID NO: 4969 - protein, 430 aa, unidentified
  source 1..430: note = Related to JAJBAW010000005.1; note = Candidatus Cloacimonetes bacterium
MKCQKYTEEVFDSPLSLVHGWDELGALLKIKTKYLSWVGGKDKNGSLRRNHMQHLVKVKGRDTYKSDTTLARIQTALNIPFDQIQDSFPHEHLLAYRKGVNYKKELQKYLGRKYMVHCDIKGYFDNISMRKIVKTLCALGAMSEAGAKLIARYCIVRRRQSDRWVHTLQQGSPCSALLSNLVGYALYDRDILAWVARKQKEYPRASLEYVRYCDNLVLFVDGDAPLELIKEYRQYVHVVMSRRGFQTHKWSVTPKNHPFRNQRFLGVVLNVKARVDLERFQRIRAALFNACRTSVTEAANTYFSLYPFRAAEFPTENVGEDRAVFAITQHARDEQFLSIMRGHVAYIDSVSKEQGSLLKKLFQACVFLRENPQGVSQRLAEPVFLALKTYNRKVESVEVFLERLSSACSRTRNSSESLTQENTGHWESVL

SEQ ID NO: 4970 - protein, 384 aa, Desulfovibrio sp.
  source 1..384: note = Related to NFJC01000017.1
MKLRSTEASQMMKLIDNFSELGSLLHIKNNHMAYARKFRDDLRRKIKVGKRTVYASKSPLSVIQRRLGMVFNIMMDDLPYNEVAIAYRPGVNVAEKLAVCQGSAIMIKTDIRHYYDNISYAHIEKALMDCGMIARGARLIASYCTIWNGRFSSLQQGSACSPALANIVGNRYFDRPIVRWLRDHCPVEHTYYRYSDNLVLFCKEEPGNDFINEYKEFVKTTAARGEFRTHSWSSIRNNHPTRHQEFLGIVLNEVANISRVKRDRIRAILWNAVVGNTAEEAKKYFADTGELPRGIADEEEVYTTKFMMAMQGYVAYARMIQDKFANRIAKLLIAVRIKDGYFNEDGMIFKYGLDNKHIECAKLYKDDSVGIEEFRRRFLDCLSS

SEQ ID NO: 4971 - protein, 325 aa, unidentified
  source 1..325: note = Related to JABCOO020000008.1; note = Candidatus Saccharibacteria bacterium
MMLYDLIGVSKNDFDNFIENINSVVIKEGTHWKHVNPSSHNSVSIKFDKYFEDQFKNVISASSPKQGAFCGKSIIQLLAPHSSKKYVLTLDIKNFFGSINFHKVQECTKDHSSLQLYSDIIHIFYFGGDDQLRRGLKGSAAIAEVVGLKIDHLIRKIIYSNKEYSNKDLVYSRYYDDIIISGDSFGALRSVASVLAKSIYKELGLLLNPKKTRLRILHGSKILGLRFHDRDITVPQSLKHKLRAIMYEYSSANYDESDYESVRDAKRHVGQIIGTLRYIINFTSANVSRYEDWLADFYEELDRLEEIRKDLAQYYDDEKGIYFDM

SEQ ID NO: 4972 - protein, 357 aa, unidentified
  source 1..357: note = Related to JAGOTC010000067.1; note = Candidatus Gracilibacteria bacterium
MLDKRRLAVNTKDFSILKGILPGVIDTLIHYPEGAYKRIEIPKKSGGMRIIHAPLGEAIMQMNADNTSTSLLGWIQKRINHVLGFILLPSSVCAFRPGIDPYSFLRTTLDGISNCRSSQVGGIYKIDIQDFFNSVSEDQVKMVWEKSLPKLSGNFYSKDIINILTLLSCYEGKLNQGPPSSPIIANIVGYLCIDSNLRGLQQTRNIGSNRTPKSLWIRYLRYADDIMILSFDGAIPSDIPDTINETIKNSGFHIAKKKTLLLNDSHSYPLLGISLLRDTSPVGFQFQIGTARDRDLASELLGYQGEGIKSIAGKLGFNKRISLLGRSGVEVEHFPGRYSKRVAHALSMKSDLLLCSQ

SEQ ID NO: 4973 - protein, 322 aa, unidentified
  source 1..322: note = Related to JADJEI010000006.1; note = Ignavibacteriales bacterium
MPSKVLQHIPLKLNLHEIKYLTTPLKTTESRLLKIISIKSKIVKEKKIPKKNSDEFRILNYPVGEFKLILKRLHKFLMSRSKFPKSVCGGIVDKNLYDMVKSHCGREGIYQIDLKDFFPNINSDRVYSFFKNSGRSERISQILTDLVIYDKRLPQGFPTSPIVANLIAWKMDYDLQSICNNHKLNYSRWIDDVLISGRISELNKAIYKIDKSILKNGFYINNKKKRLLKRKNSKEIVSVGLDLKRHKPDVPIKVYEKLEYILQVLITEGVEFARDFFEEEFKLKDIQKSLIGKIRFIEEYNKAKGNFLSNLYIQINWGKGIG

SEQ ID NO: 4974 - protein, 418 aa, unidentified
  source 1..418: note = Related to QPGD01000013.1; note = Brevibacterium aurantiacum
MQFLKKLKLALDRLILGRSTPGRMLEHVFDRNLSILDKVLESILLKDGLEHSEFRGRLTRWRKSYIGKSWGLWTDFSDSANICEFLGDSSIAESDIVSIFADPDMHYRRFWLPSRRSDNTRSKGRVRKRRLIHAPDDSLLSIHRLLLREVLDSFDLVISDAAHSYRPRRSPRTCMFPHKSSGWMICMDFRNFFGTITEDKVLRALVDRLGCPSSTAACYSRLFTVNCEDKGIRVLPQGAPTSGFISNVCLIGFDQRLRAMLSSVDSNIVYTRYADDIVISGPGMLSKSVKSRVIALVSQAANGKGFVINNSKTRVYSGASVMRALGIDIRGGELFPRKSIIDYIEKQVRLIKTRSLTEVSNGWGGLVDGQDNTLKYLDHLWGLIIYASGINRRYAQGVIAELENVETPLSGRLGLIDS

SEQ ID NO: 4975 - protein, 376 aa, Corynebacterium sp.
  source 1..376: note = Related to NZ_KV797734.1
TPLRTPKPEEPNKGVLPIYGVAHLSWMLDVSPSSLSTLLGSERAVRSDLRRRGSRPRAIYIPDSEYLAILRKINQLVFLPADERLDLAAFGFRPGCSPSDCMDKHKHGKWMLKLDIHEFFSSISFFDVKRTFIRVGHSETVSETLAEICTINENGRRVLPTGFPTSPYISNWVLASFDKRMRAWCAENKIYYTRYVDDLFFSGTEAAPNNIIGSIQGLVDYRLGLHGLTLNLKKTRFYRGDSVFKGLGVELHPSRDELVGAGRYMLPSRRMRAHIENQTRCIKKFGVETASRHWCERSGIDRGLGIPEYRYVQHLAGALSYIKNINKAYGNDLENELQIALGESVSSYLLGHQSIFPNSVYSSSYDVPSARKFGSN

SEQ ID NO: 4976 - protein, 325 aa, unidentified
  source 1..325: note = Related to JAFWLI010000028.1; note = Eggerthellaceae bacterium
MFKFDGVPPISYQEYHIPKKSKGVRIIEEPNAQLKAVQKRILPYLYDCTRVGLLPVSHLAHGFIPYRGCMTAVPKHSLNSPVLIGADVHDFFFNFPAEPVENNLWFAMDSSRVDYIMTCALWKGNYPKEHFPQGSPISPYLTNIGMVDVDRMIAAFCKKNGLFFTRYADDMLFSIIDGAEDSPQVRKMMREDEPFSSLFHGVEVILQDHLGLELSAKKSHVMWRHSTCKTQALGITFRQDNKGYNANKRKRRNTRAQLYNLFRKVQAQGGHFQDEDWQEWRSVNGSMNYCNLVRSLSKFPEVAGIDPVFQLSYYNEIERWANAAV

SEQ ID NO: 4977 - protein, 529 aa, unidentified
  source 1..529: note = Related to JAFXGU010000070.1; note = Lachnospiraceae bacterium
MTDNFDYKNPHNITTGRLLYSDELPFFDMISFCMFLGTTPTQLQRILGNIDSMYSRFYIDKDTGRVTSKHAGLRLREINAPLEPLKTWQLRLLDVLNLFPKHEANTAFMEGCSVINAAKTATKGDVLVHVDIKDFFPSHTALYIKRKLSALVFKTFRMYLPEEVLVAITKLICYRMQLPQGSPCSPMATIVLNYDLDTRIDAVAKKYNLEFKRYADDMWFTGVQSDDVIQEFLYELQDAIHPFSLNYKKTNIMRTRAYPKFNGVRIKFTKSYVPSTQAAKIINMVVAALGFTKHKANISKNQVLIEGYPTPQLALDDVRSLMDSVAATIMAKYPNLVFTCKPNWYYIQSTKKCLGLNIVGENVVYPRKRYNDLRLEAMLMGRQRALFALYFAIVAKHKANPRLLPPIKTAPFVFASKGSVGHENFRNLLTNPFNRRVFMGKVAYLRSINPEKADKIMAIEKASYQKCIDGYLLWYPTVNVDYYPDVQWLSSLRDIPNSEACVDIFIGSSISNEELSSILGEAGIGCWAL

SEQ ID NO: 4978 - protein, 567 aa, unidentified
  source 1..567: note = Related to BK016974.1; note = Siphoviridae sp.
MIELMKNYSFKTTLKNLVKGFVAAETAAPKLFTKSLDDWPFFDIATLCAYLGITPLELQALCNCQPTLLYHRFYIDKATNRIVPFNKTANLRMIEAPRPELKEYLMKLIPFFEKFPIHKCNYAFIRGKKIKDAVESVKEGEVLIHTDLKDFFTEHTPLYIKSKLEMLMLQNVPEMYDPEFCKVLTRLITVYTHLPQGSPCSPILTAIVNYDMDSTIQSLADEYNLTYMRYADDICFSGAIANDDIRVFLDKLVDAVHPFRLNRKKVAIMRDAAYPVFSGLKLYIENDRQYIPSSLLGKLIKLLRHEFEPMEFTSVHTVATQGKIHFKLGKIVETPVGSLKEKCDRFSCHLNSKYSASGFKFKLKPTYFYIKSLKQVLGMHITDGKICYPRKMYNQLRLEAMLVGRQMAFQFTQKYIAKNTIDPITSKQHVYLDLQNFVDNISDKDDPMYSRFFTVRYTNVPVGNARNALYTISSRSYKLVSYAEILGITPTYLRGKKRTSKGYRNMLDKPVSLKVFYGKVNWVNTVDPEKATKLKEIVKKYKLKTLAALVKAFQESASREYVKFSAV

SEQ ID NO: 4979 - protein, 485 aa, unidentified
  source 1..485: note = Related to BK028934.1; note = Siphoviridae sp.
MDINRFPKLVREYYNTLTGRHTPLESICGNRVLTLSELPFIDYNSFSSYMGVTPEILTSITDVTAKACYSRFYIDKNTKKIVPYSFGIKLREINAPTEALKELQLKLMEFFNQFPKHPCNYAFMQGKNIVDAAKTVANDGVLVHVDLKDFFPAHTSLYVQKGLEHLIAKNFNTNLPLDVLSRIVKLVCLDGVLPQGAPTSPILTIILNYDFDCRVAELAEKFGFTYTRYADDLCFSGNKSDAECQDFISELSEVVHPFRMNYKKVGIMRDKAYPIVTGFRIKTKVTYLPSTQSAKIIGIITNYLQMPDLRGTISAKVIEFTFSKDTKIPLDELPETLTRITDLVHTKYPNLEFIVKPMYKYVQSVKTVLGLHISNSEVKYPRSKYNDLRVEAMLIGKQLGIREVMYNIHPARIALVKKYAAHNKFFKSSFRNLMVKPLSKRVFNGKLAFLSIVDPDKTLKLKTIMDKHRQKTVEDMIDIFKREGF

SEQ ID NO: 4980 - protein, 394 aa, Aeromonas sp.
  source 1..394: note = Related to NZ_JAACNB010000003.1; note = Aeromonas veronii
MKKYTVNTSMLSLLEGCSFFVKGKGAEPLPYSHAEEGKLGNKFFYKISGSESKQINTIHELLISSLFERLPVNQSATAYLKGKSYLDFLEPHRNNYYFLRTDLKNFFHFIDKEMVVEALRHHVSEEPVTTEYSQSSLELVSRLVTLTLPKNSKNLEFAGQSILPIGFKTSPVVSNVVFRKFDILIEKFCAQHDILYTRYADDMLFSASDIRTSKYKEKDIFSVLRNPKVKEKKPFLHSRRFLEQISFIVNLGGFKINNKKTHMSKGYFTINGYTISGTNYPYTSGTIRVSNKKTKIICKLLHECKINVDDGDILKTVFNYRETKARLPYKSSKKFMNTYHATQLNNKLMGYRSYLISLLKFNETYRCMDSTFINKCTSLVCELDSIINRRINKQ

SEQ ID NO: 4981 - protein, 392 aa, Aeromonas sp.
  source 1..392: note = Related to JADPIC010000001.1; note = Aeromonas dhakensis
MKKYTINASILSTLEGCSFFFKGKGAEPLPFSHVKEGKLGNKFIYKVSGSEARQINLIHESLISTLFEKLPVNQSATAYLKGKSYLDFLEPHRNNHYFLRVDLRNFFHFIDKEMVLEALHHHVSEDKITDECNQSSLELVSRLVTLKLPNESANSDFTGKSILPIGFKTSPVVSNVVFRKFDILIEKFCAQHDILYTRYADDMLFSASDIRTSQYKERDLIFDLVNPRVKKKKPFLHSHRFIEQISFIVNLGGFKLNAKKTKMGEGNFTINGYTISGTNYSYKSGAIRVSNKKTKIISKLLHECNTKDDDGSILNAVFNYRVAKIKLPYKPSMKFLKVYYTSQLNNKLIGYKSYLISLLKFNEHYRCMDPAFITKCEKLVSGLNEMIIRRMK

SEQ ID NO: 4982 - protein, 311 aa, Aeromonas hydrophila
  source 1..311: note = Related to NZ_AP023398.1
MKSYTINSTVIATLETCSFYSKGKGVESFPYSQVKECKLNNKFIYKLSGADTRQINEIHDILIKTLFDKLPINNAATAYLKNKSYLDFLEPHRNSNYFLRIDLKNFFHFINKKIVKEVLFHHVSSDPISEKTTQSSLDLITNLLTITLPNNVKNLEFSGKSILPIGFKTSPAVSNIIFRKFDILIEKFCSRHDVLYTRYADDMLFSSSDTRTEQYIEKSLFDILLPPPNTKPFLHSSKFTEQIAFILNLGGFKINTKKTSIAKGNFTVNGYTISGSNYPYKSGTIRISNKKTKTISKLIHECKKTSPMRTY

SEQ ID NO: 4983 - protein, 389 aa, Vibrio sp.
  source 1..389: note = Related to SZQJ01000005.1
MKNYTVSSSILSLVKECMFFNEGSGVKSLPLSCVHETKVKNKFIYSITGSEGDKINHIHEALNRSLFSRIPVNQSATAYVKNKTYLNFLEPHRNHYHYLRVDLKNFFHFISDKIVRESLKEHVSTSNISETCSQSHLDLVTSLVTYTLPKSAKNTDFVGRSILPIGFKTSPLISNIVFRKLDILIEKFCSEHNITYTRYADDMLFSSSTMRDGKYREKTPFDGVLGIKDKKPFVHSQRFIEQLSFIINIDGYKINRRKTIKKSGYISINGYFIEGSNYPYIIGELRVSNKKTKVVSKLIYECSTDKSDREILKAVFNVDVEKLKFRFNPKDSFKDEYSKSQINNKLIGYRSYLISLIKFNDCTQSMNKDFINKCSKLISDIELIINRRM

SEQ ID NO: 4984 - protein, 391 aa, unidentified
  source 1..391: note = Related to MUEZ01000005.1; note = Salinivibrio sp.
MKSYTVNSSVLSVLEECTLFDKGSGLKPLPPTQFKETKIGNKFIYIPSGSERKTINYIHESLNKNLFSRIPINQSATAYSKGKSYLNFLEPHRNNYYFLRLDLKNFFHFINGDTIKNAISEHVSSSAIMDGCIQSNLDFIVKALTITLPKESKNKEFSEKTILPIGFKSSPIVSNIVFRKLDIIIEKFCSENNITYTRYADDMLFSSSTTRDENYRERTLVASLFEKKDKVPFLHSDKFIEKISFIVNIDGFKINRRKTVKSKKYLSLNGYIISGSDYPYLSGSIRVSNKKTKIISKMIHECNKSNDDILIYKSIFGSDPSKIKFQYKPKESFLIKYCRSQVLNKLVGYRSYLISILKFNTDYLCIDRGFIKKCEHLIRELEPLIESRIDK

SEQ ID NO: 4985 - protein, 391 aa, Vibrio sp.
  source 1..391: note = Related to NZ_LAUM01000014.1
MKNYTVNSSVLSVLKECTFFDEGSGLKSLPSTHFKETKVGKKFVYVPSGSERNHINAIHESLNKSLFSRIPINQAATAYSKNKSYLNFLEPHRNSYYFLRLDLKNFFHFINRTVVRNSISEHVSSSEVIEGCSQSNLDFIVNILTITLPDTSKNEEFSGKTILPIGFKSSPVVSNIVFRKLDILIERFCAKNNVTYTRYADDMLFSSSTVRDDKYREKSVFDDLFKKKEKVPFLHSDKFIEEISFIVNIDGFKLNRKKTVKSKKHLSLNGYLISGSDYPYLSGSIRISNKKTKIISKMIHECNKDQDDISLYKSVFGVNPSKINFRYKPNEAFLIKYCRSQVLNKLVGYRSYLISILKFNENYSCIDGKFINKCESLTRCLETIIESRMDK

SEQ ID NO: 4986 - protein, 393 aa, unidentified
  source 1..393: note = Related to MSCJ01000001.1; note = Photobacterium angustum
MKNYTANSFTLSLLKQCTFFNEESGLISLPSSHVIETRVGNKYIYKLVGSESELINKLHENLNETLFCRIPVNQAATAYTKNKSYLDFLEPHRNNFYFLRVDLKNFFHFINREIIKDSLKDHVSSKPIISGCRQSNLDFIVNVLTIKLPETSKNTDFIGKSILPIGFKSSPVVSNIIFRKLDILIERFCFEHNIIYTRYADDMLFSSSDLRNDKYQEKSVFDDLFKKKEKNNFLHSDRFLEQISFIVNIDGFRINSKKTVRSKKHLGLNGYLISGSNYPYIDGKIRISNKKTKKISKLIYECNTDKSDLDIFKVVFSIDPFRIKFRRKPKVEFLNNYCCAQINNKIIGYRSYLISLLKYNDKYSCLEDDFIFKVKGLIKESEKIINNRMKKEI

SEQ ID NO: 4987 - protein, 391 aa, Vibrio sp.
  source 1..391: note = Related to ABBKDM010000016.1; note = Vibrio vulnificus
MKKYSLSSVVLDLLKEYSYYKEDKGVLPLSSSHVREFKIGKKFAYSTAPAINRIHSHLSKVIFSQYVSKIPVNQSAKAYLAGTSYYDFIEPHRNNYFFLRLDLKNFFHSISKDVIQKNFLEYFSDEKISETCEQTHAQAICNLIMYKLDVNNSNVAFKGKYILPMGFPLSPSISNVVFRKTDLLIEKFCNEKGITYTRYADDMLFSSRGTIVPPPIFRLIGKNKDKVKAYESPFLHSKRFYDEISYLVGLDGYRINKIKVIKAVNTISLNGYTIAGTNYSDLKGDIRLSNAKTKIIYKLLHELKVQKSDDVLVFKKCFSSEMPVPKYKKNVGKFILNFCTNQINNKLVGYKSYIISILKYDTEKDCLSVESKSKYLNLLGKLDVVIKKRMK

SEQ ID NO: 4988 - protein, 390 aa, Vibrio sp.
  source 1..390: note = Related to AIDA02000097.1; note = Vibrio cyclitrophicus
MKKYSLSPVILDLLKEYPNYEEDKGVIPLTSSHVREFKIGKKFAYSTNTAINKTHSHLSKVIFSQYISKIPVNQSATAYLEGKSYYDFIEPHRHNYFFLRLDLKSFFHSIRSNIVSENFLEYFSDKKISENCEQTHSEAIFNLIMYKIDNKSKNNTFKGELILPMGFPLSPSISNIIFRKTDLLIEKLCDENSITYTRYADDMLFSSRGQIIPPSIFPLIDKNKKKETTYKNPFVHSKRFFDEISYLVKLDGFKINKKKTKKSVHTISLNGYTITGSNFPDIKGEIRISNLKTKIISKLIHELNNKTDDVIAFNKCFKKENPIPKYKKGSENFISEFCKNQINNKLVGYNSYIISIIKYDKEKNCLSRDSREKYANLVKDLNKLISKRLK

SEQ ID NO: 4989 - protein, 390 aa, Vibrio sp.
  source 1..390: note = Related to CP071059.1; note = Vibrio alginolyticus
MKKYSLSPIIIDLLKEYAYYKEDKGVLPLSSSHVREFKIGKKFAYSTSSAINSVHSQVSKLIFNQYISKIPVNQSATAYLSGKSYYDFIEPHRNNYFFLRLDLKNFFHSISKDIIERNFLEYFSNDPISDKCEQTHAQAIYNLIMYKLDSKSDNSTFKGCEILPMGFPLSPSISNLVFRKIDLLIEKFCDEKGIVYTRYADDMLFSSRGKIVPPPIFAFFGKDTKKRKSYDPPFLHSKAFYEEISYLLQLDGYKINKNKVKKSVHTISINGYTITGSNYSDIKGDIRISNIKTKTITKLIHELKVNKDDILVFKKCFKKEFPTPKYKKGANDFISDFCTNQINNKLVGYKSYIISIVKFDGDKDCLSTASRSKYTKLLEQLDNSITKRLK

SEQ ID NO: 4990 - protein, 393 aa, Pseudomonas sp.
  source 1..393: note = Related to NZ_JABUYN010000001.1
MKKILLHPSVVELLKNFSNYTDSKGILPLLSSHVKEFKIGKRFVYTLSEKISPSYKHIIRAIHTQNLAKIPVNQSATAYLKGKSYFDFIEPHRNNYFFIKLDLKNFFHSISEDVIKSNFLEYFSDEIIFPNSTQTHAEAIYNLIKIDLSEKSSNKRFIKKSILPVGFPLSPIISNIVFRKIDLLIEKFCDEKNIVYTRYADDMLFSSKGKIEYNPFSTKNNKYLNPYLHSKNFYDEISFILSINNYKINKNKIKKSVHTMSLSGYTITGSNYSDIKGFISISNKKTKIISKLIHELKIENTDEDRDRDRDILKKCFSMIPPKPKYRKKTDEFIKKFCENMINNKLLGYRSFLISILKYDKNHDCINIENNEKYNKLLNEINIIIRKRLSLNDF

SEQ ID NO: 4991 - protein, 398 aa, unidentified
  source 1..398: note = Related to NZ_CP012737.1; note = Pseudoalteromonas sp.
MEEIEMKKITLSKTVFDILDDYSFFDKAKGLTPLSFENVNEFKIGKKFTYTPESNLKPLHQKLSRFILNNYLSHIPLNQSSVAYQTKKSYFDFIEPHRNNYFFIRIDLKNFFHSISPAIIKSNFLNHFSDDPISESCPQSHAKLVYNLITLKLDENSKNKTFMNEEILPMGFPLSPVVSNIIFRKIDILIEKFCDIHHIKYTRYADDMLFSSKGSLLPKPIFEPIVMGLKAVTKSYKPHFIHSERFLEEISILLNLDGFKLNRKKTTKAVNTLSLNGYTISGSNFPDINGTIRISNKKTKLISQLIHELNSEEPKTDVEIFKLCFRHEFPKPKYKKNAGQFIETFCINQINNKLIGYVSYLKSIIYYHDDHNCLSNESINKYSKIINELSTIISKRVK

SEQ ID NO: 4992 - protein, 383 aa, unidentified
  source 1..383: note = Related to NZ_CP046329.1; note = Shewanella putrefaciens
MKKYSLTPAMLEVCKEYNFFSDVSGFMPLTSENIKEIKIGKKFAYSHQDNNKPTHQKLSKIIFENFLSNIPLNQSAIAYVKKKSYFDFIEPHRNNYFFLRIDLKDFFHSISEDLLKRTLSDYFSSESLSETIKQSNIDAIFTFLTVNLKSDSSNVKFLDKKILPIGFPLSPNLANIVFRKTDLLLEKLCDMHGVTYTRYADDMLFSSRGIMEKNLLFRKNNNYKKPYIHSDNFLSEIKYLVSIDGFFINHNKTIKSVNTLSLNGYTISGTNFPDIEGKIRLSNKKTKIIEKVIHEININPDDKVTFEKCFKKEFPKPKYEKNRDNFINNLCTIKINQKLLGYRSYLISIIKFNNKFNCISESSEDKYNTLLSKIENVIKKRIK

SEQ ID NO: 4993 - protein, 310 aa, unidentified
  source 1..310: note = Related to NZ_PKFV01000007.1; note = Lelliottia sp.
MSAVAYIEGKSYLNFIEPHRNNFFFLRLDIKNFFPSITEALVKECFRDYFSEEPINDVIKQSHLDAFVNFVTLNITNSSVNDTFKNSSILPMGFPLSPIISNIIFRKIDIIIERLCVQSYITYTRYADDLLFSSRGKVDMSLASFMKINSTYTAFIHTERFCDSIRKILAVDGYKINKTKTIQAKSIVSLNGYTIIGSNYSDVRGEIRVSNKKTKKIEKLLHELKKKISDQAVYLKCYSNQIPVPKYSSKKEVFLNAFYKNQIDNKLSGYRAYLISMIKFDGEYDCFDSHALQKYKNLISQLDLALSKRK

SEQ ID NO: 4994 - protein, 393 aa, unidentified
  source 1..393: note = Related to MAJY01000007.1; note = Aliivibrio fischeri
MNKNKFNNDFLKRIVVDYKNYNESHKVPSIEPDMVVEFKLGKKYVYKLNEAHSDYEGISKCQNKLITEFLSNIPISTVAKAYVSGKSYLDFLEPHRNNYYFVRMDLKNFFHSISSELIRNSFDLYFENEFTNEDKKQTLMDAFINIATYKLDQESKNVAFSGKRILPMGFKSSPIISNIIFRKIDILIEDFCSNHNITYTRYADDLLFSSKTNSDPYGSVFLKRFNSKPRTGFIHSNRFLDEISYLVRIDGFKINASKTIKAINTLSLNGYTIEGSNYSDLQGTIRISNKKTQIISKLIFEVKKGSSNFNVMKKIFDFKVSNKYFNYIPPKEEHIERYCRDQIINKVSGYRSYLISILKYESEYKCIDEKSINKYNKLIKELEWILTKPEFAS

SEQ ID NO: 4995 - protein, 367 aa, unidentified
  source 1..367: note = Related to JAKGAW010000004.1; note = Pseudoalteromonas sp.
MDKIDKDTFFSELLVGDYSTLINQGVPQTDFGDVTEIQSGKKFFYKLKEDSDLNKCLKVLTTRFLNKIPINNSAKAFRSNQSYLNFIEPHRKNYHFIRIDIKNFFHSISEDILKDCFSSYFEKQIVNTKSRSLLVDSFINLVTLRLSENSKNEVFSNKIILPIGYKTSPIISNIIFRKFDILIQSLCSMHNIEYTRYADDLLFSSPKHSNTIHSTFFYNEISFILSLGRFKINQKKLLSAKKILSIKGYTIDGTEDEKRLGTIRISNKKIKIIEKLLYEFDKGSSNIKILRKVFKINVEKKKFKYKPKPEFIDKYAKDQVHNKTLGYRSYLISLIKFNQDYKCIDDKSILKYLKLVKRLEKLALEIK

SEQ ID NO: 4996 - protein, 410 aa, unidentified
  source 1..410: note = Related to BPFA01000013.1; note = Shewanella sp.
MKIIEKKDFVNQVLQGYDGYSNEMGVKTLTPNEIVEFKIGSKFGYRCSNNDLAKSLENTQLRALSRVVNTLEISKCATAFVTGSSYLDFLEPHRYSYHFIRLDIKDFFHSISSSVISESFSKHFKDTNITSGETKQTLLKSFLNLVTYTIPPDSTNKKFAGKTILPIGFRTSPAISNIVFRRLDCLIEDFCYRNNVTYTRYADDMLFSSKINTKFKSILQKKDVLPPIPITHKEHKTRLAKIKREEALKHGCFLHSDKFTNEISSIIRIINLKLNIKKTIKSNQTISLNGYTIDGVDSYLSAGTIRVSNKKLNVISKIIHSLNKNMSAIEIMERYFKMNKAHECFKYPPKYDYYNTFCIQKLFNKITGYRSYLVSLIKYDEEYNCITPSSLKKYKSLIAELDKTFTKIKL

SEQ ID NO: 4997 - protein, 380 aa, unidentified
  source 1..380: note = Related to NZ_AP024610.1; note = Shewanella algae
MVSEKKIGNKFAYSLKVNGDEGQNILAIHNKLNQLFLNNIEINRCAKAFIKGRSYLDFIEPHRENFHFIRLDIKKFFHSIGIDLLTEAFENYFKKDYLINNENKQSLLNAFIKLVTYTIPDDSPNIELRGVTVLPIGFKLSPVISNIVFRKFDLLIEDYCYHNNITYSRYADDMIFSMKISNKFKNFKRIKFPSLLINAEDDRERKLEILSFIHSDKFIDDISDILSIGQHKFHLNPKKTIRSHHTISLNGYVIEGCEDHFSTGSIRLSNKKTHFISKVIHAITKKKLSPESIFKTILKESIDKSNIPYTPATPAFKKQYYRSQLINKLAGYRSYIISFLVYDSKHHCIEDKYIRKYLEMINAIEKSINKLEKQRLQQPK

SEQ ID NO: 4998 - protein, 372 aa, unidentified
  source 1..372: note = Related to NZ_AKXJ01000001.1; note = Pseudoalteromonas sp.
MKYKKLTVKSFVSMLSDEASDQLELLKQPIEPYKFSDVKQRKLGKKTIFKLTPAKSQYLDRLNNKLFSHIRINNSAIAYVEKKSYLDMFEPHRKNINFLRLDIKSFFHSINRKTLEETLSPYVTDENFFEVGSVKQSLIDALLNLVSLRVSVEYNDESLHNKDILPIGFKSSPVISNIVFRKFDIIIQELCAKNDIIYTRYADDMLFSSPVHSKYIHSDKFLNEISYILSFGGFRLNQSKTIKDKRMISINGYVVEAGENGDSGTIRISEKKTRKIYKLIYMMENNIPPKTIMNRIFKVRDRDIVYRYKKGKAKFKETFYKTQTLNRLTGYRAYIISLLKYNNKYNCIKERQVNEYQKMIIKLEKQIYRLNL

SEQ ID NO: 4999 - protein, 381 aa, Vibrio sp.
  source 1..381: note = Related to BA000037.2; note = Vibrio vulnificus
MCRGRSRDIMKYKKLTTKAFISILSDETSDQLELLKKPIEPHGISDVKQGKLGTKSIFKLTPAKSQYLGRLNNKFFCHIQVNNSAVAYVEKKSYLDMFEPHRKNTNFLRIDIKSFFHSINREILAEALSPYVTNEIFFESGKVKQSLLDALLNLVSLRVSTEYNDQSLHNKDILPIGFKSSPVISNIVFRRFDIIIQELCARSDIIYTRYADDMLFSSPEHSKYLHTNKFLSEISYTLSLSGFKLNQAKTIKDKNMISVNGYVIESGENGNSGSIRISEKKTKKIYKLIYMMENNIPPRTIINRIFKIRDRDIIYSYDKGKRKFKDKFYKTQTLNKLTGYRAYIISLLIYNEKYHCIKEEYINEYKTLIGKLEVQIYKLVK

SEQ ID NO: 5000 - protein, 376 aa, Vibrio sp.
  source 1..376: note = Related to JAKEUX010000001.1; note = Vibrio brasiliensis
MKYKKLTTKTFISILSDEANDQLELLKNPIKPYKFSDVKQGKLGNKSIFKLPPAKSQYLDRLNVSFFSHIQINNSAVAYVGKKSYLDMFEPHRKNTNFLRVDIKSFFHSINRKTLKKALSPYVSDENFFEKDKVKQSLLDALLNLVSLRISKEYNEKSLHNKDILPIGFKSSPVISNIVFRRLDILIQEFCAKNDISYTRYADDMLFSSPTHSKYIHTNKFLTEISYILSLSGFKINQSKTIKDKNMISVNGYVIESGKNGNSGSIRISEKKTKKIYKLLYMMENNIPHRTIMNRIFNLRDRDIIYNHEKGKGKFKDKFYKTQTLNRLTGYRAYIISLLKYNEKYHCIKDEHIEEYKDIIKGLENQIYKITYQPTK

SEQ ID NO: 5001 - protein, 371 aa, Vibrio parahaemolyticus
  source 1..371: note = Related to JABCDA010000001.1
MKYKKLTTKAFLSFLSDDPNDRLELLKTPIAPYNFSDVKQGKLGNKSIFKLSPAKSHYLERLNRNFLSKIKINNAAIAYVEQKSYLDMFEPHRENTNFLRLDIKSFFHSISRETLAKTFESYISDEVFFEVGKTRQSLLDAFLNIICLKVTTDFNDLSLHDKEILPIGFKSSPVISNIVFRRFDIMIQEFCARHDINYTRYADDMLFSSPNKSQYLHTKKFFSEISYILSLGGFNINQAKTIKDKNMISINGYVIENYSDGVPGSIRVSEKKTKKIYKLLYMIENNVSYKIIMNRIFNVRDRDIVYNYEKGKRKFKDKYYKTQTLNRLAGYRAYMISILKYNDRYNCLPKSKSDEYFKIINRLEKQILIIK

SEQ ID NO: 5002 - protein, 380 aa, Vibrio sp.
  source 1..380: note = Related to NZ_PIFZ01000001.1; note = Vibrio splendidus
MCRGRNRYIMKYRKLTTKTFLSILSDEIIDQLELSRNPIQPYTVKDVKHGKIGTKSIFKLAPAKSQYLERLNQKFFSNIEVNNSAVAYVGKKSYLDMFEPHRNNANFLRLDIKSFFHSINREALKKTFSAYISDEVFCEDGKSKQPLIDAFLNLISLNVTKDYNDPQLVNKSILPIGFKSSPVISNIIFRRFDILIQELCSRSGISYTRYADDMLFSSPSEHTYLHTNKFFNEISYILSLGEFKINTSKTIKDKNMISINGYVIESKGDGRNGTIRISEKKTKKIYKLIYMMEKGVPHKVIMNRVFRVQDRDIVYNFKKGKEEFKKKFYKTQTRNRLTGYRAYIISILKFNDKYQCIEAKYVSEYQTIVESLEKQIYKVI

SEQ ID NO: 5003 - protein, 372 aa, Vibrio sp.
  source 1..372: note = Related to CP087877.1; note = Vibrio alginolyticus
MKNRKLTTNTFLSILCDDPLEINELLKKPIPAYTKQDISETKVGTKTIFKLTPAKAHYQKRLNDRFFSRIPLNQSSVAYTKRKSYLDMFEPHRKSYRFLRLDIKSFFHSISRDLLKDTLSSHVSEDLFFSSNYAKQTLIDALLNILTINLGDTYKDKDLTNRDILPIGFPSSPVVSNIVFRKFDFLIQKLCSENNIIYTRYADDMLFSSTADSKFIHSEHFIREVSYILSLGGFKLNGDKTIKEKNMISINGYVIESNGKDKNSGHIRLSNKKTAMICKLIDKLDKNVAHKDILKKITGLKENHIKVSFDKGRNEFLAQYYKSQIINLLAGYRAYLISIIKFNKLYGCVEDKYLDKYQNIIDDIQKHLFRLV

SEQ ID NO: 5004 - protein, 362 aa, unidentified
  source 1..362: note = Related to CABDVD010000002.1; note = Raoultella terrigena
MIKRKKLTTNTFLSLLSDDHKDRFELSTQPIGDITSKNVIEFKIGSKTCFKFKNAGVLEQYQERINRLFLSEIEVSHSAFAYVKNKSYLEMFESHRNGYYFLRVDIKSFFHNISRQLIADSLSGYISDEDFIKNKQKLMDAFINIITLNVTKEQSSFVGRQILPIGFKTSPAVSNIIFRRFDNLIQSLCSKNNIVYTRYADDMLFSSPLGFKFLHTERFMNELSYILSLGGFSINNKKTLKDKHMITLNGYVIESSLTSGKIASIRISNKKTDIISKLINKLEYNVDSKLIMRKLFGLTNEKVKPQFSSKKNKFIDQYYESQLLNAIAGYRAYLISIVKFNLKYNCVEQKYILKYQGMIDKT

SEQ ID NO: 5005 - protein, 373 aa, Vibrio sp.
  source 1..373: note = Related to JAHUCN010000002.1; note = Vibrio fluvialis
MKRKKITVRAFLSILSDDPHDRAELSLQPIKSIEADRVTECKIGSKTVFKLKDAKLLEQYQDRVNQRFLSNIEVSNSAIAYVKNKSYLDLFEPHIYGYHFLRVDIKSYFHSISRELIKTSFSTYINDEDFIKGQQKLIDAFTNILTLNVGDKPKNNALAGKEILPIGFKTSPAVSNIIFRRFDNLIQSLCSKNHITYTRYADDMLFSSPLKFKFIHTRKFMDELSYILSLGGFLINDKKTVKEKHMISLNGYVIESNGVTGQPAKIRISNRKTNIIAKLINKLDHNVDCKLIMSKLFNLSEKSIKVKYKKGRDDFIDQYYRTQLINVISGYRAYLISIIKFNCKYNCIDKNHLSKYQLMINKLEKHLLRLSNW

SEQ ID NO: 5006 - protein, 373 aa, unidentified
  source 1..373: note = Related to NZ_CP057313.1; note = Klebsiella pneumoniae
MKNKRILIDKVFYERFLSVDSFKENLISQIPIPKITNKEVRLISSGAKTFYAINNTSPHSHVQYRLNRYFFSHIPINSAAKAFVKGGSYLKYLEPHIYGSSFCRLDISSFFNNISFNDVEMCLSPYIKDEYLIGNEQKLLSAILNSIGYEIPIHKKHTLIVPMGFKTSPIISNIVFRKMDLLIQNFCAKKGIIYSRYADDMLFSNPKESKLLISDYFFDEISSLLSIMGFKINESKYIAREKEISINGYVIENKGGYGAVGTIRLSKSKLKTILKVIHGLNENMPHKSICNKYIDIRLSESDFKYENKKAEFEKKYYRDQLINYLSGYRAYILSLIKFNIEYRCVNNHFLSQISAMLDDIQKHIIKEKNKRLR

SEQ ID NO: 5007 - protein, 377 aa, unidentified
  source 1..377: note = Related to DAFBNF010000007.1; note = Providencia rettgeri
MKKQAILIDKSFYEKFLSVESFKENITLQTAIPKITSKEVRLISSGAKTFYAINKASPHSHVQHRINQYFLSHIPLNSSAKAFIKGGSYLKYLEPHIYGSSFCRLDISSFFNNISFYDVEECLSPYIKDEYLIGSEQKLIDAILNSIGYNSPIQNKIIVPMGFKTSPIISNIVFRKMDILIQNFCAKKGILYSRYADDMLFSNPKESKILLSDYFFDEIASLLSIMGFKINESKYISRKNEISINGYVIENKGGYGKIGSIRLSKSKINTILKVIHALKQDIPNKIICNKYIQIRLKETDFKYENKKLEFEQKYYRDQLINYLSGYRAYLISLMKFNLIFNCINHDFLTQANMILSDIQLYLHKIKNKRSPRHINNI

SEQ ID NO: 5008 - protein, 374 aa, Citrobacter sp.
  source 1..374: note = Related to CP018810.1; note = Citrobacter freundii
MKTKKMILVDKVFYEKILSVESFKENIITQSAIPKISNKEVRLISSGSKIFYAINNTSPHSHVQLRLNRFFLSHIPLNSAAKAFVRGGSYLKYLEPHIYGSSYCRLDISSFFNNISFDDVKQSLSPYIKDEYLIGTEQKLIDAILNSVGYESPIRKDKGMIIPMGFRTSPAISNIVFRKMDLLIQDFCAKKGVIYSRYADDMLFSNPRESKLLMSDYFIDEISSLLSIMGFNINQSKYISREKEISINGYVIENKGGNGSIGTIRLSKSKLNTVLKVTHALAQNIPYKNICNKYIKVRLKEKNIKYESKKDEFEKKYYRDQLINYLGGYRSYLISLVKFHSEYKCVNSDFIIQINGILNDIQNHIQKIKNNRRL

SEQ ID NO: 5009 - protein, 370 aa, unidentified
  source 1..370: note = Related to NZ_CP033622.1; note = Dickeya zeae
MKRNTFVIDKEYYEKYLSAESFKENFISITPIPKITKKEVRLIKSGFKTFYSLQSTSPHSHIQNRLNNYFFSKIPLNSAAKAYVKGESYLSYLEPHIYGSSFCRLDIKSFFNNISFTDVKKSLSPYVKDEFLIGKEQTVLEAILNSVGYDDEKYDRTLIPMGFKTSPVISNIIFRKMDILIQDFCIKKGLIYSRYADDMLFSNLRDGNLLLSNYFFDEISSLISIMGFKLNESKYIAKKRMISVNGYVLENKGGRGVVGNIRLSSEKLSTINKVIHALNSKIPYKTICKRYLDIKLKDGDYKYESKREDFERKYYRDQLINFMNGYRAYLISIIKFNSDYNCMSIKFIESVNLTLNEIQVRIREIIKKRI

SEQ ID NO: 5010 - protein, 371 aa, unidentified
  source 1..371: note = Related to JACYMS010000012.1; note = Pantoea agglomerans
MKNNNILIDKAFYQKFLTSESFKENLISGIPIPVISNKEVTCFFSGYKKIHVIRDTSPHSHVQYRLNKYFFPHIPLNSAAKAFVKGGSYLKFLEPHINGSSFCRLDICSFFNSISFEYVEESLSPYIKDEFIIDNKQKLVEAVLNSIGFKDEKINKEEMIIPMGFRTSPAISNIIFRKMDILIQSFCSKKNIIFSRYADDMLFSTPKESKILSSDYFFNEIASLLSIMNFKINDKKYISREKEISLNGYVIENKGGYGASGSIRLSNKKMMVITKVMYALNNNIPAKTICLKYLDIKLKEKNIKFENKKSEFEKRFYRDQLLNYLGGYRSYLISILKFNSSYGCIRDNFTHHIIFILNDIQLHMVKIKKKI

SEQ ID NO: 5011 - protein, 377 aa, unidentified
  source 1..377: note = Related to NZ_JACSXJ010000009.1; note = Pantoea eucalypti
MKEKISKIDKNFYIDIFIKSSFQKEFETGDIIPLIANKEVSIINDKNKTFYSLAHSSPHYSIQTKIEKFLLKNIPLNASSFAYRKDLSYLHYLEPHIQNVKYCHLDIVSFFNSIDINLVRDTFSVYFSDEFLVKDKQSLLDAFIASVTFSTKVGDVEKTIIPMGFKSSPSISNIIFRKMDILIQKFCDKNNITYSRYADDLLFSTKKENNILSSNFFINEIGSILSINSFKLNKSKYLYKEETISLGGYVIENTLNDGSKGNIRLSSSKLNILHKALHEINKGSSAKHICNKVFNLKIKEFTYKKNKTAFEKKFYSSQLVNKLLGYRSYLLSFVKFQNKYKCINPVFLEKCFRLINEIENIINKNSHAQGMNAPMSN

SEQ ID NO: 5012 - protein, 366 aa, unidentified
  source 1..366: note = Related to PDLA01000006.1; note = Klebsiella pneumoniae
MKEKISKIDKNFYTDIFIKTSFQNEFEAGGVIPPIAKNQVSTISNKNKTFYSLAHSSPHYSIQTRIEKFLLKNIPLSASSFAFRKERSYLHYLEPHTQNVKYCHLDIVSFFHSIDVNIVRDTFSVYFSDEFLVKEKQSLLDAFMASVTLTAELDGVEKTFIPMGFKSSPSISNIIFRKIDILIQKFCDKNKITYTRYADDLLFSTKKENNILSSTFFINEISSILSINKFKLNKSKYLYKEGTISLGGYVIENILKDNSSGNIRLSSSKLNPLYKALYEIKKGSSSKHICIKVFNLKLKRFIYKKNKEKFEDKFYSSQLKNKLLGYRSYLLSFVIFHKKYKCINPIFLEKCVFLISEIESIMNRKF

SEQ ID NO: 5013 - protein, 370 aa, unidentified
  source 1..370: note = Related to CP064054.1; note = Morganella morganii
MKHKITKISSDFYKNFYLRETFSDDVIMHCGVPNITSNDYKSISFNNRMFFSIKNNSPHKKIQERLIKNFLQKIPLSSPAIAYRKKLSYLHFLEPHVHGESFCRIDLCNFFHNINYDFAKECFQSYFEDEFLLDKKIKVIDAFLNSLSIEMEISSGKKKIFPMGFATSPFISNIIFRKLDILIKNFCDKKSIIYTRYADDMLFSGSGTDKLLGSEHFDKEIASIISIAGLSLNMNKKIYKRGIISLNGYVIENNNGGGERGSLRISNGKTYLIRKALKKYKNGDSKEIICKKVFLVKKPSIKYKKNIDLFVNKFYDSQFSNKLAGYRSYFISLIKFNDKYRCFKDDEIAKYSAIIEEISSVLLKSQHKIK

SEQ ID NO: 5014 - protein, 365 aa, Escherichia coli
  source 1..365: note = Related to CP057173.1
MKHKINKINNDFYKNFYLRETFSDDIIMTHGVPEISNDDYKSISLKNRLCFTIRKSSPHKKIQERLIKNFLVKVPLSSPAIAYRKKLNYLNFLEPHIHGENFCRIDLCNFFHNINYNFARECFKSYFEDEYLVNKKIKVIDAFLNSLSIEIVVNNKKKKIFPMGFATSPFISNIIFRKLDILIKSLCDKRSIIYTRYADDMLFSSSGKDKLLGSEHFDNEISTIVNTAGLSLNKHKKIFKKGIISLNGYVIENKNGGGERGSIRISNGKMYLIRKALDKFKKGYSKEHICKKVFSVKSPTVKYNNNADQFVTDFYNSQFSNKLAGYRSYLISLVKFNDKFRCFHENEITKYSVIIDEISNALLKP

SEQ ID NO: 5015 - protein, 365 aa, unidentified
  source 1..365: note = Related to NZ_MJAO01000006.1; note = Serratia marcescens
MKHKITKINSDFYKNFYLRETFTDDIIMTHGVPNITNSEYQNISFNNRVFFSIKQSSPHKKIQERIIRNFLQKVPLSSPAIAYRKKLSYLHFLEPHIYGENFCRIDLCNFFHNINYDYARECFKSYFEDEYLVNKKIKVVDAFLNSLSVEVELNDKKKRIFPMGFSTSPFISNIVFRKLDVLIKNLCDKRSIMYTRYADDMLFSSSGKDNLLGSEHFDKEISSIVNIAGLNLNVHKKIFKRGIVSLNGYVIENKDGGGERGSLRISNGKTYLIRKALDKYKKGYSKKHICQKVLSVKPPSVKYKSNADQFVMEFYNSQFHNKLAGYRSYLISLVKFNEKFGCFHEKEITKYSAIIDEISSVLLKS

SEQ ID NO: 5016 - protein, 365 aa, unidentified
  source 1..365: note = Related to JACGFP010000002.1; note = Pectobacterium brasiliense
MKHSITKINSDFYKNFYLRETFGDDIIITRGVPNITNDDYQKISSNNRTFFSIKNSSPHKKIQERLIRNFLQKVPLSSPAIAYRKKLSYLHFLEPHIYGENFCRIDLCNFFHNINYNFTRDCFKSYFEDEYLVNNKIKLIDAFLNSLSIEIDFNDKKKRIFPMGFPTSPFISNIIFRKLDIVIKNLCDKRGITYTRYADDMLFSSSGKDKLLGSEYFDNEISSIVNMAGLSLNTHKKIFKKGIVSLNGYVIENKDGGGERGNLRISNWKTYLIRKALDKYKKGYSKEHICKKVFSVKKPSVRYKKNAAAFVQSFYSSQFSNKLAGYRSYLISLIKFNDKFECFSNEEIAKYSAIIEEISEVLLKS

SEQ ID NO: 5017 - protein, 365 aa, unidentified
  source 1..365: note = Related to nan
MRHQITKINSDFYKNFYLRETFSDDIIMTDGVPNINKDDYQHILFKNRIFFSIKINSPHRKIQERLVRNFLQKVPLSSPAIAYRKKLSYLHFLEPHIYGEKFCRIDLCKFFHNINYDFAKECFKSYFEDEYLVDKKIKVVDAFLNSVSIEIDLNGKKKKIFPMGFSTSPFISNIIFRKLDILIKTFCDKRGIIYTRYADDMLFSSLGKDKLLGSEYFDKEISYIVNMAGLSLNTHKKIFKNSIISLNGYVIENKDGSGERGRLRLSNRKTYLIRKALDKYKKGESKENICKKVFLIRTPSIKYKSNASLFVSNYFKSQFNNKLSGYRSYLISLIKFNDKFNCFEDDEIIKYSNIIEDISKVLLKP

SEQ ID NO: 5018 - protein, 365 aa, Proteus sp.
  source 1..365: note = Related to SCIO01000007.1; note = Proteus mirabilis
MKHKITKINSDFYKNFYLRETFSDEIVSSRGVPNITNDDYQSISLNNRVFFSIKKNSPHKKIQDRLIKNFLLKVPLNSSAIAYRKKLSYLHFLEPHIYGENFCRIDLCNFFHNINYDFTRECFKSYFEDEYLISKKIKLIDAFLNSLSIEVELNNKKKRIFPMGFSTSPFISNIIFRRLDILIKTFCDKRSISYTRYADDMLFSSSGKDKILGSEYFDKEISSIVSIAGLSLNTRKKIFKKSIISLNGYVIENKNGGGERGNLRISNRKTYLIRKALDKYKKGYSKEYICKKVFSVKPPVIKYRNNATLFKKEFYNSQFSNKFAGYRSYLISLIKFNNKFGCFQDKEITKYSVLIEEISQVLLKS

SEQ ID NO: 5019 - protein, 376 aa, unidentified
  source 1..376: note = Related to NZ_QGOK01000008.1; note = Marinomonas shanghaiensis
MFKKLNSKDLLNILSSDSQSRLVVLTQSWPMLNVDDVKTLKFNNKTFFSLVSRVERDGYLKKLNLSFLSKIKINSASVAYKNGKSYLDFFSPHVENYNFLRLDLKSFFHSISYEIIKETFESYFLDEYFVDNGKEKGKEKIIDVFLNLVMLNVPSSYGDSFISGRRILPMGFSTSPLISNIVFRRFDIVIHEFCEKHNIKYSRYADDMLFSSNISDKTLFSNRFHEEIKYILNRGGFKLNNAKTIQSKGVLSVNGYVIDSYLERKGLRLSSSKLKNINKIIHALKKGWSYEIILKKYAKKDFDKTNYYNKGISKYRSEYEKSQILNLLVGYRSYLISFHEFDRKDRSIDNDFLVVSGKIIKSIEKAINKIYKDRKL

SEQ ID NO: 5020 - protein, 374 aa, unidentified
  source 1..374: note = Related to PCUK01000088.1; note = bacterium (Candidatus Blackallbacteria) CG18_big_fil_WC_8_21_14_2_50_49_26
MKRLSRPEFINLIDNDTFIEFTAGKIFNIPSSGVVEFQLSNKFFYKLRTDIKLWSFLRVIHSNLNKNFLKKISLNSSAIAFRSGLSYINFFSPHIENYFFLRLDIKSFFHSISKNLINNVFSSYFRDEFIDKNSQISLLEYFIFLTTLYIDETYKNNQFKYQYILPMGFSTSPLISNIVFRSIDIQISNICLEYGVTYTRYADDMLFSMPKNANPHIQTDVFYVSIKSILSKYGFFINKHKVISKKNTISINGYTLQNTPNMCEFRVSNKKIKIIQKIIYEYNKNTEISAILKKCFKYNIIKRFTTPEKVPNNLVEKYNKHQLINKIAGYRAFLLSFILFNHRSKLMSIETSNKYLNLINELEKIMRNIYLTLD

SEQ ID NO: 5021 - protein, 365 aa, unidentified
  source 1..365: note = Related to NZ_LR136958.1; note = Alteromonas sp.
MKKLDKKLFFDILNIEEQVLNPFVEDQVSSFKIGRKFVYALGDRSREKLYQQELNQRFLYKIPLNNAAKAFRKHTSYFDFLEPHRYNYNFLRLDIKSFFPSITKPSIVETFSHYIEDELVVDDTGEKLLLNCFVDLVTFTIPSHSANRKFAGESVLPMGFVTSPAISNIIYRKLDIIIQKHCSIHGIEYSRYADDMLFSSLASSSYIHSRSFLDFISQLLLKHGFELNKRKSIYKKHVLSLNGYVIEGARSDFPSGDIRLSHKKLKLLDKLIYELGNGKSNSEVLKSVFSLEIDKVNFPIPNTEQEFKDAYCKDQLLNKIGGYRSYLIAFIKFLMLNNISSSVSMERYSELLIKLEKEYSKLHKS

SEQ ID NO: 5022 - protein, 368 aa, unidentified
  source 1..368: note = Related to JACHBV010000002.1; note = Rahnella inusitata
MHIIDKKFFKTAIASKDLFENDIFPPIPSKYVFEKKLKKRYVYSLKKDSAIFNAQQNIIDLFLRKIDVNNCAVGFRKDKSYLNFLEPHSGNYYFLRLDIRNFFHSIDEKLLKDCFSPYFKDEFIDAENKQKLISSFLNLVTFHVGKSYGNIDFVGKKIVPVGFPSSPFISNIYFRNIDVILQKLCALHDITYTRYADDLLFSSSRDNKFVHSDSFEKEVKVILSSRKLKVNEKKIVKAKHRISLNGYVIQSTALVNNKNDNNVSGIFISNKKTSILKKVLHEFESKPVNYTKIMERIFKEKIRQEDFFYPITLDFKKKYYKTQARNKICGFRAYLISFIKFNAIYGCIPECRIQAYKKLICQIDTFLV

SEQ ID NO: 5023 - protein, 368 aa, unidentified
  source 1..368: note = Related to NZ_RHDS01000003.1; note = Curtobacterium plantarum
MHIIDKNLFKTEIAPKDLLEDDVIPSIPYSSVLEKKIKKRYIYSLKNKSPALLAQRNLIEVLLRRIDLNDSAVGFRKGACYLNFLEPHSNNYHFLRFDIKNFFHSIDEKLLRDCFSSYLKDECIDPGNKQKLISSFLNLILFHVGSSFGNDDDKGKRILPVGFPASPFVSNIFLRKIDIIIQRTCALHNVTYTRYADDMLFSSSRADKYIHSDSFENEIKVILSSHKLKINEKKIVKAKHRISLNGYVIQSSSLTNRKNVNDISGVFISNKKIIKLKKIIHEFNKKPVDYTKIMEGIFREKIKPSNFTFPITGTFKQKFYKTQVRNKLCGYRAYLISFVNFNLRYDCIPDGKIELYSKLINEIDVIIK

SEQ ID NO: 5024 - protein, 368 aa, unidentified
  source 1..368: note = Related to NZ_CP059956.1; note = Pectobacterium brasiliense
MHIIDRNHLKISILPKDIFVDGIVNPIPSSAVTEKNVKGRCVYILEKNSDYAIAQRNLVEQFLSKIEVNNSAKGFRKNLSYLNFLEPHASNYYFLRLDVKNFFHSIDERLLKKCFFIYFKDEFIDSNNKQKLLDAFMNLITFYVPSSSKNINCKEKRIIPVGFSSSPLISNIFFRSIDILLQKLCIAFNITYTRYADDLLFSAVRGCEYIHSDSFEKEVRIILGTMSLKINNNKIIRAKHRISLNGYVIQARSLSKKKSANDYNGVFISNKKTETIGKVLYELSLNSVDYKKIMEKIIGNKIKISDFNYPLTYGFIIKYYKTQTRNYLSGYRSYLISFLKFNEIYRCVPDIKINVYKDLLDKIDKFLV

SEQ ID NO: 5025 - protein, 374 aa, unidentified
  source 1..374: note = Related to UHIX01000001.1; note = Yersinia enterocolitica
MLNKIDKNYFVNNILNRKIDIIKDGEIKSITSDNVIEFTVKDKLLYSLGNGNLYSFPQKRINDFLFKFIPFNNASTAFKKDFCYFDFFKPHIGNSLFLRLDIKSFFHSINIDKLKDVLNKYVEDDFIDEKKNQKIIDSVINIISLDITLNSKNKYYINKKIIPIGFSSSPLISDLYFRRIDILIQKICLKNSITYTRYADDLLFSAAHENNYVRKNWIGFTEEIRKLLYYFNFNLNDKKTIQKKGLLSLNGYVIETRLSTGNNKLIFSELRFSNEKLSKLIRAIYHLEVLGTSPTVIMISIFKEKIKDLKFKYHITPAFAARHYRYSLLNKLRGYRSFIISILKYNIKHNILNKKTKEKYKLLTEKLEREILKL

SEQ ID NO: 5026 - protein, 372 aa, unidentified
  source 1..372: note = Related to FCGU01000001.1; note = Serratia marcescens
MLKKIDRNYFNDIILNGKKDIISDGEVKTIPSDSIKEFSVKNKFFYQLSDKSIYKKPQQIIAEFLSKHATSNNSSIAFKAGLCYFDFLKPHLNNSRFLRLDIKSFFHSIDIEMLKKTLSHYIEDDYIDDMKKQKIIDALINIVTIENSEDLNIKIKKGSKFLPIGFTSSPLLSDVFFRKIDIIIQKLCVKHSIQYTRYADDLLFSVSHKNTFINKNWEGFTNEIEKIVNYFRLNINRKKTTIRKGLISLNGYTIETKMLNGAILNSEVRLSNDKLSKLTRTIYHLDTLGSSPKKIINIVFKEKIENIEFKYKATQSFIERHYKFVLMNKLCGYRSFIISILKYNSGKKILNEKSKQKYENIVSTLERLILVL

SEQ ID NO: 5027 - protein, 385 aa, Proteus sp.
  source 1..385: note = Related to NZ_CP043925.1; note = Proteus columbae
MIKLNREFFTSDIIVLKNSESGLSEFINSNTIPWDNVTEIKLKGKYYYSFSKRIVHNIDYVKSQRNIYDYFSNVIPLNNNSFAYKKETCYLDYLRPHIGNYFFLKIDIASFFHSIKESYVRKLFYNYINDEFLDNDKKCSLIDALIKLTSIDIPSESKNISYVNKRVFPIGFSSSPIISEIYFRPIDVLLMKLCSDFELTYTRYADDILISGGINNKYIANNWDFIYNRIFEIFSYYKLKINTRKTINKKKCLSINGYVLESMYYDNRLLFSELRISNFKLKKINKALFYLEENTYIKNETIKYVMEKVFNSKFKKDKFKYTITQSFIDRHYVFSLTNKMRGFRAYLLSFIIYDRKYMILQKETKDKYLKIIGRIELIIDRLLKK

SEQ ID NO: 5028 - protein, 382 aa, unidentified
  source 1..382: note = Related to NZ_CP063241.1; note = Pectobacterium brasiliense
MNKITKKILIEKILLLSKDEIDEFYQAEIPDSNVVEKKHKNKFMYSLSYSSTFRKIQSNINSALNPLLDLNNSAIAYRTGLSYFDFLEPHAKNYHFLRMDISLFFHSLNIDDVKEAISQYIDDDIINTKHNQKLIDVIIKCISYKIPKKFKNTNLHDKTILPMGFSTSPIISNITFRKIDILIQKLCAKLDITYTRYADDMLFSTPRDKKIIHSEFFLKEIKILVSLLGLKINAKKTIVKSHTISLNGYIIQNQIRLTGFAGLFSPISPAEIRLSNKKTAIIDKLLHHILVKKSDSDVILNKLFKEDVRDLMHHGNKEKYVKEYSLDQILNKLTGYRSFLLSIISHNKKFNSTSVGTIKKYSSKITKIEKCINILDKKKIYT

SEQ ID NO: 5029 - protein, 382 aa, unidentified
  source 1..382: note = Related to JACHAN010000001.1; note = Pectobacterium brasiliense
MNKITKKILIEKILLLSKDEIDEFYQAEIPDSNVVEKKHKNKFMYSLSYSSTFRKIQSNINSALNPLLDLNNSAIAYRTGLSYFDFLEPHAKNYHFLRMDISLFFHSLNIDDVKEAISQYIDDDIINTKHNQKLIDVIIKCISYKIPKKFKNTNLHDKTILPMGFSTSPIISNITFRKIDILIQKLCAKLDITYTRYADDMLFSTPRDKKIIHSEFFLKEIKILVSLLGLKINAKKTIVKSHTISLNGYIIQNQIRLTGFAGLFSPISPAEIRLSNKKTAIIDKLLHHILVKKSDSDVILNKLFKEDVRDLMHHGNKEKYVKEYSLDQILNKLTGYRSFLLSIISHNKKFNSTSVGTIKKYSSKITKIEKCINIIDKKKIYT

SEQ ID NO: 5030 - protein, 382 aa, Citrobacter sp.
  source 1..382: note = Related to CP056181.1; note = Citrobacter freundii
MNKITKKILIEKILVLNKDEIDEYFQAEILDSDVIEKKHKNKFMYSLSYGNKFRKIQSNINSELNQILELNNSAIAYRTGLSYFDFLEPHSKNYHFLRMDISSFFHSLNPEDVKSSLSQYIDNDVVNEKHNQNLIDVILKCITYKIPTKCQNKKIHEAIILPMGFSTSPLISNIVFRKIDILIQKLCTKLDVTYTRYADDMLFSTPRDKKIIHTDFFLKEISILVSLLGLKLNTRKTIIKSHTISLNGYIIQNQVRLIGFAGLFSPISPAEIRLSNKKTAVIDTLLHQILVKKNSNNQILKHLFKEDVRKLMRHGNKEKYVEEYSQDQILNKLTGYRSFLLSIISHNNKFNSTSLDTINKYKSKITKIEKCINILDKKKIYT

SEQ ID NO: 5031 - protein, 382 aa, unidentified
  source 1..382: note = Related to NZ_WHOZ01000001.1; note = Pantoea agglomerans
MKKITKKILLEKILLLNKDEFDTFIQVEIPDSEVIEKKHKNKFMYSLSYASKFRKIQSNINSILNSTIQLNNAATAYRAGLSYFDFLEPHVGNYHFTRLDISSFFHSLKVEDIKTALEQYVENDTLNEEHNQKLIDVILKCVTYKVTKESNNNRIHDKVIIPMGFSTSPVISNLVFRKIDIIIQKLCTKLDITYTRYADDMLFSAAKNKKAIHSDYFIKEIKILVSLLGLKLNERKTIKKSHTISLNGYIIQNQVKLSGFKGLFSPISPAEIRLSNKKTVIIDKLLHHIMVKKNNHNDILKKLFKEDVRHIMRYSNKAPYIDKYAKDQIMNKLTGYRSFLLSIISHNKKCSSSSNETIEKYKAKVVKIEKCIKTLDTNKIHT

SEQ ID NO: 5032 - protein, 381 aa, Proteus sp.
  source 1..381: note = Related to JADSTY010000052.1; note = Proteus mirabilis
MKKITKKILLEQILDVKKEDIDAFLQNNINDSDVSEKKIKSKYTYTINDNKLKKIQSNINEFLTQIIDLNNAAIAYRKGLSYFDFIEPHAKNYHFIRMDISSFFHSLDVKDIQEALYQYVDNDVVNDTHNQKLIDVIMNCITYTIPITANNEKYHNITVLPMGFSTSPLISNLIFRKIDILIQKLCTKLGVIYTRYADDMLFSAPFDKKIVHSEFFIKEIKILISLIKLKLNKNKTIIKSHTISLNGYIIQNKIKVNGIRGLFIEPTPSEIRLSNKKTIIIDKLLHYIEVKKSKNNIILKKLFNEDVRDLMVFSNKKKYIDDYSLDQILNKLTGYRSFLLSIIKYNEKTNITSNTTIQKYQNKIKRIEKCINSLDKNNKYT

SEQ ID NO: 5033 - protein, 390 aa, unidentified
  source 1..390: note = Related to NVWN01000005.1; note = Arcobacter sp.
MYKINKKYFLTYLQPIIEKGIVTTIKKEKVKEYKLGKHYFYEITDEKIRYIHEWLNKSFQKNIDLNNSSIAYRKGYSYLNLFEPHRHNYYFLRLDIKSFFHSIQMSDIIAVFEPYFDNEHIDEKKKQKLIDGFINLVTFKIPVSFKNKEFKSSRILPIGFITSPVISNIIFRKIDLLIQKFCSEKNIIYTRYSDDMLFSSSNNSKYLHSEDFYKEISIFLNIMNFKLNQNKTLYATHTLSLNGYTLQYSNQPNSKNEQLINEFRLSNKKLLIIKKMIYLINKQEKSPKFILNKLFNFGINKLSTKYPIESKNVKEKYYYDQLLNKLTGYRSYVLSIVVFDKKHDCCQDKTIDKYTDIVEDLNKIIKRYIKKIETISKKIEDEIKESESAK

SEQ ID NO: 5034 - protein, 358 aa, unidentified
  source 1..358: note = Related to JAIZPA010000057.1; note = Sulfurovum sp.
MGKISKDGFKKFLQTTTQTNINEFKIGKSYFYELKDNDNLLAFHRVLNREFQKVIPLNNAAVAFRKNKSYLDLFEPHRKNYYFLRLDIKAFFHSIQIDDIKKTFSTYFEDEYIDNDKTQTLIDAFINLVTYKVPDNSSNKDFRGKQILPMGFVTSPVISNIIFRKIDIQIQKFCSKRDITYTRYADDMLFSSDKNSNYVHSDGFINEISIFVAQLKFKLNHHKTLKATHTLSLNGYTIQYSNIKKDILGARDEEVISEFRLSNKKINIIKKMIHLIEVEHQTPQYVLKKLFNYRLPNDVPAEKKEEYYKHQITNKLTGYRSYILSFITFDKKYHCMQKNTVEKYIKLIKLINQNPYLQ

SEQ ID NO: 5035 - protein, 369 aa, unidentified
  source 1..369: note = Related to MICC01000016.1; note = Sulfurimonas sp.
MKKIIHKSFFKNYIIEGEVPSTKIPSVNEFQLGKNFFYEVVNNKKLLSLHKQLNDVLLNKIDLNNAAVAFRKDYSYLHLFEPHRTNYYFLRLDIRSFFHSIRVDDIKEIFKAYISEDEYIDDKKKQSILEGFINLVTYTIPADSKNDKFKEKQVLPMGFTTSPVISNIIFRKLDIQIQKFCSKNNIIYTRYADDMLFSSSLASSFVHSESFIKEIRITISQMKFQLNENKTIRTKHTISLNGYTIQYSYFENFLKLHKQEYKINEVRLSNKKTNIIKEMIYLIEVKKMSSQKILWKLFHYKLRFKFVITESDVRKKYYDDQLLNKVSGYRSYLLSIIKFNKKYSCTRDTTIKKYSELINNLDKIIDYKY

SEQ ID NO: 5036 - protein, 458 aa, unidentified
  source 1..458: note = Related to WTAE01000162.1; note = Sulfurovum sp.
MNKLITIDYFKRIILKNKVPNISKDNIREFTVGKNYFYELTDKQQLLVQFQIFNKLSNNIELNNAAIAFRKDLSYLHLFEPHRKNYNFIRLDIRSFFHSIQIDDIREVLKVYIPKDEYIDKKEKQSVLDAFINLVTYKIPSTSKNEKFKGKRVLPMGFQTSPIISNIVFRQLDILIQKLCSSHEIVYTRYADDMLFSSSKNRTYVHTDDFIKEIRIILSTMDFKLNEHKTLKARHTLSLNGYTIQYSDISTMKSKKKIIIHNESELHELRLSHKKTDIVKKIIHMIVTEKKEPEVILKKLFQYKINLKFIPSETLKNKYSHEQLLNKILGYRSYLISIIQFNKLYYCTQDKTIDKYIKIINDLEKIATQYRMKIEKLERKIDKEKKRIKSILMQPIDKLQFTIWEKDALSEVGYTTLNSLKGVTEKHLYGNIKGIGEVKAKNIVSIVNKELSKTKSRI

SEQ ID NO: 5037 - protein, 356 aa, unidentified
  source 1..356: note = Related to NZ_PDKB01000007.1; note = Aliarcobacter vitoriensis
MKINKKQLFQQIKLLLNSNNRINNLEVEEFKIGKNFFYKIDNIEIIKFHDWLNNYLLDKIEINNSSKAFITDKSYLDFFEPHIKNYNFIRLDIKSFFHSINIKDIANAAKAYFDKDTIELDKKYPLLSFFLFFTTYKIPDISENKKFINKRVLPMGFKTSPKISNIVFRSLDIQIQKLCIKNGITYTRYVDDMLFSSKKDLTYIHTDSFIEQISFILNQMNFQLNSKKTIKAKHTISLNGYTIDSSKKEFRISNKKLLKIKKLIYMKNIQKKSAKDILKKLFPKDFRKYKLRYCSSQLENKIKGYRSYLLSFIVFDNKYKCLSENTKNSYIDLINKLEKLILLDTKVYNDEIDEDF

SEQ ID NO: 5038 - protein, 317 aa, unidentified
  source 1..317: note = Related to NZ_VWUH01000001.1; note = Pantoea sp.
MLSQIEINNSAFAFVPKRSYLDFFTIHIGNYNFVRLDIKNFFHSIDLKKLEKMLSVYFENEFIDTDKDQLIIKSFMNLVTYKIPLASKNTTEKGNTILPIGFPTSPIISNIYMRDFDIKIQEFCARHNIQYSRYADDMLFSSKKDSDFVFSETFMKEVAILLSLKGLHLNTKKTIKRKHTISLNGYTLSNSNPTIKETSPHFEFRISNKKISTLKKFIFLTKNVNISSREIMEKVFSFNIKKQKFRYPPKKKFIESYCKTLLVNKIIGYRSYIIAILKHSEKHQACNDSTIEKYKLLLSELDFYLDKNPPEDFSKTL

SEQ ID NO: 5039 - protein, 380 aa, unidentified
  source 1..380: note = Related to JAENMR010000003.1; note = Lelliottia amnigena
MLKIHAGQFKQLLTGQSIFKNGTIPTIEDKFIREIQLKGKFFYAIQNSPELSSTQANLINELFIQIEINNSAYAFVSKKSYLDFFTNHIGNYNFVRFDIKNFFHSIDVIKLEKMLSAYFENDYIDNEKQQPTIKSLMNLITYKVPLSSKNIAKRGNTILPIGFTTSPIISNIYMRDFDIKIQEHCIRHNINYSRYADDMLFSSDKSSEYIFSDSFMKEVSILLGLKGLQLNAKKTVKRKHTISLNGYTISNNHISQILEKPAFEFRLSNKKLCILKKFIHLSKKDGVTSRLIMEKLFSFNIKRQKFRYRPKKEFIESYCNTLLTNKITGYRSYLISIIKHALKYNISSDCSLENYNKILKELELYLDKNPVPDHSKSDKI

SEQ ID NO: 5040 - protein, 380 aa, unidentified
  source 1..380: note = Related to NZ_CP011303.1; note = Serratia liquefaciens
MLRIDATTLKKMIISENLLIEGIIPPIESKFVTEFRVKNKFYYSVQNNPELLLAQNKIISDILSKVELNNSAFAFIKNKSYLDFFEPHMGNYNFVRIDIQNFFHSIHTPQLKEILSHYFKDEFIDPNKKQKIISSFMNLITLNIPLSSKNQNSKNNNILPIGFTTSPIISNIYMRDFDIKMQDFCIRHNITYSRYADDMLFSSTEQSSFVLSDAFMKEVSILLNLKKLKINTSKTIKKKHTISLNGYTISSSLIVDGKVISPAEFRISNKKTAIIRKFILLSKKEKITSRYIMEKLFHFDKNKVHFLFPPKDKFIESYCNTLLVNKIKGYRSYIISLIKNAKKYNNTNENTIKKYQEIILELNIYLDKNPLKNFSENKKT

SEQ ID NO: 5041 - protein, 366 aa, unidentified
  source 1..366: note = Related to NZ_JACYTP010000002.1; note = Photobacterium arenosum
MIKNKISDDFFKKAILKGNEGLLNDFSPSVREFKVGCDNFFEISRDSEHKRINDRITKFVLDKSPINSSACGFVQGKSYYDFLRPHIQGYYFLRLDIKKFFHSIPSHEVKSLLAQHFNNEKNGKKYSALDIAYMSITHRVSDNYIDKDFRGKEILPIGFSSSPVISNIIFRRVDILIQKLCEDKGIIYSRYADDMLFSCDNSKYLHSEQFEKDISIFVSTLSLKLKKRKRRATENTISLNGYVVQNRKRKKGFLHVYKEKPVGNIRLSDKKLKPLKKLSALLKKQKDPIYIMENIFYLNPKNFIRRYGGNFAFYSKYADDQLQNKLKGYRSYLVSLIKYNDKYGCVNIDCMKKVKGLVEVFESNIK

SEQ ID NO: 5042 - protein, 366 aa, Vibrio sp.
  source 1..366: note = Related to BBMT01000003.1; note = Vibrio maritimus
MIKNKISDDFFRKAILKGNEDLLNNFSPAVREFQIGCDNLFEITRETEHKQINDRITKFVLEKTPINSSACGFVQGKSYYDFLRPHISGYYFLRLDIKKFFHSIPSYEVKALLSQFFNNEKNGNKYSALDIAYMSVIHKVSDTHIDKDFRSKEILPMGFSSSPVISNIIFRKVDILIQKLCEDKGIVYSRYADDMLFSCDNSNYLHCDQFERDISIFISTLSLRLKKRKRRATENTISLNGYVVQNKKREKGFLHVYKEKPVGSIRLSDKKLKPLKKLASLLQKQKSPVVIMESLFSLERRKFINRYGNNWNFYCKYADEQLQNKLKGYRSYLVSLIKYNDKYGCVNVECMEKLRALVGVFELNIK

SEQ ID NO: 5043 - protein, 309 aa, unidentified
  source 1..309: note = Related to JAJRLY010000005.1; note = Klebsiella pneumoniae
MMKNNISDDFFKKAILKGNEDLLNDFSPAVREFKVGCDNFFEISKDSEHKRINDRITKFVLAKIPINSSACGFVQGKSYYDFLRPHIQGYYFLRLDIKNFFHSISAHKVKNLLAQHFNNEKGGNKYSALDIAYMAVTHKVSDTYLDKDFRGKEVLPIGFSSSPVISNIIFRKVDILIQKLCEDKGIIYSRYADDMFFSSGNSKYLHSEQFEKDISIFVSTLSLKLKKSKRKATENTISLNGYVVQNRKRKKDFFHVYKEKPVGNIRLSDKKLKPLKKNFRIAQKTKISNIYNGERLPFKPKKVCPKIRE

SEQ ID NO: 5044 - protein, 368 aa, Vibrio sp.
  source 1..368: note = Related to LWEH01000044.1
MIKNKKKISDDFFKKAILNGNKALLSDFSPSVSEFKVGGDRFFEISRGSEHKSINNRITKIVLDKIPINSSACGFVQCKSYYDFLRPHVHGYYFLRLDIKEFFHSIPSIEVKKLLSQYFNNEKNGAKYSALDIAYMSVTHRVSDTYIEEDFRGKDILPIGFSSSPVISNIIFRRIDILIQKMCEEKGIVYTRYADDMLFSCESSKYLHSEQFERDISIFVSTLSLKLNRKKRKAAENTISLNGYVVQNTKINKGFFHEYIEKPVGNIRLSDKKLKPLKKLSVLLKKEKDPIYIMDKVFNLNPSKFIRKYGKNYEFYSKYADDQLQNKIKGYRSYLLSLMSYNDKYGCVNAKCMQKVKGLVEVFESNIK

SEQ ID NO: 5045 - protein, 373 aa, unidentified
  source 1..373: note = Related to NZ_PNDJ01000020.1; note = Pseudoalteromonas sp.
MYQVEASMINTKISDEFFKKAILKGQSEIFNEFSPSVRESKVGPDSFFEIAQNSLHKDINDRITKFVLNKNPINSSACGFVAGKSYYDFLRPHITGYFFLRLDIKKFFHSIPVSEVRELLSQHFNDTKNGAKYSALDIAYMSVTHKVSNDHVDQDLKAREILPIGFSSSPIISNIIFRRVDILIQKLCEEKGITYTRYADDMLFSSYKSRYLHSEQFERDISIFISTLSLKLKKRKRKEAENTISLNGYVIQNKKIEKSLFNVLKEKPVGKIRLSNKKLKTLKKLAALLRKKQSPTYIMENQFKLNPNKFKAKFGKNLNFYNKFADDQLQNKIKGYRSYLVALLKYNELHGCVNIDCVKTVEKLIKVFELNVK

SEQ ID NO: 5046 - protein, 366 aa, Vibrio sp.
  source 1..366: note = Related to UHIJ01000001.1; note = Vibrio alginolyticus
MNKKVSDEFFNNAILKGNVALLDDFSTSVIERKSGADIFFEILKDSDHKIVNDRITRFVLSKIPVNSSACGFVPGKSYYDFLRPHISGYYFLRLDIKKFFHSISVLEVKNLLSQYFSDDKKGAKYSALDIAYMSITHKVNNNFDDDDIKKKEILPIGFSSSPVVSNIIFRRIDILIQKLCEDKGIVYSRYADDMLFSSSKSRYLHSEQFERDISIFVSTLSLKLKKRKRKAVENTISLNGYVIQNTKLKKNLFFNVYKQDPIGSIRLSDKKLKHLKKLSALLRKNRDSVYIMESIFQLNYNKFKRTYGENINFYIQYSDDQLQNKIKGYRSYLVSLIKYNEKYGCVANNCIVKVKELVRVFESNIK

SEQ ID NO: 5047 - protein, 367 aa, unidentified
  source 1..367: note = Related to NZ_MNAN01000032.1; note = Pseudoalteromonas byunsanensis
MNNKIIKNDFFEQAVLKGKTQLLNKFTPSAVERTVGNDIFFEIPKDSDHFLINRRIEQLILSSIPVNSSCCGFVKGKSYLDFLKPHIKGYYFLRLDIKDFFHSIQLSDIKALLGDYFEDDKKSFKYSPLDIALMSLTHSVSSTHPAKDMRGKTILPIGFPSSPVISNILFRKVDITIQKFCEDKKITYSRYADDLLFSSTSSRFLHSEQFEKEISIFISMLTLRLKRKKRIAGENTISLNGYTIQNKKKSNVSFLRDYQQDPIGSIRLSNKKLKTLKKLAASLIKKHSAVSIMENLFGLSFQKFKRNHFPDKNFYRKYARDQLQNKLKGYRSYLISWVIFDDKHSCVASDFLLTARCLIDIYEKNIE

SEQ ID NO: 5048 - protein, 367 aa, Escherichia coli
  source 1..367: note = Related to CP088131.1
MNKNKVSDDFFKNAILKGNLGLFDKFDLSVIERNIGNNAFFEISKDSEQYKINERITKFVLSRQPINSAAYGFIKGKSYYDFLKPHITGYYFLRLDIKNFFHSIPVREVNSLLEGLFNSSKEGKLYSALDLAKMTLLHTVSKDFSDSSLRGDYVLPIGFPSSPAISNIIFRRVDILIQKYCDDKNIIYSRYADDLLFSSANSNFIHSEQFEKEISIFISTLALTLKKSKRKACENTISLNGYVIQNTRPKKTLFSNIFRENSTGAIRLSNKKLQTLKKVLRSLFKGKSAIYIMETFFGLNYSKFKNKFNSDYRFYNKYATDQLQNKLRGYRSYLVSLIKYNESYDCVDQNCLKTVKSLAKDLEKYIV

SEQ ID NO: 5049 - protein, 367 aa, unidentified
  source 1..367: note = Related to CP034276.1; note = Pectobacterium versatile
MNKNRVSDDFFKNAILKGNTDLFDSFDVSVIEKKIGNDCFFEIPRDSEQNKINERITKFILSRQPVNSAACGFIKGKSYFDFLKPHTTGYYFLRLDIKNFFHSIPVREVNNLLESLFSSSKNGKSYSALDLAKSTVLHTVSKDFPDLSLRGEYILPIGFPSSPAISNIIFRKVDILVQKYCDDKNIIYSRYADDLLFSSINSNFIHSEQFEKEISIFISTLSLNLKKSKRKACKNTISLNGYVIQNTKPKKIIFSMFYSDNPVGTIRLSNKKLQILKKVVAALFKKKSAIYIMENIFDLSPSKFKKSFNSSYYFYNKYAEDQLQNKLRGYRSYIVSLIKYNEKHECVDKNCLITVKSLAKALEEFIL

SEQ ID NO: 5050 - protein, 364 aa, Vibrio sp.
  source 1..364: note = Related to CP017889.1; note = Vibrio alginolyticus
MINNKIHDDFFKNAILKGDTSLYDDFSQSVIEKQVGPDVFFEIKKDSDHYRINERITKIVLSQVPINSSACGFVPNKSYYDFLKPHIKGYYFLRLDIKNFFHSIPKKYVEELFKQYFSDKKNEQKYSSLELALMAVLYKTNIFDDEKDKIVLPIGFPSSPVISNILFRKIDILIQKFCEEKNIIYSRYADDMLFSSSKSNYLHSEYFEREISFFLSTLALKLKRRKRKATENTISLNGYVIQNEKPKKRFLFNVYKEERVGTIRLSNKKIKIIKKLSAHLIKGSSPVVIMENLFNLNPYKFKKKYNSNIQFYNKYSRDQLQNKIKGYRSYLVSLIRFNEKHGCIDKKCLETAIKLVSILEDNIT

SEQ ID NO: 5051 - protein, 367 aa, Salmonella sp.
  source 1..367: note = Related to CP079839.1; note = Salmonella enterica
MKNKILSDDFFKNAILKGNSALFNEFTPSVTEREVGPDVFFEIEKNSEHRKINERITKFILSQIPINSSACGFVQGKSYFDFLNPHIKGYFFLRLDIKKFFHSIPASEVKSLFKVYFSNTKKEEKYSALDIALMAVLHKTSKSLSDSELRDKEILPIGFSSSPVISNIIFRKVDILIQKYCEDKNIEYSRYADDLLFSSAKSNFIHGEQFEREISIFISTLSLRLKKSKRTASENTISLNGYVIQNTKQKKLFNMFFYKDAPIGTIRVSNKKTKIIKKMTALLRQGKSPIYIMENVFNLNRKSFKPKYTNNYTFYNRYATDQLQNKIKGYRSYLVSIIKFNEKYKSIDEKFLKSAKKLVKELEDSIP

SEQ ID NO: 5052 - protein, 365 aa, Vibrio sp.
  source 1..365: note = Related to NZ_JACVEG010000002.1
MKKINNEFFKGAILKNNEALFDEFKPSISEFRIGGDNFFKISPNTPHHDISERITKIVFSQVEINSSACGFVQGKSYFDFLKPHIHGYYFLRLDIKKFFHSIKISDVSALLEDCFSNEKGKFKYSPYDIALMSVTHKVSSNFSDIKLREKDILPIGLPSSPVISNIIFRRVDILIQKYCENKKITYSRYADDLLFSSLNSNFIHSENFEREISFFLSCLSLRLNHKKRKACENTISLNGYVIKNSKPKKLDFFNIHKEDPVGKISLSNKKLKIIKKIIHHLKKGSSAITIMEELFYLNFNKNRSKFYNYYGFYQKYAEDQLQNKLKGYRSYLLSLVIFHQKNKCVDELCLRTVKKMIKDINKKIV

SEQ ID NO: 5053 - protein, 365 aa, unidentified
  source 1..365: note = Related to NZ_WTLC01000042.1; note = Pseudoalteromonas sp.
MKKISNEFFQSAILKGNSAILDDFSPSVVEQNVANNTFFTIRSDTAHKSINERITKIVFSKIPINTSACGFVSGKSYYDFLSPHVYSYYYLRLDIKQFFHSIPISEVKKLLEDNFTKDKGTFKYSPYEIAFMALTHRVSKNSSNKELINKDLLPIGFSSSPVISNILFRKIDILIQKYCENKKIKYTRYADDLLFSTLNSKFVHSEQFEKEISILVSTLGLKLNNKKRKACENTISLNGYVIQNTKPKEMTFFSVRKDDPVGTIRLSNKKLKIIKKLIAAIGKNIPSVTIMEDLFGMNFDKFRGKHFNNLMFFNKYVEDQLQNKLKGYRSYLISLIQYDKRVGHVDVDCLESVIELINKINKYIK

SEQ ID NO: 5054 - protein, 367 aa, Aeromonas sp.
  source 1..367: note = Related to NZ_RJCW01000006.1; note = Aeromonas dhakensis
MNEMNKDFFINAILNKDETLLNTFKPSVVEHQVGDDFFFEIQDRTPHKNINKRITNIILSQIPLNSSACGFIRSKSYYDFLQPHVTGYYFLRLDIKNFFHTIDSDLIDDLLLSLFSDEKKGSDTLSPFDIASLVVTHKVSESCSCELINGKRILPIGFPSSPVISNIIFRKIDLIIQKFCDDKRIKYTRYADDLLFSSPDNKFIHSEQFEKEISIFVAILNLKLNKKKKIACENTISLNGYVIQNEKGKKTRHLHVYKEEPIGTIRLSIKKTKIIQKMVYLLDKKIAPVTIVSKLFKINYHTHKFKYRRNLEFFKKYADDQLQNKLKGYRSYLLSIINYNKIKPCVSTEHIDKYLYLVDKINSYIKE

SEQ ID NO: 5055 - protein, 366 aa, unidentified
  source 1..366: note = Related to CP069319.1; note = Kosakonia cowanii
MKLITNEVFSKTILKGKSELFDTFTPLSTERQIGKEVCCIIPDSTDHKVINNSLTKIVFSRIPLNNSAYGFVPNRSYLDFLTPHVKNYYFLRLDIKKFFYSIDISLIKKLVQSLFSQDKEGKKHSPYDVVMEAITHKTSSDFPIAEIRNRQVLPIGYPSSPVISNILFRPIDILIQKYCEGKKITYTRYADDMLFSGNTKRILHGENFETEISILLATIGLKINNKKTIACENTISLNGYVIQNIKPTVNEFLSQYYETSIGHIHISNKKTQLICKVIHSLRKKESPENIMATHFGKTYNKHKFKYTKDYSFYIKYADMQLQNKLKGYRSFLISLIKHNKKNNCISDKNIEKYSNLAREIERHIKN

SEQ ID NO: 5056 - protein, 365 aa, unidentified
  source 1..365: note = Related to FMAY01000002.1; note = Kosakonia oryzendophytica
MKLINNEIFIRTILKGNTDLFNTFVPTSAECQIGKEFCCVISDSTNHKAINHALTKIIFSRIPLNSSACGFVKNKSYLDFLTPHIKNYYFLRLDIKKFFYSIDVSLVENLAKSLFSQDKEGNKFSPYNIVMDAITHKASASFPITELRNKQVLPIGYPSSPVISNIIFRPIDILIQKYCEGKNIIYTRYADDMLFSANTKRVLHDRSFQTEIAILLSTINLKINKTKTIACENTISLNGYVIQNERPIFRKSPHQNYEQPTGHIRISNKKTEIIHKILHSLREKESPSTIMKKHFGKSYDNHKFIYKKDYAFFIKYIETQLQNKLKGYRSFLISLIQHDKKNFCIADEHIEKYSKLTKEIERYII

SEQ ID NO: 5057 - protein, 349 aa, unidentified
  source 1..349: note = Related to NZ_CP030062.1; note = Mannheimia varigena
MFDDSIFNRIILQNHLSLRKDFHPKVIGIKINKNLYFSINSDIHRDINKRIVNYILSDIPVNSSACAYIKGKSYLDFLSPHCKNCYFLRLDIKNFFHSFPERILDEFLLSLFNNEKPKGSDELSSYELARLVLLYKCDDEYSDDSIKGRSILPIGFPSSPIISNILFRKIDILIEKYCYTRGITYTRYADDMLFSSKSSGFLLKSEFEREMSFLISLLGFRLNNNKTIRSSNELSLNGYVIYNYMENNRSGIRLSNKKLSIIRKVIYYKKNKMSNDFIMRRLFNIHINNFKFKYGKHESFFEKYCEDQIQHKIRGFRSFLLSFSNYSKENYGVCEEYIELVNELEKYII

SEQ ID NO: 5058 - protein, 364 aa, Vibrio sp.
  source 1..364: note = Related to NZ_CP090019.1; note = Vibrio kanaloae
MKKISRDDFVKDILGLSVSTSLDSPTLSVKYHKIKSQDTYSIVEQTLHYYANKAINDNILSKISVNSSAKGFVKGKSYLDFLSEHKDGYYFLRLDIKKFFPSISQTDIRNVLSQYLSYKINKKDKISTLDYAMNVITHRVDPKSAPFLPVGFSSSPTLSNIIFRKIDILIEKLCLDKNVKYTRYADDLLFSSSNNPEILDDKFINEISKLVSILSLKLNVKKTKRKKGLISLNGYVICNKSPDQPWLFSKKKRYFTGNLWVSNKKTKNFSKLIYLMEKGYSSDYIANKVLKITPNNNHVFYGVNVDFYTKYCNDQVLNKARGYRSFLLSLIIYDTKNKCVEENYINKYSKLVNRLDLVIDKYTS

SEQ ID NO: 5059 - protein, 375 aa, unidentified
  source 1..375: note = Related to WMDK01000003.1; note = Photobacterium carnosum
MSMCSMCHTVNFCFCIKDKAYYMSKYIERKIGPSLTSKLLSNIDRNVVSELKVGKDYTYSMLTDSHLEVINKELVENLFSHIPLNNSCVGFVKKKSYLDLLEPHRYSKKFTRLDISSFFHSISISDVKASLTPYVNPLFLDKEKKISTLEKIIECITYDVPLTSSNTIFRGKKILPMGFSSSPVISNVVFRKIDIQIQKYCIENKIIYTRYADDMLFSSNKELVSQVEFINKIQSLVSQLSLRINERKTITTSGHISLNGYVIDGSSGTIRLSNKKLSRINKITHQLLVRSKSPSSVAKKLYGYSISQYNFKYSYSKEFFEQFCKDQLHNKIAGNRAYLISVLKFNDRYECICPDYLKKSKVMLDRLNEILDNWR

SEQ ID NO: 5060 - protein, 353 aa, Vibrio sp.
  source 1..353: note = Related to MCSX01000068.1; note = Vibrio cyclitrophicus
MSKYNERKIGPSLISKLLADVDHNVISEAKVGKDFTYSMLTNSDLEVLNKELVSDFFSKIPLSNSCVGFVKNKSYLDLLEPHRFSNHFTRLDISSFFHSISIDDVKSSLSPYVKPEFLDEDKSISSIEKVIDCITYSVPTTSENVKSRGKKILPMGFSSSPVVSNIVFRRIDIQIQKYCIENNIIYTRYADDMLFSSTNELVIKVEFVNKIKSLVAQLSLKINEMKTITTSGHVSLNGYVIDGVNGTIRLSNNKLSRINKITHQLLVRRKPPEYVAKKLYGYSISKFKFRYGFSKDFFDQYCKDQLHNKIAGNRSYLISLIKYNERHQCMCPIYFSKSKLMLDRLNNILDNWK

SEQ ID NO: 5061 - protein, 353 aa, Vibrio sp.
  source 1..353: note = Related to ACZN01000014.1; note = Vibrio coralliilyticus
MSKYSDIKISPSLNSKLLANVDRNVVSEIKVGKDYTYSIMAGSNLDVLNRELASDFFSKIPLNNSCVGFVKNKSYLDLLEPHRFSTKFTRLDISSFFHSISIEDVKLSIEPYVKPKFLDNDKTLLSIDKIIEYITYDVPQKSKNVKFRGKTILPMGFSSSPIISNIVFRKIDIQIHKYCNDNNIIYTRYADDMLFSSNNEIVGQRIFINKIRSLVSQISLKINERKTITTSDHISLNGYVIDGASGTIRLSNKKLNKINKITHQLLVRDRSPAVVAKKLYGYSISKYDFKFGYSQEFFEQYCKDQLHNKIAGNRSYLISVLKFNEQHDCICPEYVVKSKIMLDRLNKILDNWR

SEQ ID NO: 5062 - protein, 356 aa, Aeromonas hydrophila
  source 1..356: note = Related to JAEHJS010000001.1
MNKTKVITLQSEHKVLLCEDANPDDISSIFYLGKLAFKIKANCFREQIAIYISNSIQDVIPINSAATGFIKRKSYLDFLSPHRRSSFFIRLDVKDFFHSIKEEDIKKSLSNYIVPSHIMIEDKKTPTIDQLIKYIMHEIPDDFPDKNLKGKKILPIGFPSSPSISNLVFRKIDILISKYCQHENIMYTRYADDLLFSSKKKLPPELENKISEYLSILSLKQNNKKTLCTKSHISINGYVIDGETNSIRLSNHKLQRINKLTHAIINRKDSPKEIMKVMYGKTFSQYPFNYPKGKRNFYIKYCIDQINNKLKGYRSYLLSIIKYNKSEIIITSTYKEKLMTVITRIEKCIDIYNKLK

SEQ ID NO: 5063 - protein, 380 aa, Vibrio parahaemolyticus
  source 1..380: note = Related to AVPX01000003.1
MLTASKLPSHITRVSCGLQVTCESLFCIGSDMKTNKIKLPASLGAFLNENSDTAVKERKIKGNYFYSVDDSVLDKHQTLAKILSEAIPKNSASKGFSADCSYLDFLKPHTPSRFFLRMDISSFFHSIPVEQIANKLKPYFDNNADNESHAVSVDSILKKVTYKVPETSSNKKILGETILPMGFPCSPTLSNLFFRPLDIVIQSYCLEHDVIYTRYADDMLFSSKYNQTIGSGDVETFIKRLMNKNSLLINTKKTLYTEGHISLNGYVIDSNGGCIRLSNSKLLTINKLTKMLIVQKVSLRHVAESLFGMNIRNLPYENANTNAFFEKKCRKIVLDKVRGFRSHIIGVKKHGIATSSISAESVKKYEKIIERLEKIILQHG

SEQ ID NO: 5064 - protein, 351 aa, Citrobacter sp.
  source 1..351: note = Related to CP057863.1; note = Citrobacter freundii
MKITKIALSDDLRAFLTNDDVQLVREMKIKKDFFYHLESEETARYHKKIEILISKYIPVSRSSYGFVKGKSYFDFLSPHLDSKYFSRLDIKKFFHSISADDLSKKLKPYFVDKLDKDSNVRLIDLILKKLTYEVPANSKNQYFIGKKILPIGFPCSPIISNLVLRPIDIQIEKICKEHNVIYTRYADDMLFSSKYMLSLFNGEIKNSVNRIISHIGLTLNESKTVITSGHISLNGYVIDGTTNTLRVSNEKTMKLKKTIRLIILKKERFSAIACKYYGLNIKNLRYHNANTDKYFETYCKNIVLNKLSGYRAYFISILKFDSEHNVLDEKSIIKYNLIISDLDKILNEYRN

SEQ ID NO: 5065 - protein, 344 aa, unidentified
  source 1..344: note = Related to PNCI01000020.1; note = Pseudoalteromonas rubra
MKLSQKEVLNALKVQSIDDIKKISNEFSFKDGFYIPESMEYKILSKNLSVIFSKLPLSSAAKAYRKKHSYYDFFRPHLEGEHFLRLDIKAFFNSITSEHLEGFLISHLKGKNAYEIKMLARAISFFLTVKVDKKQILPIGFPASPSIANLIFRPLDITIEKLCHNKKIIYSRYSDDLLFSSASGSVIHSSWFESQISYIISKLDMRLNTSKRIATSKEISLNGYVLYGEENNKKIRFSNQRLRILKKLIHYKKVRNLPDRVIAKKLFQDEVRILDSSLRFNKKSEFLDTFCRDQVINKLRGYRSYLISLLKYDNLYSCVDREYKIYICDLIGELNSIIFSYDRG

SEQ ID NO: 5066 - protein, 342 aa, unidentified
  source 1..342: note = Related to NZ_AHBZ03000021.1; note = Pseudoalteromonas citrea
MKLSQKEIFKALEVKSIEDIKKISSDFAFKNGFYIPRSPEYKTSSENLNVLFSKLPLSSVAKAYRKKHSYFDFFRPHLDGEHFLRLDVKAFFNSIKREQIEIFLISHLRGKNAYEVKVLAKAISFFLTVEVDKQRVLPIGFPASPAIANLVFRPLDIAIEKLCHEKKIIYSRYSDDFLFSSASNSIIHSNWFESQISYIISKLDMRLNNGKRITTSGAISLNGYVISGEENNKKLSFSNLRLKTLKKLIHFKKIRKLSDKMIAKKLFQDNLKNLNLKYSDEKSFIDKFCRDQVINKLRGYRSYLISLLNYDNLYSCVDSAHRRHICILIEDLNSIILSYDRG

SEQ ID NO: 5067 - protein, 344 aa, unidentified
  source 1..344: note = Related to NZ_CP045418.1; note = Pseudoalteromonas sp.
MKLSQKEIFKALQVESIDDIKNISSDFSFKGGFYIPNDLKYKTSSQNLSKLFSKLPLSSAAKAYRKNHSYFDFFRPHLGGKYFLRLDIKAFFNSIKREQIEDFLISHLKGKNAYEIKFLAKRISFFLTVEADKDQILPIGFPASPAIANLVFRPLDIAIEKLCQEKKIIYSRYSDDLMFSSENSSTIHSNWFESQISYIISKLDMRLNTRKRIATTDTISLNGYVISGESPNKKISFSNQRLRILKKLIHYKKVRKLPDKVIAKKLFQDNLKSLDSSLKFAKKESFLDTFCRDQVINKLRGFRSYLISLLNYDDLYSCVQSEHREHISSLTEELNTIILSYDRG

SEQ ID NO: 5068 - protein, 341 aa, unidentified
  source 1..341: note = Related to NZ_CP055159.1; note = Shewanella algae
MKKISVAEILTSLGVKSIAEIDQIPKDHRLVSSYHVAGSSAYLAASKSIGQLISRLPLNSSSVAYRKGLSYFDFFRPHLKGKYFLRLDIKSFFHSITIDSIIRTFDSHIKGSKRREKSELTRKLTDFLTIEFEGKKILPIGFPASPQVANLVFRPLDIQIEKLCLEKGVSYTRYADDLLFSSQSEKVIHSTWFESTISSIISQQELKLNNSKKIKTKGKISLNGYLISGSDYKKISFSNKRLTVVRKLLYFKNKKNYDDLSIMRRLFPTDLKNLHLVHPNKNEFLKVFAQSQILQKLKGFRSYLLSIVNYGEKYNCIEQSHRIVLLELISNLNDVILKYEN

SEQ ID NO: 5069 - protein, 342 aa, unidentified
  source 1..342: note = Related to JADYXO010000004.1; note = Pseudoalteromonas sp.
MSKISILEVLSSLNVESIQDIDKIPKNSKLKSGYHIPDNGAYSEASSALGELLSKLPLNNSSVAYRKGYSYFDFFRPHIKSNYFLRLDIKSFFHSISKSVIEQTIESHLRSSKELDKSLLARKVSEFLTIKYDKVDILPIGFPASPRVANLIFRPLDIQIEKICLESGIIYSRYSDDLLFSSINDKTIKSNWFESQISYVISQLNMKLNNKKTIKTKNQISLNGYVISGSENNKYMSFSNERLKLIRKLIYLKKVKKISDFSIMRKLFFTEISNLKLIYHNKAEFTQVYAKSQVENKLKGFRSYLLSLVNYGDRYDCVQLEHKKMLINLIEELNLLIFQYNN

SEQ ID NO: 5070 - protein, 356 aa, unidentified
  source 1..356: note = Related to JADYXL010000003.1; note = Pseudoalteromonas sp.
MKTITKKYFMENILNSNPPGDIPDNSIQEVRIGKDFAYSIDKKFESYSINKRLTSLVFNKVPLNDSAVAFRQGMSYYDFMFPHKNNYKFLRLDVKSYFHSLRIRAIRNCLKHYFMGSRLTNNTTMVDQALKYCTYTIPTDSKNVKFSEKVVLPIGFPSSPVISNIIFRQLDIEIQKICYKHEIIYTRYADDMLFSAKKSNIYIHNALFEEEISRLLQRLSLKLNNKKTLKKNHTLSLNGNVIAFGKAGGSLRLSNKKVKLINKVTYLALVKEESAVFIMNKLFNVNINNYNFQFQQDEIFFKKVCMDQLFNKAVGYRSYLLSIIQFDKKNNCLETRYRKKYSKIITRLDKLIDIYS

SEQ ID NO: 5071 - protein, 342 aa, unidentified
  source 1..342: note = Related to JAFLWB010000009.1; note = Enterococcus sp.
MRINSKLYDDLENYFSMSVNELTITTSLEAKDRVEIFSIEKKNKEKREIHSVDTKTTMWKVQNFLNNKYFYQNNFPEYVFGFLKGKSYFGFLQYHVSKKNTNNFLKLDIKNFFGSIDTEVLIEDIVNDFEEDTYKKEELKMLFKVVLTYKDQLPQGFQTSPYLSNYYFLRADLRIKKYCDKLDFKYSRYADDIIISTLSKGEKLFSKGTVSMIDRIIADFDLKLNRSKTRVAKRELVLNGFVISSEVRLSQSKLKELRRVLFIIEHNQCKNSDQLLDLINSDKKINSKNKKRYYSTEYLLKYLSGIRAFLISSLKNISTKSDWYKTASKLIVRVEAVILKMY

SEQ ID NO: 5072 - protein, 334 aa, unidentified
  source 1..334: note = Related to NZ_CP049886.1; note = Vagococcus coleopterorum
MYNLSDHIEHVYKKNISELIDQLELDKKNNVEEFNINKNNGTKRNITMVVGDCILGRLQSFLSDNYFNKVEFPINSFGFRENCSYFDFLDIHCSSEEKDFLKLDLKDFFSSIDAKLVCENLAKDFERNVKKRVKLEELFFTVITFKGKIPQGFKTSPFISNYFFVRADLRFQKYCDKLNYQYSRYADDIIISSNTGKDFFVGNTIAIAKKILADFNLKLNSSKTKYAKNELVLNGYVISNETRLSQSKLREIRRVLFIMESSVNLDVATDRLNSKKYFSSKISNRIFDLEYLFNYLSGYRSFLISSIQKKETGKWKDTASKLIKRIEAQLLRQE

SEQ ID NO: 5073 - protein, 342 aa, unidentified
  source 1..342: note = Related to VTIG01000006.1; note = Listeria monocytogenes
MLSIHEHIKDRLEISIEDLVKVIKSEKLNNVCTYNLSKKGKERQVVEVDKDTTLYYVQTILLKFFSSINHFPEYVFGFQKHKSYYKFLDMHTTGNDETYFLKLDIQNFFTSLDAEKLLTNLVAQFEQVTANQPIVKELLYAALTYNNKIPQGFKTSPFLSNYYFFIADLRIKKYCDKLNIKYSRYADDMIFSSHFKKNIYSNRTIKAFEIILFDFNLKLNKSKTKLSKKELCLNGYVVSNEVKLSMNKLKELKRILFIIEQNKQKQTKDLLISINNHTYLHSSRKKNTRYFSEEYLKNYLSGYRSFLLSFIKENTHQKKWREISKKIILRIEKALLILYDLQ

SEQ ID NO: 5074 - protein, 329 aa, unidentified
  source 1..329: note = Related to JAAAJO010000006.1; note = Enterococcus hirae
MDIFSKKQFEHLLNIDIENDTQKIIEEKNNIKNIEIVVNNKTRNILRLPTSSLIRSTQKKIQHTILSDEYYPDCVCGYVKKKSYFDFLKPHCDKKYFLRIDIKDFFDSISSEKLTILLAEKIRINDPKERKEIMDFLLNILFVNKKLPQGFSTSPALSNLFFKRADLRIEKYCMTQKITYTRYVDDLLFSSNQNNLIGTKILTTIKYICKDFGLEINYKKIKRGIDTFSLNGFVIDNSEIRLSRKKLAYLKEVLFFLDHNCHKDNLDILISKEFGSKFYYTENILSFLSGYRAFLISSLSSNPSTWNDKCRLLINRIEKLTIILSKKIL

SEQ ID NO: 5075 - protein, 334 aa, unidentified
  source 1..334: note = Related to NZ_NUOQ01000048.1; note = Priestia megaterium
MQIFIYKEEYFYDKILSSSKALIEETIKDKDKFYREKKIPKKNGDRTLFCLKKDCPLSKVQQNIRMNFLNKISIPDYVYGFVPNHSYKDFLLPHTNKKYYIRLDIKNFFDSINSEILSEIFSYYFQVKDVVNDVLLRQFIELVTLNDRVPQGAITSPIISNIIFRQLDLRIRKYCAKFNITYTRYADDLLFSSDNPYLHKDFFIKKIKYIVSTKGFQLNKGKVRYDKDFISLNGFVVEKNIRLSRKKLKNISNTLFILERYKNKFNLNIVLAEINKMQLKKEISSISELINYLAGYRSFLIQLLDKENLENFENEKFLKYINRIQTAIIFLDSQ

SEQ ID NO: 5076 - protein, 334 aa, Bacillus sp.
  source 1..334: note = Related to JADILK010000060.1
MQIFLYREDFFYNKVLSSSKKAVDEIIKNKDKFYQEKIIPKKNGYRTLSCLKKDSSLSKIQQSIRSNFLNKISIPDYVYGFVPKHSYKDFLSPHTKRKYYIRLDIENFFQSIDPDTLKEVFAYYFQINHVTNEELLKQFIELVTLDNKVPQGAITSPIVSNIVFRQLDLRIRNYCKKFNITYTRYADDLLFSSDNPYIHKDFFIKKIKYIISTKGFKLNKNKIRYDKEFISLNGFVVENNIRLSRKKLKNLSSSLFILDRYKNKFNLNEVLMEINKIPFKKEINSIGSLINYLSGYRAFLIQLLNRENLEGDENKKFLRYIERIQNAIIFLDSQ

SEQ ID NO: 5077 - protein, 333 aa, Bacillus sp.
  source 1..333: note = Related to NZ_CP072062.1; note = Bacillus mycoides
MQIFLYKEDFFYKKILLDSKESIQEIIKDKNNFYRKKKIPKKKGYRTLCCLERDSSLYKVQQSIRKNFLNKISIPDYVYGFVPKSSYKDFLVPHTGKKYYLRLDIQNFFQSIDTKVLKEVFLYYFRLKDNNEETLNNFVELVTLEDKVPQGAVTSPVISNVIFRKLDLRIYNYCKKFNVTYTRYADDLLFSSDNIYIHQEFFIKKIKYIVSTMGFEINKSKSRYDKDFISLNGFVIDEDIRLSRKKMKNLSSILFVVEKHRNRFNLGDVLTEIQSLIHNKQIDSKHSLIHYLAGYRAFLIQFISKEQKTDLGNKKIFRYIERIENTILFLYSL

SEQ ID NO: 5078 - protein, 334 aa, Bacillus sp.
  source 1..334: note = Related to NZ_NIST01000001.1
MQIYIYKEDFFYNKILSTSKTQVEEILNDKNRYYTKRKIPKKNGFRTINCLEKNSALSKIQQSIRLNFLNKVSIPNYVYGFVSGQSYSDYLKPHVRQKYFLRLDIKNFFENITSQTIESVFSYYFRLNTNTNNDEELQFFIDLVTLNGKLPQGAITSPTISNIVFRQLDIRINKYCKKFNINYSRYADDLLFSSDNDFLHKEFFIKKIKYILSSRGFEINKHKIRYEQDSISLNGFVIEENIRLSRSKLKGLSKVLFIIDKHKNNLDTTKVISEINDGGFNKEIKNKYSLLNYLAGYRAFLLQFLDRENLEDYNNKKINRYVIRIQNAIELLYQ

SEQ ID NO: 5079 - protein, 333 aa, unidentified
  source 1..333: note = Related to NZ_CP007161.1; note = Virgibacillus sp.
MQIYIYREDFFYNKILATSKSLVEEILKDKSKYYTKRKIPKKNGFRTINCLEKNSALSKIQQSIRINFLNTISIPNYVYGFVSGQSYSDYLKPHVRRKYYLRLDIKNFFENITNDTLESVFSYYFRLNDNKNNEELLLLIDLITLDGKLPQGAITSPTISNIVFRQLDIRINKYCKKFNINYSRYADDLLFSTDNKFLHNDFFIKKIKYILSTRGFELNKHKIRYDQDSISLNGFVIEDNIRISRSKLKGLSSTLFIIDKHRSNFDITKLLSDINNSGLNREIKNKYSLLNYLAGYRAFLLQFLDRENPEEYYNKKVSNYVIRIQNSIELLRG

SEQ ID NO: 5080 - protein, 338 aa, unidentified
  source 1..338: note = Related to CAKKMH010000024.1; note = Priestia megaterium
MLGYIYTEDFFYKKLLSSEKKIVKNTLLIKESFYKERDLSKKGGTRTLSCIEKNSSLYNLQNNLRSNFLNNIPIPDNVKGFVPGHSYRDFVIPHLNNKYYLRLDIKNFFDNITFETVKEVFGEYFKLDNASNNNKLLETFAEIITLRGSLPQGAVTSPTVSNIIFRRIDIRIARYCKKFNINYTRYADDLLFSSNQSNLHKGFFIKKIAFILRDLNLKINSSKIKKTKNYISLNGFVVDKDISLSRKRKSDLTKILFIIDKNKAVCSTDALLFILNTESYIHKSYFFKDKWSLVNYLSGYRALLIDWLPINKETMNYEKSKKLITRIEKVIDFLLGEN

SEQ ID NO: 5081 - protein, 331 aa, Bacillus sp.
  source 1..331: note = Related to NZ_CP031072.1; note = Bacillus mycoides
MIIIFIYKEDFFYDYVLRNSLEEINKQIIDKQNYYYTVKIPKKGGIRVLNCIKQKTPLFELQNLLKVNFLDKIPIAENVFGFVKEQSYKDFLVPHTWENSRERYYLRVDIKDFFGSITNDTILEVFDYYFKTNEKSSKEMNELLMQIISLNGCLPQGAVTSPVVSNVVFRQLDIRIQKYCEKFDVTYSRYADDLLFSSEKLKLHDKFFIKKINSILMSSNFKVNDKKIIKTESEISLNGFVVGKNVRISRSKKRDLNRILFIYEDKKPKNIKDFLDLLNSNKFKNRVKVNNKYFNDKNNLLNYLNGYRSFLINWLNNNSSSIEYKKQKKVY

SEQ ID NO: 5082 - protein, 355 aa, Bacillus sp.
  source 1..355: note = Related to NUYK01000018.1; note = Bacillus cereus
MRKYSFNFEVIIIYIYKEDFFYEYVLRNPLEEVSKQIKNKQDCYYTVKIPKKGGVRVLNCIKQDTSLFELQTSLKVNFLDKIPIAENVYGFVKEQSYKEFLFPHVWDNGKKRYYLRVDIKDFFGSITSETLIKTFKYYFKTSDKVSKELNELLMQIISLNGVLPQGAVTSPVVSNIVFRQLDIRIKKYCDKFDIIYSRYADDLLFSSSSMRLHDKFFIKKINHMLKSLNFNINTKKIKKTESEISLNGFVVGKNVRISRSKKRDLNRVLFIYKDQKPKNINDFLNLLNNNKFKSRIKNNNNKYFEDKINLLNYLNGYRSFLIGWLHNNTLSVDYEHQKQYIERLEEFILNVNRMN

SEQ ID NO: 5083 - protein, 355 aa, Bacillus sp.
  source 1..355: note = Related to NUPV01000049.1; note = Bacillus cereus
MRKYSFKVEVVIIFIYKEDFFYNYVLRNNSLEEINNQIKNKQDSYYTVKIPKKGGIRELNCIRQHTPLIELQRSIKENFLDKIPIAENVYGFVKGQSYKDFLTPHIWENGKKRYYLRVDIKNFFDSISEDTLIKTFSYYFKATVKASNTMNKILMQIISLNGNLPQGAVTSPVVSNIVFRKLDIRIQKYCDKFNFTYTRYADDLLFSSTSTRLHDDFFLKKIKYILKSSDFKVNNKKIKKTENEISLNGFVVGENVRISRSKKRDLNRVLFIYETYKPKRMEDFLVLLNSSKFSSRVEFNDKYFNNKINLLNYLNGYRSFLISWLHNSTSSKGNNKQVEYIERLENLILELNRMS

SEQ ID NO: 5084 - protein, 345 aa, unidentified
  source 1..345: note = Related to NZ_AUMR01000034.1; note = Ectobacillus panaciterrae
MIIIFIYKEDFFYDYILQDSLEEIKKVIENKENNYYIIKIPKKDGLRKLNCIKKETKLYQYQTLIKNKFLNRIPIAENVYGFVKGQSYKDFLVPHTWENNKKRFYLRIDIKDFFGSINTDTLRQVFRYYFKTDENASNEMIDLLLDIVSLDGFLPQGAVTSPVISNIVFRQLDLRIQKYCNKLNFTYTRYADDLLFSSINKRIYDPFFIKMISTILKSRNFKINHSKVKTSDEEISLNGFVVGKNIRLSRSKKRDLNRILFIFQDQKPKNITDFLSLLNSKKFKSRINVNNEYFSNKTNLLNYLSGYRSFLISWLPENKSSPDFKSSKIYIKRIEELILNINNMN

SEQ ID NO: 5085 - protein, 323 aa, Bacillus sp.
  source 1..323: note = Related to NZ_CP095476.1; note = Bacillus glycinifermentans
MKEKIKDKQQNYYLKDIPKKGGRRYLNCIEKETPLYVYQTSLKNKFLNNIPISENAYGFVKGRSYYDFLVPHTRGNNENGRYFLRIDIKDFFDSITTDILEETFKYYFKTDEKSSNEMVGLIIDIISLNDVLPQGAVTSPVVSNIVFRQLDIRIQKYCNKLKVVYTRYADDLLFSSVNNRTHEPFFIKMISNILKTLNFNINFSKIKKSEEEISLNGFVVGQNIRISRKKKRDINRVIFIYKDKKPKTTSEFLTLLNSQIFTTRTRKNNEYFSSEISLLNYLSGYRSFLISLLPRSKQSIYYKNMKRYINNLEELILNIINLE

SEQ ID NO: 5086 - protein, 345 aa, unidentified
  source 1..345: note = Related to MWZC01000789.1; note = Chryseobacterium sp.
MRIDSLNKFEKKVLRGSITEYNESLTDDSINQAYHTKIIKKNDNSERTLQCIDSNHDIYKIQKKLKNNFFDFIPLSNHAYGYVKGKSYYDYLTPHIKKKFYLRLDIKDFFNSIKEKKLREVIEYDIDNIKINEDTTLVDFLIKTVTFNGSLPQGAVTSPVLSNMVFRVLDIRISRYCRKFGIEYSRYVDDLLFSSNDLLIHKKVFTNGITKILKSQGFYLNHNKLRKSKDEISLNGFVVGSEIRLSRKKTALLSALIFCYQNTQKKTFDNLSTEFKKHFGIDNEKIINADRLHNYLAGYRSFLLGLLPFDSVGVLPDNMTKINQKYLIKINEIEKLLKLTSKEMN

SEQ ID NO: 5087 - protein, 340 aa, unidentified
  source 1..340: note = Related to CP049783.1; note = Paenibacillus polymyxa
MRIESLSKFEKKVLRDSVSHYVDLLTEEQLLTAYYTKIIKKKDKSDRVIHCIDNEHLIYKIQKQLKNNFLDFIPLSNCAYGYVKGKSYYDYLKPHVKHGYYMKLDIKDFFHSIKEKELREVLKYYVDDVSINESLTILDFITKVVTVNEFLPQGAVTSPVLSNIYFRFLDIRISRYCRKFGINYTRYVDDLLFSSDNLFIHKRVFINGITKILKSQGFQLNPKKVRKTKSEISLNGFVVGENIRLSRKKTAIISSLIYYYQCSPNKTLEELLTEVEKNLEIKIKISNLHNFLAGYRSFLLGLLPFDSVGVLPEVITRTDKKILYKINEIEKILDLTAANI

SEQ ID NO: 5088 - protein, 342 aa, unidentified
  source 1..342: note = Related to NZ_CP071709.1; note = Cytobacillus gottheilii
MHIEDLNTFETKILRESTKTCVEILKVEKISKAYYTKTISKKNGMKRTLHCINNEHILYKLQGNLKRNFFDYIPLSSHAYGYVKGKSYYNYLEPHVGNDIFLKLDIKDFFGSIKENKLREVLGYYVDDINVSDNFTLIDFIVKVVTVDGKLPQGAVTSPVLSNILFRHLDIRISRYCKKFGITYTRYVDDILLSSASFYLHKKVFVNGIKKILKSYDLYLNTNKIIKTKNEISLNGFVIGKEIRLSRKKTAFISAIIYCYQQTNKKNVDNFIKEIKEHFKLTDSTEINLLWLHNYLAGYRSFLLGLLPFDSVGVLPEHLSKSNRKLLYKINEIEKILDLLIL

SEQ ID NO: 5089 - protein, 339 aa, unidentified
  source 1..339: note = Related to LT608335.1; note = Sporomusa sp.
MKIFSLDYFENRVLKEKIETLIIDPVEKDSCYTQIAVKKRAGGIRTLSCIHLYSRVYHSQKRLKENYFDKIPTSDFCYGYKKGLSYKDFLAPHVDSKYFLRIDLKDFFGSITCNLLSEVLTSYISCLPVNNTTLLDLIIDIVTLDGKLPQGAITSPTLSNIAFRQLDIRIYKYCEKYQVIYSRYADDLLFSSNNMVIHKLFFLKRISNILNSKGFSINRDKIVKATEQISLNGFIVGSELRISRKKRRLLSVILYCFDKYKPRTYNILLNHVNAELGAKPIKTTEYLNNFLSGYRSFLIGWLPYDSLGCLPSEAFLSEFDKKNLRLINQIEYILKKFNP

SEQ ID NO: 5090 - protein, 348 aa, Bacillus sp.
  source 1..348: note = Related to JACYOH010000011.1; note = Bacillus thuringiensis
MKIYKVDYFERQIMNNEYSTEDLLDVFLKKEEHYNLYVIPKKKNRGTRKLYCLSKNKELYRCQQLLKVNFFDRIPVSDYCYGYRTGKCYKNYLEPHIGKKYFLRLDIKDFFDCIGKDIIRDFLLTYVSEDIENTILGKEISFGLLDLITELVTINGHLPQGAITSPVISNLIFRSLDIRIYRYCCRYGITYSRYADDLLFSSENSVLHKNFFTNKIQHILKSGQYNFDINYRKVKKCRGEISLNGFVVGENVRLSRTKIKKMNTIIHVFKKEKDLDKYNILIELKKNYNLVFENVVDLNNFLSGYRSFLIGILPFNSLGELPNNINRYDTKNLRIISEIEGILEKVNK

SEQ ID NO: 5091 - protein, 325 aa, Bacillus sp.
  source 1..325: note = Related to NZ_CP023179.1; note = Bacillus cereus
MKKNAEISKITNRKIQCYFRVSIPKKGGERIIYCINPSCNLRTLQQNLQRNFLNRIPIPNNVFGFKKGYSYKDFLEPHVNKNYYLRVDIKDFFNSISKELIYDVLTNYLKMDEADNKEVLDTVFDIVSLHGKIPQGAITSPSIANVIFRQIDMRIKKYCKVFNVEYTRYADDMLFSSDNEYLLKPYFIKKIAKILFSKGFRINSSKIKKSNNGQIVLNGFVISDSLSISRKRLSDIQRVLFLYQKGGAPVSISIFLDRINSEQYLYRKKMNGKYFPTRGSLIDYLSGYRAFLIQWLPEDKNSNVYEKLTTLINRIQYLLINIEEI

SEQ ID NO: 5092 - protein, 338 aa, unidentified
  source 1..338: note = Related to WMEQ01000013.1; note = Pontibacillus yanchengensis
MFIYNEDFFYGKILNCRKDALEDILSNKSDEYQERIISKKGGKRYLSCLSDTSSIATLQRGLSNKFLDHIPVPDYVYGFIKGKSYKDYLVPHKNREFYLRVDIKDFFSSINKDLVKEVLDYYIRTDNDTLNKNLIDIIYDIVSLNDSIPQGAITSPSISNIVFRSLDIRINKYCRRFGITYTRYADDLLFSSNNSFLHNKYFLKKISHILQSKRFNINSNKVIKSNKIISLNGFVVGEKIWLSRKRLHDINKVLYLYKTNTFSNINSLLYVLNSSDYIYRKTNNNSFTSKMEIVNYLAGYRSFLLQWYEFQNGDNKNFKLLNKIDEIERILIEIEQLK

SEQ ID NO: 5093 - protein, 379 aa, unidentified
  source 1..379: note = Related to NZ_LZZM01000127.1; note = Clostridium puniceum
MKWIIIMAIRTIYDEEFFYKNILREEKENVIEIINKKKEYYYNKTINKKNGVRNLKCIIEDSPLYFLQKNLVNYFLNNIPLPLYVYGFRKGVSYKKYLEVHLREEVDNNYLESNSRKDVSKDCLQPHLRNYIGKKTCYIRIDIKSFFDSINLDLIKKIFSNYFTPKDSFLKDELLEIFSQIVTLDNLLPQGAVTSPTISNIIFIREDIRIYNYCNKLNIKYSRYADDMLFSSKHNKVFKTYFINMITKILDENGFKINYSKTKKGLDEISLNGFVISNCISLSRGRKHDISKILYIFDTLKPFSTSTYLNMLNDKDNNFKYIKYKADCYFSSRGKLINYLCGYRSFLINWLPRENEELTYNKVKRLIDRIQEVILKIQE

SEQ ID NO: 5094 - protein, 344 aa, unidentified
  source 1..344: note = Related to VDEM01000162.1; note = Cytobacillus firmus
MIVIYIYKKHFFINKVLGTKTKNIYDLVEEKDKHYFNKTIQKKNGVRELKCLKEGDFKHIQQNLKKNFLDELPIPDYVYGFVKYSSYKDFLLPHIGKMYYVRLDIKDFFPSVKKDLLFQAFKSYFKLDGSDNDDVLNLFVDIVTLNEELPQGAVTSPVISNIVFRSLDIRIKYYCDKLGITYTRYADDLLFSSTNEQLHSRYFIKKVSKILGDKKFKLNTDKILKYTDEISLNGFVVGEKVRLSRKRKSDIAQVIRLCRNVKKPVDFDTLLSQLNQLDLRYRKKTVSDNGEEVYFSSKETLANYLLGFRSFFIDWLNTNLISDKREIKFFIDQIETFIDKHYAI

SEQ ID NO: 5095 - protein, 768 aa, unidentified
  source 1..768: note = Related to JADPIE010000003.1; note = Halanaerobiaceae bacterium Z-7014
MVFIKIYSKDFFYKYIIEDKEQDELAEIISNKMYSYLRFEYEKKNGYRFIYSMKKDTGLYEVQTKLKDNFLNEIPIADHVYGFVSGYSYKDFLVRHCYEDKNKTTYFLRLDIQDFFESIKTKMIKETLEYYIKIKDEDNPTVLDLINDLVTINDFLPQGAITSPVLSNIVFRQLDIRFQKYCRKINIKYSRYADDLLFSSKESYLHKRNFTNKIRHILKDKGFKLNFTKTIKSQNEISLNGFVVGNNIRLSRKRNHDISMILYLYDNQSVDEFINILNKENFIYRNKKYDMKTNDEKYFINQDDLINYLAGYRSFLIDWIPIKDGKHKEKHIKLIKNLEVLLEDLSDINNEYNYKGDKMSQKENIPLSVPNLSKDILPNIEETIESGWVSTGGKFIDQFEEKLADYVGVDQAVSCQSGTAGLHLAMRVLGIGPGDEVIAPTVTFIAAVNPIRYMGAEPVFIDCDSDDGPAGPSAEPTNAFTNEGSVNMDLDKLEEFLENECELTDGRVINKSSGREIKAINIVHVFGNPVNMERLIDIAREYGLKVIEDATEALGSYYTEGRYAGRYCGTIGDIGVYSFNANKIITTGGGGMIVARESDLLEEAKFLSTQAKSDRLYYRHDEVGYNYRMTNIQAAFGTDQIDRLEGFIATKIENYRRYKEAIAEIDGLELMAFNEGCRPNHWFYSVLVDPDLYGIDRDELLQELNAVGIQTRPLWGLIHQQKPYLDCQAYRIEQAPYYQQNLINLPCSSNLTAEQVKTVVRYLREFKS

SEQ ID NO: 5096 - protein, 333 aa, unidentified
  source 1..333: note = Related to QBKJ01000001.1; note = Halanaerobium congolense
MEGIDKENLLEIIANKENHYGKNEISKSNGKRIIYSIDNNSQLYKMQKHLVNNFLSQIPIADHVYGFVKDYSYKDFLLRHIHDKNNKTYYYLRLDIKDFFGSINSNLIEETLDYYIKVNEAENGNSIIEIINGIVTLENFLPQGAVTSPVVSNIVFRQLDIRLQRYCRKLDIKYSRYADDLLFSSTNSNLHKNNFFKKVSYILKDKDFRLNYSKTIKDENEISLNGFVVGNNIRLSRKRKKDISKVLFLYNNKPDNQSFVSYLNEHEFLYRDKIGSSYFLNKDDLINYLAGYRSFLIDWIPVKEGRHKEKHINLIENIEDLLENISDVNNEYN

SEQ ID NO: 5097 - protein, 339 aa, unidentified
  source 1..339: note = Related to NZ_FTNC01000003.1; note = Halanaerobium kushneri
MYIKIYNLNYFLKKILEISEEKLKKTLTNKKNAYSKYKIPKKNGYRKIHSLKSGDLSHLQSNLKKNFLDNIPIADNVYGFVEGYGYKDFLIPHTYKKYYLRLDIKNFFESIKTNKLEIIFDYYITASNDEEKDKILDYLISIISLNDYLPQGAITSPATSNIFFRELDIRIQKYCKKLGFDYSRYADDILISSNNDKLPKDFVIKAVNKIVSDRKLKLNYKKIIREKNEISLNGFVVGKGIRLSRNRRYDISKINFLFKSNKSVSQYKFVELLNNANGGFKYRYKNNNGKFFSDIDDLINYLAGYRSFLINWIPDEDNKYYNKHINLLNDIEEILLWLN

SEQ ID NO: 5098 - protein, 323 aa, unidentified
  source 1..323: note = Related to NZ_JAHLOO010000081.1; note = Caldibacillus hisashii
MSKTLEKKENFYEVIEIPKKNGIRVIHCISKNSPLYYLQDQLRKNFLEKIPCSTSACGFIKGSSYKDFLIPHQNMEYYLRIDIKDFFNSIKKDKIKEVLRQYLKLNNEKSNEILNYISELVTIDSYVPQGAVTSPQLSNIIFRKLDVRLQKYCQNLNINYTRYADDLLFSSKFGKVHLPFFLNTIRKILLSENFLINKSKIIKTRKEISLSGFTVGRNIRLSRSRKGDLTKVLFLFNQGGKPKSINQLLERLNSETYRYRMVREERNNNYIYFTSKESILNYLAGYRALLIDWGNHNKYKSLKDESKLILRIEKIIKDISQLS

SEQ ID NO: 5099 - protein, 343 aa, unidentified
  source 1..343: note = Related to NZ_SIRE01000011.1; note = Paenibacillus thalictri
MNHIKIYDESFFYRAILEIEHESMISKVVENKINSYKEITISKHSGSRTIHCINNNDQLYGIQRNLVDNLFSKVALPDNICGFVKKRSYRDFLVPHLWNNNEKRYYLRLDISDFFGSINSAKIHDALDGLIDLDEEKKVKMLKLISEICTLNDILPQGAVTSPAISNIVFKRLDVRIRNYCRKLNVTYTRYADDLLFSTTKEKTLGGYFVKKIVGILKSSGFILNRKKVKRGKFEISLNGFIVGENIRISRKKKRDIAAFFFLYIRGGKPKNIVEILERLNDYDFRFRQKLFTSKNDIINYLAGYRSFIIDWLPQETESNVHKDLKKIIDKIQETLEEIEELE

SEQ ID NO: 5100 - protein, 343 aa, unidentified
  source 1..343: note = Related to NZ_BNJP01000020.1; note = Paenibacillus glycanilyticus
MTKIKIFDENFFYRSVLGIEDEHIFNNLVITKFTSYKEIAVPKNGGIRTIQCIDKENQLYKIQRNLVDNFLSKIHLPDNICGFVKRKSYRDFLIPHAWENNNKRFYLRLDISDFFGSINSAKIHNSLNDLIDIEEDKKNKILNMISEICTLNDVLPQGAVTSPVLSNIVFKRLDIRIRNYCRKLDVIYTRYADDLLFSTTKERSLGGFFVKKIIGILKTSGFILNRKKVKRGISEISLNGFIVGQNVRISRKKKSDITAFFYLFIYGGRPKTIKDLIERLNSYKFQYRRSLFVSKNDMINYLAGYRSFLIDWLPEDTETKVYKELVKIINKIQNTLEEIEALE

SEQ ID NO: 5101 - protein, 347 aa, unidentified
  source 1..347: note = Related to NZ_MBFH01000016.1; note = Brevibacillus laterosporus
MFVGDIILIYKKNFYYQTVLGVDDSSMVKEVIENKEKHYKPIVIYNRGKKREINCIEEKRELYNFQSNLAKNFLNKLPLPDNVCGFVKNRSYRDFLVPHINSHNSDRFYLRLDIKDFFNSISESHLREVLQEYVTIIDKEDNEEVILSMVNLVTLNGSLPQGGVTSPVLSNLVFRSIDIRIRNYCRKLDVTYTRYADDMLFSCDKEKVINGFFIKMIISILKSKKFVLNRRKVKKGASQISLNGFVVSHNIRISRKKRQDINRFIFLWEKGGTPKTIDELILRLNSFDFSYRIKDFNSKYSVLNYLAGYRSMLINWLPNEFDDEWYQQSERLIRKINMIIMKIEQLE

SEQ ID NO: 5102 - protein, 329 aa, Bacillus sp.
  source 1..329: note = Related to CM000757.1; note = Bacillus thuringiensis
MLGIEKDENFKIIIEKKANNYKNLLISRKGKQREIKCINKESQLYRIQANLVQNFLNEIPLPDNVCGFVKKRSYRDFLVPHINNSPTDRYYLRLDIKDFFDSITEEKIEKSLQEYVTINDGAENKEVLKDIIDIVTLNGCLPQGGVTSPVISNIIFRRLDIRIRKYCSKLNITYSRYADDMLFSSQHNRLFDGFFVKMIAKILKDSNFVLNRKKIKKGVSFISLNGFVVGKNIRISRKKRQDINRFIFLFEKGGNPKDVNELLSRLNKEKFYYRSRNFESKSSVIDYLAGYRSMLISWIPEDSDEAWKENVKNLLDKIQKIIMKIEYLK

SEQ ID NO: 5103 - protein, 349 aa, Bacillus sp.
  source 1..349: note = Related to NZ_CP018173.1; note = Bacillus subtilis
MAFYIYHTEQFFQNIIRDSSANIQASLEEKEGSYEKFSISKNSGTRTIYSIKSESKLKKYQKNLLSNFFEYINISDQSYGFVKERSYKDYLQPHINNNLYKDRYYLRLDIKEFFESIKRETIKEELSFYFRLKDSKQTEEILKLVTDIVTLNDSIPQGAVTSPTLSNIIFRELDVKINAYCNQLGVVYTRYADDMLFSSFREHDKFAQPLIKVIYKILKTKGFKLNYKKTIKGKNQISLNGFIVGDNIRLSRKRKKDINNIIFHYYKSGKNIEQFLNSLSEVDLIYRHKNINSLGSLVNYLNGYRAFLIDWIPVNVSNDKISKHSKNIDTIEQIVERLENFKNSIRKLK

SEQ ID NO: 5104 - protein, 351 aa, unidentified
  source 1..351: note = Related to NFKO01000003.1; note = Pseudoflavonifractor sp.
MRYLLFLFAWEDSMYTIESFCNAIWETSYSKVSQGVTKEEYGEFEIPKKGGSRVINYLGRDTSMWNLQHKLLKNFLEKQDLPVCVKGFRQGESYHSFLAEHIGSKFFLRIDISSFFPSITEKQIKNELSRLLACNSNEEKEKLLKLICDITTLNDCLPQGACTSPAISNLVMARIDQRITKYCQVFDIRYTRYADDLLFSSEGFNFKSKNWFLKKIKYILSSQNLKLNYSKIKYGENELVLNGYIISNKGICLSRSRLSDIRHVVSFAKKNRNLIEEFGSERFLQEINKLPLRHRDLTEYPFNTVFQFIQYMCGYRAFLISLVDRSYEETSFQKQLQHLIRKLETQITHYT

SEQ ID NO: 5105 - protein, 338 aa, unidentified
  source 1..338: note = Related to DWWA01000023.1; note = Candidatus Ruthenibacterium merdavium
MFTIESFCNAIWETSYAKVSLNILKDDYSEFEIPKKDGKRKISYLDKDSGLWSLQHKLLINFLNKQDLPVCVKGFKKGENYRSFLAEHIGAKFFLRIDISSFFPSITEKQIKSELARLIICNSDEDKEKLLGLLCDITTLNGSLPQGACTSPAISNLVMARIDQRITKYCQVFDVRYTRYADDMLFSSHVFDFDKKKWFLKKIKYILSSQDLKLNYSKIKFSQDQLVLNGYVISGDGIRLSRNRLSDIRHVVSFASKNYMLIQNSESQKFLQEVNKLPLQYRNLVDYPFKTVFQFVQYMCGYRAFLISLVDQNYAETSFQKQVQRLIRKLEIQIVHCT

SEQ ID NO: 5106 - protein, 390 aa, unidentified
  source 1..390: note = Related to NZ_CABVEO010000001.1; note = Faecalibacterium prausnitzii
MAMPAAGVRRDHSSMCCVKHALRDLLGKYLYTALCFFLLEKNAMFTTESFCNLVWGTSYLKVLRKISKEDYNEFEIPKKGGTRTINYVDRQSSLWKLQRELLNKYLVKQDLPICVKGFKKGENYKSFLSEHIGAEFFLRIDIANFFPSIKISSVKRELALIIRCDNDAEEEKLLDLIGEIVTLDGRLPQGASTSPVISNLVMARIDQRITKYCQVFNVQYTRYADDLLFSSNTFDFENKKWFLKKIKYILKSQELSLNYSKIRYGHKEIILNGYVISNNEIRLSRNRLFDIRQIVKFTKENVPLIRSIGLDEFLSKANKLPLKHRNLKEYPFKSIFQFSQYLCGYRAYLISMVDTNCLQTSFQKELQRLIRKIEAQILLLEQALPIRNSN

SEQ ID NO: 5107 - protein, 329 aa, unidentified
  source 1..329: note = Related to JAGARU010000066.1; note = Clostridia bacterium
MIWNYSYSTVQSKIAQKKYKTISIPKRNGFRELSFLDPKTDLHMLQSGLVNFLKKIELPVCAKGFVKGESYLSYLEHHIGSIHFLRLDIKDFFPSITRKLIEREISCFMSFDSEEEKKKIVKLVSDLVTYHNCLPQGAVSSPVISNIVMIRIDQRILKYCQVLGIKYTRYADDLLFSSEEFDFNDKKWFLRKIKHIVSDGNFKINYGKLKSSTREISLNGYVISQEGLRLSRQRLNDIKKVVSFASSNRQMLQSDPNSYVQALNQLNLEHRGLSVYPFKSVYQFYQFLCGYRSYLISFLKYDIESQFRKKLCKLLDKLEKIIKQIASVL

SEQ ID NO: 5108 - protein, 334 aa, unidentified
  source 1..334: note = Related to JAHLPV010000019.1; note = Acetivibrio sp.
MTIESFCKVAWNLSYNQVRSSITKKDYIQFDIPKKNGVRTITLLPEGSSLYVLQRNFNKYYLNKQGLPICVKGFVRGESYISYLESHIGAKYFVRMDIKDFFPSITSEIIKDTFSHLLSFDTDEEKEKILELISEICTYEGVLPQGVPTSPVISNIVMTRIDQRITKYCQILGITYTRYADDMLFSSNMFDFKTKKWFIKKIKFILASMHFKINYSKLKFSENEISLNGYVVSDTGIRLSRSRLMDIKKAITFSKNNHTLLKTDPTGFLRLVNETSLEYRNLKVYPFNSVFQFTQFLIGYRSYLISFLRYDIDSTFRKKAEKLIRNIEGELEFY

SEQ ID NO: 5109 - protein, 338 aa, unidentified
  source 1..338: note = Related to DWZO01000095.1; note = Candidatus Massiliomicrobiota merdigallinarum
MFDLEQFCQNIFGKGFDEIKEKINKEDYSSFVIPKKRGMRQIIALPKNSELRRMQKLLLDKFFANYSLPIPAKGFAKHESYKNYLMPHMGANYFLRIDISNFFNSIKFEHVEELLKDLFVFMDKDEKSKVIDLIWDIVSYNDSIPQGGVTSPIISNLIFRKLDQRILKYCQLFDIEYTRYADDLLFSSYEFNFMDKKWFLKKIKYILGSRKFRINYRKIKYGYKEISLNGFIVSNRDIRLSRSRLFDIRHIVSYIRNNEDAKRKDKCLLGINNLRFKHYDIEKYPFKSYYRVIQFLCGYRSFIISWIDDCIPNIANQKKLRKLVNEIEKAINILSEYI

SEQ ID NO: 5110 - protein, 343 aa, unidentified
  source 1..343: note = Related to QRWY01000002.1; note = Coprobacillus sp.
MNAKEIFCLKIIGDSNFEILTVLSNKKNEYEKIEIPKKKGYRKIYCLKSNSKIKRYQQNLINNFFSHYPIPVVAKGFVEGENYFSYMKEHVGSNYFLRIDIKDFFESIKYEHFENFMYEMETFKDKNNEGIIKIIWNIISYNDYLVQGAVSSPMISNLIFRRTDQRILKYCQELGIKYTRYADDLLFSSSNFEFKKKKWFLKKINYILRQNKFQMNCSKLKCCDYQISLNGFVISYDNIRLSRKKYHDISQVVWYVNKSDIYEKNFFDELHKLGFYNNKLRTINTYYSLLQYLCGYRSFLIGSYKECEMGDDTKRKIEYIIKKIDMSIIKVISNKYPTYWVTK

SEQ ID NO: 5111 - protein, 348 aa, unidentified
  source 1..348: note = Related to NZ_ACXX02000002.1; note = Ruminiclostridium papyrosolvens
MRIYKEEYFYNSILQCNKQKVLNGLEAKSEAYFKYEIPKANNKKRTISALDKDSLIYELQSNLYKNFFSFQPIPVCVKGFVKGNSYLDFLNAHIYDNYSTYFVRLDIRDFFDSISKETMISTLQEFINIEDVINVIYDICTLEDKLPQGAVTSPLLSNLVLRRIDQRVTLYCQSLGVAYTRYADDLLFSSNEIDFSQQKWFVKKIKYILGSIDLKINYNKIKYGKDLISINGYVVNSNVNLSRKKLYNLTSVLYFFNKNKGKYKKVYKVDNKIFMNTNWLHDLNTYLKNSTSTNLEFVSVHKLQNFLIGYRAYLISCISYSSENKVNQYSSKIKHIESIINKLLELNQ

SEQ ID NO: 5112 - protein, 347 aa, unidentified
  source 1..347: note = Related to NC_016791.1; note = Clostridium sp.
MKIYKEEYFYNSILKHSKETVLKGLGAKSEAYFKFDMPKANNEKRTISALDKDNLIHELQSNLNNNFFSLQPLPICVKGFVKGNSYLDYLNAHIYDNSSTYFVRLDIKDFFDSISKEVLISTLREFVGIEDVINVIYDICTLEEKLPQGAVTSPLLSNLVLRRIDQRITLYCQSLGVTYTRYADDLLFSSNEIDFRLKKWFVKKIKYILCSIDLKINYKKVKYGKGLISINGYVVDNNVNLSRKKLYNLTSVLYFFNKNKGKYKKIYKVDNNIFLNRTWLEDLNTFLTNSTSSKLIFGSIQKLQNFLIGYRAYLISCIGYSSEKKIDQYSSKINHIESILNKLLQLN

SEQ ID NO: 5113 - protein, 346 aa, unidentified
  source 1..346: note = Related to JACQZP010000009.1; note = Acetobacterium woodii
MFIFDENYFYNIVIKCDRNQLLNIIKEKNLQYESFEIPKNDGMRVISAIKKNSQLVRLQKNLNSNLFSKIPLPVCVRGFVSGESYNSYLVEHIGKKFFLRADISAFFDSIKKDTIISMLNEFISVINVIEQISEVVTLDDKLPQGAITSPSVSNLIFRRIDQRITKYCQELNVTYTRYADDMLFSSDKLNFNESTFFYAMIKKILKENGFACNNKKKKIEIDEISLGGFVISNDVHLSRKKLENINKLIYFFRKDKTFEKQKYLVDSLVFQDKHWLNEVNNLKLKENISFKCFSSNNQLIDYLCGYRAFIISIVQANDNNTENIKQLRKKINNIEMIIEAIIKHST

SEQ ID NO: 5114 - protein, 364 aa, unidentified
  source 1..364: note = Related to QXWO01000034.1; note = Lachnospiraceae bacterium
MISVNRYLKLYSKKYFLTRILECSEEELAQAKGEKGIVCIEDRIPKKGGFRSIVSVKPGSSLAKLQKKLYKNYLSQIPVSTAAKGFVKGCSYVNFLEEHVGHSYFLRVDIRDFFDSITKEKLAECLEPFAEKEIADEIMELCTWNGKVPQGFSTSPALSNLVFRRIDQRVRKYCRSYHKEMDRRIFYTRYADDMLFSSAGTLEFDFCKNKNFKRMIAHILHQNGFSCNESKTIYAKGEISLSGYVVSNDVHLSRQKLCNINEVIYQFDQRKSYGSISYSLDKATVNIKNIMCNLNKRKMKKADGTVIQFDSLSDLVYYAAGCRSYLMQIASTEHGDTGYDKQIAKKIRKLEMILDYLSEELGEV

SEQ ID NO: 5115 - protein, 335 aa, unidentified
  source 1..335: note = Related to BLME01000752.1; note = Lachnospiraceae bacterium
MVLYSYEYFLDKILESTQEEVEKAKREKIFVCSEMKLPKQSGFRNIVSVEKDSIMKKLQKNLQKNFLDKLPVCPSAKGFVKGNSYMDFLEEHIGHEYFLRMDIHNFFDSIAEGLLDENLKNFVRDEEEMSPDLEELESGAKGSRIREDIIELCTWQGRVPQGFLTSPSISNLVFRRLDQRIRKYCRAYQKEQKREIFYTRYADDLLFSSQGFDFKRNKNFKRMICHILEDYGFSCNENKTIYQNGQISLTGYVIRKDVHLSRKKLRNINEVLYQFREIIECDERVRSEKIKANLQMILQNLNQKKMKKSNGDPIYFADGNRLIHYVAGYRSFFTL

SEQ ID NO: 5116 - protein, 365 aa, unidentified
  source 1..365: note = Related to CP085988.1; note = Clostridium sp.
MKKIYGWDYYCERILRKSQLFIENSLAEKENSYIVFDIRDRGKERTICQVDKTSGLYQLQNNLNRNLLAKIPLSKAAAGFVRGLSYQDYLRSHCGKKFHMRLDIHHFFDHVTEEQVIKSLEEFVQDEKIRENIGEITTFNGKLPQGAVTSPAVSNIVFRRIDQRILKYCQSVRKVREGKKFYQEDLIYTRYADDMMFSSDYLDFRRDLFVYRMIKHILKENGFSLNVKKTYMAEGEISLSGFVVGGEENGCSVRPSRKRLREINRILAYFDARRELDGCPYEADIKKLRDPRVIDNVNLMFPDGSVARFSNKKSLINYLCGYRAFLITFLKGENGQGSSQRALQGKIRNLEKLIDQCQRWWFHIE

SEQ ID NO: 5117 - protein, 365 aa, unidentified
  source 1..365: note = Related to JAJCIC010000020.1; note = Lacrimispora sp.
MKKIYGWDYYCEKILWKNDAFIASSLAEKEESYSTFTIGDRGKSRVIQQVDQTSGLYQLQNNLNKNLLSRIPLSKAAAGFVKGKSYQDYLRPHCGKRFHLRLDIRHFFDHVTEEQVVESLKDFVQDERIRINIGQITTLNGCLPQGAITSPAMSNIVFRQIDQRILKYCQAVRKVKEGKQVLYEDIVYTRYADDMMFSSEYLDFRKELSFYKMIKHILMDKGFRLNHDKTYMTEGEISMSGFVVGGEAHGCMVRLSRKRMREINRILNYFDKRAKIDGSPYEVDEEKVKDFRVVDKVNALFPIGKIARFSNKKALMNYLCGYRAFLITFLKGENGQALHQRALERKIKNLEQLIDQCQSRWFGMT

SEQ ID NO: 5118 - protein, 372 aa, unidentified
  source 1..372: note = Related to JAHLDN010000040.1; note = Clostridium estertheticum
MKRLYGFEYYAKNILKIDLLNQDEKTKFFNKLETNISESYVKFQIPKKDGMRDICAIDKSSILYTIQKNLNKNFLSKIPLSSVAIGFVKGKSYNDFLAHHIGKKYYMRMDIKDFFGFISEKHIKESLKEFVQESEIIESIVNICMREGELPQGAVTSPTISNIIFRRIDQRIIKYCQSIQNIRIAKKNYNEDIIYTRYADDMLFSSNILDFKENKYFKKMIKNILSNNEFKVNYNKMYYSSDSISLSGFVIEKDVHLSRKKMKNINSILYFFDKRIEYDKTKYNINIDKIEDTQLIKQLNDLNLNTLNGRKINFENIAQFINYLCGYRSFLISFLKMDIRKTDSINLIEKKVKKIEELINKINEINDFRTQN

SEQ ID NO: 5119 - protein, 374 aa, unidentified
  source 1..374: note = Related to CP094680.1; note = Clostridia bacterium UC5.1-1D4
MKIYTEEFLRDGILEIQEQPFEKLLVEKNKWYKCFEISKKDGKREICALSDEESGQKVKRLQKNLLHRFLRKIPIAVCAKGFVKEESYQSFLEPHIGSKYFMRLDIRNFFSSFSEDLIWKGLHEFVENAEALDMICELCTWENTLPQGAVTSPALSNILFRRADQRILKYCQTITERCSKNRYRPEAAGNENTLYYTRYADDMLFSSDFFDFSKEEYFMKMISRILKDYGFELNRDKTVISEDQIVLNGYVVGNAVWLSRRKMRDLKRILYFFRNKNHELYRIDKLKVKKTIESLKELNCFMEKNNSERNNFANSLELINYLAGCRSWLIAILQMRTEDNRTRRNLGKTKVRIEMLLSELSRCEEEKQRWAERG

SEQ ID NO: 5120 - protein, 400 aa, unidentified
  source 1..400: note = Related to SRYA01000068.1; note = Lachnospiraceae bacterium
MYRVRFFHSLSSPGITPIRKFSESACSFPKNIMKIYTLEFLFKILELQPEEFSQILLKKETAYNTFEIPKKNGRRLIHGLDAKDGKPLKKLQQNLYRKVLCKQPTAIPAKGFLKGESYLSFLEPHAGNQFFLRLDIHDFFGSFSEKMIRDNLNSFIEDKEALELVFELCTVSKKLPQGAVTSPALSNIMFARLDQRILKYCQALEQNKREQLHREKESWCNASISYTRYADDMLFSSDFFDFRENLAFLHMISRILGEYGFHLNRQKTMMAEKELSMNGYVVGENIRLSKKKTSELRRILYCLKDQEAETYQLNQELMDDPQKILKKIKQFSSETQKGSRTFSDIHKLIWYLGGCRSWIISVLQTEAKFGKEEKNMVKLIRRIECVLDALQAMTEDPNRR

SEQ ID NO: 5121 - protein, 364 aa, unidentified
  source 1..364: note = Related to QRVX01000041.1; note = Coprococcus sp.
MQIYNYKFLLEKILKTSDEKLHAVLEGIEYAYEETEIPKKNGIRVIHMLRKTPEGRNLTNFQRNLVRRFLQKIPIAIPAKGFVTGESYQNFLMPHAGNHYFLRIDIKDFFDSFSEKLMKSNLKEFIQDREALETVFELCTLNAKLPQGAVTSPILSNIFFRRIDQRILKYCQSIEERYRKENTRSEKQGIRRISYTRYADDMLFSSDFFDFGEHIYFLRMLSKILKENGFEINRSKTMMCKGEIGLNGYVVGDGLRLSRRKLQSVKETLYFFRKQDQELYEVDMRKAEDLKESLKKLNEMRRENNKEAREFRSRQDFIHYLAGCRAWMISVLQTEQLLKKDSKRLEKTIQRLEELLKAVEKEEG

SEQ ID NO: 5122 - protein, 360 aa, unidentified
  source 1..360: note = Related to JAFTWW010000008.1; note = Clostridia bacterium
MFINEYDYFINGVLKTSETTLKNVQKDIKANYTTHKIPKKNGERIIHAIKKDSDLYNLQKNLCLHFLDTIPLPKPVIGFVKDENYVRFLSQHIGKRYFLRLDINSFFDTVNRKMLQKTFKEFFPGSDNTSLSTFIDLCTIDGKLPQGAVTSPVISNIVFRRIDQRILKYCQNFDDVYISKRSNKESITYTRYADDLLFSSDIIDFSKNAFFMGMIISILKDNGFTVNKTKTRCSTNEISFSGFVLGRDVHLSRKKLHELNKVIYFFNKADEHSYKKYRLNKAVFTSGDWLAKINSLELEGPFGQKKSFKTPEELLNYLCGFRSFLLLILRENPNGSPHMEQLDKKIHKLEEIIDLILCHT

SEQ ID NO: 5123 - protein, 372 aa, unidentified
  source 1..372: note = Related to NZ_JACSJW010000001.1; note = Exiguobacterium sp.
MLIDVYAAFALRTRLIFSEGTYSILTIYSGGNNINIYEESYFYKKILGYESISLPLSLTNKLDAYNSFELSINNKVRNINAINSKSDLFAFQKNLLNNFLIYIPLPNCVCGFVKGKNYLDFLKEHLKKDFYLRLDIKDFFPSLKSENIKDVLDEYIIISDINEKTHVLDTIIDIVTLNGSLPQGAVTSPQVSNVVFRRLDIRIRNYCRKFNISYTRYADDMLFSSNDSRLHKDFFVKMISKILKDNCLELNRSKIKKTKEQIVLNGYVVSNRISLSRNKLKKVNTLIYAYENLDGKKKKPKNFNEYLNRITTLEDFFPSLPSNIEGRRNVIVNYLAGYRSYLLSFDKDTYRDICVTYPNKIKKIEFILKELM

SEQ ID NO: 5124 - protein, 342 aa, unidentified
  source 1..342: note = Related to NZ_JACSMD010000001.1; note = Exiguobacterium sp.
MNIYEESFFYKKILEYGLTPPTDITSNKADAYNTFELIINGKKREINAISPKSDLYNIQKSLLDNFLTHIPLPNCVCGFIKGKSYLDFLEAHLKKEYYLRIDIKNFFPSLKAERVKETLSEYIKISNYTKKQEVLDNIVDIVTLNGSLPQGAVTSPQLSNILFRRLDIRIRNYCRKFNVDFTRYADDMLFSSNDDRLHKDFFVKMISKILKDNQLVINRKKLRRGQKKIVLNGYVISNHISLSRNKLKKVNSILYSFENIKGKKLEPKNFLEFYSRLSSNRSIFPDSSLTIEKKYDILFNYLAGYRSYLLSFSKEKHKDTCVDYSGKIKKLEYVLSKLNKWA

SEQ ID NO: 5125 - protein, 320 aa, unidentified
  source 1..320: note = Related to JAEMBY010000004.1; note = Rummeliibacillus suwonensis
MLAIIDKNLAYKSFEMTTNGKVRNIDAIDSKSSLYKLQRNFLDRFLIDIPLPDCVCGFVKGKCYLDFLIPHCGKKYYLRLDIKDFFNSLKVDKIRSVLGEYIQVSDLNKKNLILDDIGVMVTLNDSLPQGAITSPQISNILFRRIDIRIRNYCRKFDVEYTRYADDLLFSSNKSKLHDKFFTKMIFKIIKDFDLVVNRKKIKKSEERLVLNGYVIDKNISLSRAKLKNINTLLYCVEYNSGTKAYPRTIIEFFDRLKNVKTCLRLTSDIKKNKSIVINYFAGYRAFLINFSKVGYKDYCKDYTTKIDRIEKALEIIQEIK

SEQ ID NO: 5126 - protein, 442 aa, unidentified
  source 1..442: note = Related to NZ_VNKI01000001.1; note = Peribacillus simplex
MKIYSEDFFYKGLLGFDSRTVMKNSLIATNSYQSFELEVNGKKRKIDAIKPNTKLYYIQKRLLKNFLVNIPLPNCVCGFVEGKNYLDFLKPHCNKKYYTRLDIKSFFNSIKSENINGILEEYIQINDEEKKQQILNDFCEIVTLNGSLPQGAVTSPQLSNIFFRRIDIRIRNYCRKFNVEYTRYADDMLFSSNEETMHKDFFIKRISKILKDYKLKLNNKKIIQSENSIVLNGYVVSNKISLSRKKLKKINTFINAFNNSDGKKKKFIGTEDYTYRLTKSKNLSFTMTDDLYINKLKIINYLAGFRSYLMTFSKPNNEDYCEDYFDKINNIEKMLEKLTKEGLPYNDKKSNIAIIIDHVKFGRVNGFNIEVRKINKSSHSNRMLYKHLKMNLNDRTLFVKFYPFPLKLDELINDIDKKALKNRILQNNINEIRYALKINEKG

SEQ ID NO: 5127 - protein, 327 aa, Bacillus sp.
  source 1..327: note = Related to NZ_KK366017.1
MDILDEVPTIEDINEYYDTFNIQVNKKQRTINAVKQGSLLRKLQEKLLVNFLENIPLSDCVCGFVKGKNYLDFLIPHCEKKYFLRIDIKDFFNSLKVNLVRDTLSEYIDIKIPDEKENVIDEIITITTLNGSLPQGAVTSPQLSNILMRRIDIRIRKYCEKFKVEYSRYADDMLFSSETSEIHKSFFIGKLKEILKDINLRINSKKVIKTNEKIILNGYVVSNNISLTRKKLKKLNTLLYTFEYNGSIKKYPQTFTEYIRRLQSVNPILIDLSKGDDWSKVQIINYLAGYRAFLLSFNALSIKDYTCDFSNRIKRTEKMLERLSDIK

SEQ ID NO: 5128 - protein, 306 aa, unidentified
  source 1..306: note = Related to NZ_CP073315.1; note = Psychrobacillus sp.
MVNKKVRKINAIKTNSVLHNLQKKISNNFLDNIPLADCVCGFVKGKNYLDFLLPHCGSKFYLKVDIKDFFNSLKESLVRDTLSEYVDIKNREEKDRVLKELIYITTLNGSVPLGAITSPQLSNLLLRRIDLRIKKYCEKFNVIYTRYADDMLFSSNNQEVAKPFFLGRLKDILIDFELKINSKKTIIAENKIILNGYVISSRVTLTRNKMKKLNTLLYTFEYKSGVKRYPRTFNEFLQRLKTVNEELFDLSKSIPETRIQIINYLAGYRAFLLSFNKSSIKDYTCDFSKKIKRTEKMLDILSDIRY

SEQ ID NO: 5129 - protein, 327 aa, unidentified
  source 1..327: note = Related to NZ_CP091777.1; note = Lysinibacillus sp.
MNIYSGKSFFKEVFEMKYEDVKKVTDSNIEENYNIVKIPKTKGHREIYCIDDSSELYILQKNILMNFLDDIPISENAFGFVKGRSYIDFLYTHVYKNYKNIYYLKLDLKDFFSSIKSFHIERTLEKHVHTNSSKISKEIIDNIVKLTTVDNKLPQGAVTSPSLSNIVFRFTDIRIARYCEKFGIRYSRYADDMIFSSDRKVIHAPFFIKTIKKILNESNFYVNNRKTKFSIGSLNLNGFRITDKINLTRKKRAKLNTCLYICNNTKKKHVLTKLNLSGFNFSDFEDLANYLNGTRSFLIMIARSSNNNIVINELIKEIEVNINKFLQ

SEQ ID NO: 5130 - protein, 337 aa, Bacillus sp.
  source 1..337: note = Related to PVQU01000010.1; note = Bacillus pumilus
MIIYSKEFFDNNILKISNEIDYINAIQTKESSYTHKSILKKNRLRNIEVIDRDSLLAKMQINLKDNFLNIIPIPHFVYGFVKGKSYKDYLIPHINNMSKNKYYIRLDIGNFFDSVTVELIKNALSEYLSLNDLQEKDQIILNIADLVTLDGKLPQGAITSPVISNIVFRRLDLRIKKYCDQLNITYTRYADDMLFSSYDNILLKNNLINLVRAVLNDYGFELNFDKTIRTKNFISLNGFVVSDNLSLSRKKLIEIKRILFILEKNKKNKNSLKILEEINSFGKYKKRNKFTSEEALHDYLAGYRSFLISLLPDNDDLWKEKCISTINRIEKAISVSF

SEQ ID NO: 5131 - protein, 347 aa, unidentified
  source 1..347: note = Related to JAARWS010000006.1; note = Listeria booriae
MQIFDKGFFYEKLIAKSNLHDLNNVRDVYYRKFNIVINNKKRSIATVLEGTALYKLQFRLKNNYLDKLPLPDCVIGYRKGKSYRDFLVPHVKLDKNDRFFVRLDIKSFFDSINEDVIKEALQDYVKIAGEEDRNRVISDIIDICTLEGKLPQGALTSPALSNICFKRLDLRIRSYCRKLGYTYTRYVDDLLFSSTDLSLIQPKFIQMIKLILSDYGMKLNHRKIIQTKNLISLNGFVISDEIRISKSKMNHLLSLLFCIEQNLKSRNLAELLEKLNQIRQHDGKRDFLTVDDVMEFLSGSRAYLIAWNSSDSSAWKVKCTKFILRIERQLVSLDKKHGQELREVNFY

SEQ ID NO: 5132 - protein, 322 aa, unidentified
  source 1..322: note = Related to JAAVIG010000001.1; note = Oscillospiraceae bacterium
MDSFKILNKETWLQTLNISEEELMKVAELKSLFYKKYRKEKPSGYRTIYIINKDSVLYSLQSKIQKKIFRNIFLPECVYGFRENCSYIDFLTPHISSKNKFYLRLDIKDFFESISVEYIKDFFQYYIDDKISNEEKTFIVNSIIDVTTLNGKFIQGAVTSPSISNFAFREIDIRILSYCRKLNVRYTRYADDMLFSSENNYLNSKHFIIAIQAIINDLGYTLNHAKTLKYKNEISLNGYVIGADIRLSRRKLHKINELIFQLSKSDFYGFENNIEKYHIKNQLAGYRSFLIQVNRHVVDLPYRRHLEERILTIEKLIIKHFT

SEQ ID NO: 5133 - protein, 300 aa, unidentified
  source 1..300: note = Related to JAFXES010000214.1; note = Oscillospiraceae bacterium
CLSQKTDCYRVYSKQKKDGTRTIHAIKSDSGLYVLQHRMQQKFLNNIYLPDTVYGFREHCSYIDFLIPHISEEKDRCFLRLDIKDFFGSIRIDDLKEALKYYVSDEIENADQEKILDKMIEIVTVDQKVVQGAVTSPMLSNLVFRQLDIRIERYCSRFNLKYTRYADDMLFSGRTSYIHSRKFMAAIAAIIESKGFSLNYSKTLRAEQEISLNGFVIGSELRVSRKKLHKLNEIMHRLNSREFDKFSSDYELYHVRNQLAGYRSFLLQVLHTDESEARKYKIQIKIDRIEALMRKYCKID

SEQ ID NO: 5134 - protein, 325 aa, unidentified
  source 1..325: note = Related to JAFQWA010000012.1; note = Clostridia bacterium
MKSWQIHNYDSLISDILETSPEALEEAFKNVDKYYERLNLLKSDKKSYRTIYRLKESPVSIMQKNLLNRFFSNIYFPSNVFGFRKGCSYFDYLNYHQMIGDGTYYLRLDINSFFDNITIENFEDSITYYISDDCSDEEKQKIIKTLLKITTYKNHFVQGSITAPVISNIVFRELDIRIEKYCFTMGIKYSRYADDLLFSSPSSFLHSDRFIRMIINILNDKGFSINHQKTLKQVGQLVINGYVVDSAVHLSRNKLRTINKILHTIEKKKSKVLLTSWGAPNYRVLNYLSGYRSYLINVMKYCDEEKKNKLGKTLARIEDIINRYY

SEQ ID NO: 5135 - protein, 329 aa, unidentified
  source 1..329: note = Related to JAFQYD010000077.1; note = Methanobrevibacter sp.
MNNITIKDKTAFLDLIMENPEDQDKFDREKATTYRLFKIKKHNGDRHIYAIKPTSIICKYQQNLYKNFLTKLLFPECVCGFRKDRSYFDFLVPHISKQNKRYYLRLDISDFFESIQLSDVKDCFQHYLNDDMDEEVKDDICNYFIKIVSYKGKIVQGAVTSPAISNLVFRSLDIRITKYCQPFGITYTRYADDLLFSCNHKKIFSYSFQKCIQAILSDKGFTLNIDKTLKFKDEISLNGYVIGESIRLSRKKVTRLNKILFELSQSNFDELKSERERYILINTLAGYRAFFINSMRYMIDPVQTKKMERKIQQTEKAIDKIRALPIQQI

SEQ ID NO: 5136 - protein, 324 aa, unidentified
  source 1..324: note = Related to JAFYGI010000008.1; note = Firmicutes bacterium
MIGFRITSKSQFFDEIVEISEEKMALALNNKKSAYHCYKKAKKEGFRIIYAIKKNNLIYELQNKLKNSFFMNLLFPECVCGFRKRKSYYDFLIPHISSNEPRYYLRLDISDFFGSIDVDDIEESLNYYIDDSISSEEKQLIINNIIGITTIDDKIIQGALTSPILSNLVFRSLDIRIEKYCKMLNITYTRYADDMLFSSDSSYIHNYRFQNMIKTIISEKGFNLNTKKTLKYKNEISLNGYVVGNSIRLSRKKLSQLNNIIYEMGKKQFKGFKSNKEKYTIKNKLAGYRAFLIQSIPYINRNNLVQISKKITKIENLITKYCAD

SEQ ID NO: 5137 - protein, 326 aa, unidentified
  source 1..326: note = Related to NZ_WQNQ01000008.1; note = Ruminococcus bromii
MNSFRIETKEEFFKILDCDEDTFTSAIKDKEKAYFKYKLQKKIGSRYIYGLVKDNLIYTLQKKINREIFKNILFPDCVYGFCKRRSYFDFLVSHISNNQRKHYLRLDISDFFDSIEIDDIYQCLSYYISNDISGDDRDYILQLIVDITTLNNHAIQGAITSPAISNIIFRSLDIRIEKYCEKIGVHYTRYADDMLFSSESSYIHSYKFTNAIQAIISDKGFYLNRKKTLKCENEISLNGYVVGTNIRLSRKKYKSINKIIYTLTTSSFTGFKNNYHQYITRNKLAGYRSFLIQYSRYIQDENQNKKIQKKIETIQNLILKYCVSSI

SEQ ID NO: 5138 - protein, 349 aa, unidentified
  source 1..349: note = Related to FRCT01000004.1; note = Ruminococcus flavefaciens
MDSFKIANKEEFIELIDVSEDELKEILKNKQNSYHKCFVNKKKRDSIRIIFALDQKSNLFKIQRALQRKFFCNFYFPSNVYGFIKQRNYIDYLEPHCSRNGTRNFLRLDIKDFFGTIDINHIKECLKYYIADTCDENEKKYIIDSIAEIVTYENKLIQGAITSPVISNLVFRKLDIRIERFCEKNNVIYTRYADDMLFSGIDFDVHKRTFINMIATIIKDYGFSLNYKKTIKMHEELSINGYVLGRDIKISRKKYESVNCLLYYINSKINKIPISRSFKYQLINILAGYRSLFIQVLRYVHDSHNKEVIQKKIAEIEKGINKISQFKENNIGANKDYEDKILEEICSKK

SEQ ID NO: 5139 - protein, 364 aa, unidentified
  source 1..364: note = Related to NVVX01000015.1; note = Alkaliphilus sp.
MLHRASKQGDDTLKVWRVDNYNDYFSNIVKVPEKEFKSKIADNEKKLFYSEYINKTKKNGLRKIYCVTENSDLYKIQKNIKNNFLDNIMLSDSSYGFRKGRSYYDFLASHKSFYSGKYFLRLDIRDFFGSIEYSLIEDVVSYYFVVGENLTSSQKKELLQNTLSSMTYENKVPQGAITSPTLSNIVFRQLDLRIEKFCQNVDAIYTRYADDLLFSSYNRNLHSAKFINFIRSILISKGFHINHSKTIRTKNLISLNGFVISENDIHLSRKKLASLSRILFCLETPKWINSKASFVNLNMKLKTEGDKHLFEGKYALLNFLAGFRAFIIPIVRSMDDSKLRKKQQKYIVRIEKTIEKIEKLPPKK

SEQ ID NO: 5140 - protein, 349 aa, unidentified
  source 1..349: note = Related to CP013683.1; note = Clostridium botulinum
MKVWKIENYDDYFNFIVKVSEDNINELLSQDEKKKYYSGYIEIKKKIGKRKIYCVDKDSKLFKLQKNIKSNFLDNIMLSDACYGFRKGYSYYDFLSPHKDFYSKKYFLRIDIKEFFNCIDYSIIEDVIKHYFVVGDNLTKSQKKKLIQYTLKAVTYRKKVIQGAITSPVLSNIIFRQLDLRIEKYCKYIDVIYTRYADDLLFSSYNRFLHSRAFINIISRILNSKGFDINYSKIIRARNSDKNSVSINGYVINDEIHLSRTKLKSLNRVLFYLENTKWKNCKNDFESLNKKMKAENDIHNFSGKYELVNFLTGYRAFIISIVKGTDDIILKQKYQKYIERIELLVKKLV

SEQ ID NO: 5141 - protein, 346 aa, unidentified
  source 1..346: note = Related to MNRT01000036.1; note = Clostridium sp.
MKRWRIDNYRDFFNKILKVEEDELIALLENKNNVYSSYKIKKKKGHRTIYYLKDNLDLAKIQGNLIKNFLSNIMLSESCYGFRCNLNYIDFLERHTTLSNDRYFLRLDISNFFESISMELLIDVLSYYIEDSEYVTSDESNKIVYYIKEIVTFDDKLVQGIATSPIISNIVFRQLDIRIEKYCRKLGVEYSRYADDLLFSSEIKSKIHGDFFIGKIAKILSSKSFNLNHKKTIKADKELCINGYVVGKNIRISRKKMQTISRVLFFLNSVNIKKNLNFLDELNHKLKNEMKDNRIYFLNKIQLINYLSGNRAYLISILRYSDEYFGKRIIKKINNIEKLILELDES

SEQ ID NO: 5142 - protein, 347 aa, unidentified
  source 1..347: note = Related to JAFZQH010000027.1; note = Lachnospiraceae bacterium
MKIAKINNREQLYKGVLEYEKRIIDTALTDSAKKQYYGKRINIPKKGGSRGIYCVDSNTFLYEVQKSFAKNFLNNIPNSDAAHGFVKGKNYYSFLNAHVYPYSRISFLRLDIKDFFESITSEMVRNSLDYYVSNDDPRMHDEVLNIMTDIVCYEGRLIQGSPTSPAISNIVFRPVDIRIERYCMSQGVVYSRYADDLLFSSISGTQLSERFISGIKAILKDNHFRLNLQKTIRSVDYISLKGFVIEGQIRLSRKKTKSIRQVLYFLEKNRYENTNAWMSSFKEEMEGLGNDSAMDINNSYSLKNYLAGMRAFIISSIKESGDIYYKKRAAGIISRIEKQIDEIENKG

SEQ ID NO: 5143 - protein, 351 aa, unidentified
  source 1..351: note = Related to NZ_VTVE01000001.1; note = Pseudobutyrivibrio xylanivorans
MGDNNGMNGWNIQDKEDFYNRIGVKTDLELKSYVSFLAKNKYYKQSVEIPKKNGTRLIYNIDKTSELYRIHNNLKKQYLDRIYISDAAYGFVKKRSYYDYLVPHLNKYKNRHYMRIDISSFFDSIKSEHIENAFGFILKECKDRDYIIERLKEIFLYNGTLAQGTPIAPAVSNIVFRELDIRIEKYCNKRKVVYTRYADDLLFSSDDNTVMRKDFYRGIRKILGSRGFNINEDKTINMSDSIVMNGIVVGKSIHLSRKKLKPIRTMLFALKLVEKEKDIEKCLKCINNTFQKAKIDKTFNSAIDVRFYLCGYRSYLIQILKYCEDINIENRLKKIINSIESYLNGPKKSFL

SEQ ID NO: 5144 - protein, 335 aa, unidentified
  source 1..335: note = Related to NZ_KE383885.1; note = Hugenholtzia roseola
MWGKKTFFEPNPFFKRRLQWLYRQLLPLYEPPACAFAYIKGRNYAQYRAVHQKNHYIYAIDLKSFFNSITTPQVNNALQSFCSPAVAGYLADALTAEGVLPIGFPTSPLISNIVFKNLDEKIVEFANKEGLSYSRYADDILISSNKKITTQNLNAFVYLIEKNGFKINFKKFKKVDKNTNLSTLSLKERRFLNLLLHQWQKKGYMDTNLWFLAAHRKSYAKPQDALSNFLRAKIFPFKDDFPKLWAQFERISKQYPYQTQNQMEENSIPATEKTQIMKEQPKSPTQYAQAPEPVVVSATTNATKLTFSASRQELEQYRRTPVSGSIDNFFKNHCQ

SEQ ID NO: 5145 - protein, 502 aa, unidentified
  source 1..502: note = Related to QNFV01000088.1; note = Epsilonproteobacteria bacterium
MKKLNSYKVKKLIDRYMTSSEELGSMLLRASNLSRHILNTIDMNNTDKATHKFLSNYKEEIDDIQEHNSYSLSKFSSSKLGLSNRGILSTSMSLAGSYSKWDARHWVSYREDDNRKTQLYKEGSEILSPSPSGIEFDFNNDVFMGEVIGNINQLMGVIGKMSNSVIFRHRFVDGRRISMINPKLEKSLRDIIEAEFKGYAKNFYKMYNSFHLNIGSNREHVTGFIKGKSYIDHARAHLGCRSAVSIDISKFYDNISLLNIINNNLFYNSLLSFFKQETGLPFEASSFKEGYHYDLLSKLFGLMNVQFVGLMTFLTHNGLLPTGAHYSPNISNLILSNVDLHMVDEIKNINSNLKYTRYADDICISSDKDKDENGEYYLNMDFIKRLETIINDHGFHLNYDKTMIMGASDRKKIAGIILDHTANPPRLSIGSRKKLELQERFNGKDWKELTTSDIGTINWVKTINVNQYNFVCSGITGERLMPIPRGCERDPITSLVVDAVPF

SEQ ID NO: 5146 - protein, 431 aa, unidentified
  source 1..431: note = Related to JAGNEA010000001.1; note = Candidatus Woesebacteria bacterium
MKRLALKRTRYKKLRKQLCISRLPKNNNDLSAVSFLALYIDFLKLYRSTLILCCSIVYSDSIAIEISKKKKNKDFFNQHDIALFDSLYLSIISDYDLYKKDLNEKNRAVVVARIDRNSKLLMPVFNSLFELFGSVSNTFIFRNVVINNRQLSIISDSIDAGLTYHIKKNNKAISLFFSRYYSIFVNHYSLNDNVYGFIKNKSCVDNANYHLDNSPASLINIDINKFFNNCTVVKCLKNNVFTDTIDLFDASVDTKIAFSFGIISLLGYCTHNSVFPTGASFTPVLSNIMLIPVDVAIKSYLSETFGNNVCNIRYSRYVDDISISSDRAKINKSYVLTIDTIKCIESILNNYGFYVKYSKTSIAGPGDKKSVNNIILDNNNHKLSIGTDKKLKYKTIFSKLFADEEHDYVVANLPYIKDINKDQYDYITEQK

SEQ ID NO: 5147 - protein, 325 aa, unidentified
  source 1..325: note = Related to LT907983.1; note = Cytophagales bacterium TFI 002
MDYNTVITLLGHDNESWQNLIANGIRYSVFQLPKANKKLRLIEAPQGELKRTQKYLNNILYAEYHPQSPDCVHGFIRMKAAPRNILSNARTHLGKKYLINIDLKDFYHQITTERTTDLLWKRFPNLLPNEVDELNKIVVKDDRLPMGAPTSSVLSNMAFQECDMALMTYCDQHKIVYTRYVDDLSFSSNKQINSAILEGIYTIIKLNGFSENPKKVKHYGESDVKIITGIAMQGLHWHVSDDMKSRLEKNMSEYRKLRKLINNLKFLGVEAKAKTKLKTLKRAIAGQLEFVKQIEGIDSDFYRSMKKIWKQSDADTVNVDLSVYI

SEQ ID NO: 5148 - protein, 330 aa, unidentified
  source 1..330: note = Related to NC_015512.1; note = Haliscomenobacter hydrossis
MHALFKNEPDQLAQSLNWPDDYQDVIKKQNYHQFSMPKKDGTLRAITAPGNKLKFLQKTLSHAFQLTYLNKIPDCVHGYVPGDIHPEVGTRHILSNAQVHFGAKYLLNLDIDDFFPNLDSLRILDALRYWYPEMPQATQELLVGICCYNNQLPMGAPSSPVLSNMCVHQMDLALLTLCAQHQVTYSRYVDDMSFSSSSDNLLALEPALIEALQSFGFTINQAKRMHFGPEGPKIVTGLIMDETDITVNDTFLDNLNECIKEYSQLRWLSRQLEMDKKWLQSKVRFAAQSIEGQLAFLSQIQGADDAVYQKYHRKFDKAQSMRPPNYDFYF

SEQ ID NO: 5149 - protein, 338 aa, unidentified
  source 1..338: note = Related to JADJTC010000010.1; note = Saprospiraceae bacterium
MNILNLQNASNRVQFCKVLAISEDALKSALANHKYYTFKVTKKNGKLRKIEDPNDERQYVQQRLSFELYPLYKTVLPPYVHGYIPTAISQNGSRSILSNAEAHLNCNFMVNLDLLDFFHQITISKIRGCLSKVYKIRSLNIIDLIVKIACYEGRLPMGSPCSPVLSNMIVIDLDGALFDYCQAQNITYTRYVDDLSFSSKLEITGVQIETLKKIILNEGFLLNEEKFRIFHQNDPKKVTGLVVHQGKLDVSDDYLNSLSRNIKKLKRIKRTYQHMRMLHPELKTNLQSRYRLIKSSVAGQLSFVQRILQPEDERCLALAEEFDDARTSSEVVDLHLYF

SEQ ID NO: 5150 - protein, 563 aa, unidentified
  source 1..563: note = Related to JAIUNV010000007.1; note = Bacteroidetes bacterium
MYSKKVKTPSDFLLLSNELENIRDFSGLAVLLGVNQDYLLMNILPSYTCFEIKKKSTLRKVYYPEYYVSEIQRTLNLYLTASYLTNYYLPTQLPVHSYIPRITLTEQSDSDICRNNKSNAEVHFGSERILKLDLANFFPSIKSIHVRDGLRRLLPRLPQYCIEWLVHLTTFEGFLPAGAPTSPTISNIILYDFDKFANSINGIKYSRYGDDLTFSAIDGRINLKQVERDVKIELEKWQFQIQEAKTFFLRKGQRLRITGVVLNEKLNISREYLKWLRAVVYSCESIGIEKAATKYGDRYFEKMLNSTRKKYRYIGVYVDKGLIKKCITNKELVSFLKASLLGHISYVSSVRGKDDVYVQNLRNRFINCLREEGLEKKEIEFEAKSFKENENLVYITNATSQSVVYYAYVFLKSAKLSDDDINRLRKHFSYKDSSNIDFKKIKENFINQSIYFLELYNYMFYRDRFKLFYESLSDDEWNQLFNRDQNFANKRTYPRWIYHLDFNCSNIRNNYNEEGVFHPNSGVFFEEEKANQVYNAYLLEKNFLDQLGMRTCLICQSNISEFT

SEQ ID NO: 5151 - protein, 326 aa, unidentified
  source 1..326: note = Related to JAGOCA010000016.1; note = Saprospiraceae bacterium
MKNKSAFYHFAKSFNLEQEDLYLVYSAPTYHTFEIPKRNGDLRTIYAPAPNLKKIQRKIAEKLSKYYSESLPASVMGFVKTAAWKKKRDIVSNARKHIKSKHLINIDIENFFPSIKTDHVARVLNEIIKLDNEGVQIIRQVLMKDDSLPPGSPASPILSNLVFKPIDLAIEHFCKGQKIIYTRYVDDLTFSSKKEITKTQICTIADILTKYNFRVNEDKTVIYKKNDIKEITGIAIVDKKLTLCESTIEEIKNNILYYKEWKQQILQQYGPNESVRKKISHMQRSIKGQLNFAKRIDGEKGEKYNELKELYEHSLDEKEFAFKVYI

SEQ ID NO: 5152 - protein, 399 aa, unidentified
  source 1..399: note = Related to JAJTGA010000020.1; note = Opitutaceae bacterium
MTNAPDSAPLTTPSGKKPPGLSVTLTVERHRLLHVILDPAAWRMFREALQTRGAWSRRGRILKATLVAEDFRGWSPRPYLPPDSPDWSETVMELHPPTEPAAFERLIATAMEHFRILEQEDAAAFDRSLRNTWEKVRRAAMAAHALAPSQLPRPFPVYAARLAAIPKKRPGEFRVIAVPDRAQLAAGRSLLPYLHSRLDPALPIHGFVPGRNPVTNAQPHRGFGWSLTMDLADFFDHVTADKLVDAGLPRSIARLITDRDGVARQGYATSPAASNLAFQTVDHRILALLAAECPGAVYTRYADDLTISANDREALIRVQRNLEALIASAGFKVSARKTHVLAARAGRRVVTGVAVGETDLRATRSARRRLRAAEHADNRMQARGLREWSLLKAPRDKLP

SEQ ID NO: 5153 - protein, 381 aa, unidentified
  source 1..381: note = Related to JAJTGA010000020.1; note = Opitutaceae bacterium
MNDYITLDLKGRSENGRSRQVHLTGEGLREFGEKLEKNGLQTEAPLIVRALFLRGEAGNLDSRPCFNGNGWDGNMLEIHLAPGIGSKVAEAGVEAYLDVTFDRKADGLFDRKWRAEMAKVRGNFPGFPGGGVAPFPAFDAPLVRIPKRRPGAFRLIATPTADQKRAARWLLPTLDKWIDYRLPIHGFVHGRNPVTNAKVHIGFRFSLGFDLEDFFDHVTVKKLVAAGLPRSLAVAVTDGAGIARQGYPTSPTAANIAFQEVDRALLRTVAQLDQGVAYSRYADDLTFSADSWSVLRRLRGLVEELVPRYGFRISHRKTTSWSAFAGRRMITGVAVGKDGVCAPREIRRRLRAARHQGRAPQASGLAEWNRVREPHVFRRSD

SEQ ID NO: 5154 - protein, 313 aa, unidentified
  source 1..313: note = Related to SSEH01000250.1; note = Hyphomicrobiaceae bacterium
MAARFARGPQGLQSDPSHLKTTGSHTSNRAAICGLVDVFIVEFGMQVLRIPKGNGKVRVVYAPSEEEKAELRSLLPALVKIAKRRCNLEVVHGFMPGRSPLTNALPHVGYQYTVNMDLQDFFDTVLITHVMHLIPPQILAKVMRYGAARQGLPTSPLVANIAAAQLDWDLITALPEDVVYTRYADDLSFSFDDQKLTKELPLLVKKMVEDHGFAVNTAKTKVQWAGAGRRIITGIAVDHSRVFATREVRRKLRAAHHQNNKGSKAGLTEWCRLKLPALYLAEQTRRGKKSKSHHRAEEPVVEKSNKERRSLRL

SEQ ID NO: 5155 - protein, 430 aa, unidentified
  source 1..430: note = Related to AP009389.1; note = Pelotomaculum thermopropionicum
MKILKIPKKNGKYRTIYAPDAEEKRALRGIVGILNQKCQHVCDPAAVHGFMPLKSPVTNALAHVGRKYTVSFDLEDFFDTVTPEKASKCLTKEQKELVFVDGAARQGLPTSPAVANLAATDMDRAILKWIEKSGKSVVYTRYADDLAFSFDDPELIPVIQKKVPEIIRRSGFRVNTDKTTVQAAVAGRRIICGVAVDDEGVHPTREVKRRLRAAKHQGNELEAAGLEEWCKLKVPSGKRQKARETTEGLDELRKHWKLRKIDMAKAVSRKVIPEKDLGDNCYITNDPAYFMGMSTFTTGWKSCMRMDGGEYRKGVMAWLALPGTSVAVFLSDRTMNIAGVERRRMRARCLVHKLENGQLVYDRLYGNPDDTPVLVKKLEEAGIRPIREFAGKGIYVEGDVPASMAMPYCDNLWEEKINIKSGKRVVRFYV

SEQ ID NO: 5156 - protein, 431 aa, unidentified
  source 1..431: note = Related to FNBS01000081.1; note = Thermoanaerobacter thermohydrosulfuricus
MKIVQIPKRNGEYRTIYVPDKKEKQKFKNLLGELNRKAKNILSNAVHGFVPGRSPVTNALAHVGYEYTISFDLEDFFDTVTPEKVSKYLTKEEKETVFVDGAARQGLPTSPVVANLAAADMDKAILKWIKKTQKNIVYTRYADDLTLSFNEPELIPVIKDKIPEIVKRNGFKINEKKTRVQAAIAGRRIICGIAVDKNGIYPTREVKRRLRAALHQGKIRQAKGLEEWMKLKLPNSEKKEEKIKRIEEAKVLIELWGIKKIDVEKALREKAIPEMDLGDNCYITNDPAYIFGMSYFTTGWRSCMAPDGGYGKGVVTWMMLSGTSVAVFLSDRKKATGSVERRVMRARCLVHRLRTGELVYDRLYGNPQDIEFLKKKLEEHGIKSAREMPKDSKLYVVGNVSRSLPQPYYDTLRKEKVVLKESQKKAYRFFI

SEQ ID NO: 5157 - protein, 305 aa, unidentified
  source 1..305: note = Related to RFGF01000109.1; note = Nitrospirae bacterium
MRRILIPKSHRTWRTIYVPGPAEKARLRGLVPVLHRLERSAAERHGTIHVAHGFVPHRSPVTCALAHLNCAWTLTADLADWFDHIHESQIAHGIELGGGDPNVAAQLCVDGAPQQGLPTSPIAANLAAIPMDRWILDRLPPDAVYTRYADDLQLSLRTAPHDPQAIVGILEEAASHMGWQIAPHKTRIYDARRGHRIIVGIAVGSRSIAIPRTTRRRLRAARHQRPQHPHTQGLEEWCRLLLPRALRPRRRLRFEQATDTPPAGLSSLSTPSSRISHAGTIERSQQHKPGLRRVFRFSVRNQSSP

SEQ ID NO: 5158 - protein, 323 aa, Vibrio sp.
  source 1..323: note = Related to CP033144.1; note = Vibrio owensii
MNNDYSNTQGGSVNDNQWKEDLDGIWSITLTPKLSNIYNVLAYGEWLSDPNKIEALSVKKIHVDTGGKKRLIYSPNMDSKGFYQAILPKLNETFEKMEERAVAYGFVPKRSCVDQALQHVNYAYTISLDIKDFFDHVKIKHVKGLIDEELIPYLFIDGAARQGLPTSPMVSNIAFNAIDLEIITFLEERMGFTTSKPKAERDMFFWDLDLDFDQEQKRYYAYTRYADDLSVSLDQYEDIARVINGVQRILLRHGFELNARKTKILDSNNGRRVICGVGVDEETVYPTRKTLKKLRAAKHQKNLSSMFGHRAWIYSIDKKKPVR

SEQ ID NO: 5159 - protein, 316 aa, Vibrio parahaemolyticus
  source 1..316: note = Related to DADYEG010000002.1
MNNDYSNNEGSSVNENQWEDNSNGVWSITLTPKLSKIYADVVWGEWLSEPGMIEVLNVRKIHVDTGGKKRQVYSPDMNSKVFYQALLPNLNETFEKMEERAVAFGFVPKRSCVDQALQHRNYAYTISLDIKDFFDHVKPKHVKGLIDEELIPYLFIDGAARQGLPTSPMVSNIAFNAIDREIIAFLEDKITLIADKPKYGGSSWGGEEKKRYYTYTRYADDLSVSLDSYDDIARVINGVQRILLRHGFDLNARKTKILDAKNGRRVICGVGVDVETVYPTRKTLKKLRAARHQKNLSSVFGHRAWIYSIDKKKPVR

SEQ ID NO: 5160 - protein, 316 aa, Vibrio sp.
  source 1..316: note = Related to NZ_CP045071.1; note = Vibrio harveyi
MNNVYSNYEGCGVNNNQWKEDQNGVYSITLAPKLSEIYADAVKDEWFFEPSKSDTLSVKKINVDTGGKIRKIYSPDMQSKVFYQALLPSLNEAFDKIEERTVSFGFVPKRGCVDQALLHLNYAYTISLDIKDFFEHVKIKHVKGLIDEELIPYLFIDGAARQGLPTSPMVSNIAFNAIDRQIVTFLEDKIGRVASRPKDEFFFDLEDDLKCYCSYTRYADDLSISLSLYEDVARVINGVQRILLRHGFELNARKTKILDAKNGHRVICGVGVDEETVYPTRKTLKKLRAARHQKNLSSIFGHRAWIYSIDKKKPVR

SEQ ID NO: 5161 - protein, 304 aa, Vibrio sp.
  source 1..304: note = Related to ABDZOA010000009.1; note = Vibrio vulnificus
MNDNQWKEEINGVWSITLTPKLSKIYADAVWGEWLSGDGKSEALTIKKICVDTGGKKRQIYSPDTHSKLFYQALLPNLNETFEKMEERAVAFGFVPKRSCVDQALQHMNYAYTISLDIKDFFDHVKPKHVKGLIDEELIPYLFIDGAARQGLPTSPMVSNIAFNTIDREIVKYIEGKIGLSNTIKQTDDFFIWGDENDWKYAYTRYADDLSISLNDFNEIPQVINGVQRILLRHGFELNARKTKILDAKNGRRVICGVGVDVETVYPTRKTLKKLRAARHQKNLSSVFGHRAWIYSIDKKKPVR

SEQ ID NO: 5162 - protein, 644 aa, Vibrio parahaemolyticus
  source 1..644: note = Related to DAETXO010000001.1
MHELRINKGNGKFRSVVAVGKEERYFYRELLENQLEQTLTGHLKENGLFNVVHGRKYSNTVANAIPHQRYQYTLSVDLKSCFDSMTRDVAAKNGFPDLPEDCFVAISTSSEPVAAQGLPTSTVICNLLLVKTDIKILHLLHKTFKGEFAYTRYIDDLTISFNSFNEKKYTTLLSNLVYLVSQSGFEVNMSKVELQRALDGRRRVCGLAVDEGGVYLPRKLKRTIRALEHKESMNLFPSKQTRTLRGLLAYGELKLPNKLGAQQEDTESLIKSIVVSGEWGKKWLCYLIELSSKQSKNPGQEIFCFRVPHTLDDGSIRQLVEAYTIQESSIENDRKTLDINQVSSTEQPDIRTLSSYDIIATHHEVEVLGCTDAQSSKLKQAYFEKRVNFTSQDRKILGFLERREPIPRSLREVITIPPNTKKLDALVCAITGLFDSETILNICKREIWLSGALENVLNDEDRLLFLSQHPYAYRYMLHFVNERDLVKVLESNFYSAKHIFPHIKTAQMKRALGNTRELYRKLVSTNSYGAMYLVPPEWFKKERFISLCSEYFNLTSVMLYEVYSRSVAFYYLRERLYDSNFECASLDDVIRQCKAHTFRVVESEFPAAKNLDQNEICTVELRVNKLVTEIQSRWPWKFVIKNMG

SEQ ID NO: 5163 - protein, 387 aa, unidentified
  source 1..387: note = Related to NZ_LEKN01000013.1; note = Ursidibacter maritimus
MKDRIEKIITISKNNGKFRKVFVPTPSYAEQLNKNLKYLNEILLERDKCKVNHAFLTGRNSVTNAMQHIGYRYCLQLDIEDFFDSITSESVKGLINDEVINLVFIDGFLKQGLPTSPMISNIAFIPVDQAILNFVKNLDENIVYTRYADDLTFSFNDIRCKGVIHKRIIKILDEFGFKINNKKTKFQKAVNGNFIITGISVNEKGVFSTRKTKKKLRALEHQYQKNIKFIINIIEDISFMEKDILKLVNVLKLLNTYYKNKDNILNWNLKFLDGFLNEACNIFVSFSGNIYISDVKEIGRYHKYLKYNSEYNHIINNHTDFKWIKYRKYKIKLEDIIKKCDECRYNFHSVIGFRGWASCALPKKEKKDAKVNQSSSNIFFDDDNIPF

SEQ ID NO: 5164 - protein, 387 aa, unidentified
  source 1..387: note = Related to WIUM01000095.1; note = Glaesserella parasuis
MENRIAKVITISKHNGKFRKVFVPKSSYTEQLNKKRKYLNKILLERDECKVNHAFLAERNSVTNAMQHIGYRYCLQLDIEDFFDSITSESVKDIIDDKVCDLVFIDGILRQGLPTSPIVSNIAFIPVDQAILKFVKKLDENIVYTRYADDLTFSFNDIKFKDVIYKRVIKILDAFGFKINNKKTKFQKSVNGNIIITGVAVNGKGVFPTRKTKKKLRAIEHQYQANIKFLIKIIEEISVRENDESKLVNIFKLLNTYYKNKDDILSWDWEKLNFLLNDIEAIFKIFSSDIYISDTKELTKYQMHYIHNSIYYSNDSECFNRNNYTDFKWLKYRKYKIKSEDIINKCNECRYNFHSLIGFRGWANCPLPKKREKGNKNSSNFDNDIPY

SEQ ID NO: 5165 - protein, 316 aa, unidentified
  source 1..316: note = Related to DMMV01000106.1; note = Gammaproteobacteria bacterium
MDDFTEYHFEGSSWITPWYFPCWNSEWEWEYDDKIYRTIHEWNAAGRIIKKGEKKKCYLPCRKRLVFTIDQTARFDLFYISKKNGKFRRIFSLYRKQKDQLRKLIPYLEKILLKHDDDKVNYAFIRNRNCVEHAIQHIGYKYTVSMDLESFFESVNREHVSKYLTTNVMDQCFISGAPQQGLPTSPLIANLAFLDCDKAILNSLEKYNISSVYTRYADDLVVSFDDKKDIGKIIFLITNIVNKAGFKVNKSKTKIQSIKNGRIIITGVAIDNKGVRPTRKTLKKIRAAKHSGNDKSLSGLIEWSKCSLPKTHPQKI

SEQ ID NO: 5166 - protein, 318 aa, unidentified
  source 1..318: note = Related to JADJWY010000016.1; note = Hahellaceae bacterium
MEIEEYKISKIPKGKNSFRLLYIPTPTLKKKLQSHLSYLQYKNLELDEHRTCHAFLKGRNCVTNALQHVGYNYCVSMDIKDFFDSVRPHHVENKVSREVIQDCFIDGAPRQGLPTSPLLSNLALLDADAKIIEFLNQFRVVHRYTRYADDISISFDDERATGRIIFIVNSVLESYGFSVNQKKTKIQSKENGRIIITGIAIDKNGLFPTRKTKRKIRAAYHQKNISSVRGLEEWAKCKLPNNTPKNPKRFIRIVGKTLVSCMHCNQSNLIWAEQYPGRTFLVNSESGSRHKCKFLNAILSQRDLMTQLKKWGTRTSFL

SEQ ID NO: 5167 - protein, 487 aa, unidentified
  source 1..487: note = Related to NZ_MJIC01000014.1; note = Alteromonas lipolytica
MQTEFTIKKIPKGKSFRTLYIPSSAYKKHLKSKLPLLLERYILFEGDNGFCHSFLPGRNCVTNAIPHIGFAYNISLDIQDFFDAITPDHVTSKISRELIQDCFIDGAPRQGLPTSPLIANIAMIDIDNEIVASISKLTSEFVYTRYADDICVSFNQKQYLYQAKYLITNLLNRHGFRVNNKKTTFQSLKNGRLIITGIAVDKAGVHPTRKTRRKMRAAEHQGSESSYRGLHEWALCKLPGQGISHSQELHQISPKSISCQFCGEQDLVWLRIGKSKLRLYSKTTKMIHDCGQHKRLDVFEHLTALGFTKFETSRKPWFTGFYILQQESLLLLFRKRGIDIYRIDFLEYFHDCTSPAEVIEDVNSTLVDHEMYETTTENNGSDELYLEDHVREELLQDNQIDEFQRGFTPSELCRDIFRPESKYLSLMERVNYKKFPLKVHKFILSLTTPINFREEFYSAYNNAISQQAKNGTLDFDDLDLIDWDIPF

SEQ ID NO: 5168 - protein, 1017 aa, unidentified
  source 1..1017: note = Related to SIAK01000078.1; note = Phycisphaerales bacterium
MWLQSSEAREIFDTDLTKTIGIDAAEIEKFRRELAAVPSATLVKFWFGAQRTSEPTTLEKHLREKLRTRAALFSWVHGPGTSIARDLLYVKLPSSEKRRLVNLLLASLRSRMPWIESRLIHAMAFRPAELNRVAEKTVGKTKGFQQWGPLYRGVKIGKRRGYRQLWIPNTPLKATQGALLRLIAPGLARVLQPFVFGASSGRRGPTFENAAAHLGKAYVATFDLRDFFPSTRVGDVIRGIQWAADHGHLLVDETRVPSYLEENPQVRSLRWTDDAMVLVARLATYRARLPQGSPLSPLLANVAFARFDERILDALGREFGKREFAYTRYFDDLTISLSGAAARDLGLKQTSTVRDRIEQKLQEVLEGSSFALNASKSRCTALTVERRPAAGKTIANSLGHHVTGVILRRESVELTRDLKRELRTTIHRLKHRDFVEDARVWHQSKNFLPPAFKSLSKGHRWEGNTIISRRCSAERLSVLMLRHFHPELRVRAILREWYPWQERFIGGEQVRRGKQAWPLIEWLLAALWEGTVTARRHGDNTIRFSQGGVAVCDVEAESALQFFLLAKESAIAVTEYWHHLQGLKGYLGACPIRPEFSDIIEWRDRLVEAMSALEIRGYEIEATEPIVENTSDGDPEPLTVSDRVKERSDRFIVVYREFARRMSIAGDTFLGTCEDAARVVATNSADFDRWISAIRGLFVTRLPRLPAVVEHRDSFDRRRLFDAVRVWDDGTKRLVADDYQFVADLRVALKIDRLDSEDTYQFARAQLRLFDWLLASFERSTETRRCGIGEVSALDRGCDLPVNLWSGTLKERLAEAFEELVSAHEVLRSSDGETKLFIQRSGEELHRERETIRCTEQWNNDRAWEHLCQVARVLFITTQESVEPSLWRDPVEDDQPVSAQNELRRKKTWKGVCDRVDSELRHRARLLAKLRNRDAHKANDDRRAEWCSIQADVARILGRSWESTSGRKHPQFHAKDDLELFGHEVTVVKLELIRSLTALFNRAAELQVWRPEHGMDR

SEQ ID NO: 5169 - protein, 842 aa, unidentified
  source 1..842: note = Related to JADLBO010000003.1; note = Phycisphaerales bacterium
MTSRLIHALAFRPSYFTRHPSSRWGALYHRREISRGTNKPRVLYIPNKPLRSIQRALLFLFLNRASHELGQSVFGARPGQRCPLINNAKRHLGQMYIVSFDLADFFPSITLGHIVSALAHIRTPLGHCALQDNEANLDRPRRDFPWTHDAAVLVARLCTYRGRLPQGASTSPLLANIAFSRFDDLIAERLGTGLVYSRYFDDITISVSKSAARRLHLNNAKALADYAQTCIETELIPAGFRLNAKKTRFGTAAAGFTVTGLRINKNTIDIPRKTRRQIRALLHTISTSGLLAAARKTWGAELEARIRWDSARQSHHSAGRRLPQEKLCALMLKRLLPDLVIRVFDRDETEAPRTTEITGRQATRVLEKLLTYAWTHRVSFRVHDDYVAVKAAGEREIARLFSKVSIEFFGLAPNELIRCTELFHKLAGWSAFLEDAENHGEARRVADLGRELRRVLAGVQAGTRSETTAYETGALRVDPAGLPLTAEQENRQLAREVFELIRQFMLFVSPGPISHDLPELERNFKAVANSEETFSRWLETTMRLYQIRAEVVPPESARREFRGHDIHETIRLLSDRLAGRRAPTYEIERDFYKKVSKDDVPDSPRAYLRHQFRVLGRLKSAFDCSLALRNQRGPTAWIQTLNENTWSRSIAARLHTAVQVLRERLVEMASQPGVMRVFQNAVLADLNAGMSELMTTVSSTTSELRWKSLFATGSVLSKLILEQVEASRLETETTEKRSHTEIAIASLTAGTGESHADLLRLIHLLRCRDAHPATDEQMNDWIKLQRLCGSRLRRVTTNIRMPDNAGAMFGNGHLELTELEANDLKLSIIEGVDRFLRQVSVV

SEQ ID NO: 5170 - protein, 306 aa, unidentified
  source 1..306: note = Related to LR594584.1; note = Gemmataceae bacterium
MAFREDRFQRLFAPAHGELYRRKRVPKGKCCYRTLFVPCAPLARAQRLLLSRCLNQMLGHSHPGVYGGRPQTSVYGNAQRHLGQKFVVTLDLRDFFPSVTVNHVVATLLRLPPVSLVRHVWLDQPTQGGRARVPQMHRYAWTQRAAVLVARLTTFRGRLPQGAPTSPAISNLVFARYDDRIATALPGFVYTRYVDDLTLSVSETAARDLGIRTAKQAQAVVVERVERALRRSGFMLHPDKTRVTAIEREHRITGLRVGADRVDVPRRVKRKAASLARDLRKLGLVDTARRRIGAEIHAATQARPWV

SEQ ID NO: 5171 - protein, 955 aa, unidentified
  source 1..955: note = Related to DTTU01000469.1; note = Phycisphaerales bacterium
MSDHIVEKIKALDAQFVQLEKLPHHVIYSEFTTPQQLLLDRKIQYREGAYQLLDWYPPIREARELLKHLPPFEMLKLVGGKPCSSLSLFTFIKRHLARKGTKSIFRWSDRKRFVYWVYRNKLLSSVLPYVRPASESKHLVLRYLLKPLKKQQGYYSSKVVHAWAFRPDFFKAKVDYEPLYITRKIAKSQRGYRTLDIPFAGLAKLQRAILKMLLNPACQRVLTDSVFGFTPGNDRTIFSAAEAHLGAKFLVGFDIADFFHTVKFNDITSTLMKLPPDILRASNSAISKNKSPLKWEWDLVLLLAKLMAYKGRLPQGAPTSPALANLVFHEYDVLIRQQLCDSFEYTRYADDLTFSISATKAKRLGIRSELDARQYLEKRLIQLFESSSFTLNSKKSRAVNLRQGGRVLGLYLNNEGVGVPRSTRRDLRTTLHKMRNHGLLCTARNHPALPDCSEFVHRDTKRGVRHFFKSGRVSMERLCSLTAHRICRNLTISDLRNEGSTRELIGNRLRDTLERVISNAWLGKLVLAKQDSKSLLVSFNSGDPALLLRAETGIDFLLLGRIDCVKCALLHQSLSGYLSFLEGAPNRATFAAIHDLAKQLGDVLGSLDIGQFQPAASRQAGTTDGERPSLTIDEDVTRKARAFLAKLGVSDFEHPDWSVLCRAVYSREQLDSWLTATDKLIKEKRVFAEGSRRNPVKFIDIRAGKIFGRRTGTYDEENQYLVRRLSEDGLSRPDLALQLQEELIEDLIEYAEQAGEQGETAYPEQSVRLERVCADLKKLRNQLTTTNESMLLFARRCSPENDTNIRKRLEKLEQPISGDSSGAVWYSLFEFGFCFVQSFQESLEHDDEGKPVATSRAWKDIKRYNVLSLLRNRHAHGWVKTAANLANLDEIQRTIAKRLGKIWKPKKNQVGDTLESLITLELTSFEANEFTLDILNQLRDSLIAVRQELQTPPSP

SEQ ID NO: 5172 - protein, 314 aa, unidentified
  source 1..314: note = Related to JAFRHR010000024.1; note = unidentified bacterium
MERTEITPWFYYDIYKTEKRTIHKPSHALKKVQRFIMRKFLKPHFKQMTTNEAASVHCGKKWIMKLDIKDFFNSITEKQIKDVIKKYVSYDNYDSSITYEHTWEVFSEEQIFSVCTLKGKLPTGASTSPYIANLVLRDFDIEIENFCLRYGVRYTRYMDDLFFSTNREQYFLSLVELEVLRLFKELGFEINVPKIKYISSNKCQQILGLGVNNKKPVLTKDTKREYRAYFYNLLAPIQFNNTEEYKKHEKELFGHLAYIMSVDKKFYYKMVAYIFNIIKRLNIWRKPCLKNLIKKIGNNFETEIEMFRFCSYLK

SEQ ID NO: 5173 - protein, 415 aa, unidentified
  source 1..415: note = Related to VXLT01000305.1; note = Gemmatimonadetes bacterium
MPPAEPTPSLGQAMRRLRLAAGLSQRELAGRLAVDPTYLSHLESDRRDPSVRFVKRFAALVDVPVTSLLVVAMWDEMAPSEQDMFQPVVSSLMHLTEAVVRMPASSPGPLRRLSVQKLVAVCRLSEQQFARLLESREKEYHEVSWEKEPGKTRTLHIPSERLKAVQRLILRYMIDRVPPHPCSACVKGRGNHWAYRRHARHPSMLRLDISDFFPSVGEDAVREAFIRLGAREPVADALVRLVTLPERLPQGAPTSVAVADMVLFPLDVRLAGMAEKHGFTYSRYVDDITLSGGNRLARFEQTVRRIVTDLGWELNEKGGLVGSDQRHSLLGGIVNAKPNVASEYYGRVRSYLRLVAKGREQPDEDDFRKLRSKVEWIVSVNPERKAALHALVDEALTTLKQQEASIRRREKIVPQ

SEQ ID NO: 5174 - protein, 320 aa, unidentified
  source 1..320: note = Related to JAGGSE010000064.1; note = unidentified bacterium
MFSLDELLSIFNDVEEVEMSPSFAFVYSQLVEKGTSAFWLGVRKHALRDWYEQYHNVLSEDVKVEYTPVRIPKRSGGFRTLYIPSDQLKERQRAWLKLTYILVPKVTHAYAFEKRRSLRDALEKHVGNYLFLRLDIKDAYPSIRKKVLDSVLVKHDVPLSVRQMLIRDCYFKGLPQGAPTSGRLFNIVLSQTDLVIAEVIARLHGVYTRYADDILVSFPKDAKISISKTSQVINRYLNKISLELHPSKLRVGRGKLRVLGCVVHSDKVTISRKVRRLYRAMLHNNKTGKISLSKHKINGIKGWLNMVYRSETVPAIGPIS

SEQ ID NO: 5175 - protein, 469 aa, unidentified
  source 1..469: note = Related to WKFN01000002.1; note = Alteromonadaceae bacterium
MIFIKLLLLPFYLIFGVLRNILSEGGHPFDGAYNDMVARQNEEHRKNLKERSDKIKKAINEIEKKSKEEPLWKLSKLTKISIEELKHTTGTYRKVNVKKKTGGYRELQIPNDQLKQVQKKLAKFINSQFKNDISPFCHSYRNNRGIISNSLPHLNCKVLVKLDVKDYFQNITFEQVMRELDLGFESIQFHPQSNFIRHNVSEPDSRISSYLASEEAQEILKKLVYSEQGLPQGAPTSPVISNLVLSDFDKEVYALVTSLNGAYTRYSDDITISFKEDSSQKIAQVIKFVEAKLAENGFKLNKKKGKINVLRPHQAQRICGVTINSGKPTISRKQRRLIRAAEHNAKQGKPTTFTEDQIKGHESFQKYIKEHGELLAGNERIQYLKTKVISARGCKVDKNFVILKGSQFDISKFDEAKEEFQTLFNQLKQEGVIVLKQNVARFKRNHQFKSKTLATSLLHLRNVRSSKWV

SEQ ID NO: 5176 - protein, 332 aa, unidentified
  source 1..332: note = Related to DNYA01000036.1; note = Cryomorphaceae bacterium
MEFAVDSISYELGTVLALLVVLVGLVLLTKSLARDYVSKYGGGARKHAQRKNSRTLLDTIDVREDVFFGVATDYALVKIPKRTGGSRQLQIPNAELKRLQRKLLVYLTAKLGHRVNRSVHSYKKYRSIKTNATVHLGAAVVIKLDIVNFFPKVTLKQCRQVLKLLNLTKPVEDRLVALLTTPGGLPQGAPTSPLLSNLVLRALDKSVWYYCWSRGHRYSRYADDITISLPIDDRQAVHRAISFVNHALKRAGFKLNRRRGKFHILRRHQAQRICGVTINSGKTTISRQKRRELRAIRYRLENNMEASISEIQLEGYEAYVRMVSGVSVKAFS

SEQ ID NO: 5177 - protein, 365 aa, unidentified
  source 1..365: note = Related to CP036278.1; note = Aeoliella mucimassa
MLPHQIRPEHLAEAMGLSVNMLWSFARNMDACFKPRRMQWDGKKHRPIDPLYKPPKRLLKKLHRFLQNHHLCHPAAHGGVRRRSTFTSAQIHVGSRNVWTRDVTDCYPSISQAAMFSQLRKLKFQHDTALVLSMLFTYRDGVPQGSPISGDALNIFFWPLDQLLASMAGSLKLRYGRNADDFVWSGSNRENGDKLAARLESEIELLGLKINEKKKRANGLQTSSDERLVHGISVSKPSGTAISRLQSKKALALGEKYVAACRSVTADSLEAVAVKRAQLAGWMYYCRQAHIGPARTIRQLLEAGDRHVLKKLRAIGLSSQKNKWWIIDYRPRRNKPSRNEPKRLANAWRTRLARMSHKNVVATGL

SEQ ID NO: 5178 - protein, 359 aa, unidentified
  source 1..359: note = Related to NZ_CP036349.1; note = Botrimarina mediterranea
MKPSEIRVEHLAEAMGLSINAFWFFARNIDNAYKPRRMRWDGKKHRPIDPLKPMAKKVLRRLHRFLQRNRLCHPAAHGGIKGRSCFTSARVHLGARNVWTRDAKDCYPSIAPEAMQKELQALSFRNDTSKALVLLFTYRGAVPQGSPISGDALNIFFWRLDQLLASMAGSLKLGYSRSADDFVFSGDDRDAGDQITACLENELLNRGMKINRKKKEESGHQTASDERLVHSIAVSRRRGTGVCRLHAREALELCRIFVAASRSVSANSIQSVASKRATIQGWLNYCRQADFGPAKTVRQQLEAGDRHVLRKLQSMDLSAKGNKWWYVNSTQGRDEPRRLSATWRAKQAKKSADLAGSNA

SEQ ID NO: 5179 - protein, 348 aa, unidentified
  source 1..348: note = Related to PAJV01000050.1; note = Gimesia sp.
MNPKSITPAEIAAAMKMTERQLWTFTRNFEKLFKPTREIMIGSKKRAIDAPRDSAKKKLKLLHKWFFEKKLFHPSAHGGVRHRSCFTSAQQHLGKKFVWTRDASDCYPSITPEMFFYELKRIGFRQDTATLLTRLCTVRGSIPQGSPVSNDAINLYFWRIDQFLKSLSGANDLSYSRVADDFVLSGYKKYLGDNILLRLEGMLQQFGIQINDKKRRKSGFQNRSNPQLVHSIRVDLRRGTKISQEHRTKIIDLANSYEAACKRVQPSSLEPIAHKRQQLIGYLHYSRQADLSPIKHLKSKIQNGDRRVSRILKNLHISAFKGKWWLVSSKRNEPRRLKSIWMKRLEAN

SEQ ID NO: 5180 - protein, 384 aa, unidentified
  source 1..384: note = Related to CP036432.1; note = Planctomycetes bacterium TBK1r
MLSKNWLKWKHGSMRYSPAVKTRLSPPDLTVKRLAAVAQVDPSELMRYAGNTAVMYRSARKQWDGKKHRVIRPMNKKFKKMSKRLHKFFQRQPWWHGAAHGSICHRSCFTSAARHVGQRHVFTRDVENCFPSITTDALYRQLLLLRFKPDVADLLAKLMTCDGTIPQGCPTSTDAVNLFFAGLDQRLASTAAAMGAQYSRVVDDVVVSAKDKDAGQIVINRVEHEFERLGLKTNLKKKQTDGYRGPHQKRHVHGLDISSKRGVQISRQCKEKALAVAQSYLDSCKSATPLSLESIAAKRERAMGYMQHLRQGTGSTFRQLDQKVKAGDRAVQAKLRRVGVTCRKNRWWIIRGPQDRITKAARNIVREVARQWHATKYSTPSSSP

SEQ ID NO: 5181 - protein, 352 aa, unidentified
  source 1..352: note = Related to JACQXM010000014.1; note = Planctomycetes bacterium
MKPSDITPAMIAEACKVDEGRLWRIAERTESQYHSPRPKLIKGRHREIDPPNHDFKKVLRRLHRYLQRSLTFPRCVHGGLRGRSCVTAAGNHVGRKYIVTRDVKDCYPSIPTEALRRRLIDEGFRSDTALLLSRLMTNRGVIPHGAPVSGDALNLFLADSDRRLDHCVRRRGGSYTRSADDMVVSVGARESVTPLARVIEDEIEGHGLRVSEHKRRQKGVQHSNTRGGPRVHNLLVNNRRGVGAVPEHRAKGLRLAESYVCGARSVRPETLEGLASRRAELVGMINYFRQLRFSPARHLARLLRQGDRLVRSRLSTVGVSLTAKWWVNSRKRNRPREIGDRWRLKSDNSPAA

SEQ ID NO: 5182 - protein, 340 aa, unidentified
  source 1..340: note = Related to JADBLS010000178.1; note = Chloroflexi bacterium
MASLDGMASNMASWYKPARKVLIKGKLREIDPPTPVLRYRLRKLHRFIAANFRPHRGVHGGAKGRSCFSSARVHKGRRYIIKRDVKDCYPSIKTAALLDRLVAYGFCEETARILSLLMTLNGRLPHGSPVSADALNLFLFEADEVIVAKCTVLGGKYSRTYDDMVVSTNSGAASRELGEVLESQIAAHGLEVNSRKRAKEGFQPPHKRQLVHNIDVRSAGGVRIVREHEQKALAVATRYVRAARCVSPESLEPVALLRSQAAGYMHYCGQADFGPAKQLRRLLKQGDRHVRKRLTNECVTRCRKWWIISLRRNKAKQIAQRWRALQDEESRSSAPSTSIA

SEQ ID NO: 5183 - protein, 368 aa, unidentified
  source 1..368: note = Related to JADHYA010000008.1; note = Phycisphaerae bacterium
MKEKYRMQCKHKDVKKPLKGMTVEWLAEECGTTGDFLWILAKDSTFMYKPPRKQLKRSGNGYREIDPPKHQYKRILRKITKVLSSNMRHHPAAHGGVPYRSSFTSAKPHCGAKFIVTRDIRECYPSISSQNLFRSFRLLGASLSFAKFLSAIMTVHNHIPQGGPPSSLALNLYFRRMDDHFYRRAQSQGGNYRRFADDFVISNNSRKKAVALESELDHSISHRGLEVNEKKREKKGFLSGDQLKEIHSLVVNCRRGLKPKREHIAKGLQLAEHYARCCTCAKPADLPSLAKLRQRATGMMYYFRQADFSPARHIRNMLEHADKKVLRMLQSRGLQPHKNKWWLVHATRNEPQRLLCLWEPSAQVCSVA

SEQ ID NO: 5184 - protein, 366 aa, unidentified
  source 1..366: note = Related to JAAYDY010000091.1; note = Phycisphaerae bacterium
MNSETASRTADAGTLLRGITVEAIAQACETSPDELWRLARNSKLLFKLPRQQRKKGGGFRVIYPPTKTHKPLLKRMARFLSRQIPVHSAAHGGVKGRSSFTSAAKHLGATVLVVRDIEECYPSIGPQALANALKRLGASPSLAKFLSSIMTVDGQIPQGGPLSSLALNLFFYRQDEHLHRKARRVRGAYTRLADDLVASVGDTETGAAMGREFDSAISSRHLRVNASKRAKKGLLGGDKLKEIHSLIVNSRRGLRPKDEHVQKALRFLQNYCRRCRSATPADLESLAYLRRVVCGWMYYMRQAARSPARHMRKQIHLADARVTQMLKKHAIQAKKNKWWVLSSKRNEPRRLAAQWVWREVNAARAG

SEQ ID NO: 5185 - protein, 326 aa, unidentified
  source 1..326: note = Related to NZ_JACHXU010000003.1; note = Rhodopirellula rubra
MSEHTFLDWVARGDERFLPTRIDSSSGKFRELDVPKPSDMRIFRMLNKSLGFDRLFHRVAHGGVKRRSSVTSAKSHIKAPFVWVIDVTNCFPSVKFDRFASELGHLGVTPAMQKIIAETLFCRGQIPQGCPTSNLALNLFFMALDYQMAEYCWKRLISFTRMADDIVVGAKERSRGEHAVDKLVAGLAKLDLTVNEKKRAKVGFQPNTGQQLVHSLEISSGSLLLCDEHRNRARQVAEKTVGACRSVQPQSLERAADYRRQLNGWFHYSSQSQDLLTSDLAKAIRVSDNAVKSRLQRAQLDCKRWRWWEIKTATELAARWGSHISV

SEQ ID NO: 5186 - protein, 405 aa, unidentified
  source 1..405: note = Related to JADJBV010000001.1; note = Deltaproteobacteria bacterium
MGDLIHTRRWDLPDIDELLRERGLPELSDGGNRVPISSLPIQRIAVRRRPRRPSEGNELDVLMRICTALGCNADWTTVVQVARASHWERHRRYKKSGAIRWLDVPEERLKTALGEIHRLLLSSMPRDGTSTAFHAGASPALHARVHSGAVAAAAADIRNFFGSVRPRHLLPWFGLTDYPKASLLPGWSELGRKAVCQLLFRYRDGKPAYLAQGAPSSPLAANLAGLWLDRAIVSAAARQFAPGKFAYSRYADDLVLSAVDCEEPTRFAEEAAQILARSVAGQGWTIQSSKSRQWTTADSVALHVCGLRVPTRPGEPLTLGRETWRRARSALHRLRHRSDFGLHAAGSPAVAHGLLAYSYSATGDLRWLAYTSARLAYLARRLGGPIFSESLLAGWSDESSLADVP

SEQ ID NO: 5187 - protein, 354 aa, unidentified
  source 1..354: note = Related to JAGQAG010000001.1; note = Ruegeria pomeroyi
MPFSIKKREKTKLRDRFPVLWQVLGDLLANETCYCASDYNSFTFKARRSRKSRTIDAPCPHLKALQRQALNILLAPVVVHEAAMAFAPGKSIAMNARCHLGATHLYSTDIRSFFTSVSRVHVKEMLATRVKYLSVEAREEILDLVTWNERLPQGAPTSPHIANLVMFSFDELCTDMATRVGATYTRYADDISISSTSADVLLQMQKVVNMGLGALGMEPHPEKTRHLGPNQTKLVTGLDIGGSHIRPTRAFRKKTTALVRMSVKYPAEMEKHQEVIFGYLAFWYDVDPGDPQLANLLWQMGQPREASRAKATRQKQIGMMSKPSPTTPPPKEQQAVPLNAERKPSKPPVTKPDV

SEQ ID NO: 5188 - protein, 314 aa, unidentified
  source 1..314: note = Related to NZ_FNEB01000020.1; note = Lutimaribacter saemankumensis
MEDVFYDRANSYHSFTIKARRSAKIRTIDAPNPPLKLLQRATLDKLLAPVVAHDASMAFAPGKSIAMNARRHLGASYLFSTDIRSFFPSVTSQHVREMLEARFQHFSPEAREEVQDLVTFNGRLPQGAPTSPHIGNLVMFSFDEICCAKAAEMGAVYTRYADDISVSSNSSEPPQRMQEVITGYLSAMGMELHPDKTRQLGPKQTRIVTGLDIGRSRLRPTKAYRKKAAALVRMSSKYPTKMARQHYKILGYLAYWNDIDPSDPQLAALLDQMKRPSWAAKVRASAARQKPRGQAMFHRFPEELLKDLGPGLRK

SEQ ID NO: 5189 - protein, 351 aa, unidentified
  source 1..351: note = Related to NZ_CP014327.1; note = Falsihalocynthiibacter arcticus
MIFGSDDRKVNILEEYPTLCQVLEVSQEEGNCDCEVSYNSFIIKSRRSKKYRTIDAPCPHLKSIQRALLDRLLASVPPHDAAAAFVRGKSIAMNAQRHHGASHLFTTDIRSFFPSVKDSHVREMLRIHFPHFSQVFCEEIISLVTNGGQLPQGAPSSPHIANLVMSKFDERCQEASDNLKTVYTRYADDISISSNDAASLRRMERVVRIGLDALDMEIHSEKTRHLGPQQTKLVTGLDIGGSRIRPTRAFRRKTSALVRMSVKYPGKMNRHRDTIRGYLAFWYDIDPIDPQLPSLLNQMALHRWEVRLRAAQETNQRLLPIQPNPLQGRTQTNGYTKVRSNIVSLFKKLRD

SEQ ID NO: 5190 - protein, 323 aa, unidentified
  source 1..323: note = Related to RCIZ01000009.1; note = Mesorhizobium sp.
MSSEQSVLSSVLGLDSTAIKPVMGWYGPMFYHSFDVKPKRRGRKARQILAPIDELKTIQRAILEKLLSHVSPHPAATAFFAGRSIVSNARQHHGCRYLYKTDISDFFPSVTTGMVRVVLERHFPHLSQSAIDEIIRLTTHEGTLPQGAPTSPHLANLALYDFDDSLSRLCNEIGARYTRYADDVTVSAQDEYALSIAAGAIRSGFAELGLAQHPAKTRCFGPNCRKIVTGLDVSGEVIRPPRSFRKKAAALVRMSETYPKRMERHSPRVMGYLAHWQGTTPDDPELYNLKHRMRQLQRREAIADHTVNAVSSWAIEDDLKISF

SEQ ID NO: 5191 - protein, 453 aa, unidentified
  source 1..453: note = Related to nan
MTAQTPERLVFEGREHPMFSEPLSDFLRSGSGRPEFQMQSTACWRGYIGTWEVIGRRLYLVKLEGRLKSGEKANLAAVFPSSEERVFARWFSGIIQLPQGDEIEYLHIGFASIYERDLLLRFEDGELVDRRLRVNGETGSDAPGDCALLPRREDAKLAAGPGHQLWEQIERAAEELSTQPKTFAALALREFYYTEGSVRIARKIRALACPSEQLKKLQRSILTSILDVAAPHKQATAFFRGCSIIQNARQHHNKHYMFKTDIRSFFGSITTEDITTTLRRFIPNLSQKNLEALTKVLSCDGTLPQGAPTSPHVSNLHMRDFDELVSSQAKKHKCSYTRYADDIAVSSDNKFAVHQMSEIVGDALGNARFTQNTRKTHLLGKFDRKIVTGLDVSGDHIRPTKKFRKTTKAMVRVFIVHDRKAMLPNIQSRLAFWRSIRPDDPEMLQLRKSIASA

SEQ ID NO: 5192 - protein, 304 aa, unidentified
  source 1..304: note = Related to NZ_JADMNM010000013.1; note = Qipengyuania sp.
MLTEAPRHHLWKEIERAAEELSTHHPIIKLNAFNGYSGREFFYTEGSIRVARKRRALACPSEQLKELQRIILTSILDVAAPHKQATAFFRGCSIVQNARQHHRKDYMFKTDIKSFFDHIKSADIMRAVQRFIPNLSQANLDALTKVLSCDGALPQGAPTSPHVSNLHMRDFDELISAEARKRGCSYTRYADDIAISSDDKFAVHQMSEVVGEALEKAGFTQNKRKTHLLGKFDRKIVTGLDVSGVYIRPTKKFRKTTKAMTRVFIVYGRKAMLPSIESRLAFWRSIRPDDPELFQLRKSIDNER

SEQ ID NO: 5193 - protein, 494 aa, unidentified
  source 1..494: note = Related to NZ_MTSX01000001.1; note = Kiloniella majae
MGKSKNNEFSRRQLLIAFASTSIIGIMPSITSASSHIYEKENALIWLIGTLQPISLNELENTSFFPDRSWLIETINNFEEQLLINKHKRISEFYFSLTHEGHEKLPWIHAHSKDITRLSILRSSIFRSKNKVKFDRWIASAGVSPPKRTNVPVSLGAHNFARIEDEMVSSDRLFSDKNQLISFNSAQDLADSIPQNLSQSEVPLYKFAIDLGISVEFFQKFFEHRYEMYKFKKTRKQNGTLREIEIPLENLKTLQSVMAWKLSFQLKPHKTVHSFIRGRSSITNAKEHIRGDFIGKSDIRNFFPNISSSKIYTSLISSGYNRFEAKFIALFCTIQKNKRSKLPHGSPTSPILSNFVLYDADETIYQYCKARDITYTRYADDFTFSGKNYSKIQQAIKYQISALENHDFQPNHSKVKISNARDFPRVTGINISGDIFPPRNLKKRARAVFHLIETGNSSPKVRSQAAGYLGYLSQFTSFTRTATYKKWQTILERR

SEQ ID NO: 5194 - protein, 334 aa, unidentified
  source 1..334: note = Related to JABHVZ010000016.1; note = Candidatus Peribacter sp.
GYYTFTIPKGSGGTRLITAPDDELKAKQRKLLKKMQKKHWISRKAHGFRKRHNCLTNAQVHAGKKYILNIDVKNFFPSITSIAYRNYATRERNLMETKYKDEDRGFPNLFFYAATPVFHSGSLPQGAPTSPFISNIYMRRFDTQIEKLLRQYISDDILYTRYVDDLTFSSNSRAVERVIPIVRGKLKSLRLEINDDKTKFMSPSQRQEITGINVNSGRPTIGKAYRRKVRAIVHRAEQGWVITSAQKERLLGMISHIALCHPSEAAKYRDALLPVSISPNSARMFSGVNRVKLPVKKTRSKKKQSNSNAGVTGANRTVKRKIAIDKKGEVHDID

SEQ ID NO: 5195 - protein, 356 aa, unidentified
  source 1..356: note = Related to JAFDVW010000003.1; note = Acidobacteria bacterium
MLMGPQQMQPVAAAAAWNVPRIESPDALADWLRLTPGELRWFADLNHLNDRSRIQKLSHYHYQISTKPAGGWRLIESPKPRLKHIQQQVLHHILERIPPHRAVHGFLKGRSIQTFAAPHVGRRVVLRMDLQDFFPTFRGARIRAFFRTLGYPETVADLLGGLCTNAVSHNAWPTRMHHEDSAHRSRVQAFYSRVHLPQGAPTSPLLANLCAYRMDCRLAGLAESAGARYTRYADDLAFSGEKDFERGIERFSTHVAAILLEEGFQVHFRKTRVMRQGVRQHLTGIVVNRRLNVMRPDFDRLKAILTNCVRLGPESQNREGHANFRSHLEGRIGFMEMIHPQKGARLRRIYREIRWP

SEQ ID NO: 5196 - protein, 442 aa, unidentified
  source 1..442: note = Related to JAFAPG010000514.1; note = Acidobacteria bacterium
MQKLFLVKVIAGAFLSGEPTIPEIVARLSRTLGKRWDWIHPLAQRYIKTIAGRTRPRRRDVVKFLLQDSGFKKAWSNHAHQLSIKQWLTEPQRMQPVSAAENWGIPVIESIGALAQWLELTPSELLWFSDLRGLGCRSDERRLRHYHYRILDKQYGNIRLIELPKPRLKQLQLQILAQILERIPPHPSVHGFVKRRSIKTFVAPHVGRPIVLRMDLREFFPSFRAARIQTLFRTIGYPEPVADLLGGICTNAVSRDVWKKPSPDVHPCRWSEARILYSKPHLPQGAPTSPALANLCGYRMDCRLAGLAKSVGAQYTRYADDLAFSGDKALEMRIERFATHVAAILIEEGFMVHYRKTRVMRQGVRQHLVGLVINHHVNTIRPDFDRLKATLTNCVRLGPESQNRNAHPHLRLHLEGRLGFVEMINPSKGKRLRAIFNQINWQ

SEQ ID NO: 5197 - protein, 442 aa, unidentified
  source 1..442: note = Related to QHZV01000271.1; note = Acidobacteria bacterium
MPFSSLLRTVAASFVAGETTTEEIIARLSSTLGRRWRWLGPLAQRYVKFVSARTRPRHSEVVQFLRHDAGFRRAWSRHKNEISIEQWLSGPAQMQPVTAAAGWDLPAIESIGELAAWFGLTVSELLWFADLKGLGYRQKSEKLHHYHYRILPKPSGEIRLIEAPKPRLRELQRHILSGILSRIPPHPAGHGFIKGRSIKTFVLPHVGQHVILRMDLRHFFPSFRAARIQTIFRTTGYPEPVADLLGGICANCTPRDVWNKYGSESDYDCRWQARVLYCRPHLPQGAPTSPALANLCTYRADCRLSGLARSAGARFTRSADDLAFSGGADFGRHVERFSTHVAAILLEEGFDVHYRKTRVMRQGVRQHLAGVVLNQHVNVMRADFDRLKATLTNCVRLGPKSQNRESHSSFRSHLEGRMAFVEMINPAKGKRLRAIFDQIHWE

SEQ ID NO: 5198 - protein, 451 aa, unidentified
  source 1..451: note = Related to JAIQGJ010000043.1; note = Acidobacteriia bacterium
MRNHSLLTSLARSFLAGEPDTDQVFTRASRLLGRRWRWLRPLARRYVMAFADKARPRQRDVVRFLLHDPDFKHAREKYFKELSVRQWLIGPQQMLPVAAAETWGVPAIGSIGALADWLQLTPGELQWFADLKALGYKRKDCPQLQHYHYKVFSKRSGSIRFIESPKPRLKELQRQILARILDRTPAHPAVHGFCRGRSIKTFAASHTGRRVVLRMDLQDFFPSITGARVQALFRTAGYPESVADLLGGICTNVVPRDVWKEPAHEIDLRQLWEARVLFSRPHLPQGAPTSPALANLCTYRIDCRLAGLAKSANAEYTRYADDLAFSGGHEFERSVERFSTQVAAILSEEGFAINHRKTRIMRQGVRQHLAGLVINQRVNVTRSGFDCLKATLTNCVRLGPESQNRENHPSFQAHLEGRIGFVEMINPAKAIRLRRIFERIQWTGMESQRER

SEQ ID NO: 5199 - protein, 442 aa, unidentified
  source 1..442: note = Related to QHYC01000242.1; note = Acidobacteria bacterium
MSRSSLLRVLATSILAGEPTVDHIVVRVSRTLGRTWRWLPPLSQRYVKAFAGRTRPRRRDVVQFLRHDPGFLCAWSKHFHELWVEQWLTEQQRMQPVAAAETWAVPVIESPGALADWLGLRTVELQWFADLKGLGYKSSRPKLRHYHYRILAKQSGNIRLIEAPKPRLKELQRQILAQILERIPPHPAVHGFVKGRSIKTFVAPHVGQRVVLRMDLRDFFPSFSAARIQAIFRTLGYPESVADLLGGICTNATPRDVWSRPAFDIDLSQVQEARALYSRPHLPQGAPTSPALANLCAYRVDCRLSGLAKSVGVEYTRYADDLAFSGNEAFERCVDRFSTHVAAILLEEGFAVHFRKTRVMRQGVRQHLAGLVVNQHMNVMRPDFDLLKATLTNCIRLGPESQNRDAHPRFRSHLEGRVGFVEMINPVRGRRLRTIFEQIQWR

SEQ ID NO: 5200 - protein, 445 aa, unidentified
  source 1..445: note = Related to QIAA01000032.1; note = Acidobacteria bacterium
MSKSSLQRALANSFLAGEPYLEQLVSRASRTLGRDWRWLRSLAHRYLKRFAGQTRPRHRDVVRFLNDDSGFRRAWLQNHSELTVAHWVTEPPRMQPVAAAESWKIPSISSAGDLAAWLGLSIGELQWFEDVRRLVYKEGSSKLRHYHYRVVAKQFGAVRLIEAPKPRLKTLQRQILSQILEQIPAHPAAHGFIKGRSIKTFVSPHVGRRVILRMDLQDFFPSFAAARIQALFRTFGYPESVANLLAGICTTTTPQSVWEGTGFDVSLKQLQEARILYSNAHLPQGAPTSPALANLCTYRVDCRLRGLASAAGAAYTRYADDLAFSGDTQFEQGIERFSNHAAAIILEEGFAVHFRKTRIMRRGVRQHLAGIVTNHHINIMRPDFDRLKAILTNCVRLGPQSQNRDAHSHFRLHLEGRVGFVEMINPAKGYRLRRILDQIQWPTET

SEQ ID NO: 5201 - protein, 444 aa, unidentified
  source 1..444: note = Related to JAFDVQ010000015.1; note = Acidobacteria bacterium
MGGPGFYAALANSMVAGEATEDAIAARLAQTLGHRWRWIRPLARRYVARFGGAMRPRRRTIAQFLITDEGLSRALRLHRKDIRIANWVAPAGDMQPHRAAKNWPVPAIETVGALAEWLQVTPSELEWFADLKRMISRREDGFEGPLSHYHYRILAKPGGDVRLIEAPKERLKKMQRQILADVLEKIPVHPAVHGFRRGRSIKTFAAPHVGQRVVIRMDLRDFFPSISAPRVQALFRTAGYPERVADLLGGICSNATPRTLWTKKGSGIDPLRMAEARQHYAWPHLPQGAPSSPALANICAYRVDCRLTCLAEASGAVYTRYADDLAFSGGMDFERCAERFAIRAAAILLEEGFAVHHRKTRIMRQGVRQYLAGIVVNEHVNVIRRDYDALKATLTNCVRHGWESQNREGHVNFREHLAGRVSFVEMVNAKRGAKLRALFERIRW

SEQ ID NO: 5202 - protein, 401 aa, unidentified
  source 1..401: note = Related to JACQZR010000185.1; note = Acidobacteria bacterium
MTLGRPWRWLRPLGQRYLARFSQGTRPRTAGVVDFLLQDPGFRRAAQRHARSLDVANWLCEPRQMQPVGKAAGWDIPTIETVTDLASWLEIPLDALNSAAVPFATSHHYHYRLLSKQSGMLRLIEAPKPRLKALQRRIAAGILDCIPLHPAVHGFRHGHSIKTFAAPHAGQRVVLRMDLRDFFPTITRARVQAFFRTAGYPEAVADMLGILCTNSTPGSIWKPADPKLVPEMRALHRTPHLPQGAPTSPALANLCAYRFDCRLSGLALASGAFYTRYADDLAFSGDTDFERSVDRFTTHAAAILMDEGFSVHHRKTRVMRRGVRQHLAGLVTNDIPNIYRGDYDRLKAILTNCLRHGPASQNRNGHPDFRAHLDGRISFVEMINPSKARKLRALFHQINWA

SEQ ID NO: 5203 - protein, 442 aa, unidentified
  source 1..442: note = Related to JAFAQG010000033.1; note = Acidobacteriaceae bacterium
MANPSLPNLLARSFLAGEPSLDQIVSRCTQVLGRRWLWLRPLAQRYLETTTSKTRPRQREVADFILRDPVFSRIWSERAHTLAIEQWLPAPSRMAPVPAARAWDIPLIDSPAALADFLWLDYAELDWFADLKKLTYKTAHPRLRHYYYRVLTKQSGGVRLIEAPKRRLKRLQREILAGILEKIPPHPAVHGFFKGRSIRTFVAPHVGRRVVLRMDLRDFFVSFGAARIQAFFRTLGYPESVADLLGGICTNAVPRHVWHDAGSDIDPAEFERVRSLYSRPHLPQGAPTSPALANLCAYRLDCRLAGLAKSAGVTYTRYADDLAFSGGSEFEKHVERFSTHVAAIALEEGFSVHHRKTRIMRRGVRQHLAGVVTNERINILRADFDRLKATLTNCVRHGPASQNRTAHPSFRAHLDGRVAFVETINPERGKRLRTLFEQIDWR

SEQ ID NO: 5204 - protein, 447 aa, unidentified
  source 1..447: note = Related to QIAH01000498.1; note = Acidobacteria bacterium
MKGSVFYSVLASSLLAGEPTVDLTSERLTRTLGRRWRWIRPLVERYIKRFSGHTRPHRREVFEFLRHDQHFQEARAKYRKEIRIEHWLMESELMRPVPAAADWNLPRIESVGALAEWLALDLMDLLWLADLKGLASKYNRPPLQHYHYRILPKASGRLRLIEIPKPRLKDVQRQILFHVLNKVPPHPAAHGFVKSRSILSFVRPHVGRPIVLRMDLQDFFPTFPAARIAAFFRTAGYPESVADLLGGLCTTTAPRSLWLKSDSDYAFENIYQARDMYSRPHLPQGAPTSPALANVCAYRMDCRLAGLARSVGAEYTRYADDLAFSGDESFARHVDRFSIHVAAILLEEGFSVNHRKTRIMRRGVRQHLAGIVANEXXXDFDRLKAILTNCIRHGPGTQNRKLHPQFRSHLLGRVAFFESINPAKGQRLRAIFEQIQWPERTGNEMKQ

SEQ ID NO: 5205 - protein, 435 aa, unidentified
  source 1..435: note = Related to JAFKEE010000018.1; note = Acidobacteria bacterium
MANPALVAHLARCFASGETTADRIAERAAEVLGRTWFWLLPLARRYLKEHKGSTRPKQHDVIRFLLDDGEFRRRANKLSVARWLMAPQRMQPVPAAATWSLPELVTAGDLAAWLGVSPGELDWFADRKGLNARTKRAPLDHYHYRILAKPRGGLRLIEAPKPRLKEMQRRILTEILNRIPAHPAAHGFCPGRSIRTFAEPHVGRSIVLRMDLQDFFPSLPAARIQAVFRTLGYPESVADLLAGACTHRTLSSVWRAAEPSISGAELFLARQLHQSPHLPQGAPTSPALANLCAYHADCRLTGLARHFGAVYTRYADDLAFSFDEPGDVSRFTSYAAAILLEEGFAVNNRKTRIMTRGRQQRLAGLVTNARLNIPRSDFDQLKATLTNCVRFGPAEQNRAGVADFRAHLLGRIGFVESIHPGKGRRLRILFDNICW

SEQ ID NO: 5206 - protein, 435 aa, unidentified
  source 1..435: note = Related to NZ_CP063849.1; note = Paludibaculum fermentans
MANPALLSILARCFASGEPTADGIAARTAQALGRPWFWLLPLARRYLKAHGALTRPKRQEVIRFLLDDTGFRHRAHKLSVAKWLTEPQRMQPVQAAAEWNLPELVTEGDLASWLSVRPEELDWFADPKGLNARTSRPPLEHYHYRVLAKRRGGIRLIEAPKPRLKEMQRQILGEILDLVPAHPAAHGFCPGRSIRTFAEPHVGRPVVLRMDLQDFFPSLPAARIQAVFRTLGYPELVADLLAGVCTNRTHSSVLRTPRPAIPQVELIEARRLYHWPHLPQGAPTSPALANLCAYRADCRLTGLARNFGAIYTRYADDLAFSFGQPSDVRRFSTYAAAILLEEGFAVNHRKTRIMTRGMQQRLAGLVTNDHLNIPRSDFDTLKAILTNCVRLGPATQNRAGVPDFRAHLNGRVGFVESIHTGKGSRLRAIFDNISW

SEQ ID NO: 5207 - protein, 440 aa, unidentified
  source 1..440: note = Related to JACJWB010000023.1; note = Bryobacterales bacterium
MDRRTLATALARALCAGEADAASAAERLEQTLGRKWRFVAPLARRYAAAFEAVVRPRLADVERFLSRDGGFCRAARRHGPQLAVAQWIQEPAPAMRPAAAAREWGLPAVATPGDLAAMLGLEAADLDWFADLRGWGAGGVDAKLEHYRYRVVPKRSGRLRLIEAPKQRLKQVQRRLLAEILRSVPPHPAVHGFVAGRSVATFAEPHTAKRMVLKMDLRDFFPSVRAARIEAFFRTAGYPEPVARALTGLVTNAAPRRVFAKEGELGLVHGARSLYCRPHLPQGAPTSPALANICFRRADQRLEALARSAGADYTRYADDLAFSGGDDFARHARRFSLHVAAIATEEGFAVEHRKTRLAPESGRQRLAGVVVNHRPSLPRAEIETLEAILTNCARDSPETQNRDGHPRFREHLAGRIAYLAMLNPSKAAKLRAIFDRIAWT

SEQ ID NO: 5208 - protein, 441 aa, unidentified
  source 1..441: note = Related to JACMLA010000763.1; note = Bryobacteraceae bacterium
MQRSLVIKKLAEVFLASGINSPFLTSRCAVVLGRNWRWLRPLADRYVVTFSNRIRPSYREVLSFLETDTGLKEAFTRNSGQFEIKQWIEETPHMRPVPAAQAWPVPPIETTGALAEWLWLDAGHLEWYADLKAFAETSISEKLSHYSYHVLRKRTGSVRLIEAPKRQIKKLQTQILEWILNPVPPHPAVHGFIAKRSITTFVAPHTGQRVVLKMDLRNFFPSLRAARIQAFFRTAGYPDEVAQLLTGVCTNITPRRFWRAPELNLTLQEIQDMRDLYGRPHLPQGAPTSPALANLCAWRLDCRLQALAASAGAQYTRYADDLVFSGDEHFDRSVSRFSAHIGAVVLEEGFAIHHAKTRIMRQGQQQRVAGLVVNQHANVARPDYDRLKAILTNCIRHGPESQNQNAHTSFRQHLEGHISFVHMVNPAKALRLRALFDQIAW

SEQ ID NO: 5209 - protein, 377 aa, unidentified
  source 1..377: note = Related to PSQY01000227.1; note = Proteobacteria bacterium
RDRGLLRAYENYGHRINVITSFPEVQEMCPVPAARTWGVPPIRTEGELATWLGIELNELYWFSDVAGFGARLGAPPKTRHYSYWILTKRSGNIRLIEAPKSRLKALHRKILSEILERVPIHDAAHGFVKARSITTFAAPHIGRRVVLKMDLQDFFPSFHAARIQTLFRTIGYPERVADLFSGLCCASTPRELWKQMPIEVNPQQWRESRDLYFRTHLPQGAPTSPALANICCYRLDCRLASLANSAGAAYTRYADDLAFSGVGQFVRGIERFANHVAAVLLDEGFSVNFRKTRIMRHGVRQRLTGLVINQHPNVPRDEFDRLKAILTNCVRLGPDTQNREGLSHWRQHLEGRIGFVEMVNPKRGAKLRRIFDVIAWN

SEQ ID NO: 5210 - protein, 443 aa, unidentified
  source 1..443: note = Related to JAFAUE010000361.1; note = Acidobacteria bacterium
MRPNVCLFEALASAFVAGDPTVDGIVARSARMLGRDWRWLRPLAQRYVETFAGRVRPRRSDAVDFLRGDKRFRRICQRIPSHIGIAHWLTQSQRMLPMAAAKGWRVPSIESVSALADWLGTDENYVEWFADLKALSCKSDHNKLRHYHYRVLLKDSGDVRLIEAPKQSLKRLQQRILTGILNGIPAHPATHGFVTGRSIKTFAAPHAGKRIVLRIDLRNFFPSFRAARIEAFFRTMGYPETVAAMLAGICTNATPRDIWHNVKPGGGPVQFWETRSLYARPHLPQGAPTSPAIANLCCYRLDCRLAGLARSAGAVYTRYADDLAFSGSKSFEKSVERFSIHVAAIALEEGFSVNHHKTRIMRQGVRQRLAGVVVNQHPNVLRHTFDRLKATLTNCVRYGPSSQNRERHINFRAHLEGRISFVEMLNRNKGSRLRKLFGQIRWE

SEQ ID NO: 5211 - protein, 445 aa, unidentified
  source 1..445: note = Related to JAEUQG010000434.1; note = Bryobacterales bacterium
MTGRIAAAMNAAFLAALARSLMAGEQTVEAARARAMRTLGRRWRWAGPFAARYIAAFRHGPRPRLKDVIAFIRADEGFDLAALTYGSKLSIAHWLAAPQRMLPYGPAADWDLPSIHTEGDLARWLALHATELDWLADRKNLCRKQANPKLRHYRYVIEPKRRGGIRLIESPKRLLKELQRRILAEILDRIPPHPAAHGFVKGRSIVTFATPHTNQPLVMRLDLENFFPSFPAARVQALYRTLGYPDAVADVLTGLCTTSTLHDIVRAQTFEDRRLYEQRHLPQGAPTSPALANAMAYRLDCRLSGLARTAGAVYTRYADDLAFSGGDEFRRNAHRFQHHAAAIALEEGFAVNFRKTRIMRQGVRQSLAGLVVNGGLSIRRRDLETLEAILTNCLRHGPTSQNRANHGDFRAHLEGRISYVEMVHPEKGRRLRSLFDRIDSWANTL

SEQ ID NO: 5212 - protein, 432 aa, unidentified
  source 1..432: note = Related to JAFDVS010000120.1; note = Acidobacteria bacterium
MKISFPAAVVSAVARSLMAGEPTVEGAHVRMMRTLGRPYRWLLPLAGRYVRAFAGRTRPRLREVVQFLLNDRGFRRVRQRQLAVEHWLTEPQRMLPCGPAAEWGLPVVECEADLAGWLGLHLSELEWFSDRKGLCRKHGSEKLQHYHYRMEEKRSGGIRLVECPKRELKELQRWILGSLLDRIPAHAAAHGFVKGRSIVSFAAPHAGKAVLLRMDMENFFPSFPAARVAALFRTLGYPEVVAEHLMGLCTNAVPRGVWGTRVEGRMLYSRRHLPQGAPTSPALANAMAYRLDCRLTGLARTAGAVYTRYADDLAFSGGEEFRRVVDRFGIHVAAVALEEGFAVNHRKTRVMGQGMRQALAGVVVNQGVSIRRDELEKLEAILTNCVRTGLAAQNREGVADFRAHLEGRIGFVEMVHREKGRRLRAIFEKIRG

SEQ ID NO: 5213 - protein, 344 aa, unidentified
  source 1..344: note = Related to NZ_CAJCHS010000439.1; note = Nevskia soli
LVAEWLPEAPRMRPVAAAEEWKLPAIETVGDLADWLSLYPAELEWFADLKHLNNRRPKLQHYHYRVLVKRSGGVRLIETPKATLKALQRRVLSGILDHVPVHPDVHGFVRGRSIVTYAQPHVRQDVLLRLDLENFFPAFPAARIQALFRTLGYPETVSDRLGGLCSNSAPADACGALYARPHLPQGAPTSPSLANLMAYRLDCRLSALARTAGGRYTRYADDLAFSGGVPFRRGVDRFASHAAAIALEEGFGVNHHKTRIMRPSTRQQLAGIVVNHHVIISRRELELLEAILTNSVRRGPASQNRDGTPDFRGCLQGQVSFVEMVNRAKGQPLRTLFEAIDWER

SEQ ID NO: 5214 - protein, 452 aa, unidentified
  source 1..452: note = Related to JAFDVZ010000005.1; note = Acidobacteria bacterium
MSRAAILSVLARSLLAGEPAYPAARSRAERTLGRRWRWLGPLARRFAGRFGDAVRPRHRDVVRFLARDAGFSEALHAYGGRIRIAEWLAEPQRMLPVEAALAWDLPVIETAGALAEWLGVTVDELDWFADRKDLCGRANASEQLRHYRLRLLAKRTGGARLTEAPKPRLKAVQRRILEGILDRVPPHPAAHGFVQGRSIVTFAEPHARRRMLLRLDLADFFPASPAARVEALFRTLGYPEAAAGLLAGLCTTATPRAFWRDCPAWLGAEEWSAARTLYARPHLPQGAPTSPALANAMAYRLDCRLAGLARSAGAVYTRYADDLAFSGDLEFARGVHRFAAHAAAVALEEGFAVNHRKTRIRGQGARQRLAGLVVNDRPNLPRRDLERLEAILVNCARRGPQGQNRAGEADFRAHLEGRVGYVEMVNPAKGERLRRILETIAWPERQGRTLDS

SEQ ID NO: 5215 - protein, 334 aa, unidentified
  source 1..334: note = Related to JAIEMJ010000003.1; note = Bryobacteraceae bacterium
MPEAWGLPKIASAEALAEWLGLDPPDLAWFADLRGMTRQAPTEALRHYRYHVIVKRHGNLRLIEAPKPRLKAIQRQILTEMLDRVPPHEAAHGFVHGRSIASFAAPHTGQSAVLRLDLDHFFPRLQRARVRAFFETLGYRKPVATLLGGLCTNRAPRFLPWPDFATMQVHTAPHLPQGAPSSPSIANSCAYRADCRLAGLAAAAGVRYTRYADDLAFSGGDEFSRGALTFATHVAFILGEEGFAVNHRKTRLMRQGVQQYLTGLVVNQHLNVDREDFDRLKATLTNCVRRGLASENREGLTDFRAHLEGRVGFVEWINPRRGERLRGLILQIKD

SEQ ID NO: 5216 - protein, 329 aa, unidentified
  source 1..329: note = Related to AP025252.1; note = Bryobacterales bacterium F-183
MHARFALSHPLPPLPTEVALADWLCLSPSELDWFANRRNLATSAARSHYRYHLLTKPSGGVRLLEAPKFRLKCLQKRIQTGILDLLPPHPAVHGFVKGRSVKSFAIGHVGQPGVLRIDLENFFASVRSARITGLFRTLGYPPPVAKLLSELCTNSVPKTVLADHPERFLYFNRHLPQGAPTSPLLANLCAYRADCRLAALAKADGSLYTRYADDIAFSGFVNNDLAAQASAILAEEGFTVNHHKTRLMSEGVRQHLAGLVVNAKPSTPRDEYDRLKATLTNCARYGLDSQNRDKHPNFRQHLEGRVAWVEYIHPERGAKLRTILAKLEP

SEQ ID NO: 5217 - protein, 432 aa, unidentified
  source 1..432: note = Related to JAEUQE010000020.1; note = Bryobacterales bacterium
MARILNGAPFDVPGMIASADEMLGRRFRWVRLLAKRYASAMAGKTRPRLRTTRQFLIQDGAVSEAWRKHKIRVEQWVTHGPRMQPAPAASEWDLPRIETSGDLADWFWIEPGELEWFADLKRLGNKLGVAKLQHYRYLILKKPNGRLRLIEMPKRRLKSFQRQILEFILDRIPVHPAAHGFVKGRSIHTFVAPHIGQEVVLRIDIADFFPAISQERIQALFRTMGYPEAVSDLLGGICTNAVPYEVWGQTPEGVDARVRYEARNLYRWAHLPQGAPTSPSLANLCAYRLDCRLAGLANAAGVRYSRYADDLAFSGGGAFVKNVRRFAVSVGSILQEEGFAANHRKTRVMRRGVQQRLTGLVVNERPNVSREEYDRLKAILTNCARHGAGSQNREGHAFFRSHLEGRVGFVEAVNPERGHRLRKILERIDWEE

SEQ ID NO: 5218 - protein, 454 aa, unidentified
  source 1..454: note = Related to JAEUQF010000393.1; note = Bryobacterales bacterium
MPLALEIEICAALAQAFTNAASLPDMVASADHLLGSRWRWVRLLVKRFAAANPSATRPRYRDAYQFLAKDGAVRRALYRHPGEIHLAHTIPSPPRMRPVPAAQPWNLPTLETLGDLAQWFWLSPEQLDWFAGLNRFSKNGSEELQHYRYRLEPKSHGGLRLIEIPKPRLRKLQRQILHYILDLIPAHPAAHGFVKGRGILSFAQPHAAKPIVLRLDLQDFFPSIYGPRVQTLFRTFGYPENVADSLGGICTNIVPSHIWNTTPEGTTLDAKVAAKALYRSSHLPQGAPTSPALANLCAYRLDCRLTGLAKAAGAVYTRYADDLAFSGDASFARGVDRFATHVAAIAAEEGFSVNHRKTRIMRLGVRQHLAGLTVNEKPNIRRDTFDELKAILTNCLRHGPATQNRENHPDFRAHLEGRVSFVASIHPAKGLKLQSLLRQIQWADTPRPAAPSPP

SEQ ID NO: 5219 - protein, 458 aa, unidentified
  source 1..458: note = Related to JADLFK010000145.1; note = Gemmatimonadaceae bacterium
MKPHDFATVLAIALLAGDQSDDAAVARLRLVARGRQRDLLRLVGYYRALAPNGVAPRRREVARQLRALFDAQRERGAAPWVRARTQVDVPLPSPVMRPSAMRTSAVRAAPAHAWDPAPRDRPDIATVGALASWLELPVEELLWFADCRDLNRRHSAPSLRHYHVSTRPKRHGGVRVIEAPQTRLKAIQRKILSEILETIPLYYSAAHGFVKGRSVRSFAAEHVGKPLLLRIDLADFFPTVSGARVQALFRTLGYPEAVADLLGGLCTATTSRHVFGAVRAQVDRRMLQHAMELYTRPHLPQGAPTSPALANACAFRLDARLTGLADWAGAVYSRYADDLAFSGGDEFARRIDRFCAEVGAIARDEGWRVQDHKTRIMRRGARQQLAGVVVNERLSTPRVAYEQLKATLTNCVRFGPASQNRAAVVDFRAHLLGRMAWVASLHAARGRKLHAIFDRISW

SEQ ID NO: 5220 - protein, 447 aa, unidentified
  source 1..447: note = Related to JACMJE010000135.1; note = Phycisphaerae bacterium
MPHQSLTIALARALTGGSQDEPSIALRLAVTLGRPPARWIARFAHRYVRAFSGNTRPREIEVAQFIVADRSWSARLAPTPTRPRQLVARWPLETPGMVPVPAAADWPVKRIESVGDLAEWLGIDSSMLDWFVDAKNIAHKQPHTKLHHYHYRVLQKRSGGIRIIEAPQERLKIIQRKILKDILEQVPQYYSAAHGFVKGRSVRTFAAPHVQQQAILRIDLQDFFPTIGRARVQALFRTLGYPETVADALGALCTNTTPRRFFAMTPRTAGDVALQVKARHLYGRPHVPQGAPTSPLIANLCAYRLDCRLTGLADWAGAVYTRYADDVAISGSGNFARNVERYAAEVSGIALREGWSVQHHKTRIMRRGVRQHLAGIVVNERLNVSRTDTDRLKAILTNCVRHGPTSQNREHHPDFQSHLRGRVGWVTFVNPLKGQRLATLFEQINWE

SEQ ID NO: 5221 - protein, 396 aa, unidentified
  source 1..396: note = Related to JAEUQC010000130.1; note = Bryobacterales bacterium
MHTLARAFLAGELNAQSAAARAAALFATPPRWLPALAARFVAAFAGKTRPRFLHAVAFLQAQPPRAAKLINWLTEPAVMQPVEAAKGWALPSLTSTGELATWLGLSIPELEWLADLRGTARPGHYHYQPVAKQSGAARLLEAPKPRLKAAQRQILRQILDLVPGHAAVHGFRRHRSIRTFAAPHAARPVVLRMDLRDFFPSISRTRVDAVFRTLGYPGPVAALLAGLCTTAAPTGGPLYRQPHLPQGAPTSPALANICFHRSDCRLAGLAAATGLQYTRYADDLAFSGEFISENLQARIGAIVLEEGFTLQYRKTRLMRQSVRQHLAGLTVNAGCNVRRVDFDRLKATLHRCVQLGPRDETRDALTGHVAFVESVNAARGRKLRALLERIQWTSHG

SEQ ID NO: 5222 - protein, 448 aa, unidentified
  source 1..448: note = Related to NZ_SDMK01000004.1; note = Acidipila dinghuensis
MERPLQPLSHSSNEFLSLAHALLSAEQAVEPHLQILRTAFRAEPPPGRLRPLAVRTVGWASTRPRPRIRRFIEQLRAEPRLVRLIERHGLRQLPLVSVPLRMLPIPGTAPVVLETAGSLAAWLEVEAGQLLWFADLRDWNRKAGGDRLKHYTCRVLAKPYGAIRLLEVPGPRLKSMQRRILREILAPVPPHPAAHGFRRGRSIVSFAAPHAGREVVLRMDLRDFFPSISGPRVQALFRTLGYPEPVADLLGGLCTATTPRGVWRNTGCELSAADLQDARIFYARPHLPQGAPTSPAIANLCALRLDRRIGGLAEKAGVTYTRYADDLAFSGDALFARGAERFALRVAAIAAEEGFAVHPRKTRLMRRGVRQHLAGLTVNAQPQLPRRELERLEAILTNCVRHGPEGQNRDGHADFRRHLEGKVAFATMVNPARAGHLRELLERIAWGD

SEQ ID NO: 5223 - protein, 598 aa, unidentified
  source 1..598: note = Related to VANK01000001.1; note = Acidobacteria bacterium AB60
MGYHEPTPAISVPARPRVPHVSRVGDMGYHEPTPAISVPARPREPHISRLLETWDTTNLTRPSALSHERRCDLALASRPLAAQRPAAILLMRRSAPSWQGKKPSGLALTSLGLPQGNVAIRALVAGASLRSHADQLPPGQTRWSTPLAPRLSKSVLIRALATAFLHGEPTTEELIQRAAHTLGRNWRWLRPVARRFVERFAGKVRPTRRSVLAFLREDENVNRTWHSRRHQLTVASWVVEPDGPAAMQPMAAAADWPIPAIATVGDLARWLGLTMGDLEWFSDPRRLTAKTRTPTLQHYHYRVFPKSSGGFRLIEAPKFRLKKVQRQILHEILDRVPTHAAVHGFVPGRSIKTFASLHAGKQVVLRIDLREFFPSIGRPRVQALFRTMGYPDSVAGLLSGLCTNATPRRVWREGTAQPSRSVDPAASFEAAQFYARPHLPQGAPASPALANLCAFRLDSRLQGLANAAGATYARYADDLAFSGDAAFARSAERFAARVAAIAEEEGWTVNHRKTRIMRQGVRQHLVGLVTNTHANVRRADFDRLKAILTNCGLHDPATQNRENHPAFRAHLEGRVSFVESINPGKGRRLRALFDRIVW

SEQ ID NO: 5224 - protein, 483 aa, unidentified
  source 1..483: note = Related to NZ_SIHJ01000001.1; note = Posidoniimonas corsicana
MRAYASYLTPDQTRWWGSAAAPTMLPSRTQVTPPVECTRNNLARALASAMAAGPVETDALMERASRLLGDQEQHKRLSWLRPLTRRVEAEFGAGPRPRAAALAEYLLCDEGFERAFQKHAPWPVGLVSAAPAMAPIPDAADWRVAPLTTVGQAASWLGLSVGELRWFADCRAWERRRPAGPLRHYQYRGLTKRFGQTRLIEAPKPRLKALQRQVLERVLDRVPPHDAAHGFRRGRSVGTFAAPHAGQRVVLKIDLQDFFPSIAGARVAALFRSVGYPEPVADVLTGLCTNSAPPDVWAEGPTSRAAAQQRRLYSAPHLPQGAPTSPALANLIAYRLDCRLAALAKSAGGVYTRYADDLAFSGGQEFLRSVHRFRTHACATAMEQGFSVNHHKTRVMPSSQQQRIAGLVVNERPAVSRVERGRLKAILSNCIRHGPESQNRDGHADFRACLQGRVAWVEMACPPQGAKLRSLLDLVDWTATRKR

SEQ ID NO: 5225 - protein, 440 aa, unidentified
  source 1..440: note = Related to NZ_SJPO01000016.1; note = Posidoniimonas polymericola
METDIQSVARALAAAFAAGPLTADRLVGCGERTLGRRYRWLRPLAWRVEAEFAYGPRPRADHIADFLLLDERFRVYAARHDAAAVSRVHDPVEFCPFPAAQAWPVARLRTPGQLAGWLDTPPQQLAWLADVRGWERRRRRGPLRHYHYRALAKRFGATRLIEAPKPRLKAVQRRLLAEILHHVPPHDAAHGFRPGRSIRTFAAPHSGQRVVLKLDLEDFFPSTPAAQVNALFRSLGYPEAVADLLTGLCTNTAPAAVFSPDSARDWRAALQRARYAQPHLPQGAPTSPALANLCAYRLDCRLAGLAAAAGGVYTRYADDLAFSGGAEFARSVHRFRTHAAAIALEEGYRVNHHKTRVMPTAQQQRIAGLVVNAQPAVSRAERDRLKAVLTNCVRHGPASQNHTGHTDFRAHLGGRIAFVEMACARQAAKLRRVFEQIEWG

SEQ ID NO: 5226 - protein, 445 aa, unidentified
  source 1..445: note = Related to CP036291.1; note = Pirellulimonas nuda
MRPGHSTAVALATAFVAGPLEVDPLVDRGAHVLGGRPRWLRPLARRVAARFGDQTRPRVTAVARFLLADRALLRAALTCQIQPGAGLGLTPEMAPLGPAARWRTPSLCNTRELAGWLGLPVGELEWFADLRSLESRQREGPLRHYHYRPLTKRFGQTRLIEAPKPRLKAIQRVILAELLDHVPPHPSAHGFCRGGSVRTFAAPHAGRPVVLKIDLEDFFPSIAAARVRALLRAIGYPERVADLLAGLCTNAVPPDVWKEAGAPATGHADRQLRRYAQPHLPQGAPTSPALANLCAYRLDCRLAGLAEAAGGVYTRYADDLAFSGGDAFARCVGRFQTHVCATAMEEGFAVNHYKTRVMRRGQRQQIAGLVVNHRPGVARDQRDRLRATLTNCVRHGPASQNREAHADFRAHLNGRVAFVEMVSPEQGQRLRRLFEEIRWEAGCGV

SEQ ID NO: 5227 - protein, 440 aa, unidentified
  source 1..440: note = Related to PNKX01000009.1; note = Pirellula sp.
MPTPRITADALAAAFLAGEIEKDQLIARASRMLGRRPRWLAPLAKRVATAYGTRTKPRRAALATFLLGDPGFRAALAKGPLRIVDWTTDEPAMRPTTPAAAWVLPLIGNISELAAWLGVSLHELAWFADMRSWEAKRSSGALRHYHYRIESKRFGQVRLIEAPKSRLKTIQRRILAELLEPIPLHEATHGFRRGRSIKSFAVPHVGQAAVLKIDLQDFFPSIAAARVQALFRTVGYPEPVADALAGLCCNATPADVWNRSEADGDAAQRRQTRWLYEKPHLPQGAPTSPAIANLCAYRLDCRLSALAASARAAYTRYADDLAFSGGADFARSAGRFETQVCATVMEEGWAVRHRKTRLMRQGVRQSLAGINVNKRLNLCRRDVDQLKATLTNCVRMGATSQNHADHADFRSHLEGRVSFVEFINPERGAKLRRLFERIEW

SEQ ID NO: 5228 - protein, 440 aa, unidentified
  source 1..440: note = Related to RECD01000177.1; note = Planctomycetaceae bacterium
MASETIVRLLAAACLAGNLEVDEVVDRWGRAMGKRWRWLRPLARRVLAEFAGDARARESAVARFIASDRGFRRAALTHDLRVAEVLHASGPGMSPVRAAEVWQLPPLRTAGELAQWLGIDTRQLDWFADRRSFGSKRHQGPLRHYHYRTVAKRFGQVRLIESPKPRLKQIQRRILAGILDLIPTHPAVHGFRRGRSIMTFAQPHVGQRIVVRIDLQDFFPTVGRAWVQALFRTVGYPEVVADVLAGVCTHATPADAWESVDSEHFGRQPDRIHRLYSRPHLPQGAPTSPALANLCAYRLDCRLAGLARSAGASYTRYADDLAFSGQADFVRVAPRFCLHVGATAMEEGFSVHHRKTRRMRQGVRQHLAGLVVNERLNVRRKDFDLLKATLTNCIRSGPQSQNRGNQSNFRAHLAGRLSFVELVNPEKGRRLRELFDRIPW

SEQ ID NO: 5229 - protein, 440 aa, unidentified
  source 1..440: note = Related to JAGQPE010001238.1; note = Planctomycetales bacterium
MSDITVAQALTTAFLTGEPDLDQIVDRWSVTLGRRWRWLRPLAVRLLANLDEADQRREVAVAWFLFLDRGFQRACDSHDLDVAQWIHITRPPMRPIAAARDWQVPSICTPGELADWLDVEPNRLEWYADLRSLESYWPQNKLRHYHYRLLEKRFGQVRVIESPKPRLKQIQRQILTGILDHIPPHPAAHGFRRGCSISSFARPHVGKRIVVRIDLQDFFPSISHLRIRALFLSLGYPQQVAKRLAGLCTNVVPLDTWLGDCGNRSTFGPSGVQRLYSTPHLPQGAPTSPALANLCAFRLDCRLAALANSAGATYTRYADDLAFSGERDFERVAHRFHLHVCAAVMEEGFRVHHHKTRRMRRGVRQHLAGLVVNERLNVCRQDFDRLKAILTNCIRHGPQSQNRMAHPDFRGHLAGRIGFFESVNAAKARRLRALFDQIAW

SEQ ID NO: 5230 - protein, 440 aa, unidentified
  source 1..440: note = Related to NYXM01000103.1; note = Planctomycetaceae bacterium
MDSYATIADALATAFLAGDIETDELVDRGSLLFNRRWRWIRPLARRVVETFAAGVRPRQTSVVEFILADRGFFRACQKHDLRLANRLVAPPMMRPVIAAASWRVASIRTPRELADWLGVSFGELSWFADLRGLEHKRNHGRLRHYHYRPLAKRFGQVRLIESPKPRLRQIQRRVLTDILDHIPLHDAVHGFRRGRSIKTFAAPHVGRRVVLKIDLQDFFPSISAARIQAIFRTIGYPEEVADLLAGLCMNSAPTDEWDHEFSGSSGRQVRQFRWLYSQPHLPQGAPTSPALANLSAYHLDCRLTGLSRSAAATYTRYADDLAFSGARDFERVAMRFHNHVCATVMEERFTVHHRKTRIMRQGVRQRLAGLVVNERVNVPRVDFDRLKATLTNCIRQGPQSQNRQGHLDYRGHLQGRISFVEMVNPSKGHRLRALFDQIDW

SEQ ID NO: 5231 - protein, 444 aa, unidentified
  source 1..444: note = Related to JAAYAY010000047.1; note = Planctomycetaceae bacterium
MNFCNVTARALSAAFLAGDFDVDGLVVRGSRVLGKRRRWLRPLARRAVETFAGRPRPRRVTLAEFILGDPGFLQASRRHGLRPATLPTAPSIMCPVGAAESWQIPSIRSAGELADWLGVTIGELEWFADRRSLEYKWNHGRLRHYHYRPLTKRSGQVRMVEAPKPRLKAIQRRILAGILDHIPLHDAAHGFRRGRSINTFASPHAGKRVVLKIDLHDFFPSIRLARIQALFRTIGYPEEVADLLAGLCTNATPPDVWEADTIRLAGGQLQEACWLYSQPHLPQGAPTSPALANLCAYRLDCRLHGLAQSAHAVYTRYADDLAFSGDRDFERAAKRFHLHVCATVMEEGFSVHHRKTRIMRQGVRQRLTGLVVNERLNVSRRQFDCLKATLTNCIRFGPQSQNRSGHGEYRAHLDGRISFVETINPARGHRLRELFDRIEWPERD

SEQ ID NO: 5232 - protein, 440 aa, unidentified
  source 1..440: note = Related to SJPS01000003.1; note = Bythopirellula polymerisocia
MSTRNHTANALARIFLAGKFESDEMVERASHLLAKRWRWLRPLARRVVAAYDGKPLPRSIALTKFILSDLGFSRALEKHEVHVVHPLINVPTMNPIAVANTWRLPSICTIKELADLLSITVSELNWFADLKLFEYKRNRGALRHYRYRPVTKRFGRIRLIEAPKPRLKVIQTLILSTILNNVPPHTAAHGFRRGRSIKTFAEPHTDKMAVLKIDLSDFFPSISIARVQSLFRALGYPELVADTLAGLCSNATPLDVWDSPKVDSPAKNIRQVRWLYANPHLPQGAPTSPTLANLCAYRLDCRLSALAESVGAVYTRYADDLAFSGDDSFARVAKRFQIHVCATAMEEGFRVHHRKTRIMRRGVRQRIAGLVVNKHLNLARNDIDRLKAILTNCIRFGAHTQNRSEQDDFRAHLYGRVAFVESINPRKGSKLRQLLEQVEW

SEQ ID NO: 5233 - protein, 459 aa, unidentified
  source 1..459: note = Related to CP036278.1; note = Aeoliella mucimassa
MSLRARLESLGYSAACLIAMSSPKRIAEPLAAAFLAGPLEVEGMVARGSQLLGKRWRWLSPLAKRMHRYFGGTTRPRQARLINVMLCDEGFYRACTKYELQLVDLQACQPAMAPSLAALSWNVPALCTTKQLADWLGLAVSELEWFADMRRWETKPASMQTQHYRYRVLSKRNGRLRLIEAPKSRLNMLQRQILTHLLDRFPVHSAVHGFRQGRSIRTFAVPHIHRPVVLKLDLRDFFPTIRIAQLSALFRTAGYPERVADLLAGICTNTTPTEVWDDEGLAASPSEIRRMRMLYEQPHLPQGAPTSPTLANLCAYRLDCRLAGLAEASGGVYTRYADDLAFSGDERFARTAERFAIHVMATVMEEGFEVHPRKTRLMRPGVCQRLTGLVVNQHLNIARSDRDRLKAILTNCVRHGPATQNHEGHRDFRCHLRGRVAFVESINPTWGKKLRGLFDQIVW

SEQ ID NO: 5234 - protein, 437 aa, unidentified
  source 1..437: note = Related to JAGQOY010000114.1; note = Planctomycetales bacterium
MCSYVSIARNLAASFVAGQFESDAIVERGAQLLGRRWRWLRPLAIRVIEKFSKGPRPSHASVVQFILRDHGFIRAYEKHNLQLIDLIGEATEMSPIKKAQPWTVPIINNIAELADWLGITMGHLEWFADLNSLEYKCNRGRLRHYHYRPLAKRFGSVRLIEAPKARLKEIQRKILSGLLDQIPAHEAAHGFQRKRSVKTFAACHVGKSVVLRMDLHDFFPSITLSRVRAVFRSTGYHESVSDLLAGLCTNCAPLDVWENLVPSGPGRQSIMLYSQPHLPQGAPTSPALANLIAYRLDCRLSALAHSAGAVYTRYADDCAFSGGPEFFRIVKRFACHVGAVVMDEGFSVNFRKTRIMREGVRQKLAGLVVNEKTNFPRADYDRLKATLVNSIKHGPESQNRTQHRDFRAHLLGRISFIEMLNPNRGRKLRQLFQGIAW

SEQ ID NO: 5235 - protein, 377 aa, unidentified
  source 1..377: note = Related to JAGQOX010000111.1; note = Planctomycetales bacterium
MARFILSDRGFLRAYERHNLQLVELLTTAPVMLPLPTAEGWEVPQLPEVNDLADWLGVSLATLHWLADTRCLESKWNRGKLRNYYYRPLAKKQGTIRLIEVPKPRLKGCQRQILTGILDHIPPHDAAHGFCRGRSIKSFADKHVGKQVVLRLDLQDFFPSVHGGRVQAVFRSLGFPASVADLLAGICTNSTPRDIWESLQFPQPQLRLTQWQYDNVHLPQGAPTSPALANLCAYRLDCRLSALARTVGADYTRYADDLAFSGGQDFSRAVRRFHVHASAIAMDEGFHVHFRKTRIMRRSARQRLAGLVVNQHANISRAEYDRLKATLHNCVRSGPSDQNRTGHTDFRAYLNGRISFIEMVNPARGAHLRRLFDRIPW

SEQ ID NO: 5236 - protein, 454 aa, unidentified
  source 1..454: note = Related to JAGQPK010000195.1; note = Planctomycetales bacterium
MTHARPDSLGVLDRFPMTHSDQTIARFLAAAFVAGPLVADEMATRGARMLGRRWRWLTRLALRVSEEFQHGPRPRRATVEEFLLGDSVFHKACERHELEIANYSITAQMCPVDAARNWPVPPLCTFADTADWLNVRSRELEWFADLRGLAARASHQKLRHYHYRTLSKRFGQVRLIEAPKLRLKEIQRQILREILDAIPAHNAAHGFCAGRSIKTFAAGHVATSVVLRMDLRDFFPSISRAQVEAVFRSVGYAESVANVLAGLCTNCAPDDIWDGVEVPVQQLRSVIARYARPHLPQGAPTSPALANLCAYRIDCRLAGLAESAGATYTRYADDLAFSGGDEFRRSAKRFSQHASAIVMDEGFDVNHRKTRIMQSGARQRLAGIVVNAHTNVPRKDYDRLKAILVNCLRSGPQSQNRDQHADFRAHLNGRVAYVELINPPRGKKLRELFRRIDW

SEQ ID NO: 5237 - protein, 440 aa, unidentified
  source 1..440: note = Related to JAGQQK010000642.1; note = Planctomycetaceae bacterium
MNEAAIAKALATAFLADTMTITAMEARGSHVLGQSCDWIRPLAARIMAAFPGGVRPRRQRVVEIIRQSRAFLLACEEHDFHALNPTLLPTKMHPAQSIRTWNVPSITSTDALARWLGISPAQLDWFSGRFRRSASVRIGSLGHYRYRLLQKSSGQVRLIEIPKWRLAELQRQILTRILNHIPPHAAAHGFRQQHSIHTFVAPHTGQAMVARIDLQDFFPSITLPRVAAVFRTVGYPEAVADALAGLCCHQVPDHVWHSEAGNLGTSSRNQLRLLYRQPHLPQGTPTSPAIANLCAYRLDCRLTGLAQSARATYTRYADDLAFSGDDEFRRSAKSFVLHACACVMEEGFTVHFRKTRIMPAAARQRLAGLVVNGKTNVPREDFDRLKAILTNCIRSGPDSQNREQHVNFQAVLSGRISFVEHINPSRGRKLRTLFEQIVWA

SEQ ID NO: 5238 - protein, 459 aa, unidentified
  source 1..459: note = Related to DNWZ01000023.1; note = Planctomycetaceae bacterium
MQSNRVLIRTIAITLLRGDWQVEAMAIRTAKLLGKRYRWISPLIKRLDQQFGSSRRPKQSELIDFLRLDRGLCRALEKHEPEIFDWLQEADVMQPIPSAEAWQIPSITTEGELAEFLGAATSDLIWLADEKSLHSKNTKKYSGHYHHHLVNKKNSVLHFCNPHDLDAIANRLRIPSESIRLIEAPKRRLKSIQRNVLNGILDRVPPHRSCCGFRQGESIVDYSRPHVGKSIVLKMDLRNFYPTITLNRIISIYTSLGFPETVSRLLAHLSTTVTPPEIWRNHKGASQLRYLESLYTCRHLPQGAPSSPALANLVAFRLDCRLEGLAKHVGADYTRYADDLAFSGGDEFRRIAKRFSTSVSAIVMEEGFGVNFRKTRIMPAASRQRLVGLVVNHGLNVQRQEYDRLKAILTNCIRHGPESQNRDNHPSFRRYLEGKIAFVSMINIEKGNKLLGLFRAISW

SEQ ID NO: 5239 - protein, 376 aa, unidentified
  source 1..376: note = Related to JAGQPD010000106.1; note = Planctomycetales bacterium
MANQSGPQDRDRVKPRVVSWRPRGTEMRPVSAASQWHVPEIRTPRELAAWLNVSFKQLDWLADIRSLEYTPGRGRSRHYCYRVLSKRFGAVRLIEAPKSRLKAIQRQISSEILSQIPVHESVHGFRRGKSINTFAAPHVGRACVTKIDLEDFFPTVTRSWVRGIFQSAGYPDAVSVLLAGLCTNSAPHDVWQDMREQLPRQRLRYIEALYATPHLPQGAPSSPTLANLAAFRLDCRLSGLARKMELTYTRYADDLAFSSDSPATRDIHRRLPYIYAIVMEEGFRIHFRKTRVMPSAGRQFLTGLVVNDRLNITRTDYDVLKAILTNCVRHGPDGQNRDRRNDFRAHLSGRIAFVESVHPERGNKLRQLFERIQWPT

SEQ ID NO: 5240 - protein, 443 aa, unidentified
  source 1..443: note = Related to CP036289.1; note = Bremerella volcania
MHTIQFYAINLAGVFVDGPFDVDALVERGSQILSKRGRWLRPLAKRLAKTFGDRIRPRKSDVVSFLLADQGFRNAYQNGRFKFSSLLRPAPEMVAPAVTTTWQAPLNLRTPQDLSHWLDLKPGELAWFSDRRQLEAKQNKPKLQHYRYRLLPKRPGEFRLIEAPKPRLKTIQRRILKDILNHLPPHDASHGFRCGRSISSFARPHIGREVVLKMDLQDFFPSIRAAQVQAIFRSLGYPDCVADLLTGLCTNSAPTEIWNALDHAPPAKIQYKIRRYARPHLPQGAPTSPVLANLCAFRMDSRLAGLARKMNASFTRYADDLAFSGDCEFARICRRFSVHVAAIAMEEGYTVHYRKTKIMRKGVRQRIAGIVVNKRPNILRKDYDRLKAILSNCVRTGPASQNREGHDDFQSHLAGRVSFVEMIHPDRGRKLRAILEQIDWTVS

SEQ ID NO: 5241 - protein, 442 aa, unidentified
  source 1..442: note = Related to QPEW01000030.1; note = Blastopirellula cremea
MHSVTHSANILATAFAAGRFDPEELVQRGSQVVASRGRWLRPLAVRLAEAFAGKIHPRKSTIVAFLVADAGFCRAYHNDRVQIANLLGPIPEMIPTATAANWQGCLALPTPHDVSRWLNLAPGELDWFADRRRMAHAQSNPKLQHYRYRLLQKRPGEYRLIEAPKPRLKAIQRRILSDILNHVPPHEAAHGFRRGRSITSFAAPHVGKQVVLKMDLQDFFPSTRAAQIQSIFRFLGYPDTVADLLTGLCTTSAPQDIWPTAAPRPAQPTQRQMRRYAEPHLPQGAPTSPVLANLCAYRMDLRFSGLASTVNASYTRYADDMAFSGNQDFARVCQRFSTQAAAIAIDEGYTVHFRKTRIMKQGACQRVAGMVINRRLNISRKDYDRLKAVLTNCARHGPDSQNHDAHNDFRSHLEGRVSFVEQINPERGRRLRALLERIDWSK

SEQ ID NO: 5242 - protein, 465 aa, unidentified
  source 1..465: note = Related to NZ_QPEV01000005.1; note = Blastopirellula cremea
MIPHAERDSLVIPPSTFFLMRTSKKTLAAALATAFVAGSFEVDDLVERGYGVIGKKPRWMQPLAERLHAAFPWDMRPRRASVERFLLFDYGFHRAYRRSKLTVASRIGSSPVMNQGVVASGWKAIRPLTTPAELADWLDVPLRQLDWFAGVGPYKRVPTEMKLQHYRYRVLKKVDGNVRLLEAPKARLKRMQQKILTEILNHVPPHATCHGFRRGRSITTFAKPHQGQAVVVKLDLRDFFPSIRAAQIHALFLYLGYPEPVAHLLTGLCTTSAPETVWREIGASPRNNLTQEQIRRYARPHLPQGAPTSPALANLCAYRLDYRLSGLALAAGATYTRYADDLAFSGDAVFRRAAQRFVVHATAIVLEEGYQVHHRKTRVMRQSVRQKIAGLVVNQQANVPRKDFDRLKATLTNCVRHGPESQNRADHANFRLHLRGRIAFVESINQKRGEQLRSIFAQITWPQSA

SEQ ID NO: 5243 - protein, 437 aa, unidentified
  source 1..437: note = Related to NZ_CP083740.1; note = Bremerella volcania
MHSRKLLAATLASAFVGGPVETDALVEHVRVLLLDKRKQRWLKPLVKRFVQASSVGPRPRQPQVEAFLLADYGFLKAYHKNHIRLSGALAPSPVMSSTIESITSSDRISLITPAELARWLDLPIRELDWFADRRGWEAKHANAKLQHYRYLTFAKPSGETRLVEAPKSRLKGIQRRINTDILNHVRPHEAAHGFRAGHSVRSFAEPHVGKRVVLKLDLRNFFPSIRAAQIHAIFRSIGYPDAVASLLTGLCTNTTPSEIWEERLPLALDFPMYERPHLPQGAPTSPALANLAAYRLDARLGGLAKSAGANYTRYADDLAFSGNTPFERVVRRFADHVAATVMEEGFFVHHRKTRIMPQGVRQRIAGVIVNEHLNVDRRTYDRLKAVLTNCIRLGPDSQNVDAHEHYRHHLEGQVSWVESINPQRGQRLRELSNRIMW

SEQ ID NO: 5244 - protein, 446 aa, unidentified
  source 1..446: note = Related to JADLDX010000443.1; note = Pirellulaceae bacterium
MLNDPESPTKRWQMLADILLHCRWTSADHLALGMGAIKRQPNAVRNMIAAIHQAFPWVPSRTQLVTFLASRSDLLKGLRWKRLPDIQCQRRLYPTTMQPTRFAQQTWEPPPLPTLGSVADDLLRLPASLVEWLSNPRVQHYVVSVIAKRGSAGSAGTGAATGRILEQPKRLLKAAQRDILREILRDVPAHPAAHGFVPHRSVVTFAKPHTGRPVVVRMDLANFFTSIPAARVNAVFRSLGYPLPVAHQLTNLCTTACKLDAVEGLADYSAAERVRLENLYGRPHLPQGAPTSPALANLVAYRLDARLSGLARRVGCEYTRYADDLLFSGDRRLLRQAQSLVVQVSAIALDEGFQVQHRKTRIMTQAVLQAAAGVVLNQHTNIDRRDYDNLKATLTNCVRHGPATQNHLQHPNYREHLLGRIGWVHHLNPTRGSKLMRIFERIQWPN

SEQ ID NO: 5245 - protein, 444 aa, unidentified
  source 1..444: note = Related to JAGQOV010001318.1; note = Planctomycetales bacterium
MQTPHTVAETLAEAFLQGEFATESLVQRGAQALQGTPPRWLRRLASRAVQTYGLGPRPALPALSRFIAHDAAFQSAMRGRRPVVARAWLCVPEMFPIAAARSWEVPPLCTLGSLAEWLDVPVGRLDALSDVKSLERLHPRESLRNYRYRVLSKGGGRVRLIEAPKPLLRAIQRQILAEILRAAPVHDSAHGFCHGRSTKTFATPHVDQSVVISLDLKEFFPSISAARVDALFRSLGYPARVAAALTALCVNCTPSWVWKKLSGDALTRRRIELERLYGFAHLPQGAPTSPALANLCAYRLDCRLAGLAAVCGGNYTRYADDLAFSGGERLRRSAARFQVHASAIVMEEGFKVNHRKTRIMSQGACQKLAGVVVNRTTSLPRRDVDQLKAILTNCVRFGPTSQNREGHADYRGHLRGRVAYVQFLHPGRGAKLRAIFEQIDWNAS

SEQ ID NO: 5246 - protein, 463 aa, unidentified
  source 1..463: note = Related to JAGQPV010000013.1; note = Planctomycetaceae bacterium
MPDDLAAARRLALAFLTAEWNPQSMAEHGRRVLGLKGSPKWILRLAEQVCRQYPAAPPPTQLELSRLLATSGRLRQAIRRREQSNQPLDSGTLLLPPMPMRPVVGLPAGWELPNLTSAGQLAAWLDITPDELDWFADVRRLQRDRPPGPARHYQYRWIPKAGGRQRLLESPKPRLKQVQRSLLHGLLDRIPPHPAACAFRRGHSLASFLAPHAGRRILLHVDLRHFFPSISSARVHALFRTVGYPEAMARSLTGLCTTSTPRQELDRPQDREAEAALHRLYGSPHLPQGAPTSPALANLCARRLDVRLNGLARRTGADYTRYADDLLFSGGHELERMLSRFRVWVCAIAIDEGFTIRHRKTRELPRSGRQQVAGVVLNEKLNQPRAEYDRLRATLHNCIRHGAASQNRNGHPRFREHLGGRIAWVNMLNPNRGARLKQLFQQIDWPEESTGSPPADSQPAKPD

SEQ ID NO: 5247 - protein, 461 aa, unidentified
  source 1..461: note = Related to NZ_CP036276.1; note = Symmachiella dynata
MTDVRAVARGLATVFLSGEWTRAGITQRVQTALEQRVKSRAVDLLVGRILRACGEQPPPPTLHKLTKLILSDPVFHKYIAEEDGYPRRLNLAHLPPPVMAPAPAIPSDWQLPTILTPGALADWLGLSSPELEWFADCHGRERQRAREALRHYRYRWIPKRTGGRRLLEIPKQRLKDLQRTILQWILGRIEPHAAAHAFRRGRSIASFAQPHSAKRVVLRIDLRHFFPSVQPSRIKSLFRTVGYPEAVARLLCGLCTNSVPDDILGVAEQQFATNERQPVERLYAAAHLPQGAPTSPALANLAARRLDGRLSGLATAVGGDYTRYADDLVFSGGRALERCLPRFRTLLLAIVLDEGFSIRHRKTAVMPAGGRQQVAGIVVNEHPNLNRKEFDRLKAILYNCAHHGPRSQLTGCLPQPNEPPTEATLEQLRSHLTGKVAFVRMINPAKGERLSKLLREIDWVG

SEQ ID NO: 5248 - protein, 448 aa, unidentified
  source 1..448: note = Related to NZ_JH636435.1; note = Schlesneria paludicola
MDDSFRQFTANLAETLARGTWSLDELLKRADQSLTETSSRAWIIRLTERTMVAFPGRQSPQHCLLMQFLAHDRGLRRVWNNCERDERPFPEIDLTKLVPPVMQPASEVIAAWPVRPLVTIQDVSQWLGLTLGELDWFADRTRRKSRVPEGPLRHYRYRWIAKSSGGQRLLEIPKPRLKELQRKILAEILDAIPPHPAAHAFRRGRSVRGYVTPHVGQQVVLHIDLREFFPSIRASQIHALYRTVGYPERVAAMLTGLCTHITPRDAIPLNGEQQASNSNWKRLGSPHLPQGAPTSPALANLVAFRLDCRLAGLSQKVEAVYTRYADDLLFSGGKELARCASRFRLLVTAIAHHEGFEIRARKSRTMHSGTRQQVAGIVLNRQPNIPREEYDALRATLYNCQRHGPTTQNVNQHPHFRDHLLGKINYWSNICPERSRKLRLLFDQIVWP

SEQ ID NO: 5249 - protein, 442 aa, unidentified
  source 1..442: note = Related to CP036268.1; note = Planctomycetes bacterium Pan189
MHDFEDEFPTPDAESVARVFLAGAFSPESCTARLTVVFGRVHHRRIERLVRLVFAVFPPHSAVPTLRRLTLFLLRFESYFPDQFRISPPRDLTGHRTIPAEAITGSLPILNNIRELAEFLDLTPERMLWLADPHGFETKRPRERQRHYRYRWVERTGRTPRPLEIPKQRLKAIQKKILAEILNKLRPHPAACAFRKGQSVRDFAKPHVGRRVVIRFDIANFFPSILQPRVQATFRAVGYVEEVAFLLSALTTNRLPTDQLHAEATGSGARHLRQHLLSAHLPQGAPTSPALANLCAFHLDRRLTGLAARFSLSYTRYADDLLFSGNLSDAEIYRFRIRALAILIDEGFEARSSKSAVLRKGSRQQACGVILNTRLNIAREDYDALKATLHNCIRHGPELQNHEGVADFRSVLRGRIAWVHSLNVAKGEKLLAMFEQIHWNTS

SEQ ID NO: 5250 - protein, 425 aa, unidentified
  source 1..425: note = Related to JADZEF010000070.1; note = Planctomycetaceae bacterium
MSERIRMVMAARRQSRWHDQLAKRVHDEFAAVIPRPTRDRLAEFILFKGRIPRRVRAPEHRDGPLRNTSLLSLPAPAMIPADAIAARVALPAITTQGQLADWLSISPSELDWFADPAALLARWGVADRGTLRHYRTRLLPKPRGRWRLVESPKPRLKEIQRKILADLLDLVPVHPAAHAFVRGRSIVTGVTPHFGRDVVLSIDLREFFPSVHAGRIHAMFRTLGYPERVASLLTGLCTTRTPADRLAQGAFSTAQRQLYQSLHLPQGAPTSPALANLAAWRLDCRLEGLARRFGAAYTRYADDLIFSGDSTVHRALPRLRMWATAIVLDEGFAIQRRKTRVMPSGQRQTVGGLILNARANIPRREYEALKATIFNCLTYGPSSQNREQHPRFYEHLRGQIAWVAASSPPRAARLLEEFQRIDWSR

SEQ ID NO: 5251 - protein, 446 aa, unidentified
  source 1..446: note = Related to JABMPE010000532.1; note = Rhodopirellula sp.
MPSEFIRKLSWVLLAGRWERGELENRGRLALRRATCPMWMVQLANRLIVTFGDNVTVPQRRQLELFLSWDAPLQKRIRTWDRNGSFPKLVVPPQRMAPAADRFIESRLPELTTTSSLAAWLSISPSELDWFADQRRWERRQVNEAARHYRYLWIPKSGGMCRLLESPKPRLKAMQREILDCILAKVPVHDAAHGFCRGRSVRTYLEPHVGRDIVFSVDLRQFFPSVRVSQINAIFRTVGYPEEVARMLTGLCTNSTPENVLHSKRVPDAGVENSRMLRRYRDVHLPQGTPTSPMLANLAAFRLDRRLTGLASKFGASYTRYADDLTFSGDSDFRCALERFKILVYAIVIDQGFEIRHRKTRVMTQGQRQLVTGLVLNNRLNVPRNSFDVLKATLHNCVRFGPSSQNREAIDNFSEHLAGRISWVDSVSPARGAKLKALFNEIDWSR

SEQ ID NO: 5252 - protein, 418 aa, unidentified
  source 1..418: note = Related to JAGQQF010000113.1; note = Planctomycetaceae bacterium
MPSRRPSPSYIALCLAVAWEHKTGRNDELLEDAVAVLGLTDRPRWLRHLCRHLAGRWGDPLRRPSRGKVVRLLLASESFIAAVGAVPLQDNLAPAPYWTTILPAWSWNLPEFPSTGALANWLSVSPADLDWLADVRGLNPRSPDPQLWHYHYSVRPKSDGRSRLISAPKLRLKQLQRQILGQILQRIPVHPAAHAYVSGRSMATCLAPHVGRDVVLHLDLDSFFPSIQASQVRAVWTYVGYGASVAAMLTGLCTENVPDSVLSRLNASRQAVDRFRERHLPQGAPTSPALSNLCAYRLDCRLSGLAGHFGAAYTRYADDLIFSGDAHFRRRLFDFRTTVGAILLDSGFNLQGRKTRVLPASRSQRVGGLVVNRRLNIPRREYDDMRAILHNCARFGAESQNRERHPHYREHLLGRIAY

SEQ ID NO: 5253 - protein, 451 aa, unidentified
  source 1..451: note = Related to NZ_CP011270.1; note = Planctomyces sp.
MDEPEFRERVVLDALARTLLPLADDVSVAVRAARQLLGWKPERWFRTLVANVLAWPEMRAGQMTAGELAARLSGIPSLMEALDEGKGVVLDLSAIPRPRMRRSPVAGMGPIVRLETVGDCLDWLGLGLNELDWLTDPKGWLPAAGQSRLAHYHCQWIPKPAGGVRLIEAPKRRLKAIQRKIHEEILRHVPPHEAAHAYRPGRSMVTALTPHTGQETVWHLDLTSFFWSIGSGRVRRFFRRIGYPEGVAGVLTGLCTSRVAPGLLEPAPLSEREKQQLLARHLPQGAPTSPALSNLCAFRLDCRLSALSARYDVRYTRYADDLVFSCGPKLRRRLPGFRNTVLAILIDEGFQIRRRKTRVLRRGQRQQVGGLILNETLNVPRSEYDTLRAILHDCGRNGPVVANRDQHPSFREHLQGRVAWIAHVSPGRGRKLKEMFERIDWSGSEEPTGAG

SEQ ID NO: 5254 - protein, 438 aa, unidentified
  source 1..438: note = Related to JACKHO010000006.1; note = Planctomycetaceae bacterium
MTYRAFLRSLAFILDQGFWHEEAALEQVLDVLPTRQRQAKWPRRLIGRIFTTFSRYTRPSFGELSRFLQGDKELKADLRRLTAIPLIVWRPGDQTRPHPVLRVSGDLPILKSVRDFANFLRMPVNSLQALADVNSREARTLDARHRHYNYRWIQKRSGGQRLIEIPKERLKHAQSQLLECILRHVPVHEAARAYRRGLSLRDAVEQHVGQRILLRIDLQDFFPSIGVGKVRQVFRHLGYPSVVAMHMAGLCTNVVPQAVLETTSSNHRLSHVYQLPHLPQGAPTSAVLSNLASYRMDARLTGLAAYWSMQYTRYADDLLFSGDSLSAAQVSRLRTQILAVASDEGFRIRRYKTKVMRAGRQQSALGLTLNSQANTMRRDFDNLRALLNNAVRHGLESQNRDNHPKFLEHLAGRVAYHRSMNPKRGARLDRLLSRLTNE

SEQ ID NO: 5255 - protein, 435 aa, unidentified
  source 1..435: note = Related to NZ_CP036271.1; note = Caulifigura coniformis
MNGEILRAARIAEALLAGPWDLKSLTGRLKTTFHAVARSRWPRQTAVELVAEFPAPPRAIRLAFWITRNRHLAPRQKDVPLADLPRPRMRPHPAAASLLVPALCTPGDIAAWLRLDPGQVDGLAGAGVPERRRHARARNYAYRWLKKSDGRVRLIESPKWRLMAVQRQILSDLLDHVPPHPAAHAFVRGRSLQTFLSPHVRRNWVLRLDLADFFATIAANRVVEVFRFLGYPEASAQWLTRLCVNAAPSDVLCDGIGHAADAHVQRLRSRLSGLHLPQGAPTSPALANLCLFRFDQRLARLAESRGLQYTRYCDDLVFSGDRETRSDVVDLRRTLFMILADERLSVRHAKTRIMPAGRRQNVCGLNLNHGLNTPRAAFDQLRAILHRCGTKGLTAEEQQDSSRFRQHLQGRIAWVSSINPHRQAKLVKLFEAIAW

SEQ ID NO: 5256 - protein, 456 aa, unidentified
  source 1..456: note = Related to JAGQQQ010000113.1; note = Planctomycetaceae bacterium
MGQQSRRLAEAIAQTVLNGPFAFDAIVSRLKRITPGPCLRGWKQRVARSVLDRFGEGGGVPSLFTLRQYLIDSGLLIDVEADDFPEDWIDETETTIIRPDRVPHAVFCPRIAAFQNLGLPEWTTTRELADWFGLTDGQLLWLSGGRRSDGKSAFERYRLKCQRSSSGKVRCLEVPRSMLKSIQRELNRDLLTRIPIHSCAHGFVPGRSIHSYVEPHVGQDVIWKTDLANFFPSITRSRIEAQFRLFGYPDAVARTLSGLMTVRQDRTKIEELSQQFPRDQFRDLASLLTQSHLPQGAPTSPALANLAAYRLDCRLSGLATKFHANYTRYADDLTYSGGQRFQRSLDTFRVHALAIIVDEGFRNRLRKTRVMMSSRRQTVAGLVINQTQNVPREEYKTLKAILFNCRLHGPASQNRDGIPDFQAHLRGRIEFVRSANPERGEKLMAMFEEIEFHAET

SEQ ID NO: 5257 - protein, 446 aa, unidentified
  source 1..446: note = Related to NZ_FOQD01000001.1; note = Planctomicrobium piriforme
MNLFLDALATVVLSGPFDQKAICARIRKSLVVRSDAPLEVKLTTRWVTPLVKAFLSAVPARPRHRQVVSFLSTQQLSAQAEYFSIETSRCSPPLFLPLKPQFAEWGLPQWRTTGQLADFLGISPVRLDWLCGRYPVRDSQEIRQRYQIRWQRSRTGKLRMIEIPCPQLMRIQRQLLHDVLDRIPVHAAAHGFRAKHSTLTCVSPHVAQAVVWKLDLASFFLSIPRCRVTGLFRMLGYPEAVAEDLGWLTTNAVPSKVLQRMKAKIGTDQFQELERFAAAGHLPQGAPSSPALANLIAYRLDCRLNGLATAYGAHYSRYADDLLFSGDYRFKRYLAGFRIQVLAIILDEGFLIRRRKSKVMVHSRRQQALGIVINQHPNLPRQEYKLLHAILHNCVVQGPHSQNRDGHLDYHAHLAGRIANLRRLNPARAAKLQTMFEQINWQRFDS

SEQ ID NO: 5258 - protein, 423 aa, unidentified
  source 1..423: note = Related to JAFBGL010000010.1; note = Verrucomicrobiaceae bacterium 5K15
MSSDELATILLSGAFEQAAFEERLVMAVGAPKFSRKLAGRVIRHFGSGSRPSVRMLAEWLESDRRYQKKQRRGELQLSGQILPAEMAPDMRVAADWKIPSITTSGDLAHWLDLPVSQMEWFAGDYNSVPADTKLSHYTVQTVVKKSGGFRVLEKPKWQMKQVQRYILHGILDHLPPHPCSHGFQKNRSILSYVQPHIGRKMLIKMDLKDYFLSIERSRVRALFHLLGYPPLVSVQLAGCCTNRLRLADVPSGVAQRDRYTVSHLPQGAPTSPALADRLLYRLDLRLHGLAQKMHMDYTRYADDFAFSTNDSVRRPQVEAFLNLVDQIVREEGLQLHKTKTSVMHHSQRQRLAGLVLNEKHNVARGEYDRLRAILHRCGQNGLDAENKNDHPSFLQHLEGRVEFIRQTNPRRGKKLQGMLDKLV

SEQ ID NO: 5259 - protein, 445 aa, unidentified
  source 1..445: note = Related to NZ_NIDE01000017.1; note = Fimbriiglobus ruber
MKIDPVFLDMARVLLAHPWDRAAVLACGHKLLGRKPKWWAAAVEKFVAWFPTRPPTAARLARLLAAHPRLAALRDKDKLPQPRADLLREALQYQVDHLRYPDLPKLATPAQLADWLNVPEPVLRWLADIKCLNARQAPAVQNYRYHWVARRRGGHRLIEAPKEILKRLQRQILDRILDLVPPHDVAHGFRAGRSILTHAAPHTGQIVVIKFDLKDYFPSVAGKRVGSLFRWLGYPDEVAWLLTCLCTTITPAAVEATAPAGADDVSLTFQTLYRRRHLPQGAPTSPAVANLCTFRLDRRLSGLAAKLGARYTRYADDLLFSGDAVFARKRRSFIACVYRVILEEGFQPAFRKTRVMARSTRQLATGLILNETLNVPRPDFDELKAILHNAMKHGLASQNRAGHPHFVDSLRGRIAFVSQANPRRGAKLKLKFEAVLENEKRPAST

SEQ ID NO: 5260 - protein, 429 aa, unidentified
  source 1..429: note = Related to NZ_BMXI01000009.1; note = Roseibacillus persicicus
MTPTTLWLKNLSTLLLEEERQLDAWLALIRKVIPGKPRRNFLIITREVWKVAKTRTVLENRELQQIFRENRRFWNWQRKWYATRTPLPPALIVGPATPVLDTSAWHLPELATVGDLADFFALQPDDLGWLLSPKAQHYHEQWLPKRKGGRRLLESPKPLLKQVQRTLLRELLDKVPPHECATGFRAGHSIVDFAQPHANKSIALKMDLANFFPSLGRSRIKRLFMSLGYREGVALALAVLTTHRSASPDLTFTEKELYSRYHLPQGAPTSPALANLAAFRLDCRLAGLAKSAGASYTRYADDLLFSGTEELARGLHRFENRVIIITREEGLEINFRKTRRMAASQRQAAAGLVFNQKLNVPRREFDTLKAILHNCRKHGVSSQNHSHHPDFQAHLRGRIAWIASLHPVRGERLRAAFEELDWSKPNAQE

SEQ ID NO: 5261 - protein, 477 aa, unidentified
  source 1..477: note = Related to NZ_ANOH01000392.1; note = Rhodopirellula sp.
MSDYPTAVGFELTQHSDRLASARLELSPRNERIVHRASLSPVFTMAPRPVVKRSVSAAELTKLLAASLSARWLGDTESVSRRLRKLTGSRAKWVQELAVSLNQQFGKQGYASGAEIIRHLRNNPYLQSARKNNKLFRLPVAEAISAPESDSPSIETDTQLVDFLGLPSLRALEWLLLPHLRRQTNVDHYTRRTLHQTNGKTRLIEEPRPVLKRVQRLILTEILSHVPIHDVAHAYRPERSVFTCAAPHTDCRVVLRMDIRDFFGTITLRRVAAQFRRCGYPRPIAFTLARLCTAATPITSESTEREQHLTIPHLPQGAPSSPTLANAVAFQLDRRLAGLTRAVDANYTRYADDLLFSGGQCLASRVDRIATTVAVIAMEEGFQIAHRKTRTMFSGHQQRVLGLTVNQKLNCDRRQYELLRAILTNCLRHGWESQNRDSHPNFAEHLRGRIAQIVQANPNRGQRLLHLYEQVSWNDPG

SEQ ID NO: 5262 - protein, 464 aa, unidentified
  source 1..464: note = Related to NZ_JACHXU010000006.1; note = Rhodopirellula rubra
MAPPSVAKRTVTASQLADLIASELATRWLGDVDEVTRQISKLTGSRAKWVRTLATSVTQQFGKTGHATRIQLLRSLRNEPHLRNARKKKKSFNVPVLSTTQPTSSLFPTIETDDQLVDFLQLPSLTVLDWLLVPHFRRQTQVDHYTRRVLRRRDGTTRLIEEPRPLLKRIQRLIHSEVLVDVVIHDVAHAYRGERSIFTCAAPHVGHQAVLKMDLQNFFGTITLRRIAAQFRRCGFPRPIALTLGRLCTAPPVSVVSPQTGKGFVQVNLINSGSANSGGNLNAVRMPAHLPQGAPTSPTLANAIAFQLDRRLLGLANAVGANYTRYADDLFFSGDRGFASRIDRFATTVAVIAMEEGFTVAHRKTRKMFSGHRQQLLGLTANEKLNSHRQQYEQLKAILTNCVRHGWESQNRENHPNFADHLRGRIAQTLQCNPNRGQRLMRLFHEIAWNETQPSRPSPDKPDP

SEQ ID NO: 5263 - protein, 445 aa, unidentified
  source 1..445: note = Related to JAGQPR010000068.1; note = Planctomycetales bacterium
MAALSLVPLRMDEKAAVNRAAFIKVLAFELSRTWLGSRQRIRQVLRRMLGRMPAWCEELSSMVHEEFSAAAYANQLQLRRFLGRVAALRSVFRKGRNLRIRTTALGRATAYRWPVPQARNEAELQDLLCLRSTVALDWLIKPHVVRSTNVDHYRRKMICKHDGQIRLIEEPRPLMKRVQKTIHRHLLAAIPVHSAAHGFICGRSIFSAASPHCGKRLVLCMDLANFFGSIDRRRTSALFRLCGYPAPVAFLLGCICTAPESNSPDMPGGELVKVSRLPQGAPSSPSIANAVAFRFDQRLAGLAHSVGADYTRYADDLTFSGNEQFVNSASRLIPLVGAIAIEEGFAVNHRKTRRFYAGHRQTVLGLTVNVSPAAARQSYESLKALLTNCVRHGPESQNRDNVDNFRSHLRGRIAYVGAQHASRNKKLLELFGRIHWDQSTPRDLQ

SEQ ID NO: 5264 - protein, 426 aa, unidentified
  source 1..426: note = Related to SJPU01000001.1; note = Planctomycetes bacterium Poly21
MESSLTRSQLAMLISRDLSRRWLGNSSVIHRRLRRITGSRARWTDQLAEALHLQFGRAGHAQQVPLQVWLDGHPVMKAAFRNRQTLRVDVATANQINRPGYRWPVPAAANLLELTDLLCLRTPRAIDWLVRPHLRRSTSVDHYVRRRIPGRQGRGRWLHQPRPLLMRVQRCIAREILTEIPLHAAAHAYRRGLSVRDCAAPHVGHRVVLKIDLENFFGTISLRRVTALFRAAGYPDEVAVTLGRLCTVPARTPSGTEDCRIAGTCLPQGGPASPAISNAIAFQMDRRLAGLASSVGASYTRYADDLLFSGGPDLASRIDRVATTVCVIAMEEGFQVQHRKTRKMYSGDRQRLLGLNVNTQLSTDRSDFELLKAILTNCQRQGWRSQNRDQHPEFRLHLQGRIAHIGQTNPGRYQKLARLFDAIDWT

SEQ ID NO: 5265 - protein, 434 aa, unidentified
  source 1..434: note = Related to JADYZV010000153.1; note = Pirellulaceae bacterium
MAEKTLDPALVSRRQFCRQLAGCMSRCWLGNDAHVRERLEQVLDCQATWVAELAKSLSASFSEIGYANRFALESWLRKQPTIKLFFKGKKSRRLTDEVQRALASRNHRWPVPPLDSDDDLCRLLEIASLRELQWLVLPHVRRNTAVDHYKRTCLKKKLGGYRWIEEPRPKLKAVQRRMLESVLPGIPLHSAAHAYRTGCSVQSCAEPHVGQRVVLKLDLRDYFGTISIFRVKALFANAGYSWPIALRLAQLCTAPARMDDLRDEARSLTRTRLPQGAPTSPSIANAVAYRMDRRLAGLAASVGASYTRYADDLIFSGDDNFAARVDRFATSAAAIVIEEGFAIQFRKTRKLFHGAEQRILGVTVNEKLNLNRRAFEGLKAELHNCARRGWRTQNRTEHADYRAHLRGRIAYAQSLNPTRGAKLLQLFEQVKWNE

SEQ ID NO: 5266 - protein, 462 aa, unidentified
  source 1..462: note = Related to CP036526.1; note = Planctomycetes bacterium K23_9
MTARRETRIDIGRARLVRILIARLNHRWLETPAQVLRLTQGLFGSQHSLEKQLATQLSQAHRENRLSTQQPLSRWLLRNELLIRYFRKKQTISICKSIVDSIEKSEHAYRWRVPAVDDEVQLAKFLLLGSSQVLQWLTLPHRRRRTDVNHYRRRAIPKRDGTLRWIESPSPILKRTQRIIAADLLPHVPLHDAAMGFRRGHSIHDSAARHVGKASVLRLDLQDFFGSIHFGRVRSLFAYAGYSSKVASTLAMLCTAPSETAPLDTSPPCITPLSNSARTSTRSALPELPSRLPQGTPTSPAIANAIAFRMDRRLDGLATAAGANYTRYADDLVFSFDSPSVAFAKRFATSVAVIAMEEGFKMNFRKTRLMRRGNRQRVLGMTVNEKLNVSRQAYETLKAILHNCAKRGPRSQNRTEHPNFREHLRGRIAHVASIHTGRGNKLTAVFETIDWDDDAPDYRQPD

SEQ ID NO: 5267 - protein, 430 aa, unidentified
  source 1..430: note = Related to JABDKS010000522.1; note = Pirellulaceae bacterium
MSSHTVTIDVDLKRFAGLLHRRLQYRHLPAPASVRDAIQPLFGRDKKLCEDLVQQIVDAQRNPQPLRHPQMLTWLSKNPAVKKRFRHRKRIKIQQSLVIQIESDGVYRWPVPPIANEGQLADFLSLSTPRIIDWLTLPHRRRSTSVDHYTRVASTKRDGTIRWIEQPAPTLKRVQRLIAQQILSTIPLHDAASGFRAGHSVPDCARQHVRRSLIIRMDMRHFFGSIHVGRVRNLFLIAGYPPQVARTLAFLCTAPASIDPDADELLRRSRLPQGAPTSPAIANAVSFAMDRRISGLCKTLNVTYTRYADDLIFSCDHFGLSQAKRFATTVAVIAMEEGFQINFRKTAFMRHGNNQRVLGLTVNQKLNSARKEYETLRAILHNCRRDGPAGQNRHDHPKFRCHLRGRIAHIASVNPHRGAKLMEQFDQIYW

SEQ ID NO: 5268 - protein, 444 aa, unidentified
  source 1..444: note = Related to JAGQOZ010000019.1; note = Planctomycetales bacterium
MPPATYSLDQVAAAFAKAAVVGVWKRTAVLDQWRKLIEPLPNGLKSVAMQLIGQFAHVPSQQVVAEFLQSNRMFQQAYAKNLVMRRVGWCDHQIVDAALAPKSRHVRNWDLPELTSPTDLASLLDCPENLLWQLADHRRCYWLRQSHYRLRMSRKRSGGLRLIEAPKPKLKTVQRRIWKRIIRWIPAHQAAHGFQPRRSIRSNAALHTGQSVVIRMDLQNFFASVSGARIAAIFRTAGYPESVALLLARLCTSKVSRFVWQMLCDENQAADLHGLVDQVSVWHLPQGAPTSPALANLAAFRLDRRLTGLAASMSSRYSRYADDLIFSGPTDLAKRSQAFVAKVTEIMVEEGFLPNTRKTRIMRPSVRQSVCGLTVNQKVNSNRADFKQLQAILHNCVTLGPAGQNRANVADFRAHLAGRIQFQRFIHPQRAAKLEAMFVRIKWP

SEQ ID NO: 5269 - protein, 450 aa, unidentified
  source 1..450: note = Related to JAEUHH010000058.1; note = Verrucomicrobiales bacterium
MPPEPLPECMIAAAAEQLAGWLQLRLLPEAQSLEAALESGLPGSISDRKPLLRRLSGIKEIATMPEADLAKIIAADPWFQAHGARSARHWRHQTRVREMTPRWEGLPILATEGDLCLWLGGLRPAELHWLAQTERGDHDPAGKLAHYVHRWIPRRHGAPPRLLASPKPLLKSLQRKILRDLLDHLPLHEAAHGFRRGRSIRSFAHPHTATDCVLRLDLADFFPSIRFGRVAALFETAGYPSPVARLLAGLCCHSAPRAVVRSAGLPRALADRLLRPHLPQGAPTSPALSNAVAFRLDRRLAGLAAAAGAQYTRYADDLAFSGGRDLWRGATRFLDRATAIVLDEGFEVNFRKIRVMPACARQRIAGVVVNEKTNTVRETYDALKAALHRWETRGLPEDDALFPERLLGRISALAQLNPEKGAKLRQRYDRVREGSGFHEMGSPPTSGGLL

SEQ ID NO: 5270 - protein, 346 aa, unidentified
  source 1..346: note = Related to JAGROW010000047.1; note = Verrucomicrobiae bacterium
PHPAVMTARWEGLPLLPSLSDLADWLEIASLSELHWLAGIDRGREAPPSRAVHYTYRWILRKNGSPPRLLECPKPKLKAIQRKILRQILDKVPLHDAAHGFRLRRSIRTFAVPHTGRECVLRADLADFFPSIRFGRVAAFFETSGYPASVARLLAGLCCHAPSKRGIRAAKLSPFSAAKWLRPHLPQGAPTSPALSNAIAFRLDRRLSGLAQASGAHYTRYADDLAFSGGSDLSRGADRFLALVATIALEEGLELNYRKSRVMPACSRQRIAGVVVNETPNTTRAIFDELKACLHRWETKGFDACAADDPEFSDRLLGRIAALAHLNPRKGEKLRQRFERLRGARQ

SEQ ID NO: 5271 - protein, 384 aa, unidentified
  source 1..384: note = Related to VFZW01000070.1; note = Acidobacteria bacterium
MTTAIPRLLAQAFLNGKLQRAGMIKRGAELLGQKWKWLGPLATRFLKEFGGAKPRLGDAVRFLRHDEGLCVARAGLRIAKWTPSNGVAAMRWKLPEMESPAALAEWLGLTDAEVAWFADRKNINKGKSSHYTYCVFEKPGKPARLIEAPKTRMKELLRRLLTDVFEKIPVHAAAHGFVARHSIKTFAAPHAGQPCLLKMDLANFFPSISRARVESLLITAGYDERVAELLAGICTNRAPRDVAPDPIYTRPHLPQGAPTSPAIANLCMFRADRRLRGLAESAGAVYTRYADDLAFSGASVGDRSALRIVRRTHLRIVRRTQAAEPVKHESPRLRHSRAGRPVQCSSMRTDSHQIAIRIIRVFGCCGCAVWVFHDDRQPPQRIMG

SEQ ID NO: 5272 - protein, 440 aa, unidentified
  source 1..440: note = Related to JAGQPM010000203.1; note = Planctomycetales bacterium
MATHRHIAKVIAGTAAAGQLTEDEIVARVAGVLGKRWRWLRPLARRMEERFAGRTRPRESAVHRWIIADDGFHRACRQHAIVIVEELPHRPEMRPPTGIAMTWNVPTITTVYDLAHWADLPLDELEWLADRRGREPSAEAKYRRYRYRVLSKGQSRFRLIETPIYRLKLLQRHLLSGILDHLSPHDAAHGFRKGRSIHTFADNHLGRQVVLKMDLRDCFTTIDFGRVSHLFRLAGYPERVADTLAAITTNTVPDQVWEAASGAHVFCPSERLPSIYASPHLPQGAPTSPAIANLCLYKLDLRLTGLAKACGASYSRYADDLAFSGDADFARCVQRVRHHIAAIIQEEGFEVNHRKTRVMRASTRQRITGIVVNQHRNIPRREYDQLKAILHNCISRGLQSQNRDKHTDYRAHLAGRVAFVEAVSPSRGQRLRDMLNQIDP

SEQ ID NO: 5273 - protein, 448 aa, unidentified
  source 1..448: note = Related to JAGQPF010000096.1; note = Planctomycetales bacterium
MKRVAEWFAVLFSRAATIGEMKGAAARLIGGQPRWVAPMLRRAEADAQVRDPPSELVGLSFQSWMHWLLHDRGFLARVSDPFAAIHRGPAESMMLPAAAAMDWPVPQILTVGDLAHWLDISPAELHWLANLDASWKLTGREGRHYQRVAHQKRFGEVRIIEAPRYRLKVVQRRILHGLLNRIPAHDAAHGFVAGRSTRTFAEMHARSRMVLRIDLRNFFVTIRRFQIAGVFALAGYPADVAYVLSRLCSAQMSVQEFSDLVGSPLEFRRASGAPSLAQTRRLYTRPHLPQGAPTSPMLANLCVYRLDCRLSGLAAAVGGRYSRYADDLAFSADLDVRQSKRLCTQIAAIVIEEGFQVHDRKTKRMRRGTRQRIAGVVINEHPNVTRQQYDQLKAILHNCARYGPESQNRDQCADFRAHLEGRVAHVGMLNPTRGAKLKRLLQQIDWGR

SEQ ID NO: 5274 - protein, 338 aa, unidentified
  source 1..338: note = Related to CP042912.1; note = Mariniblastus fucicola
MKFPVPKIRTLLQLANLLEIEPEQLRWLANPCGRRSAPDSWSRHYRSHWIRKRSGGWRLIEAPRSRLRYVQRILLDTIFNAMPPHVLAFGFCRNRSVIDFVKPHVGKDVCWRFDLTDFFTSVTTGRVAGLLRNSGYPCDVANSIAMLTTVQTSPRILSVEHPRATFSVQSPKHLRRHLPQGAPTSPAIANLCAYRLDARLSGLARSVGGVCYSRYADDILFSGDSDLARQSGRLRAHVGAIAIEEGFEINYRKTRLARASQRQFAAGIVLNEKLNVPRENFDRLKAILHNCVRSGPTSQNRDNHPAFRQHLEGRVQWVEMLNRGRGEKLRKLLERIEW

SEQ ID NO: 5275 - protein, 445 aa, unidentified
  source 1..445: note = Related to JACRUV010000555.1; note = Planctomycetes bacterium
MATQRFVADYLASAFVCGRWECDDLVDRGADALGRRWRWLRPLAQRALHTLGHDRRPSRFQVLRFLRQDEGLRRACHKHDVRVGGLQRKPPEMAPTAGHPVNWDVPPLVTVGELADWLDLKLTELDWFADRRGLERKVPRGPLRHYRYYWLSKRIGGSARLIESPKQRLKAIQRCILHEILDRIPPHEAAHGFCRGRSIRSFVAPHAGQSIVLRADLRDFFPCIPRRRVAGVFRTAGYPEEVSQCLAALGTNEVPDDVWRSFPQYGNVADRWRHQRLYGQPHLPQGTATSPAIANLCSYRLDCRLAGLARSFRGRYTRYADDLLFSGGRVLARSIGKFHRVVYAIAMDEGFEINPRKTRIMRQGVRQCAAGLTVNRHPNIPRDEFDRLKAILYNCARRGPGNENHARLPEFRLHLDGHVSFVESVNPARGQKLRSLFERIQWPAT

SEQ ID NO: 5276 - protein, 445 aa, unidentified
  source 1..445: note = Related to VGYH01000867.1; note = Planctomycetes bacterium
MVNQDLVASALAAAFVGGRWQVDELVARGARALGRRWSWLRPLASRLLHVLGEDSLPSRSQIERFLLQDAGFQRACLEHAIRVGGPGRNYPMMSPAAGSPASWGVPPLVTVGELAKWLGLEGKQLDWFADRRSLERTTPAGPLRHYKYYWLSKRLGGSARLVEAPKWRLKMLQRRVLRGILDNIPPHAAAHGFWRGRSIRSFAAAHVGQAVVLRMDLKDFFPSIAKARIVAVFRTAGYPEDVCQLLAALCTNHVPDDVWQRFPQYGGAADRWRHEGLYARPHLPQGTPTSPALANLCAYRLDCRLTGLAHAVGGKYTRYADDLLFSGGEALARSLRRFEATACSVIIDEGFAVNFRKRRIMRQGVRQHATGLVLNRHVNVARDEYDRLKATLHNCVCQGPTGQNRGGVRDWRLHLQGRIAFVESINPDRGRRLRRLFDRIQWPRD

SEQ ID NO: 5277 - protein, 447 aa, unidentified
  source 1..447: note = Related to JAEUIH010000118.1; note = Planctomyces sp.
MSSRKSIARRLTVAVLAGRFGKDSILERTLPLIQGSPTWLKRFVDQLIRRFGNQRPKRSYVLAFLLSNREFIDASLNEDFDVQPYLLPSEFSPSPGNFEAIDVIRLRSSGEVAAWLKLNENELSWFADRHQLERLSTVGPLRHYRYFWKLKRHGRCRLIEAPKFRMREIQRRLLREILSRIPVHNAAHGFRRGRSANSHAAPHVGRSVVLKLDLEDFFPSVPPMRLTRLLMHTGYPEDVAEILTALCCNHVPSDVFDSFPHRDDWKLRRRAKQLYCRPHIPQGAPTSPVIANLCAYRLDTRLAGLAQSANATYTRYADDLLFSGDDQFSRGIDRFRILAAAIAMEEGFAVNHHKTRVMKRSIRQEAVGLVLNEKINTRRDEFDRLKATLHRCILKGPEAVNCGQHAHFRQHLIGRIQHIAQSSQSRHTKLMALFDQINWSDPQSPST

SEQ ID NO: 5278 - protein, 441 aa, unidentified
  source 1..441: note = Related to JAGQQS010000555.1; note = Planctomycetaceae bacterium
MNTPESAARRLAVAILAGKFEKEAILQRTLPIISGSITWMKRLVNQIIKRFGNQRPRRRDLVTFLLHSRGLSNASEQEDFQIRAYDQAADFLPSPGLFENVGVLPLRSVGEIGEWFGLGESELLWFADRRQLERVLPDGPLRHYRYHWKLKRHGKCRLIEAPKFRLREIQRKLLREILNQIPVHNAAHGFRKNRSAQSHAAAHVGKAIVLKMDLEDFFPSIAPAQLVRILMHVGYPEDVAEVLTALSCNHVPYEVFSSFPHMADGRQKRHAQQLYCRPHFPQGAPTSPAIANVCAFRMDRRLAGLARSANAVYTRYADDLLFSGDEKFARSINHFRISVAAIAIEEGFTINHHKTRVMKRSVRQEAVGLVLNEKLNTRRDEFDRLKAILHRCVLRGPAAVNEGRHADLRSHLRGRIQYVAQTNQGRHAKLSRLFEQIDWSD

SEQ ID NO: 5279 - protein, 479 aa, unidentified
  source 1..479: note = Related to JAEUHE010000137.1; note = Verrucomicrobiales bacterium
MSVARFIARATLRWRADPLTHNGTRWSTVPLSTLMEFANQVARQLAIAIQQGRIEEEALVQRIREHCLGRQRWLRSFARRFVAHFGEGRRWRRLRMERFILKDAGFRRAVAMSQLSLRSGINPAPGMCPAAGAPEHWKLPELATTGDLARWLNLEPGELAWFSDSRTQEQTLPEGPLRHYRYHWVLKRGGSARLLECPKQRLKLFQRHVLFQLLNRIPIHPAAHGFQAGRSVQSFAQPHVGREIVMRLDLQDFFPSVMKSRVLAIFLTAGYPEPVAAMLAGLCTNASPFAVLSSCPATVHPTQRCHLKDLYRRPHLPQGAPTSAALANLAAFRLDLRLHGLAKAAGAAYTRYADDLVFSGDSAFARMVERFYIQVCAIALEEGFAVQTRKTRMMRRSVSQRAVGLVLNDRLNTPRREFDCLKAILHNCVVQGVAAQNRADHPRFKEHLAGRIAYMESINPGRGIRLRRDFDRIIWPDPT

SEQ ID NO: 5280 - protein, 442 aa, unidentified
  source 1..442: note = Related to JACPRJ010000368.1; note = Verrucomicrobia bacterium
MRLAAKIAHALATAILNGTLTTEGVYKRGAAVLGCRWAWLRPLAKRIIAHFGEGTRPRVFRLERFILANGGFLKACEKHQLTLRPDAHFEPAMCPAAGPPRRWKVPRIRTPGELARWLGVEFNQLLWLADCRTQEQKLPPGPLRHYCYHWQPKRDSSARLIESPKPRLKTIQRQVLHEILDRIPPHAAAHGFRAGRSIRSFVKPHVKREVVLKLDLKDFFPRIARARVLAIFLTAGYPEAVAELLTGLCTNSVPSEVIKACPAATNPLRAREAKQLYQRPHLPQGAPTSPALANLAAYRLDCRLAGLAKAAGARYTRYADDLVFSGGKPFARMVDRFYIQACAIALEEGFEVHTRKTKIMRRSLSQRAAGIVLNEHPNVPRREFDRLKAVLHNCVVHGPASQNRDGVADFRAHLAGRVAHVEVINPARGRKLREGFERIEWE

SEQ ID NO: 5281 - protein, 386 aa, unidentified
  source 1..386: note = Related to JAIOQE010000901.1; note = Planctomycetales bacterium
SRTALTRFILGNAGFQAVCEEDPDLSLSGSRHFVPAMTPQNSRAASWPVPPLVALQQLADWLGITPGELAWFGDLNSLQRSVPNGPLCHYGYHWIRKRGGSFRLVESPKARLKQLQRKVLHELVDKIPPHDSTHGFRQGRSICSFVKPHVGKRVILKMDLQDFFPSITRWRVTGIFLYAGYPEEVARLLAGICTNEAPPQVLRSLPACERQRAWQLESLYQIPHLPQGAPTSPGLANLCAYKLDSRLAGLARAAGGTYTRYADDLLFSGDDAFARSVKRFYIHAAAIVLEEDFTINFHKTRIQGQSVRQRAAGLVINSHANIQRDSFDNLKATLHNAARFGPAGQNRGGVADFRAHLGGRIAFVEMVCPPRGEKLRRIFEQIAWEG

SEQ ID NO: 5282 - protein, 451 aa, unidentified
  source 1..451: note = Related to NZ_CP042997.1; note = Aquisphaera giovannonii
MERPPLSSSSFHRLRRYCLILARAFLAGPWERQGLVERGRATVQRKAKWLDSAAKRAMEAFPTCAALREARLADHLAGDPDVLKAATSGRVPLRPQALVDLRPEMRPPPGPSAAWSVPAIATPAELAAFCDVSPVQLEGLADCQGRERRTPREPLRNYRYRAFPKASGGFRIIEAPKPRLRRMQRLLLDEILAKIPAHEAAHGFRPGRSVMSFVERHVGRHVVLKMDLADFFPSITAARVLAIFMTAGYPEDVAKLLAGLCTNAVPMHLERLLGGTPVGDWRSRKLLAGPHLPQGAPTSPALANLAAYRLDLRLDALARSAGAHYTRYADDMVFSGDESFARSAGRFALSVSAIALEEGLAVRNRKTRVMRRGVRQRAAGIVLNERPKIPRDDYDKLKATLHNCLRHGPAGQNRDGHMDFRAHLLGRIAYVARIHPGRGERLMRSFDRITW

SEQ ID NO: 5283 - protein, 441 aa, unidentified
  source 1..441: note = Related to NZ_JAALJH010000014.1; note = Aquisphaera sp.
MSSSRHPHRRFALVLARAFLAGPWEHPELVGRGRTAIGRKGRWLDAVARRLLVAFPSPAALRARWIADHLLADPQFLKAIGKARVPLRAELSPVMRPAPGEPASWLVPAITTPAELAAFCGVTITQLEGLADCQGREKKARREPLRNYRYRVVAKPSGGSRLVESPKPRLKAIQRRLLDEIVARIPPHDAAHGFRPGRSVSSFVAGHAGRHIVLRMDLADFFPSITSARVEAIFMTAGYPEDVARLLAGLCTNVVPRHLEDGDGADRATGWHSRRLLAEPHLPQGAPSSPALANLAAHHLDVRLDALARAAGARYTRYADDLVFSGDDAFARSVRRFSIHVAAITLEEGFAVRHRKTRIMRRGVRQRAAGIMLNVRPNIPREDYDALKAILHNCARHGPEGQNRAGVSDFRAHLLGRIAYVSGIHPQRGARLKRTFDRIAW

SEQ ID NO: 5284 - protein, 449 aa, unidentified
  source 1..449: note = Related to CP003364.1; note = Singulisphaera acidiphila
MGRPPLLSTQNAEFIVRELANAFVEGVWDLDGLVARGEQTLGRRPRWLRHLARRLLAAFNDGRRPPAAQIARFIHNDRGFDRVRERYELTMEWSRRPPPVMSPGPGEPESWPVPAIVTPEDLAERLGLTRSELDWFADSQAREGRGSPEKLRHYHYRWQAKRSGSARLIEAPKPRLKAIQRRLLDEIVAMVPPHDAAHGFRLGRSVRTYVEPHIGRTIVLKMDLRDFFPSISAAWITALFLTAGYPEPVARLLSGFCTNSVPPDIWADPRCPIQGPEHWRLRRLHRQTHLPQGAPTSPAIANLCAYRLDCRLQALATSVEARYTRYADDLAFSGDQRLARAVERFQTQVGAIALEEGFVVQHRKTRAMRQAVRQRVAGVVLNVRPNVPRPDYDRLKATLTNCIKQSPQSQNRDGHADFQAHLRGRIAYVAALNPNRGQRLRALFEQIAW

SEQ ID NO: 5285 - protein, 445 aa, unidentified
  source 1..445: note = Related to JACKIC010000007.1; note = Planctomycetes bacterium
MVLSASSLPLRLARTLLSRPFTWQAVEEALVDARGGPDPGLTRLVTVLLLRLRALRTRARSRAALHELVDYLDNSRRVERLFGEVGPELAELPPPTMLPLPGAPKRWQVPAITTVAQLADWLRVQPDELLALACRWRQDREHRDDRLQHYHRRWLPRRGGPPRLLEAPKARLKAVQRRILTGILNAAPPHRAAHGFVRGRGVGTFAAAHVGAACVLRLDVADFFASVRGARVRGVFLAMGYPIDVAELLACLCTTRTPDRVCHRGLHDFGTVGAVLATRLRARHLPQGAPTSPALANLVAFHLDARLTGLARRFGARYSRYADDLLFSGVGAFVRGANRLAVYVAAVLLQEGFAAAHRKTRRMPQGVAQHAAGLVLNVHGAVPRRERERLEAVLVNCVRHGPASQNRVGRVDFEAHLRGRIAHVEHHHAPHAARLWRWFDRIVWE

SEQ ID NO: 5286 - protein, 439 aa, unidentified
  source 1..439: note = Related to JAGQRA010000173.1; note = Planctomycetes bacterium
MPLSVEQHARDVARTLVARPFTAPAIEAVLVVECGRPDPRLARLAKALALRFGGLRRPRAREVADYLVRRRRYAETAAACEMQLQDLPRRSMLPLPGAPATWKVPAIVTTTELAAFLRVGAEELAAWCRRWRRSPGRPDPRHEHYHCRWLPRHGAPPRLLEVPKTALKRVQRRILTGILQAIPPHPVAHGFVRGRGVATFTAQHTDRDCVLQLDIEDFFGSIQERRVRAVFVAAGYPVDVAAALARLCTTHTPPRVLAELVSNDRARRLATRLAMTHLPQGAPTSPALANLIAFRCDLRLAGLARRFGGGYTRYADDLLFSGGPEFAADARRCATHAAAILETEGFAVAHRKTRVMRRGVAQRAGGLVLNRHGAVPRASRERLEAILTNCVRHGPASQNRAGVVDFAAHLQGRVAHVAHHHPPHGVRLLRLLAQIDWCR

SEQ ID NO: 5287 - protein, 436 aa, unidentified
  source 1..436: note = Related to JAFEGM010000060.1; note = Verrucomicrobia bacterium
MNRPDLAAALVARRIVAGTIEPAAVTEALVETGGLRLRRARPLARQIVRQFGGVLRPRWRDVARLLAGNRMFRRQCRGSAAAGAAAPPTMRPAAGAPQQWPVPPLTTPGELAAWLRLSPEELLFLAARWRERLPSEPRVRHYHYAWHPRRHGPPRLLEVPKARLKWVQRRILRGILDHIPPHAAAHGFRRGCNILSYTSTHTGRACVLRMDVQDFFPSLRRGRIVRIFLTAGYPEPVATLLADLCTTATPAEVLRPLAAPISARAAQLRVALRSRHLPQGAPTSPALANLCAFGVDARLAGLARRFGATFTRYADDLLFSGDAGFARSARRCEVRVGAILLELGLTVAHRKTRVLPRSVCQRAAGLVLNERPGLPRRERDRLKAILTNCVRHGPASQNRANLPDFAAHLRGRVAHALATHPASAARLLALYERIVW

SEQ ID NO: 5288 - protein, 439 aa, unidentified
  source 1..439: note = Related to JAGQQE010000253.1; note = Planctomycetaceae bacterium
MSLLSRDVDSLVDAFVAGEWTEPSMLHRCGVIVDGKPKWLPFLIQRVLKRFPGVRPTRRALTDFLYEDRRLAAASERITTLTNHIRMNSEFDCQLTSLKSSVRPTWTTVRQLADWFDLPVEHLLWFADSSQIGRQHPHGPLCHYHYRWVEKRRSGRRLIESPKPGLRQMQRRLLNECLRHLPVHDAAHGFCKGRSVDTFVQSHTGRQVVLRMDLQNYFPSLRPFRLMRLLMLAGYPEVVARTLSNLCTNTTPSSVLRDYSSISLSNSDRHLTVLLRQPHFPQGAPTSPLIANLLSYRLDARLQGLAQSAGIHYSRYADDLLFSGDERFRRCVKQFRIHVAAIVIAEGLNVNHRKSRIMLQSRQQRATGLVLNQHPAVSRRDFDLLKAILHNCIRFGPQTQNHSGIDNFRMHLLGRIQHMARYHPSRAQKLMHSFEQITF

SEQ ID NO: 5289 - protein, 434 aa, unidentified
  source 1..434: note = Related to JAGQPY010000402.1; note = Planctomycetaceae bacterium
MKVSHLADAMLAGVWVQQEITERVLQVVKTPRRWVPSLVRRTILAFPDHRPLRSVLCQFLMTDDSLRSRACDDEFEVLAYSGNDEFDNHRFDDSARRPVRWQTFGQLAEFLDLEISELSWLADLRGLQRTAPDGPLNHYHRRWQLRRRAVPRLIESPKPRLKSVQRRILQCCLSRLPLHSAAHGFRKGRSVSTFLQHHAGQSCVVRLDLHDFFGFLSPIRLLRLLMMFGYSESVARTITAICSTTTPEHTIERMPQNFVDRRQATTLQRLRSRHFPQGAPTSPAIANLIAWKLDQRLTGLATTFGATYSRYADDLLFSGDEDFRRRAQWFTTCVAAVAMDEGFEVQHRKTRIMTRSVRQQACGLVLNHRPTVSRREYDVLKATLHNAVRFGPESQNRSRHSGFRQHLLGRINYVRQWNPARAVRLMALFDSIRW

SEQ ID NO: 5290 - protein, 431 aa, unidentified
  source 1..431: note = Related to NZ_JAENIJ010000042.1; note = Luteolibacter pohnpeiensis
MPSRIHHARRLATALAAGSMANHDELIHRAAPLMGDIRKARWLKALARNLSLEFAEAPRPTIRKITDRILHDPGFTRAWILGKARIGIGFTQPEMAPAPGIAVAWGVPAITTLAELADLLRLHPDDLGWLTARNSSEHYRYRWQIKPKSGRYRLIESPKELLKGAQRRVLRKILNLIPPHEAAHGFRPGGSIRNFVEPHSGKPMLLRFDLEDFFPSITSTRIFHIFLTAGYPENVAQALTAICTHSTPSQTIGEKPLNSHERSRLTTRHLPQGAPTSPALANLSAYRLDCRLLGLAQSIGATYTRYADDLLFSGDQKFARKSKGLQAMIGGIILEERFSINHRKTRVLRQAQKQHAAGLILNQKPNIDRREIDQLKAILTNCIRFGPESQNRNNHPDFAAHLAGKLSWIRFIQPQKALKLESLFERIDWPA

SEQ ID NO: 5291 - protein, 430 aa, unidentified
  source 1..430: note = Related to NEUO01000019.1; note = Verrucomicrobiae bacterium Tous-C4TDCM
MPSQAQHVRRLAAALAAGPMDDREAMLARVKPLVGDLRKARWLEPLVRNLSLEFGEAPRPAIHHVAGRILGHPPFVKAWIAGQGRILPLPVTPQMAPAMGAPRDWQIPAITNLTELADELRLHGDDLGWLIAHGQADHYRHRWQAKPKSGRFRLIESPKTLLKFAQRQVLRRILDAIPPHEAARGFRPGNSIRDFVEPHTGRELLLRFDLEDFFPSLCAARVLRIFLTAGYPETVARALTRLTTRATPHSTLEEKTLAWAERRRLATPHLPQGAPTSPALANLGAFRLDCRLAGLAEAAGARYTRYADDLLFSGGADFARQSRRFETAVGAIILEEGFRPNHHKTRVLRQGQKQHAAGLVLNDKPNIDRRDFDRLKAVLTNCVRHGPASQNRDHHADFAAHLQGKLAWVRFIHPGKEEKLQGIFDKIDWD

SEQ ID NO: 5292 - protein, 451 aa, unidentified
  source 1..451: note = Related to JAFLEF010000009.1; note = Verrucomicrobia bacterium
MTPTEERWIASLAKMALAGEWEAAALLERGQVWLGSRPRWWLRLVHRLLRQFGPGTRPRLSRVESFLRRDPWLRKVLLKGDLKGDANPPEPVQCAARGRPATWKLPSFTRPVELASWLRVSVGELEWLADAQGWRSGEACERLGHYHYRWLRKRDGSARLIESPKQHLKLIQRGLLDAVVSAIPAHESAHGFQPGRSTLTHVGPHIGREVVLKYDLRDFFTRVTRPRVQAVFRTAGYPEAVAALLAALCTHRTPARIWRQFPGFETDPLIRARARNWQCPHLPQGAPTSPALANLVAYRLDCRLAGLAKAAGASYTRYADDLLFSGGSELARGAERFGIMVGAIALEEGFELNTRKTRVLRRGVAQRAVGLVLNDRINVPRAEYDRLKAILHHCVRQGPAGQNREGVPDFAAHLAGRVAYVTQTNPQRGARLQQWLDQIDWSRSSESAAAT

SEQ ID NO: 5293 - protein, 445 aa, unidentified
  source 1..445: note = Related to JAHWKS010000775.1; note = Planctomycetes bacterium
MQTARDAARTIAQLLLSGPFDEPAVWERLRPLAGRRRWLRFCIRRMLTAWKGTGHPSSAWIIDFLLSDARFQASWPTLRTPEPRMSPAAGAPLQWPVPSLGTPDEVATWLAVSHRELEARADTWGREARTPAGPMRNFDYSWRGKRSGAARLIEAPRPRLRSLQRKVLHGVLDAIPPHDAAHGFRRGRSVATFTAPHVGKQIVVRMDLRDFFASIHRAQIQAIFATAGYPPAVAKLLAALCWNAAPDDIWLDFPGTLPDDLGRLPAARLYRRPHLPQGAPTSPAVANLCAYRLDCRLAGLARSAGAAYTRYADDLLFSGDADFARTARRFTLHVAAIAREEGFAAHPRKTRLMRQGVRQFAAGVVLNERPNVPRRDYERLKAILHRAARIGPSPSAGETLMTYRARLAGKIAWVASISPRRGEKLQAVFEQIDWGRPNVGHSLCE

SEQ ID NO: 5294 - protein, 429 aa, unidentified
  source 1..429: note = Related to JABGQM010000001.1; note = Verrucomicrobia bacterium
MLKARHIESLTRGVAAALLAGPWEWEAMLDRSADALGRRWRWRRGLIRDMLLQHPSPVAYEALVQAIAANPHFRGAINDRTRPHIVHWFPWPTGMAPRYPAWHLPVISSVGALAALLDLPEEKLHWLADCEHRQGRPDELLRRHYRHYWLRKPSGGWRLVEEPHYLLKQAQRGILHGVLDRVPPHPAACAFVHTRSVVDYAAPHVGRELVLHLDLKEFFPSIPASRVHAMLTTLGYPTEVARLVTGLCTSTVPGYICRQRPGGKIYSAPHLPQGAPTSPALANLAAYRLDGRLAGAAASVGACYTRYADDLAFSGDEPFARSVNRFQAMVWRIVAEEGFDIHHRKTRLMHKSVRQRLCGLVVNDHLSIDRRVYDRLKAILTNCLRHGLESQNRDGHSDFRAHLCGRVAFVEQVNPARGARLRDLLKQVA

SEQ ID NO: 5295 - protein, 479 aa, unidentified
  source 1..479: note = Related to CP000442.1; note = Burkholderia ambifaria
MRRKSAGCALRNDCSRSTCHVDSSSRPFLAMHASRFDTARMIAEAMLAGPPERGGMLERIKTVLGAAPSWSHELVDHAIAHFGTHWADVDTDLLASALADTSAFMIAWYGRDRPVVMRIVRRPPVQRLLPARLAGADVPQWPTCGDLARWLGVSAPELDWLSERWRVDARGSGSPLHHYTYTGYDKRRGGCRLIEIPKGRLREAQRRILHGLLDRIPPHDAAHGFRKGRGIVSFAAPHADRDVVVRFDLADFFVSVRAARVHALFVTLGYPAEVARTLTALCTNRVPSARLLEADLRDRFDWTGRQRYRNRHLPQGAPTSPALANLCAFRLDMRLAALARSLDATYTRYADDLAFSGGGALAREAGRLQVRVAAIALEEGFALQLRKTRVMRRGVRQQLAGVVVNRHPNLARDEFDVLKAILTNCIRHGPASQNRAAHPDFRAYLAGRVAHARALNAARGAKLHALFARIAWDGCSFGA

SEQ ID NO: 5296 - protein, 420 aa, unidentified
  source 1..420: note = Related to NZ_CP086299.1; note = Burkholderia ambifaria
MHASRFDTARMIAEAMLAGPPERGGMLERITTVLGAAPSWSHELAEHAIAHFGTHWADVDTDLLASALADTSAFMIAWYGRDRPVVMRIVRRPPVQRPLPARLAGADVPQWPTCGDLARWLGVSAPELDWLSERWRVDARGSDSPLHHYTYTGYDKRRGGCRLIENPKGRLREAQRRILHGLLDRIPPHDAAHGFRKGRGIVSFAAPHADRDVVVRFDLADFFVSVRAARVHALFVTLGYPAEVARTLTALCTNRVPSARLLEADLRDRFDWTGRQRYRNRHLPQGAPTSPALANLCAFRLDMRLAGLARSLDATYTRYADDLAFSGGGALAREAGRQQLAGVVVNRHPNLARDEFDVLKAILTNCIRHGPASQNRAAHPDFRAYLAGRVAHARALNTARGAKLHALFARIAWDGCSFGA

SEQ ID NO: 5297 - protein, 449 aa, unidentified
  source 1..449: note = Related to CABVLY010000011.1; note = Burkholderia anthina
MHASLFDTVRTIAEAMLAGAPERGGVVDRIAAVLGAAPPWAHDVSDDALARFGAQWADVDTDRLAGMLADAPAFLNAWYGPHRPVVIRVVRRPPVQRPLPPRLAGCDVPLWPTCGDLAEWLGVSTAELDWLSDRWRVDARSADTPLHHYTYTGYDKRSGGCRLIEMPKGRLREAQRRILHGLLDRVPPHDAAHGFRKARGIVSFAAPHADRDVVVRFDLADFFVSVRAARVHALFDTLGYPVDVARTLTALCTNRVPSARLLAPDLRDRFDWAARQRYRYRHLPQGAPTSPALANLCAFRFDMRLAALARSLGATYTRYADDLAFSGGDVLARDAERLERRVAAIALDEGFALQLRKTRVMRRGTRQQLAGVVVNRHPNLARDAFDLLKAILTNCIRHGPASQNRAAHTDFRAHLAGRVAHAAALNPARGAKLQALFDRITWDTCSPGA

SEQ ID NO: 5298 - protein, 449 aa, unidentified
  source 1..449: note = Related to CP013399.1; note = Burkholderia seminalis
MHSSLRDTTRTIAEAMLAGSPERDGVVARMAAVLGGAPVWADEVADASLARFGAHWADTAIDALAAVVAEAPGFVRAWYGDPRPAVIRVVRRPPVQRPLPAPLAGCEVPPWATPGDLADWLGVSVPALDWLSDHWRVDARSGATPLHHYTYVAVDKRSGGCRLVEIPKGRLREAQRRILHGLLDRIAPHGAVHGFRKGHGIVSFAAPHAGRDVVVRFDLADFFVSVRAARVHALFATLGYPVEVARTLTGLCTNRVPSARLLAPDLRDRFDWIGRQRYRERHLPQGAPTSPALANLSAFRFDMRLAALARSLDATYTRYADDLAFSGGGALARDIERLQIRVAAIALEEGFALQLRKTRVMRRGARQQLAGVVVNRHPNLARDEFDRLKAILTNCIRHGPASQNRDAHPDFRAHLAGRVAHAAALNAARGAKLRALFDRIAWDAHDAGR

SEQ ID NO: 5299 - protein, 449 aa, unidentified
  source 1..449: note = Related to CP015035.1; note = Burkholderia cenocepacia
MHSSLRDTTRTIAEAMLAGPPERDGVVARMAAVLGEAQPWTPECAGTALARFGANWADTDTDALAALLAEAPAFVRAWSGERRPVVIRIVRRPLVQRPLPAPLAGCDVPQWPTPGDLAGWLGVSAPELDWLSDHWRVDARSGATPLHHYTYVAVDKRSGGCRLVEIPKGRLREAQRRILHGLLDRIAPHGAVHGFRKGHGIVSFATPHADRDVVVRFDLADFFVSVRAARVHALFATLGYPAEVARILTGLCTNRVPSARLLAPDLRDRFDWIGRQRYRERHLPQGAPTSPALANLCAFRLDLRLAALARSVDATYTRYADDLAFSGGGALARDVARLQVRVAAIALEEGFALQLRKTRVMRRGTRQQLAGVVVNRHPNLSRDAFDRLKAILTNCIRRGPASQNRDAHPDFRAHLAGRVAHATALNAARGVKLRALFDRIVWDAGGAGR

SEQ ID NO: 5300 - protein, 449 aa, unidentified
  source 1..449: note = Related to CP011301.1; note = Burkholderia cepacia
MRASLSDTVRTIAEAMLAGLPERGGVASRIAAVLGDAPPWAHELADAAIARFGPNWADADIDALARFVADAPGFVRAWHGDRRPGVMRVVRRAPVQRPLPAPLAASDVPQWPTCGDLAAWLGVSASELEWLSDRWRVDARSSGSPLHHYTYVAYDKRRGGCRLIEIPKGRLREAQRRVLHGLLDRVPPHDAVHGFRKGRGIVSFAAPHADRDVVVRFDLADFFVSVHAARVHALFDTLGYPAEVARTLTALCTNRVPSARLLAPDLRERLDWATRQRYRNRHLPQGAPTSPALANLCAFRFDMRLAALARTLDATYTRYADDLAFSGGAALARNAERLEVKVAAIALDEGFALQLRKTRVMRRGVRQQLAGVVVNRHPNVARDEFDRLKAILTNCIRHGPASQNRDAHPDFRAHLAGRVAHATALNAARGAKLHALFGRIAWDAGGFDT

SEQ ID NO: 5301 - protein, 449 aa, unidentified
  source 1..449: note = Related to NZ_CADFDQ010000020.1; note = Burkholderia pseudomultivorans
MYAPLSDTVHTIAEAMLAGSPEPDGVAARIAAVTGDAPPWARPLADAATVRFGPRWADLDIDTLARFVVDSPGFVRAWYGADRPAVIRIVRRPPVQRPLPLPLAGCDVPHWPTCGDLAGWLGLDAAELDWLADRWRVDARGSETPLHHYTYMACDKRRGGSRLIEIPKGRLREAQRRILHGLLDRVPPHESAHGFRKGRGIVSFAAPHADRDVVIRFDLADFFVSVRAARVHALFDTLGYPAEVARMLTALCTNRVPSARLLAPDLRDRFDWTGRQRYRNRHLPQGAPTSPALANLCAFRFDMRLAALARSLDATYTRYADDLAFSGGATLARAIDRLQVRVAAIAFDEGFALQLRKTRVMRRGARQQLAGVVVNRHPNLARDEFDLLKAILTNCVRHGPASQNRDAHADFRAHLAGRVAHAAALNAARGAKLRALFERIAWGDAEAGT

SEQ ID NO: 5302 - protein, 451 aa, unidentified
  source 1..451: note = Related to JAAGPL010000085.1; note = Burkholderia sp.
MYSSLYDITRTLAEAMLAGPPETDGVAARMAAVLGDAPPWVHAVARDAIERFGNLGKQWAAIEPNDLSLLVASAPGFVAAWHSDARPTIVRIVLRPPQQQPPPPALDAPDLPRLPTLGDLADWLGLSVPELDWLADRWRVAPRSETPLHHYTYRAFDKRGGSCRLVEIPKGHLREAQRRILHGLLDRVPPHHAAHGFRKGRGIVSFAAPHADRDVVIRFDLADFFVSIRAARIHALFRTLGYPLEVARALTALCTNRVPSARLLAPDLRDRLDWSGRQRYRNRHLPQGAPTSPALANLCAFRLDTRLAALAHSLDATYTRYADDLAFSGGAVLARAAERLPARVGAIALEEGFALQWRKTRVMRRGVRQRLAGVVVNRHPNLARDEFDTLKAMLTNCVRHGPASQNRVAHPDFRGYLAGRVAHATMLNDARGAKLQAIFDRIVWDAGDGDA

SEQ ID NO: 5303 - protein, 445 aa, unidentified
  source 1..445: note = Related to NZ_SMRO01000001.1; note = Paraburkholderia flava
MNASLYDLTHTLAEAMLAGPPEPDGVTARIASVLGDSPPWAREVAVNAINSFGPRWADATPRDLSFVIADTSGFVNAWQSDNPPTIARIVLRPPEQRPPPQALAALDLPQWSTTRDLADWLGLAIPEFEWLADRWRVEPRSSGTPLHHYTYRTFDKRDGGCRLIEIPKGHLREAQRRILRGLLDRIPPHEAAHGFRKGRGIVSFAEPHVDCDVVIRFDLADFFVSIDAKKVHALFATLGYPLEVVRALTALCTNRVPSARLLAADLRDRLDWAGRQRYRERHLPQGASTSPALANLCAFRLDTRLAALAHSLDATYTRYADDLAFSGGPVLARVAERLPVRVASIAIEEGFTLQLRKTRVMPRGVRQRIVGVVVNRHPNLARDQFDALKATLTNCVRHGPLSQNRDAHADFRGYLAGRVAHATMLNAARGSKLQAIFDRIVWEGV

SEQ ID NO: 5304 - protein, 464 aa, unidentified
  source 1..464: note = Related to NZ_JACBNX010000003.1; note = Burkholderia guangdongensis
MHSSLYDTTRTIADAMLAGPAEPDGVAARIAAVLGDSPPWVRDVALDAIARFGERWADVEPDELSRLVVGAPGFVEAWRRGGRPTIVRILRQPAVQRPLPPPLAALDLPPLPPLPQLPTSGDLADWLDLTVPELEWLADRWRVAARGSETPLHHYTYRAFDKRDGGCRLIEIPKGRLRDAQSRVLHGLLDRVPPHDAAHGFRRGRGIVSFAAPHADRDVVIRFDLADFFVSVRAARIHALFGTLGYPAEVARTLTALCTNRVPSARLLAPDLRDRFDWSGRQRYRNRHLPQGAPTSPALANLCAFRLDTRLAALARSLDATYTRYADDLAFSGGAGLARAIERLQVRVAAIALEEGFALHMRKTRVMRRSVRQRLAGVVVNRHPNLARDAFDTLKAMLTNSVRHGPASQNRDAHPDFRGYLAGRVAHATMLNATRGIKLRAIFDRIAWDAGDVDTIPDGNGSQP

SEQ ID NO: 5305 - protein, 449 aa, unidentified
  source 1..449: note = Related to CP013414.1; note = Burkholderia ubonensis
MRSSVYDTARTIADAMLAGPPDPGGVAARMAAVLGDAPPWLHDVERDAVARFGARWAAVEADDLTRLVAEAPGFVAAWRSDSPPAIVRILPRPAVQRPLPAALGALDLPQWPTPGELAGWLGIAVPDLDWLADRWRVAARGSETPLHHYTYHAFDKRDGGCRLIEIPKGRLREAQRSILHGLLDRVPPHDAAHGFRKGRGIVSFAAPHADRAVVIRFDLADFFASVSAAKVHALFDTLGYPLEVVRTLTALCTNRVPSARLFAPDLRDRLDWSGRQRYRNRHLPQGAPTSPALANLCAFRLDTRLAALARSLDATYTRYADDLAFSGGAVLTRATEWMTVRVAAIALEEGFALQLRKTRVMRRGVRQRLAGVVVNRHPNLARDEFDTLKAILTNCVRHGPASQNRAAHADFRGYLAGRVAHATMLNAARGMKLQAIFDRIVWDAGDIGA

SEQ ID NO: 5306 - protein, 449 aa, unidentified
  source 1..449: note = Related to VWWJ01000001.1; note = Burkholderia sp.
MQPGFRNTLVIVCDAMLAGAPEVAGVVTRLTATFGLYGAWMEEVAQQAVDAFGSRWDATRVDELTPLLENAPAIVAAFSSQASPEIIRIIRRAPAQRPPPPQLAHIGLPHLPTLRDLAEWLELNDSDLAWLATRWRVDPGEASSPLHHYSYHAREKRDGRHRLIERPKSLMRFVQHKLLHGLLDHVPPHDAAHGFRQGRNIVSFAAPHADKSLVIRLDLADFFASITQARVHATFHALGYPLAVSRALTALSTNRVPVRVLSCGALKDKFDWTEQQRLRARHLPQGASTSPALANLCAFRLDTRLAALARSLDADYTRYADDLAFSGAARLERVADRLPLWVAAIALEEGFTVQPRKTRVMARGVRQQLAGVVVNRHPNLARDRFDALKALLTNCVRHGPVSQNRDGRADFRASLAGHVAHATMLNPARGAKLRAIFDRIDWNRLESAS

SEQ ID NO: 5307 - protein, 445 aa, unidentified
  source 1..445: note = Related to NZ_CP046915.1; note = Paraburkholderia acidisoli
MRLNFRDTLVAACDALLAGPPELAGMVARLVSVFGTYRAWMDDVAREAAHGFAPRWDAIPAHELARSLEQLPVFATVFGNASRPEVVRIVRRAPVQRPLPPGLEQVSLPRLATLRDLAEWLEVAGGDLAWLATRWRVEPGEAASPLHHYSYHAREKRDGRNRLIERPKPLLRFVQHKLLHDLLDRVPPHDAAHGFRRGRSIVSFAAPHADQPLVIRLDLADFFASITQGRVHAVFHALGYPVAVARALTALSTNRVPSRMLTSGALKDKFDWTEQRRLRARHLPQGASTSPALANLCAWRLDTRLAALAQSLDANYTRYADDLAFSGAARFQRVADRLPLWVAAIALEEGFSVQPRKTRVMAQGVRQQLAGVVVNRHPNLARDRFDALKALLTNCVRHGPASQNRDGRADFRAALAGHVAHAAMLNPSRGAKLQGIFDRIDWSQS

SEQ ID NO: 5308 - protein, 449 aa, unidentified
  source 1..449: note = Related to LMPF01000021.1; note = Burkholderia sp.
MRLNFHDTLVITCEAMLAGPPEVASIVARLMLIFGEHSPWMDDVARKAADLFTPRWNDTPIDELIRVVEDTPTFVAAFGTHIRPEAIRIIRRPPVQRLPPRRLAHVDLPHLPTLRDLADWLELDGSDMSWLATRWRVEPGEAVSPLHHYSYHAREKRDGRYRLIERPKALIRFAQHKILRELLDRVPPHDAVHGFRRGRNIVSFAGPHADKALVIRFDLTDFFASVTQARVHGMFRTLGYPIAVASALTALATNRVPSRLFTLGELKGKFDWDAQQRLRARHLPQGASTSPALANLCAFRLDTRLAALAHSVDAVYTRYADDLAFSGEASLKRGADRFSARVAAIAREEGFNLHFGKTRVMGRGVQQRLAGVVVNRHPNLARDRFDMLKAILTNCVQHGPASQNRAGRADFRASLAGQVAHAMMLNSSRGAKLRAIFDRINWSQGNSAG

SEQ ID NO: 5309 - protein, 445 aa, unidentified
  source 1..445: note = Related to JAAGPF010000151.1; note = Burkholderia sp.
MRPGTPKTIALLCEAMLAGEPEPAAVAARLVLACNRHERWMEALAQLAVERFARVWRDTEPDELASLFALAAPFPPGWSARDLPAIARIVRRAPEQQLPPPRLVHLDLPSLPTLRALADWLELSDEDLAWLATRWRVAPHEAASPLHHYRYHVREKPDGRHRLIEQPKPLLRMAQHTLLHGLLDRVPPHEAAHGFRRGRNIVSFAAPHAGQPLVIRLDFEDFFGSVTEARVHGLFRTLGYPVAVAQALSALATHRVPSRLFDVGDLKGKFDWHAQQRLRARHLPQGAATSPALANLCAFRLDVRLAALARGFGASYTRYADDLAFSGGDKLKSVARDWPLWVARIAREEGFAVRSQKTRVLRNNMRQQLAGVVVNRHPNLSRERFDLLKAMLTNCVRHGPASQNRDGRADFRASLAGHVAHATMLNAARGAKLKAIFDRIDWTRG

SEQ ID NO: 5310 - protein, 455 aa, unidentified
  source 1..455: note = Related to NZ_MTZV01000006.1; note = Paraburkholderia acidicola
MQLSLHQTVIAIAEAMLAGEPYRDSVAARAASILGAQLPWLSEAADDAVHRFGHRWDDTQPDEVAPFIADLPGFVSSWMSEERLSVIRILRRAPVQRRLPPPLAQIEIPQLPALGDLADWLELSPADLGWLANRWRVGARDGPSPLHHYSYRVCEKRGGRYRLIERPKSLLRAAQHKLLHGLLDRVPPHEAAHGFRKGRNIVSFAAPHVGQPLVIRLDLADFFVSVTEARVHSVFRTLGYTSAVARAMTAMVTNRVPSAQLLAPDLKGKFDWLEQQRFRTRHLPQGASTSPALANLCAFRLDTRLAALARSLNANYTRYADDLAFSGGAQLMSVADRLPVKVAAIAIEEGFSVQPRKTRVMPRGVRQQLAGIVVNQHPNFSRDKFDTLKATLNNCVKHGVASQNRSAHRDFRASLAGHIAHVTMLNSARGAKLKAIFDCIDWSEPVGDEHGTSAL

SEQ ID NO: 5311 - protein, 489 aa, unidentified
  source 1..489: note = Related to NZ_CADFGU010000011.1; note = Robbsia andropogonis
MSHCTARAPLRTAQARSRHTGTLIRGSSFTMQLDLSAAVQLIAEAALAGPSKHASVVERIVAVVGADPPWCHDVATLAVQRFAYCWREASPEDLALLIVDVPAFAAAWSGVDRPTFVRVLKRVPTQVAPPVSLAHISIPLLPTLADLADWLELRSTDLEWLADRWRVEGHARRLHHYGYHACEKRDGRYRLIERPKPLLRSAQHKILHQILDHIPVHAAAHGFCKRRNIVSFAAPHAGQAMVLSFDLQDFFSSVTAGRVHAIFRTLGYPFAVARAITALTTNRVPSAYFDAPPLRGKFTWHERERLRARHLPQGAATSPALANLCAFRLDMRLSALARALGARYTRYADDLAFSGGSVLARASERLSIQVAAIALEEGFEVHSRKTHGMPRGVRQQLAGVVINRHPNLARDCYDRCKAVLHNCALHGPASQNREAHGDFRAHLMGKVAHATMLNPRRGAKLKVLFDRIIWPEDAPARPPDDGTVHAMPQ

SEQ ID NO: 5312 - protein, 490 aa, unidentified
  source 1..490: note = Related to FNCJ01000001.1; note = Paraburkholderia phenazinium
MISAVRRMSPLCVLRKTAHAALDALTRRPASFHAMRLSPLQRITYAIADAMLAGPAEPDSMVERMSDSLGVPSDWMLGLARRVAKRFGARWDSVDSKEVALVVAKTAGFVAAWRSEARPFVVRVLRRPPVQQLPPPRLREIALPKLATLGDLAAWLEVEVAELDWFADRWRVLPQGADTPLHHYTYKAIEKRDGRCRLIEIPKSRLRSLQRKILHGLLDRVPPHDCVHGFRKGRNTVTYAAPHAGKAVVVRFDLADFFASVHAPRVHAVMRTLGYPLEVARMLTALCTNRVPSARLLAADVRGKFDWLERQRYRTRHLPQGAPTSPALANLCAYRLDLRLEGLARAVGATYTRYADDLAFSGDEDLARVVERLKVRVAAIALEEGFSIQLRKTRVMRRGVRQHLAGVVVNQHPNLARSEFDALKAILMNCVRHGAASQNREGHADFRAHLQGRVAQAVMLNAARGAKLKGIFERIGWEDIANDSRLDSEA

SEQ ID NO: 5313 - protein, 451 aa, unidentified
  source 1..451: note = Related to QVQV01000003.1; note = Paraburkholderia sp.
MRLSSLQHVTFAIADAMLAGPPEPDALVARMTAALGVRADWMTGIARTTSRRFAARWEHVKRDELLRMIAATESFQLAWHNEHQRPVVVRVLKRAPQQVAPPPRLAHVALPQLPTLGDLAAWLEVDDADLGWFADQWRVMPQASSTPLHHYSYKAIEKRDGRCRLIEMPKSRLRDLQRKILKGLLEHVPPHECAHGFRKGRNTASYATPHLGKDVVVRFDLADFFASVHAGRVHALMRTLGYPLEVARALTAICTNRVPSARLLADDVRERFDWQEKQRYRTRHLPQGAPTSPALANLCAYRLDLRLAGLARTMCTSYTRYADDLAFSGGRELARGVERLAVRVAAIAMEEGFSIQLRKTRVMRRAARQRLAGVVVNQRPNLARDEFDALKATLTNCVRYGVEGQNRDGHRDFRAHLEGKVAQVCFLNPGRGEKLRGILRQIQWDVSGAHE

SEQ ID NO: 5314 - protein, 455 aa, unidentified
  source 1..455: note = Related to NZ_SNVI01000001.1; note = Paraburkholderia dipogonis
MPLSSLQHVTYAIADAMLAGSPEPASMVERMTLVLGESTRWMDGLARHVAKRFAARWDSVGRREVSAVVAGMPGFVSAWRSEQPPKVLRVLTRPPFQRPPPPWLHDVALPQLPTLGDLAAWLNIEPGDLDWFADRWRVPAHSAATPLHHYAYKAIEKRDGRCRIIEIPKPRLRALQRKVLSGLLDRIPAHESVHGFRHGRNIVTFAAPHVGRAVVMRFDLTDFFASVHAGRVYSAFYAFGYPLAVAMALTALCTNRIPSGRLLATDVRERLQWQERQRYRNRHLPQGAPTSPTLANLCAFRLDLRLAGLARSVGATYTRYADDLAFSGDEELARMADRLCIRVAAIALEEGFGVNLRKTRVMRRGVRQHLAGVVVNSHANVARPEFDALKAMLTNCVRHGPRSQNRDDHPEFRAHLAGRVAHVGMVNAARGAKLRALLESIEWDEESEAKAESNA

SEQ ID NO: 5315 - protein, 370 aa, unidentified
  source 1..370: note = Related to FNTG01000001.1; note = Burkholderia sp.
MAALPSFRPPFQRPPPLWLREVALPQLPTLGDLAARLGIEPDELHWFAARWRVPAHSAATPLHHYSYKAIEKRDGRCRIIEIPKPRQRALQLKVLSGLLDRIPAHESAHGFRRGRNIVTFTVPHVGKAVVMRFDLTDFFASVHAGRVYSDFHSFGFSPAVAQVFTALCTKRVPSGRLLAADVRERLPWQERQRYRNRHLPQGAPTSPALANLCAFRFDRRLAGLARSVGATYTRYADDLAFSGDENVARMVERLSVRVAAIAIEEGFSVNLRKTRVMRRGARQHLAGVVVNWHANVGRTEFDALKAVLSNCVRHGLRSQNRDGHRDFRAHLAGRVAHVAMVNAARGAKLRALLERIEWDEESEAKAKSNV

SEQ ID NO: 5316 - protein, 453 aa, unidentified
  source 1..453: note = Related to NZ_QLTK01000012.1; note = Paraburkholderia bryophila
MPSSYLQYVANAIADAMLAGPAQPASIVERMVLALGAPADWMSGLARRVSRRFGKRWDSVGRHELSRVIADHAAFVSAWQSDNRPRVVRLLTRPPVQRQVPPWLHGITLPQLPALADLADWLEVEPTELDWFADRWRAPAHAAATPLHHYSYKAIEKRDGRCRIIEIPKSRLRTVQRKVLHGLLDRIPVHDAAHGFRRGRNTLSFATPHAAKAVVVRFDLTDFFASVNAGRVYSTFRDFGYPLAVARSLTALCTNRVPSGRLLEADVRERIDWLERQRYRNRHLPQGAPTSPALANLCAYRLDLRLAGLARSVGATYTRYADDLAFSGDEDLARIAERLSIRVGAIAIEEGFALNFRKTRVMRRGARQHLAGVVVNRHPNLARPMFDTLKAILTNCVRHGPESQNREAHPDFRAHLAGRVAHLAMLNARRGAKLEAIFERIGWEGGEGSGTTV

SEQ ID NO: 5317 - protein, 449 aa, unidentified
  source 1..449: note = Related to NZ_CP024941.1; note = Paraburkholderia terricola
MPQSSLQVVTYAIADAMLAGPADPATMVERMTRVLGESADWMTGLARRVERRFGARWDSVEAKHLSKIIAETAGFVAAWRSENRPRIVRVLTRPPVQRPAPRWLRDVTLPQLPTLGDLAAWLDVEPLELDWFADRWRVAAHDATTRLHHYSYKAIEKRDGRCRIIEIPKSRLRELQRKVLHGLLDRIPAHDAVHGFRRGRNTVTFAAPHAGKAVVFRFDLTDFFASVHAGRVYSAIHALGYPLEVARALTALCTNRVPSGRLLAPDVRDRIDWQERQRYRNRHLPQGAPTSPALANLCAFRLDLRLAGLARSVGASYTRYADDLAFSGGNDLSRMTERLSIRVAAIAIEEGFAVNMRKTRVMRHAVRQHLAGVVVNSHPNLERPAFDALKALLTNCVRHGPRSQNRDAHTDFRAHLAGRVAHVTMLNAARGEKLKGIFERIGWDERDQS

SEQ ID NO: 5318 - protein, 430 aa, unidentified
  source 1..430: note = Related to CP010026.1; note = Paraburkholderia fungorum
MLAGPPEAAAMVERMTLVLGERADWMNGLARGIAKRFGARWDSVDGKELSKVVAENTGFVAAWRGESRPRVVRVLPRPPVQRPPPPWLHGVALPQLPTLGDLAMWLEVEPDELDWFADRWRVPAQSAATPLHHYSYKAIEKRDGRCRIIEVPKSRLRALQRKVLHGLLDRVPAHDAVHGFRRGRNTVTFAAPHAGKAVVIRFDLMDFFASVHAGRVYSVIRALGYPLNVARALTGLCTNRVPSGWLVAPDVRDRIDWQERQRYQNRHLPQGAPTSPALANLCAFRLDLRLAGLARSLGATYTRYADDLAFSGGEDLARMAQRVEIRVAAIAIEEGFAVNLRKTRVMRRGGRQQLAGVVVNSHPNLARAEFDALKAVLTNCVRHGPGSQNREGHEDFRAHLAGRVAHAGMLNAVRGAKLKAIFGRIVWDDG

SEQ ID NO: 5319 - protein, 447 aa, unidentified
  source 1..447: note = Related to NZ_CAJHCR010000004.1; note = Paraburkholderia kirstenboschensis
MSLSTLQTVTNAIANAMLAGPPEPAAIVERMTCALGEPADWMKGLASRVAQRFAARWDSVDPSAISKVVAETTGFVSAWRSETPPRVVRTLIRPPSQRPAPPWLQDAVLPQLATLAELAAWLEVEPDELDWFADHWRVPAQQAATPLHHYSYMVADKRDGRCRIIEIPKSRLRGLQRKVLRGLLDKIPPHDAVHGFRRGRSTVSFAAPHVGKAVVIRFDLTDFFASIHAGRVYSVWRSLGFPKGVARSLTGLCTNRVPSGRLLAPDLREKTDWQERQRYRNRHLPQGAPTSPALANLCAYRMDMRLAGLARSVGASYTRYADDLAFSGGDDLARMATRLSIRVAAIAIEEGFAVNLRKTRVMQRGARQQLASVVVNQHVNVARSEFDALKAVLTNCAKLGVESQNRDGHPDFRSHLAGRLAHVEMVNAARGAKLRRIFGRIVWGRSG

SEQ ID NO: 5320 - protein, 434 aa, unidentified
  source 1..434: note = Related to nan
MNSAFVAENLAAALLLGEWTGRGLLDSALRVVRYREPWLHRFLRRLRRAFPEPPARQEFRALVDWISNDRGFLNRSLDGVFEFVSLTPAMSQSRWPVPQLATVGTLAQWLELTPRELDWFADGQGREAVQPRGPLRHYVYKAIPKRGGRLRLIESPKSRLKAIQRRILDQILSVIPAHDAAHGFCRGRSVVTYAAAHANKDVVLRLDLADFFPSVPASRVHAIFCTAGYPKDVARMLTGICTNVTPRDELPESFGADNRGWTLLQRLLSPHLPQGAPTSPALANLSAYRLDLRLSALAQASGIAFTRYADDLAFSGDEEFARGVLRFYEKACQIVIEEGFAVRPAKTRIMRRGVRQQLAGVVVNVRPNAPRGEYDRLKAILTNCSRHGVGSQNREKHPSFREHLLGRITWLTSLHPERGKKLRARFDRIDWNGG

SEQ ID NO: 5321 - protein, 509 aa, unidentified
  source 1..509: note = Related to NZ_JAGKQQ010000001.1; note = Gemmata sp.
MVRENRVRHRSGVTPETFYHLGLQARDSPGASTPPMSRGTGLVDPLAALTFTDEMSTQQRFVRNLAAGMLAGEWTAAGLRESAYRATGHTFAWAPALAKRVLETHSTAPPFPTLLAVLTADAGFQRAFAALASDRNADDRFPVWHLFPVPTPPPLPRPEWAKELPDLPNEPALAEWLGVPLERLLWLADPKGRNTGHRPGSVRTYRARWVPKTHSRARLLEVPIPALMRAQRKVLVGLLNSVPSHPAVHGFRVGRSAITNAAPHCGRAVVIRFDLADFFPSIPAGRVFRMFLTLGYPETVARLLGSLCTTRLPTKDWNARPNPRTDSAEYQTRIRLATRHLPQGAPTSPALANLAAHRLDRRLAGLASACGATYSRYADDLTFSGGEDVRRSASRLARRVALIAAEEGFTLNRGKTRMQGRSERQTVTGAVVNVRPNIPRADFDLLKAILTNCVRHGPATQNRASHPDFRAHLAGRIAHLASVNPVRGRKLWATFDRIAWDADSTQSGQ

SEQ ID NO: 5322 - protein, 453 aa, unidentified
  source 1..453: note = Related to NZ_LR593886.1; note = Gemmata sp.
MTTQQRFVQNLAAGMLAGEWTAAGIRESVYRATGRRFAWGPALAKRLLNAHATAPTFPTLLATLTADAGFQRGLTVLASARNADNRFPVWHLFSAPAPPPLPRPQWAAELPDLPNEPALAEWLGVSLERLLWLADTKSRNTGHRPGSVRTYRARWVPKTHGRARLLEVPIPALMRAQRKILAELLNLVPAHPAVHGFRPGHSAITNAAQHCGRACVIRFDLTDFFPSIPVGRIFRMFLTLGYSEPVARLFGCLCTTRLPAEDWNRRPNPRNDSSEYQTQTRLASRHVPQGAPTSPALANLTAYRLDCRLAGLASACGATYSRYADDLTFSGDDTLRRSAARLARRVALIVVEEGFALNRGKTRVQGRGERQLVTGVVVNVRPNIPREDFDQLKAILTNCVRHNPATQNRTNHPDFRAHLAGRIAHVASVNPTRGRKLWATFDRIVWDTNSAQS

SEQ ID NO: 5323 - protein, 452 aa, unidentified
  source 1..452: note = Related to CP025958.1; note = Gemmata obscuriglobus
MTANRFVSNLAAALLAGEWSVAGLRTSVYRATGKRFGWTPRFAKRVHTAHATPPTFNELLAFLGRDPGFVRALAALATARYPADRFPVWHIFAPPEPPPRPRPDWASGLPVLPNEPALAEWLGVPVGHLLWLADPAGRNAISKGVRSYRVRWVPKPKGRARLLEIPVPPLKRVQRKLLADLLNHVPPHPAVHGFRPGRSIVTNATPHCGHAIVIRFDLTDFFASVPVGRVLALFLALGYRESVARLLSGLCTTRLASNDWNERPNPLNDGSEHATRARLTSRHLPQGAPTSPALANLVALRLDRRLAGLAAACGATYTRYADDLTFSGGELLRRNAARFVRRVTLIAAEEGFALNRGKTRVMGGGGRQTVTGVVVNQRPNVPRAEFDRLKAILTNCVRHGPADQNRSGHPDFRSHLAGRVAYVAGVNPVRGRKLWALFDRITWPGAHTYPAS

SEQ ID NO: 5324 - protein, 460 aa, unidentified
  source 1..460: note = Related to VGZJ01000033.1; note = Planctomycetes bacterium
MDPQQRFVRNIAAGMLAGEWSRAGLRDAIRRATGREYRWASPLVTRLLAAHIEPPSSIALLDVLVRDTTFAGVLARLAGARTAGDRYPRRTLFAVPGEAIPPAPTWNADLPRWDTEHDCADALGVALPQLLWLADPTGRNPYRRDETLRTYRARWVLKPRGGARLLEVPKPLLRRTQRRLVDLLLNRVAPHPAAHGFRAGRSAVTNAAEHCGRAAVLRFDLTDFFSSIVAGRTFGLFRNLGYPEPVVRLLGALCTTRLPRAVWDVRPHPTADGSDYPAWVRVNTRHLPQGAPTSPALANLIAYRLDRRLARLAAACGATYTRYADDLTFSGGPGLLRAARGLARRVALIAAEEGFRVNRGKSRAYGRGTRQTVTGIVTNVRPNVTRAEFDLLKAILTNCTRHGPAGQNRAQVPDFRAHLAGRVAHVAGVNSVRGRKLWELFDRIVWPVDESSSMIDLKDS

SEQ ID NO: 5325 - protein, 442 aa, unidentified
  source 1..442: note = Related to PNKH01000003.1; note = Isosphaera sp.
MPTFDAERFLFSLAGGLRAGAWADADLRAALRGAASDRPVRAPGLVPRLLRRFHGTPGYGELLLFLVNDPGLARAVDRLTWSRPQPGPAKPAMGQPPPRLGTLAIPALATEAALGTWLGVGPDRLRWLADLTGRNRRHPPGPLRTYRHRWVPKADGRARLLEIPRPGLKLVQRKILADLLDAVPAHPAAHGFRPGRSAVTNAAEHCGRAVVVRLDLADFFPSVPAARVSRIFRTLGYPDPVARLLTGLCTTRVPADVWDTRPNPGPADHPARVRFAGRHLPQGAPTSPALANLAAHRLDRRLARLATAVGATYTRYADDLAFSGGNAVRRGAARLARLVAVVAREEGFAVNPGKTRVMTRAGRQTVTGVVVNARPNLPRAEFDRLKATLTNCVRHGPGGQNRGGHADFRAHLAGRVAHLAAVHPGRGRKVWALFDRIAWPAG

SEQ ID NO: 5326 - protein, 443 aa, unidentified
  source 1..443: note = Related to JAFKFQ010000274.1; note = unidentified bacterium
MLDRTRFLFALAGACLREPWTATGLRAALDRAAAGHRVHVPGLAARILGHFPEPPGYGALLAFLVADARLMRALNRPTGRAIPKRGRPAMDSPPPSLAAVQLPPLATEVALAAHLNLDPARLRWYADLTGRNRHHPPGPLRTYRHRWVAKPGGRARLLEVPTFSLKRIQRTILTDILNHVPPHPAAHGFRPGRSAVTNAIEHCGRSVVMKFDLADFFPSVAAARVVRLFRTLGYPEAVARLLAGLCTTRTPADVWKARPNPAADGSDHVSRLRLVARHLPQGAPTSPALANLAAHRLDRRLAGLATAIGATYTRYADDLTFSGDIDLARRSHRLAGLVAEVASEEGFALNARKTRVLRRGGRQTVTGVVVNAKPNLPRAAYDRLKATLTNCVRKGTASQNRENRADFRAHLAGRVAHAAAINPARGRKLWALFDAIAWAEPPP

SEQ ID NO: 5327 - protein, 461 aa, unidentified
  source 1..461: note = Related to JAIEQN010000341.1; note = Gemmataceae bacterium
MAQSARGRFVANLAAALVAGRWDRRVMRAAAAAAVGGKPGWLAPLVRRVHAAYPEKPQFDPVRAFLERDPTLGRVIDRDGPPAVVRVFVPPAEMLPPPTAAGLVELPQLPTEAALAEWLGITPARLLWLADASGRNRKHPPGPLRTYHHRWVPKPGGRARLLEVPVHLLKEVQRDLLERLLDRIPPHPAAHGFRPGRSVVTNARPHCGRSVVIRFDLQDFFPSVSAARVRAIFRTFGYPEAVARLLTGLCTTRLPADVWDARPNPAADGSDHPAWQRLAARHLPQGAPTSPALANLAAFKHDRRLSKLAAALGADYTRYADDLTFSGSVELARGAKRLATLVAVIAGQEGFAVNHRKTRVMRRAGRQEVAGVVVNARPNVRRAEYDEIKAILTNCVRHGPAGQNRANHPDFRAHLTGRVAHLAAVHPAHGRKLWALLVRIEWRAAKVAGGEQAETATDNNR

SEQ ID NO: 5328 - protein, 450 aa, unidentified
  source 1..450: note = Related to JAIEQO010001050.1; note = Gemmataceae bacterium
MAKTARGRFLDNLAAALVAGRWDRRVMRAAAVAAVGGKPRWLAPLIRRVHAAFIDKPHFGRVRAALEQDEQLIRAVAADGPPPVVRVFVPPAEMLPPPAAAGPVELPQLPTEAAVAEWFSTDPGKLLWYADPAGRNRQHPPGFLRTYRHKWAAKPGGRSRLIEMPTESLKRHQRWLLISILNRIPPHPAAHGFRTGRSVATNAGPHCGKAVVIRFDLADFFPSVSAARVRAIFRTFGYPEVVARLLTGLCTTRLPADVWNARPNPAPDGSDHATWQRLNARHLPQGAPTSPALANLVAFKLDCRLSKLAAALGADYTRYADDLTFSGGDELARGSKRLATLVAVIAAEEGFALNHRKTRVMRRAGRQEVAGVVVNTRPNVRRAEYDTIKAILTNCVRHGPAGQNRGNHPDFRAHLTGRVAHVAAVNPARGRKLWAILDRVTWEAHEPAAR

SEQ ID NO: 5329 - protein, 439 aa, unidentified
  source 1..439: note = Related to CP042425.1; note = Limnoglobus roseus
MLDTTLANLLDAFLAGSWTEDRLVARAKAALGRSHRFIRPFVRRVLAAFPAPTHSDRLRVFALADEEFRKGWRRAEPHTAKRFFPVPVMAPHQAARGWLIPEITTAEKVCEVLRIDRHQLDWLADCAGRNHRESSPKLHHYRYRWIPKPSGRSRVLEIPKPILKQVQRNVLGQILDAIPPHAAAHGFRIGRSILTNAVPHSGRAVVLRFDLAIFFSSISADAVTAIFRTAGYPPDVARQLTGLCTTRLPKAVWDQRPRPAADGSDSLEERHLRNRHLPQGAPTSPALANLVAFRLDRRLDGLAKSLDVTYTRYADDLAFSGGIDLTRRSEKFRNAVARIVSEEGFRLNPLKTRVMPQSVRQTVAGVVVNIRTSIPRAEFDRLKAVLTNCLRHGPESQNREAHPNFRAYLAGKLAHVARLNPTRGRKLLALFDQIRWQSA

SEQ ID NO: 5330 - protein, 447 aa, unidentified
  source 1..447: note = Related to JAFATI010001257.1; note = Planctomycetes bacterium
MSTRHSIARNLAAAFLTGTWSLDGLVQQGARACGKRERWLRPLARCVLAAFPGPPAGIDPEALARWMEENPVFRTAWAKYGREGRFPLGQVFWVPPRMTPRTGAPATWRVPPLTTSGALAEWLGLKPKELDWFADCHGGEEKLPPGPLRHYTYRWLVGRSRKLRLLEMPKQRLKALQRRVLHDLLDHLPCHEAAHGYRRGRSVATYVGPHTGRRIVLHLDLRDFFPSIRSSRVQALFRTVGYPFPVARLLTGLCTNVVPGEVWHSSPVRGEPGEWNRSPHYQVPHLPQGAPTSPALANLCAYRLDCRLTGLARAVGAAYTRYADDLAFSGGRDLERSTRGFQVQVARIALEEGFEVHTRKTRFMRQGVRQQLAGVVLNEHANLRREEYDRLKAILFNCVRHGPGLQNREGRPDFRESLAGRIAYVQMLNPSRGRRLRELFDRIAWEK

SEQ ID NO: 5331 - protein, 422 aa, unidentified
  source 1..422: note = Related to JACPPF010000025.1; note = Planctomycetes bacterium
MATFHVDPDFVEQLAATLRAGNWVRLALKSRVWFTFPDDRALTAKVVGQVWEHFGGSRPSLKQLTKFLKKAISALPHEPEQRAVPVEPAPMTARWPVPVLATPVQLAHWLNVPLTRLEWLADIKEWTLRQADAKLRHYVNVWVPRRRGKPRLLEAPKPHLKAIQRRILHEILDHIPPHDTAHGFRTGRSIVSYARPHVGKQMVLHFDLRDFFASVSAARVRAIFRTAGYPADVASLLTGLCTTRTPDDVTVAGIHWRRRHLPQGAPTSPAFANLAARRMDVRLSALAEKLGATYTRYADDLAISGGHDLERAVRRVNVLVGIIAGEEGFELNFRKTRFMRQSVCQQVAGVVVNVKTNCRREDFDRLKAILHNCARHGPACQNRERHPDFRRHLLGRVAHLRHLNPARGARLQALFEHIDWTR

SEQ ID NO: 5332 - protein, 456 aa, unidentified
  source 1..456: note = Related to NZ_CP011125.1; note = Sandaracinus amylolyticus
MTEWTFDADDLDEDEEDADPPPGPAELRLARALALAFLGTDGRRRAMIEAALATLHVPDEARARAWIGALVALVRRTFDPLRRASLDELTTTIAHGRALARRDRGVHVVRWVATPGEMRAPRWDVPRIDTVGDLARWLDVEIGELDWLADRRAMLVRARVGPLHHYVRTWVPKPSGGARLIEAPKARLAAIQRRVLREVLERVPMHDVAHGFRRGRSVATFVAPHVGRAVVVRVDLEDFFASVTRGRVIGIFRSAGYPEEIARTLAALCTTRTPASEMRGIEHAVRARLRVPHLPQGAPTSPALASLAAFRLDARIEGLARAVGARCTRYADDVALSFERDRSHGAIDRVIARIAEIAREEGFGVASHKTRVMRRGARQSLAGVVVNERPAVAREEYERLRAILHRAATRGPSPDELGAHRDLRAHLAGRIAWIAQWSERRGAKLAAMLARIDWSA

SEQ ID NO: 5333 - protein, 455 aa, unidentified
  source 1..455: note = Related to NZ_CP070225.1; note = Sandaracinus amylolyticus
MTDSTFDDWEDDDDDPEDLPPGRRAWRLSRALALAFLGTDGSRRAMIDAALAALRVPHEARARAWLGGLVALVRRTFDPLPRASLDELTTTIAHSRALARYDRDAEIVRWVVTPGAPLETRWDVPRIDTVGDLARWLEVEIGELDWLADRRAMLVRAPLGPLHHYLRTWVPKPSGGARLIEAPKSRLASIQRRVLREIVERIPMHDVAHGFRRGRSVATFVAPHVGRAVVVRVDLEDFFASVTRGRVIGIFRSAGYPEEVARTLAASCTTRTPSREMRGIEHAVRARLRVPHLPQGAPTSPALASLAAFRLDARVEGLARAIDARCTRYADDIALSFERPQSHVAIDRVIARIAEIAREEGFRVAPHKTRVMRHGARQSLAGVVVNEKPAVPREEYERLRAILHRAAIEGPRAEDLAAHRDLRAHLEGRIAWIGQWSEHRRAKLAAMLARIEWTP

SEQ ID NO: 5334 - protein, 430 aa, unidentified
  source 1..430: note = Related to JACPFM010000079.1; note = Deltaproteobacteria bacterium
MTRADLAARAIADALLDGEWALEPMVQRLGTTFGARRAWMTKLARRALSLFPRAPADARDLLARTARTLPGFPAACRARVRHWAIPEPRMGRVRWPVPTIETAADLSAWLGVDAAALAVLADRRGLARDADPKMRHYTYEWIAKRTGGRRLLEAPKQRLKAVQRRILHGVLDAIPAHDAAHGFRAGRSVVSFARVHVGAALVLRVDLEAFFHSVFAGRVYGIFRGAGYPEDVARTLTALCTHRSPRDVLAGAPRDLVGDRPRSLQRLRTPHLPQGAPTSPALANLAAFALDVRLDALARSWGARYSRYADDLVFSGRVAQPQRLVAAIDHIVRDEGFLIARHKTRLLRASTRQEIAGVVVNQKTSVRRDEVDRLRAILHNCARTGPAAQNRDGHPDFRAHLLGRVAWVEQVSPDKARRLRALFDHLRWDT

SEQ ID NO: 5335 - protein, 440 aa, unidentified
  source 1..440: note = Related to JABFXX010000467.1; note = Kofleriaceae bacterium
MTWLVREFAGALLAGPWERRPMIARLAYVTNLPEAGWIVKLVAAVLRKHGEPPDHEALTDWLYSHRPLQRVLVDPEIRIRRWLEPPLEMADSPWDVPPLGSRKELATWLGLDVQRLEALADERGRVREAREQRMRHYRYTWIAKRAGGHRLLEAPKPRLRAVQRLVLDDIVAKVPPHDAAHGFRAGHSVVGFAAVHVGREVVIRVDLHAFFASVSRPRVAAIFRSAGYPREIAGVLAALCTHRTPRDVLAAAPSREWSELAKLRGAHLPQGAPTSGALANLAAYRLDVRVAALAAAIGASYTRYADDLVLSGPRALARAASSIVGRIGAIAHDEGFALNFRKTRVMTASDRQRITGLVVNEKLAVTRDEVDRLRAILFNCARTGPAAQNREGHADFRAHLLGRISWVSAVDRGKGDRLRALFDRIRWDEAPADATDEDVR

SEQ ID NO: 5336 - protein, 410 aa, unidentified
  source 1..410: note = Related to JADJMO010000033.1; note = Myxococcales bacterium
MKWLEPALARTVAEALADALPGSREDREARCLDVLGACDEEALASLLERVPPALGWRALVAWILGDDAFGRLLAGGVAVEPPRAMAPSRFEVPSLDTEGDLAAWLAVTPRALEAFTDPTDATRRAPRGPMRHYTHRWVGARLIEAPKPRLRAIQRRILQGVLDAVPPHDAAHGFRRGRSIFTSAAPHVGKPAVLRVDLRRFFQTIHLARVVAVFSALGYPRAVSRAFARVCTHAVPDDELVGQPFLTRQRLRTRHLPQGAPTSPTLANLAAHGLDVRLSALARAAGLAYTRYADDLVFSGDVAPGFPSRVASICAEEGFPVATEKTRLRRASDQQRVVGLVVNDHLGVARVERDRLRAILHNCARSGVNAENRAGHADFRAHLEGRVSFVEQADPRQGARLRRLFCTIPW

SEQ ID NO: 5337 - protein, 425 aa, unidentified
  source 1..425: note = Related to JAGQJB010000072.1; note = Myxococcales bacterium
MKRRDPSRDIALAALGETWSPAAIEGALADLFASEQRWMRAMARRMTRRFGEAPPLDVLEAFVRADRDLRQARRLLVRHPSLAMPPMPPSRFGAPPIASMGDLATLLEVPVEDLDWLADRRGTTRDAEAPVRHYRARWIPKRSVGWRLVEAPKARLRRAQRCLLDRVLASVPPHEAAHGFVPGRSVLDHARAHVRQAVVVRLDLEDFFASVPAAQVRAVFRTAGYGEDVAVALTALSTTRTPPALLRSPWVSRFETRQRLAHRHLPQGAPTSPWIANLAAYRLDLRVSALARSLGATYTRYADDLVLSGDEGFARGVERLLPRLGAIAIEEGFALQHRKTRVTRAGASQRVCGLVVNEGARVSRRERERLEAILFNCVKHGPASQNRGDHPRFRDHLLGRIAWVEQAHEPHAARLHALFARIEWP

SEQ ID NO: 5338 - protein, 532 aa, unidentified
  source 1..532: note = Related to JADJOY010000023.1; note = Deltaproteobacteria bacterium
MAAAPEHVARAIADAFLCGPWTALGLRASGAELFARRARWLDPLIRATLRAFPDPPRASRDALARFLGPHVERLTARLEPPRWPPVRRRLVPAPAMAERRRWPVRELATTAELARWLGLTPGELDWFADRHGTAARAVDPRLVHYRETWIPKRSGVGERLLEIPRPRLRAIQRAILDEILVAIPPHAAALGFRRGRSALDHASRHAGRAVLIRLDLEDFFAATPAGRVYGTFRAAGYPAEVALTLTRLTTRRASPDARRRARRWTPAHGDGSGGTLQSEGGRTSGRLAAAHLPQGSPSSPALANLAAFHLDVRLAALAEAIGARYSRYADDLAFSGEDTLERAAERLLPRIAAIVIEEGFRPRFRKTRIERATGRQTLMGLTVNVRPAVPRAERERLRAILTNCVRHGPASQNRERHADFRAHPRRARDVGRARERRSRAAAAHAARRDRLDALSQTEATQQEPAPACGDPSRGDGAPRATKTIGATGVPSPVAGSSDRDRSDRRCDTETCRWRGTRRPYPAGGRAGTCPTE

SEQ ID NO: 5339 - protein, 442 aa, unidentified
  source 1..442: note = Related to JAHBWB010000013.1; note = Labilithrix sp.
MSPTIVADALAAAFLDGAWSAPALARRGARALGQSTRWLPALARRVVAAFPDGAPRDRFEALATLLARDAAVRKAGRPDAPWRLVITAPTLAMRDAHPEWRLPRLHTAGDLATWLGLEIGDLLWFADTRGLSRRRRAVALDHYHRRWLPKRSGGARLVEAPKRWLKEVQRRILRELVERIPPHEAAHGFRRRRGVLSHAALHAGRDVVLRMDLEDFFVSIPASRVFAVFHAAGYPLEVARLLTGLCTTRAPSDPGAPMPATPTRAELEARHRARERYAERHLPQGAPTSPALANLCAWRLDVRLSAAARTAGAVYTRYADDLVFSGDDRFARWPAARFAYVVGGIAIEEGFNVQHRKTKLMRAGTRQQVTGLVVNRSAAIPRRDFERYKAILHNCVLTGPDRQNRDGRPDFRAHLEGVVAWVTHVQPARGAKLAKLLDAIRW

SEQ ID NO: 5340 - protein, 442 aa, unidentified
  source 1..442: note = Related to MKVQ01000030.1; note = Myxococcales bacterium 68-20
MDRRIVGEALAAAFLDGTWSPQPMARRGARAIGRPGRWLPALARRTVEAFPEGPPVDRFEDLARSLAEDKAVVRACATPAPWHLAFVAPALAMRDAHPSWGLPRLDTAGDVAAWLGLDVGDLLWFADTHGLARHRRDPRLEHYVRRWLPKRSGGARLVEAPKKWLKDLQRRILHELVERIPPHDAAHGFRRAHSILTHAASHAGREVVLRMDLEDFFVSIPAARIFAIFRAAGYPAEVARLLTGLCTTSSPPDAGAPVSAAPTVAELQARHRARARYASRHLPQGAPTSPALANLCAYGLDVRLGAVARSAHAVYTRYADDLVFSGDERFVRWPAKRFGILVAGIALEQGFTVQHRKTKLMRAATRQAVTGLVVNRAPSIPRRDFERYKATLHNCVRFGPESQNREGHADFRAHLEGVVAWVRHVQPERGARLAQLLDAVSW

SEQ ID NO: 5341 - protein, 443 aa, unidentified
  source 1..443: note = Related to JABFRG010000265.1; note = Polyangiaceae bacterium
MRHETLVVQAVASAMLADGAWSSADLVTRGAMVFDKRPRWMVAAVSAVMATHPTREGVTVAELVALLSSRPGVMRAIRRAHAVVRRWAIPLVTLVPPRWPVPAFASANALASWLELSPAELAWFADVKGLGRDPELDEPLRHYRVHWVPKRRGGVRLLEAPKPRLRDMQRRMLREILDAIPPHDAAHGFRRGRDARSHAALHEGQAVVLRVDLEDFFLSISLARTVATFRSAGYTDDVAHLLGRLCTHRTNASCPLPVLGAYPTEADLRARRNAERLARALHLPQGAPTSPAVANLCAYRLDVRLEAAAASVGATYSRYADDLVFSGGEDFAARAHRFAALVGGVVLDEGFRVNHRKTRIMGRGARQLVGGLVVNAHAQVPRASFDTVKAIVRNCIQYGPASQNRDSHPDFRAHLRGLVGWAGGAADSPRRAKLDALFRQIVW

SEQ ID NO: 5342 - protein, 444 aa, unidentified
  source 1..444: note = Related to JAHBWD010000001.1; note = Labilithrix sp.
MKTKVPERVAEALASAFLAHGAWTRDALAERGRVTLAEDARWMRGVVDRVLATFPEPPRARFSALARFIASVSIAAPRERRAPRWRPKVARWLEPEIAMGVRRWDVPAIATPGDLARWLGLSPAECDWFADGRGLERLRRPEALDHYRRRWVAKRRGGFRLLEAPKARTKAVQQRILREILDRVPAHDAAHGFVRGRSVRTHAALHVGRAVVVRLDLEDFFLSISAARVAGVFRAAGYPDDVAWSLTLLCTNVAPPSGLVLGRDATHDDVARLRRAEMRARTRHLPQGAPTSPALANLCARGLDVRLTALATKLGAVYTRYADDMTFSGDRRLARSSSRLEAWASAIASDEGFTVNHRKSRVMRAGVRQLVTGVVVNTRLNVARDAYDRLEATLHNCRRLGPGSQNRDGHPDFRAHLVGRVAHVKSLHPARGEKLAALLEQIAW

SEQ ID NO: 5343 - protein, 444 aa, unidentified
  source 1..444: note = Related to JAGQIZ010000167.1; note = Myxococcales bacterium
MASYLEHVSRALGSAFMMGPWTRLALMGLGERVLGERPPWLGGLVSRTLSALPEPPPTVEAVAAVLREHRAFRNAFADQASRPRVRRWLHAPPSAPAEAPWPVPPLRTFDDLARHLELPDEQLSWLADPRGVLRRAPSERLHHYHRDFLPKRAGGHRLVETPKPRLKAVQRRLLRTIFDHIPPHPSAHGFVKGRSPITHAGQHAGRAVVLRLDLEDFFTSVTYARVYRVCRFAAYPDEVARLLAGLCTTSLPPPIWRRAPRPDHPADLPAYQRQRERALRRHLPQGAPTSPSLANHCASRLDRRLHAAAERAGAHYSRYADDLVFSGDDGFARSVTRFIPFAAAIAMDEGFVVNFRKTRVMPRNRRQQVAGLVVNAHPNVSRQTYDRLKAILTNCARHGPASQNRDGHPDFRSHLRGLIAWIDSVAPKRGAELRALFEAIEWKG

SEQ ID NO: 5344 - protein, 442 aa, unidentified
  source 1..442: note = Related to JACQYO010000099.1; note = Deltaproteobacteria bacterium
MTLDDVVRAFAGALLAGEWTESTVRERAVEALGAKPRWLWPLVRRVVRLGSPPRRRQVELAIRASSAFVGAWKRGLVQPTRALEVRAVLSSPRMGPVRWAVPSLGTEGELARWLGLGVSDLFWLADPLAGERRARVERIRNYVYTWVPKRSGGVRLIESPKPLLKTLQRRILREIISLVPVSDSAHGFVLGRSTLTHASSHISQRVVLRLDLRDFFSTVSAWRVAAVFRTAGYPENVARLLAGLCTNSAPEAVLQLAGPSLSRFQKQRLRSAHVPQGAPTSPAVANLCAYRLDRRLAGLARVSGTIYTRYADDLVFSGDFTRSKDFDRPRPSIDRFVARAHAIVLEEGFTPHFEKTRVMGCGRRQEVTGIVVNRQPNVSRADLEVFEATLYNCRRSGPSTQNRTGHPDFRAQLAGRLGYVEMVLGERARWLRTLFEQIDWSR

SEQ ID NO: 5345 - protein, 393 aa, unidentified
  source 1..393: note = Related to BJHF01000062.1; note = Deltaproteobacteria bacterium
MARTLSRRPPPMEADRDFTERLARFPGAKEAVLKRLPIRRWFVVTPVQRPGRWPVPLLPTPSDLATALRLDVDALDWFADNRGLEAHTRSRALRHYHYRWLAKPTGGARLVEAPKGRTVDIQRWILRNLLDSVPPHPAAVGFRRGFSTLDAAAPHVGREVVLSLDLEDFFASVSAARVAATFAALGYPRPVAYCLSGLCTTRVPAAILAEQPRGGDLPAAWRQRRRLRDAHLPTGAPTSPALANLAAFALDTRLAAAAAAVGATYTRYADDLSFSGDAEFSRRARRFSVLVGAIAIEEGYRVNLRKTRLAGKGARQEVVGVVVNVRPALARDRWDRLRAILHNCQVHGPSTQNRDGHEDFRAWITGTVAAARAIDAKRGGRLLEMLAGVDWGR

SEQ ID NO: 5346 - protein, 441 aa, unidentified
  source 1..441: note = Related to JADZFZ010000151.1; note = Deltaproteobacteria bacterium
MNRSDRTSLARDLAATFLAGPWERREMARRAAASFGLPRSPRWLSTLAREVVRVFGPDPPHGRDGRIAALIAPRLRPLRRAGIARRPALVHPCLVPARMGTAAAPVLRERGLPEVATPGELAAWLGLDRDRLAWLADVRGLSRRTHDGPLVHYRYRWVPKRSGGARLLEIPKPDLAAAQRKILRELLDRVPPHASAVGFRKGRNVLDHASAHAGAAVVLRMDLGDFFASVAATRVHAIFVALGYPAAVSSLLTGLCTHRTSMFVRHASTDHAAWSRLRERHLPQGAPTSPALANLAAFGLDVRLAALASKAGAAYTRYADDLAFSGGTGFARSAAAFHVLACAIVIEESFAPNPRKTRIMRASSRQQITGLVVNAKPSLPRDELDRLKATLHNCVAHGPASQNRDGRADFRAWLAGKVAWVASVHPARGARLRAMLERIRW

SEQ ID NO: 5347 - protein, 442 aa, unidentified
  source 1..442: note = Related to NZ_RAWM01000011.1; note = Corallococcus interemptor
MSERNVVAKALASAFLAAPWTRAGLIANGAEVVGGRFPWLASLARSTLRFFPRPPHDRLELLAEILATRPALKQACANPTAPVRLLRWLTAEPQMGRAPWPVPALPTQADLAAWLGVTDAQLDWLADGKGLEHRTSPGRWRRYGYTWIPKRSGGQRLLEQPGEELARLQRKVLHCILDRIPPHEAAHGFVKGRGIRGFVEPHTRQAVVVRLDLEDFFLSVRPPRLWGVFRAAGYPDGVAGALVGLCTNRTPGAVVAQARKPTHAQEVESRWLLGRRLESRHLPQGAPTSPALANLAAYRLDVRLSALAGVLGMRYTRYADDLAFSADAARPGSIRRLLRSVRRIVRDEGFTVREDKTRVMSKGHQQWLAGVVVNEHPNLRREDYDRLKAVLHLCRTRGPASQNTGGHPDFRAHLLGRIAWVTYLHPARGARLRALFDRIAWD

SEQ ID NO: 5348 - protein, 442 aa, unidentified
  source 1..442: note = Related to NZ_CP079946.1; note = Corallococcus sp.
MSGRTVVARALASAFLAAPWTVSGLVAKGSEVVGGRFSWLRSLARSVLRFFPRPPHGRLELLAEVLATRAALKQACANPEAPVRVVRWLTSEPEMGRQPWPIPALSTQADLADWLKVTSAQLDWLADGMGREHTSSPGRWRRYRYTWIPKRSGGERLLEQPGEELARLQRQVLHGILDRIPPHEAAYGFVKGRGIRGFVEPHTGQAVVMRLDLEDFFLSVRPPRVWGVFRAAGYPDGVAGALAGLCTNRTPGAVVAKARRADDARKVDARWLLARRLESRHLPQGAPTSPALANLAAYKLDVRLSALAAALGMHYTRYADDLAFSGSDARAGSAHRLLRCVRSIVRDEGFTVREDKTRVMHQGHQQWLAGVVVNQHPSLRRADYDRLKALLHLSRTRGPNSQNTGGHPDFRAHLLGRIAWVTHLHPARGARLRAIFEQIVWD

SEQ ID NO: 5349 - protein, 442 aa, unidentified
  source 1..442: note = Related to NZ_VIFM01000112.1; note = Myxococcus sp.
MSKRIAVANALASAFLSGPWTTAGLVERGAEVIGGRTPWLLSVVRSTRRFFPRPPHARFELLAEILATRPALQRACGNPHAPVKILHWVATEPEMGRQPWPVPSLPTQAELTDWLGMTDAQLGWLADARGLERMTPPGQWRRYRYTWIPKRSGGERLLEQPGLDLSRLQRKVLHGILDVIPPHEAAYGFVAGRGVRGFAEPHVGQAVVVRVDLEDFFLSVKPARVWGMFRAAGYPDDVATTLAGLCTTRTPSGVLEQARRAADGEALTARWRLARRLESRHLAQGAPTSPALANLAAYRLDVRLSALASALGARYTRYADDLAFSGGDALARSTGRLLRCVARIVREEGFTVRTEKTRVMRRGRQQRLAGVVVNEHPSVPRADYDRLKAILHLCRTRGPASQNTGSHPEFRAHLLGRVAWVSQLNPTRGARLRAIFEQIAWE

SEQ ID NO: 5350 - protein, 449 aa, unidentified
  source 1..449: note = Related to NZ_CP071091.1; note = Myxococcus sp.
MALGDSAVSNRQSVASALASAFLAGPWTYEGMVERGAHVVGGRAPWLLAVVRGIRRFFPHPPVARMELLTELLATRPALIKACRNPAVPVHLHRWLIPEPSMGQRPWPVPELSTQAEVARWLGVTDAQLGWLADGSGFERTSRPGQWRRYRYVWIPKRAGGKRLLEQPGVDLGRLQRQVLHGLLDLIPPHDAARGFVRGRGVRDFAEPHVGQAVVVHMDLEDFFHSVRPSKVWGVFRAAGYPDSVTEVLAGLCTNRTPGTVVEEAPRATHLGEQKARWRMTRRLTARHLPQGAPTSPALANLAAYRLDVRLSALAAALGARYTRYADDLAFSGGASLLQRPLRLVRCVAAIVREEGFAIRADKTRVMHQGQQQRLAGVVVNAHPTVPREDYERLKAVLHLCRTRGPTSQNTEGHHDFRAHLLGRIAWVSHLHPSRGARLRATFDRITWD

SEQ ID NO: 5351 - protein, 444 aa, unidentified
  source 1..444: note = Related to NZ_FOIB01000009.1; note = Myxococcus fulvus
MSTRHPVAAALASAFLAGPWTRAGLRERGAHVVGGRPRWLVPVVRGILRYFPRPPHARFELLTELLATRPALIKACGNSAEPIRIRHWLDVEPQMSRRPWPVPELTTQAALAQWLGVTDAQLGWLADGSGFERTSRPGQWRRYRYVWIPKRTGGKRLLEQPGLDLARLQRKVLHDILDVIPPHAAARGFVRGLGVKDFAEPHVGRAVVVRVDLEDFFHAVRPAQVWGVFRTAGYPDGVVNALAGLCTNRTPGAVVEQARRAESAQELDACWRLSRRLSARHLPQGAPTSPALANLAAYRLDVRLSALAATLGARYTRYADDLAFSGDEVLARRVRRLLTCVTRIIRDEGFTVRQGKTRVMHQGQQQRLAGVVVNAHPTVPREDYERLKAVLHLCRTRGPESQNTEQHPDFRAHLLGRIAWVEHLHPARGARLRATFERIPWAPE

SEQ ID NO: 5352 - protein, 443 aa, unidentified
  source 1..443: note = Related to NZ_CP022203.1; note = Corallococcus macrosporus
MSERRVVAQGLASAFLAGPWTLKGLVERGTEAVGGRAPWVRSMARSAMIFFPRPPHARLELLAEVLASRPVFPKGFADSSGRARIVRWLTSEPRMDRQPWPVPSLPTQADLADWLGVTGAQLDWLADAPGIERTSKPGRWRRYRYTWIPKRSGGERLLEQPGLDLMQVQRKVLHGILDRVPPHDAAHGFVAGRSVRSFVEPHAGQAVVVRVDLEDFFFSVRPARIWAVFRTAGYPDGVTNALAGLCTNRTPQAVLAQARQPESVSEVDARWRLARRLESRHLPQGAPTSPALANLAAYRLDVRLSALATAMGARYTRYADDLAFSGGDALSRRTHKLLRYVSQILREEGFMTRAGKTRVMRQGAQQRLAGVVVNAHPSVSRADYERLKAILHLCRTRGPASQNTEGHPDFRAYLLGRIAWVAHLHPARGAKLRATFEQVVWAG

SEQ ID NO: 5353 - protein, 442 aa, unidentified
  source 1..442: note = Related to NZ_CP068048.1; note = Myxococcus xanthus
MSEQRVVAQALASAFLAGPWTLKGLVERGTEVVGGRAPWVSSLARSAMIFFPRPPHARMELLGDLLASRPAFMRGCTDPSARARIVRWITSEPRMARQPWPVPSLSTQAELAAWLGVTGAQLDWLADVPGIERTSSPGRWRRYRYTWIPKRSGGERLLERPGLDLLLVQRKLLHGILDHIPPHDAAHGFVAGRSVLGFAEPHARQAVVVRVDIEDFFFAVRPARIWAVFRTAGYPDGVVSALAGLCTNRTPSAVVSQARRPDSLADASARWRLARRLESRHLPQGAPTSPALANLAAYRLDVRLSALAEAMGARYTRYADDMAFSGGDALARRTHKLLRYVSQIVREEGFTPRTGKTRVMHRSTQQRLAGVVVNDHPSIRRVDYERLKAILHLCRTRGPASQNTEGHPDFRAHLLGRIAWVAHLHPARGAKLRATFDQIAWD

SEQ ID NO: 5354 - protein, 449 aa, unidentified
  source 1..449: note = Related to CP012109.1; note = Myxococcus sp.
MACESAMSERRVVATALASAFLAGPWTIQGLTERGLEVVGAPSPWVASLARSAVRFFPRAPRARMELLADLLATRAAFQRGFEDPEARARIVRWRVSEPRMARQPWPVPSLPAQADLADWLGVTSAQLDWLADVPGIERTSPPGRWRRYRYTWIPKRSGGQRLLERPGLDLACVQRKVLHGILDRIPAHDAAHGFVSGRGVRSFTAPHVGQAVVVRLDLEDFFLAVRPARIWGVFRAAGYPDGVVRALAGLCTNRTPGAVMARAPTPTSLATVAARWRWTRRLESRHLPQGAPTSPALANLAAYRLDVRLSALAAAMGARYTRYADDLAFSGDASLARRTRRLLHLVGLIVREEGFTPRAGKTRVMSQGTQQRLAGVVVNARPSIPRADYDRLKALLHLCRTRGPDSQNNTGHPDFRAHLLGRIAWVSHLHPTRGARLRALFEQIAWTA

SEQ ID NO: 5355 - protein, 419 aa, unidentified
  source 1..419: note = Related to NZ_JAAIYA010000009.1; note = Pyxidicoccus sp.
MHERAVTALGQHFQWLTGVVRNVRRGFHRPPVDAPDTLARYIAHLPSFRQAMAHPDTRPRIRHWLVAPTDMGRMRWPVPALPTTGELAAWLGLSDEDLDWLADRKGYSHSARDTRLLHYQWRWVPKRTGGVRLLESPKARLKALQRQVLHAILDAIPPHESAHAFQQGRSVLTFAAPHVGQHVLLRMDLEDFFTSISAGRVFGVFRTAGYPEAVSSTLASLCTHALPLLVLRDMPRPASVEDIDAHWRARARLSSPHLPQGAPTSPALANLCAWGLDVRLSTLAASMGVRYSRYADDLVFSGGEDLSHALERFRHLVETVIRDEGFVPNVRKTRVLRQSVRQQVAGVVVNARPNVPRADFDTLKATLTNCIRQGPSTQNHTGHPDFRAHLVGRVAWVASVHPQRGARLHALLDAIDWSR

SEQ ID NO: 5356 - protein, 447 aa, unidentified
  source 1..447: note = Related to JADYYK010000281.1; note = Deltaproteobacteria bacterium
MIEPQAARAILAEAFLGGDWSADGLLQRALEVVAEPAPRQSLRALIKLVLGRFPATPPLRRRDLEEVIASSRSFSKATRAQRLRVWRPWLRSPVMTPLAGAPTSWPVPALPTTTELAAWLGLDVDALEWFAGTHGRARRAPPGPLGHYTYSWAGKASGGYRLIEAPKARLKALQRRVLDGILAEVPVHPAAHGFCRGRGVLSHAAPHAGQRLVMALDLRDFFASVRASRVLAIFRTLGYPEATARLLTGLATHTVSALVWASAPPPRDAAEASARFHAGRFFQSPHLPQGAPTSPALANLAAFRLDLRLTALARAADATYTRYADDLAFSGGERFARGAERLFSLAAQIIFEEGFRLNAGKTRLLGQGMRQRLAGVVVNAHPNLARRDFDQLKATLHNCRRDGAQAHDRDGLGAGFRAHLLGRVAWAEQVNPARGGKLRTIFDGIRW

SEQ ID NO: 5357 - protein, 639 aa, unidentified
  source 1..639: note = Related to DOEP01000754.1; note = Planctomycetes bacterium
MAGEVSPGLGKLSGGDYEGLELVRARVEFASGVRWFHPGELDRVHPHVEAALVRHAITRDLIAAGNATRLEQSLEAFWEGRQEFYRTPGLLDELWLLHRGPAPTELGELFDAPRAELLAIVPQLAPPLPQLPRETRLLEAEELHAEAWKQVTPIGELEEDEDWSSEWERAAPLGALVPPRTRADYLADDQDDDDPDDDEEWELRRRRKQLAEAASALCQAFLSAEWSADDLLDRGQRTLGTSEPWLEELVDRVLAAFPARPHPEDEDLVLFLAEDEALHEQLLEGSLVVWTRFFVPPQMRADRRFPVMPLEGAPDVERWLRIGTGDLQWLADQERWLYRHPSGPLQHYHYHWLPKRSGGRRLVEAPKELLKSVQRQILRDVLGPVPPHEAAHGFCRGRSVRSYAEPHAGQELVLGFDLREFFPTIRAPRVSALFRALGYPSGVAQLLSDLRTTVTPSDVLEEGPLSGGARGRLEQRHLPQGSPTSPALANLCAYGLPVRLSAAAAAVSARYTRYADDLAFSGGADFLRQASRFRYLVMRIAAEEGFEINPTKNRWMRPQRQQRLTGLVVNVRPRPSRAEFDRLKATLHNCGRHGPASQNRAGLPDFRAHLAGRVSWFEQTDPVRGERLRELFHQITWET

SEQ ID NO: 5358 - protein, 440 aa, unidentified
  source 1..440: note = Related to JAHBXY010000029.1; note = Planctomycetes bacterium
MNVDEVARGLAAAFLAGDWLQEGMVARGREALGGRFGWLPGLARRAREAFLDPPLHDPEALEDLLAADARLQAALRRRARQGHPPLVVRRLFLHHTAMRSERRFAVPSFDTEADLARWLGLALTDLDWFADRKAWLIHAPQGPLQHYHRTWIRKRGGGLRLLEAPKATLKAMQRRVLHGLLAHVPPHDAAHGFRPGRSVVTHAAPHAGKALVLRLDLRDFFPSVPAGRVAALFRSLGYPRSVAGLLTGLVTTRTPLATLEGVDLDREAEDALRRSHLPQGAPTSPWLANLCALGLDVRLSAAAAKVGADYTRYADDLAFSGDEAFRRVAARFRTLVHAIVLGEGFDLRPEKTRWMTPSVRQRLTGLVVNQRPRPSRAEFDRLKATLFNCARRGPTAENREGHPDLRAHLRGRVAWFEHTDPARGARLRALFERIAWAPAR

SEQ ID NO: 5359 - protein, 433 aa, unidentified
  source 1..433: note = Related to JAJTCO010000005.1; note = Pseudoduganella sp.
MMLATVASPASLIAACQRVFGTTPAWVPRVCFALIDRTGDNFHCFSRQELADILLQLLFHGPQTERIALPPVRRYCTEPARQAPRPAWLAALALPDLPSVGALAGWLGEPVGALAWLADQWRSEDGNRSRLQHYHYRWVPKRSGGVRLIEIPKARLRRIQHKILRQILDRVPPHPAAHGFLRGHSCLTHAALHAGQEVVIRMDLKDFFPSIQYARIHALFEKLGYTTNVAGTLARVCVNRTPPSAIRDQAAGSLSWPERHALKSPHLPQGSPCSPALANLCAYRLDLRLASLARPLGASYSRYADDLVFSGGPDFARSAERFRVRAAAIALEEGFQVNTRKSRVMRKGARQQVTGIVVNAHPNLARSEYDRLKATLTNCVRHGPDSQNRQNHPDYQAYLAGRVSYVKMVNASRSAKLQRLFDAVAWPQDAPSA

SEQ ID NO: 5360 - protein, 395 aa, unidentified
  source 1..395: note = Related to JAIENA010000076.1; note = Burkholderiaceae bacterium
LLWQCLGRGDGNEDDNDGDGDGDGDGDAWVVGADLPPLRRYCVDPPVRPVPPAWLAALALPALASVGALAAWFDEPVGALGWLADQWRLGGEGQERLQHYHYRWVPKRSGGVRLIEIPKARLRRLQQKILREILDRVPPHPAAHGFRRGHSCVTHAALHAGQTVVIRMDLKDFFPSIQLSRIHALFAKLGYCASVAGTLARLCVNRTPPSAFNDRQLGAALNWTERQALKSPHLPQGSPCSPALANLCAYRLDLRLSSLAQSQGATYSRYADDLAFSGGAAFARRAERFHLQVAAIALEEGFQVHHRKTRLMRAATRQQVTGVVVNRHPNIARSDYDALKATLTNCVRHGPATQNRDRHTDFRAYLAGRIAHVKMVNADRATKLQRLFEAIAWPA

SEQ ID NO: 5361 - protein, 456 aa, unidentified
  source 1..456: note = Related to NZ_LMDJ01000008.1; note = Massilia sp.
MNTKQFTVLALADMVLATDGSLASLIGACNRVFDAEPPWVPAACAALIERTGDYFHYYSRRELAALLLECIGHGSAGARDEDAEPGHERGLECLVMPDVRRLCVEPALRPPKPAWLAALALPDLPTAGALAAWLNEPVGALDWFADQWRLARDAQSPLQHYHYRWVPKRSGGQRLIEIPKARLRRIQQKILREILDMVPPHPAAHGFRRGHSCVTHAALHAGRHAVIRMDLKDFFPSIQLSRVHALFEKLGYPHRTAGTLARICVNRTPQGALRDKLAGGALPWLERQALKSPHLPQGSPCSPALANLCAYRLDIRLSALAQSLGGSYSRYADDLAFSGGPAFARAADRFHVRVAAIALEEGFRVNTRKTRLMREGTRQQVTGIVVNAHTNVARDEYDKLKATLTNCVRHGPASQNRDRHPDFKAYLAGRVSYVRMVNAGRASRLQGLLDAIAWAA

SEQ ID NO: 5362 - protein, 459 aa, unidentified
  source 1..459: note = Related to NZ_CP086370.1; note = Massilia sp.
MNIKQHTVLALADMALATDGSLASLTAACHRVFDAEPPWVPAVCEALIARTGEHFHYYSRHELAGLLLECIGHGRGGPGADGQDGDDAEDFALPEPIALPAVRRYCVDPPVRPPKPEWLAALALPELANAAALAAWLNEPVGALDWFADQWRLARDGQSPLQHYHYRWVPKRSGGVRLIEIPKARLRRIQQKILREILDLVPPHPAAHGFRRGHSCVTHAAQHAGQHAVVRMDLKDFFPSIQLSRVHALFEKLGYPYKTAGTLARICVNRTPLGAFRSTPDGDSLSWSERQALKSPHLPQGSPCSPALANLCAYRLDIRLAALAESLGGAYSRYADDLAFSGGPAFARAADRFHIQVAAIALEEGFRVNTRKTRLMRAGARQQVTGVVVNAHPNIARDEYDKLKATLTNCVRHGPASQNRDRRPDFHAYLAGRISYVKMVNAARASRLQSLMDAIAWAA

SEQ ID NO: 5363 - protein, 460 aa, unidentified
  source 1..460: note = Related to NZ_AUDI01000016.1; note = Pseudoduganella violaceinigra
MTTDKLTALALADTMLATDGSMESLIAACNRVFGSRQPWATGICVALIERTGESFHYFSRHELADILLQLLGHQFDDDEYGEYNDDEFGEEDSSPPYIELPQVRRYCLDQPIRPPKPEWLAALALPELPTIGDLAHWLNEPVGALEWFADQWRLAGDAQSRLQNYHYRWVAKRSGGLRLIEIPKARLRRVQQKILRQILDLAPPHPSVHGFRRGRSSVTHAALHAGKRVVIRMDLKDFFPSIQVSRIHALFEKLGYSQSVAGTLARICVNRAPYGLFRDKQTGGSLPWVERQALKTPHLPQGSPCSPALANLCAYRLDIRLETLAQSLGASYSRYADDLAFSGGADFARAAHRFHIQVAAIALEEGFRVNTRKTRVMREGTRQQVTGVVVNTHPNLARSEYDTLKAMLTNCVRHGPTSQNRHNRPDFRAHLAGRISYVKMLNVNRAVKLQRLFESIAWTP

SEQ ID NO: 5364 - protein, 452 aa, unidentified
  source 1..452: note = Related to NZ_WNKX01000014.1; note = Massilia eburnea
MNTEKLTALALADMMLATDGSMASLVAACHRVFDSPQPWSATICAALIERTGDNFHYFSRHELAHILLLLTGRRFDDFEDGDDEPSPPLIELPAVRRYCLNQPIRPPKPAWLASLALPELKTVGDLAGWLNEPVGALAWLADQWRLAGDEQSRLQHYHYRWVPKRGGGLRLIEIPKARLRRIQHKILRQILDLAPPHPCAHGFRHGHSSVTHAALHAGKNVIIRMDLKDFFPSIQASRIHALFEKLGYPPSVAGTLARMCVNRAPRGIFRDKQTGGSLPWSERQALQSPHLPQGSPCSPALANLSAYRLDIRLASLAQSLGASYSRYADDLAFSGGPDLARAADRFHIQVAAIALEEGFRINTRKTRVMRKGTRQEVAGVVVNSHPNLARGEYDLLKAILTNCVRHGPASQNRHRHPSFRAHLAGRISYVKMLNANRAVKLQRLFETIEWAD

SEQ ID NO: 5365 - protein, 458 aa, unidentified
  source 1..458: note = Related to LMDB01000012.1; note = Duganella sp.
MDNEKLTALALADTMLATDGSPENLIAACDRVFDATQPWAPGVCMALVMRTGENFHYFSRHELADILLQLLGRGHVDYDDEDEDEEEGGADAPPFIKLQDVRRYCLEQPIRPPKPAWLAELALPDLPTVGDLAVWLNEPVGALRWFADQWRIARDEQSRLQHYHYRWVPKRSGGLRLIEIPKERLRRIQQKILRQILDLVPPHASAHGFRRGHSCVTHAARHAGQHAVVRMDLKDFFPSIQHARVQALFEKLGYPESVAGTLARICVNRAPHDLFRDKQSGGSLAWSERQALKSPHLPQGSPCSPALANLCAYRLDIRLESLARSLGASYSRYADDLAFSGGDEFARCAERFHIQVAAIALEEGFRVNTRKTRLMREGTRQQVTGIVVNAHPNIARDEYDKLKATLTNCVRHGPESQNRESHPNFQAYLAGRISYVAMVNSDRAAKLQRLLDDIVWPT

SEQ ID NO: 5366 - protein, 308 aa, unidentified
  source 1..308: note = Related to CP051684.1; note = Duganella sp.
MAGAARRADSASALPLPLGAQAQRRPAPDRNSQGAAAAHPANNPAPDPRPGAAACGRPRIPARPVERHARRLACRPPNRRPHGPEGFFPSIQYARIVALFEKLGYPDKVASLLARLCVNRTPNGAWRDRKVAEAVTWSERQALKSPHLPQGSPCSPALANLCAYRLDIRLTALAQSLGASYSRYADDLVFSGDHDFARAAERFHIQVAAIALEEGFRVNTRKTRLMREGTRQQVTGVVINRHPNIARDEYDKLKATLTNCVRHGPASQNREGRTDFRAYLAGRISYVNMVNANRATRLQRLADAIVWS

SEQ ID NO: 5367 - protein, 459 aa, unidentified
  source 1..459: note = Related to NZ_WKJN01000036.1; note = Duganella alba
MAIEKLTLLALADTLLATEAHLASQIAACTRVFDAPQPWAPPVCAALLARTGDNFHYFSRYEIADLLRQLLARAQEEREGAAAEDADTAAADSAPLVTELPPVRRYCIDPPLRPPQADWLVALGLPQLHSVGALAAWLDEPVGALGWLADQWRLPHNAPARLQHYHYRWVPKRSGGLRLIEIPKARLRRIQQQILRQLLDLTPPHAAAHGFRRGRSSVTHAALHAGRHTVIRMDLKDFFPSIQYARIVALFEKLGYPEKVAGLLARLCVNRTPNGALHGRQVADAVTWSERQALKSPHLPQGSPCSPALANLCAYRLDIRLDALAQSLGAVYSRYADDLVFSGDRDFARAADRFHIQVAAIALEEGFRVNTRKTRLMREGTRQQVTGVVINRHPNIARDEYDQLKATLTNCVRHGPASQNRDGRADFRAYLAGRISYVRMVNAQRAARLQRLADAIVWR

SEQ ID NO: 5368 - protein, 477 aa, unidentified
  source 1..477: note = Related to WHUF01000005.1; note = Rugamonas rivuli
MSRVAFPRKTAHASRDSLKALRSFSLRMTIKKLTVLALADTMLASERNLDSLIAACGRVFGAPPPWASEVCAALIERTGENFYYFSRHEIAGILLQLLSHDNADDDDGDDEAPEPMELPPVRRYCIDPPIRPPRDAWLAALALPELRTVGDLAAWLDEPVGALEWFADQWRLAGDKESRLQHYHYRWVPKRSGGLRLIEIPKERLRSIQQKILRQILDPLPPHPAAHGFRRGHSCLTHATLHAGRHVVIRMDLKDFFPSVQLSRIHALFEKLGYPDKVAGALARVCVNRAPHGVFRDTHDGASVTWAERQALKSPHLPQGSPCSPALANLCAYRLDVRLEALAQAMGASYSRYADDLAFSGDRDFARAAERFHIQVAAIALEEGFRINTRKTRLMREGTRQQVTGVVVNAHPNIARDEYDRLKATLTNCVRHGPATQNRDSHPDFRAYLAGRISYVKMVNASRAVKLQRLLATVAWA

SEQ ID NO: 5369 - protein, 446 aa, unidentified
  source 1..446: note = Related to QVIN01000001.1; note = Duganella sp.
MTIAKLTALALADTMLASDGSVEKLIAACGRVFGAPQPWAPKLCAALSERTGDNFHYFSRHEIADILLHLLGHDYNDDEERPVIALPAVRRYCIDPPIRPPQDEWFAALALPELPTVGALAAWLDEPVDALDWFADLWRVESGQQSRLQHYRYRWVPKRSGGLRLIEIPKARLRRIQQKILRQLLDRLPPHPAAHGFRRGRSCVTHAALHAGRRIVIRMDLKDFFPSIQYSRIHALFEKLGYSPTVAGTLARICVNRAPCGVFSDPMEGGSLPWAERQALKSHHLPQGSPCSPALANLCAYRLDMRLQALAQSLGASYSRYADDLAFSGDQDFARTAERFHIQVAAIALEEGFRIHHRKTRLMREGTRQQVTGVVVNTHPNIARDEYDRLKATLTNCARHGQATQNRDSHPNFRAYLAGRISYVGMVNANRALKLRRLFDAIAWPA

SEQ ID NO: 5370 - protein, 456 aa, unidentified
  source 1..456: note = Related to QVIO01000002.1; note = Duganella sp.
MNIEKLTVLALADTMLASDRSLGSLISACGSVFGMSPLWAPSICAALIERTGENFYHFSRHELADILLHLLGRGSDDVHDDEDEDNPEEYTEVAERLELPEVRRYCIEPPIRPPQTAWVAALALPQLPSVGALAAWLDEPVGALAWFADQWRLASDAQSRLQHYHYRWVPKRNGGQRLIEIPKARLRVLQQKILRHLLDRLPPHPAAHGFRRGHSCVTHAALHAGRPVVVRMDLKDFFPSIQLARIHALFEKLDYPPAVAGTLARICVNRAPQGVFKEAGSLPWAERQVLRSPHLPQGSPCSPALANLCAYRLDMRLEALAQSLGATYSRYADDLAFSGDRDFARAAERFNIQVAAIALEEGFRINTRKTRLMREGTRQRLTGVVVNAHPNIARDEYDRLKATLTNCVRHGPASQNRDRHPDFHAHLAGRISHVKMVNANRAVKLQRLLEAIAWTV

SEQ ID NO: 5371 - protein, 457 aa, unidentified
  source 1..457: note = Related to NZ_WWCJ01000021.1; note = Massilia guangdongensis
MDIDKLAVLALADTMLASDGSMAALVAACHRVFAAPQPWAPRICAALIEHTGENFHYFSRHELADRLWQLLGRATSDADVDVDDFVALAAPPFIALPPVRRYCIDLPQRPPAPGWLAALALPELATVGDLAAWLGEPVAALDWFADQWRLDGPAQTPLQHYHYRWVPKRSGGWRLIEIPKERLRRLQQRILRQLLDRVPPHPAAHGFRRGHSCLTHATLHAGQRAVIRMDLKDFFTSVQPARIHALFAKLGYPPSVAGTLARLCVNRAPHGVLRDRQGDVALPWSERQALKTPHLPQGAPSSPALANLCAYRLDLRLAALARTLGASYSRYADDLAFSGGEEFARAAARLHIQVAAIALEEGFRVNTRKTRLMRAGARQQVTGVVVNAHPNLARDEYDRLKAMLTNCVRHGPATQNRAGHADFRAHLAGKISHVRMLNPQRAGRLQAVFDAIRWDLH

SEQ ID NO: 5372 - protein, 458 aa, unidentified
  source 1..458: note = Related to JACMNR010000433.1; note = Bdellovibrionales bacterium
MIPAPSVALALADTLLAGEASPDGLAASAASALGTAYAWGPAMCGFILQRTGDKFRYFSRHELAAIILDSDAFHAAFEPGKEAPQIKRYCLQLPVRPEPDAWLSALSLPAIPTLGELALLLNVELQDLGWFADQWRRGSAEAAPLQHYHYRWVAKRSGGWRLIEIPKQRLRRMQQTILRKILEDVPVHGAAHGFRRGHSCVTHAALHAGQRVVIRMDLKDFFPSIQASRIHALFSKLGYSDSVAGTLARLCTSRAPASAFADPHTGGSLPWAARRALRSPHLPQGSPCSPALANLCAWRLDLRLDALCGSIGATYSRYADDLVFSGGREFERSVERFHVQVAAIAIEEAFGVNTRKTRVMRAGVRQQVTGVVINQHPNLRRDEFDRLKAVLTNCARHGPVAQNREGRENYWHYLAGKVAWVKMLNPARGAKLEKVFAGIDWPEAGSGSVAAPASESSS

SEQ ID NO: 5373 - protein, 492 aa, unidentified
  source 1..492: note = Related to WHJH01000043.1; note = Massilia mucilaginosa
MPLRGYPVGTILLCNSPHEPPCAAAHLSSSFTRLVEGSPPPQSYPSMIPKDAVALALADTMLARDATLAGLIASATWAFDHPWPWIPALCEEIHARTAAHFYYFSRDELARIIFELDVFHAAWDGEGPAPQLQRYCLDLPVVPPAPDWLAALALPALPSVGELARWLGLRPDELGWFAGQWRKDPMPAAQLEHYHYRWVPKRSGGVRLIEIPKPRLRAMQAIILRELLDRVPAHPAAHGFRRGHSCVTHAALHTGQRVVIRMDLKDFFPSIPASRIHALFAKLGYSQTVAGVLARLCVNRVPAGVLREPAGGNALTWTQRQALRAPHLPQGSPCSPALANACAWRLDVRLETLAQLLGARYSRYADDLVLSGGRELERAMDRVHAQVGAIALEEGFAINTRKTRVMRAGVRQQVTGIVVNRHPNIARDEFDVLKATLTNCVRHGPQGQDRENRPDFRAWLAGKVAYVTMVNPQRGGRLQRLFDAIAWPHPPL

SEQ ID NO: 5374 - protein, 459 aa, unidentified
  source 1..459: note = Related to NZ_CP065053.1; note = Massilia antarctica
MIPKDAVAQALADTMLARDATLAGLIASATWAFGHPWPWIPDLCEQIHSRTAEHFYHFSRHELAQIIFELDVFHDAWDGDGPAPELERYCLDLPLVPPPPDWLAALALPALPSVGGLARWLRLRVDDIAWFADQWRVDAAPAAQMEHYHYRWVPKRSGGVRLIEIPKQRLRAMQATILRELLDRVPAHPAAHGFRRGHSCVTHAALHTGQRVVIRMDLKDFFPSIPASRIHALFAKLGYSQSVAGVLARLCVNRVPAGVLRAPVDDNALTWMQRQALRTPHLPQGSPCSPALANACAWRLDVRLDTLAQSLGARYSRYADDLVFSGGRALERAMDRFHAQVGAIAIEEGFAVNARKTRMMRAGVRQQVTGIVVNRHPNIARDEFDLLKATLTNCARHGPQAQNRDHHPDFRAYLAGKVAYVTMVNPQRGQRLQGLFETIAWLSAPGQPDNNSGKQYNFP

SEQ ID NO: 5375 - protein, 438 aa, unidentified
  source 1..438: note = Related to FQWU01000004.1; note = Massilia sp.
MIPAHSVALALADTMLAGAAGVAALIGSAARAFEVEHKWVPPLCEAIHVRTGEHFHSFSRMELAAIILDDEHFLGAWENGKAPPQIRRYCISLPVVPEQPAWLVALALPAIPTVGDLARWLTVRPDELGWFADQFRLTHDATSRLQHYHYRWLPKRSGGWRLIEIPKQRLRAMQQKILREILDLVPAHSAAHGFRRGHSCVTHAALHVNQRVVIRMDLKDFFPSIPASRVHAMFVKLGYSQSVAGALARLCVNRTPAGAAAAVDISWAERQALRSPHLPQGSPCSPALANACAFRLDIRLQALAASMGAVYSRYADDLVFSGDAQLARALDRFHVRVAAIALGEGFRVNTRKTRMMGAGVRQQVTGIVVNCRPNIARDEYDALKATLTNCVRHGPASQNRIGHDNFRAYLEGRVAHVHMVNPARAERLRNLCAAIVWP

SEQ ID NO: 5376 - protein, 441 aa, unidentified
  source 1..441: note = Related to NZ_CP013232.1; note = Collimonas fungivorans
MNPKTFVALALADTFLAREASLDAMLQGARWALGKKWRWIPSLCRAIHKQTGEQLHSHGRTELAALILAHEGFADAWLDSEPPQVRHFCLDPPVAAEPPAWLSALALPVLATAADLAQWLKVTPSELDWFADQWRNSQATTTALQHYHHRWIAKRSGGLRLIEIPKPHLRTMQTQVLRGLLDRIPLHQAAHGFRRGHSCVTHAALHAGKRVVIRMDLKDFFPSIPAARVHALFIKLGYPPKVAGLLSRLCTYRTPGNVLNQPGQKIPWQERQALRTRHLPQGSPCSPALANLCAYRLDMRLQALATALDARYSRYADDLVFSGESGLERAMDRFHVQVAAIALEEGFAVNARKTRMMRSGVRQQVTGIVVNRHPNIPRQEFDKLKAALTNCIRHGPASQNREGRDNYRQFLAGRVSYAQMVNPQRGKRLHRLFEQISWPGS

SEQ ID NO: 5377 - protein, 445 aa, unidentified
  source 1..445: note = Related to FOLC01000015.1; note = Collimonas sp.
MTPQTFVALALADTFLAREASVEAMQQGARRALGKKWRWIPSLCRAVYKQFGDRLHRHGRTELAALILAHQGFADAWLDSEPPQIRHFCLDLPLPAGKPAWVSALPLPALATTADLAQWLKAGPSELDWFADKWRTSPPPAAALQHYHHRWIAKRSGGLRLLEIPKPRLRTMQGQILRGLLDLLPLHPAAQGFRRGHSCVTHAARHAGKRVVIRMDLKNFFTSIPAARIHALFTGLGYPSRVAGILSRLCTHRTPGSVLNHQDPASAGALSWQERQVFRQRHLPQGSPCSPALANLCAYRLDLRLQALAASLNAGYSRYADDLAFSGDGELERAMDRFHVQVAAIALEEGFSVNTRKTRMMRSGARQQVTGIVVNRHPNIPRQEFDNLKAALTNCIRHGPASQNRDGRDNHRQFLAGRIAYVRMVNPQRGKRLQQLFDKIAWPKG

SEQ ID NO: 5378 - protein, 447 aa, unidentified
  source 1..447: note = Related to PDBX01000001.1; note = Collimonas sp.
MTPKTFVALALADTFLAHDASTNALIAGARRALGKKWRWIPSLFRTILKQHGEQLHCLGRSELAALILAHDGFSDAWQESSPPQIRHYCLDAPLAVEQPGWLAALGLPRLASVAELAQWLQVAPLELDWFADKWRNNMPAPSALQHYHYRWLQKRSGGLRLLEIPKLRLRAMQSQILRHLLDLVPPHPAAHGFRRAHSCATHAALHAGKRVVMRMDLSNFFPSIPAARIHGLFVKLGYPANVAGVFSRLCTHRTPASVLANPDKGLRSAHVMSWQERLALRTRHLPQGSPCSPALANLCAYRLDMRLQALAVSLNASYSRYADDLVFSGDQELERAMHRFHVQVAAIALEEGFSVNTRKTRMMRSAVRQQITGIVVNSHPNIARPDFDNLKAALTNCIRHGPASQNREGRDNYRQFLAGKVAYLHMVNPQRGKRLQQLFEQIVWSAD

SEQ ID NO: 5379 - protein, 440 aa, unidentified
  source 1..440: note = Related to JACOUL010000024.1; note = Burkholderiales bacterium
MTSKTLVALALADTFLSREAGLASMVHSAAWALGKKWKWIPSLCRAIVEQAGEHFYDYSRDELAALILAHAGFSDAWQDNAPPRIKHYCLDLPIAPEKPAWLSSLALPELATIADLTQWLKLSAAELDWFADKWREQSPTARALQHYRYRWLVKKSGGLRLIEIPKQRLRSIQTHILRKLLDLVPPHSAAHGFRRAHSCVTHASLHAGKRVVVRMDLKNFFTSISYARIHAMFGKLGYSSSVAAALARLCTHRTPLGVFSEREITKTIPWQERHALRTPHLPQGSPSSPALANLCAHRLDIRLDALANSLNARYSRYADDLTFSGEYELEQAMERFSIQVAAIALEEGFSVNTRKTRLMRAGVRQQVTGLLVNRHPNTPREEFDILKATLTNCIRHDPASQNREGRENYRQYLAGRIAFVHMVNAKRGVRLKQLFEKIKW

SEQ ID NO: 5380 - protein, 446 aa, unidentified
  source 1..446: note = Related to NZ_QJKB01000006.1; note = Undibacterium pigrum
MDIPKQVALAIADALLAGECSHIALMKNMSWVLGKKWPWIPSLCPKIYLHAGPHFYHYSRHEIAAIILDDHGYYDAWRGKDKPQIKQYCLLPAIAPEKPAWLQALALPEFNNSADLARHLNLTVNELAWFADQWRQDAQAAPQLRHYHYRWLEKATGGWRLLEIPKSRLRNIQRKILQRILNQVPPHAAAQAFQQGRSSISHAAQHTGKLVVVRLDLKDFFTSIPGSRLHALFAKLGYPEKVAGTLARLCSNRTPTVIAKEKTRYLAPLSSAHLLRSPHLPQGAPTSPALANLCAYRLDMRLQALADSMQASYSRYADDLTFSGDEQFDQSLRRVIPQVAAIVLEEGFVLNYKKTRIMRASTRQQVTGIVVNRHCNIKRADYDTLKAILTNCLRSNPASQNREGHANFRAHLAGKLAYMRMINPARTAKLQALFEQIKWPDSAVMI

SEQ ID NO: 5381 - protein, 446 aa, unidentified
  source 1..446: note = Related to JAKZHX010000011.1; note = Undibacterium sp.
MDKPEQVALALADALLAGPCDPVIMMKNMRWVMGRKWPWIPALCKKIHRHTGDHFYHYSRHEVADMILADNGFDNAWFRSESPPVIRHYCLLPPVAPDRPVWLEMLNLPSLANSDELANYLNLPHGELAWFADQWRDSAPESTGLRHYRYRWLDKPTGGVRLLEMPKQRLRNIQRKILRQILDRVPPHAAAQAFRKRHSCLSHASLHTGKQVVLRLDLKDFFSSIPGSRIHSLFAKLGYPQSVAAILARLCTHRTPNTVLDEIMARQGAPWQVRHMLRSRHLPQGAPTSPALANLCAFRLDMRLHTLAASMQATYSRYADDLTFSGDEELARALQRFIIQAGAIAIEEGFSLNHKKTRIMRATGRQQVTGIVINRHCNIRRSEFDRMKAILTNCVRNGPATQNRDHHADFRVHLAGKLAHLHMINAARATKLQTIFEQINWPAKPE

SEQ ID NO: 5382 - protein, 452 aa, unidentified
  source 1..452: note = Related to JAGOHT010000005.1; note = Alphaproteobacteria bacterium
MDAKDFVALALADAWLAEPAGQDFTGRATVLFGQPHPWIPRLARRIKRQFGTTEHYDRRTALAQFIRADDGYTTAWSSYAKPRLRQYVFATPQMRLQSAWLSTAKLPPLATCGALAEWLGLTTEELAWFADTRGMNRTATGKLNHYQYQWRKKRSGQYRLIESPKERLRAIQRKILTGILNQVPPHDAAHGFRRQRSCLSFVAPHIGKDCVLRMDLCNFFGTITAARIHALFRALGYPMAPARLLTGLCTHSLPQQFIDQLHTAGIELSWAERRAYQAPHLPQGAPTSPALANLCAYGLDVRLSALVAKHGADYTRYADDIAFSGGGAFKSQAADISTFVAVVAQEEGFAVNFRKTRRMPTSQRQQLTGIILNKKPNVRRTDYDALKAILHNCQQGDPASQNRSRHPDFRAHLLGKINYVKQINPQRGTKLLTLYSEITWPENPSQTAPEQP

SEQ ID NO: 5383 - protein, 448 aa, unidentified
  source 1..448: note = Related to NZ_JONR01000045.1; note = Nevskia soli
MTPRDQVAEGLADALLAGPSSVDDLAARAAEALGRKHRWIRPFARRVFKRFGAALAHAQRGELIGFIQTDPGYCKAWKAAGKLRIRRYFFGVPSMGPRPGALARCVLPELPTSADLAAWLGITIPELEWYADLRGMIGSSDGALCHYHYKWIPKRHGDYRLIESPKPRLSAIQTRILREILDLIPTHEAAHGFRRGRSCLTYVAPHVGKLVVLRMDLHNFFGSIPFARINALFKTLGYPEETAKYLAGLCTNRLPARVALKIPGADPGFVLPWPECKKLNERHLPQGAPTSPALANLCALHLDFRLAALASKVNADYTRYADDLAFSGNEGVRRKIGDLSTTIAAIALAEGFEVNFRKTRAMHKSDRQILTGIVVNERVNMQRNEYDRLKATLYNCLRFDPDSQNREGHRDFQAHLLGRVNHLKNLNQRRGAKLQALLERVEWQAGAG

SEQ ID NO: 5384 - protein, 445 aa, unidentified
  source 1..445: note = Related to JAEUMY010000023.1; note = Betaproteobacteria bacterium
MTSKSRKHFVACGLADALLAGPPGITEFEARAKQALGRKPRWVLPLCKRIFARFGSGLGTQQRAKLIEFIETDQGYLDAWLADTKPRIRHYFLATNSMAPRVGALALCPLPNIPTSVDLAAWLDISIEDLEWFADVRHMVKAPGPLCHYHFRWLPKRSGGWRLVEIPKQRLRDLQRKILREVLDPVMPHDAAHGFRRGRSCLTNAAPHCGKDVVLRMDLLNFFTSIPASRIHALFTTLGYPDPVAKRLTGLCTCEVTTRMLPALPAGAEPLPWAMRKRYAERHLPQGAPTSPALANLCALHLDFRLAGLAESLGGAYTRYADDLAISGGEPLRRRVGAITSLLSAIAREQKFDINHRKTRVMHRSDRQRLTGVVVNEKPNVSRAEFDQLKAVLHNCVVHGPQSQNRMGHPNFREHLRGRVSYVAGLNGARGERLRLAFEEIDWAR

SEQ ID NO: 5385 - protein, 443 aa, unidentified
  source 1..443: note = Related to NATR01000129.1; note = gamma proteobacterium symbiont of Ctena orbiculata
MGNGLSSLATNLRLLALSVLAGAWDKPGLIERLEQALEYSPTDAAQLASRLLFHYEAGQPPSRQRLMAFLANEVSLQQRFASPDAKPPRLVLDPPRMGRPPERLITLPLPPLETRKDLAEWLGLFDHELAWFADLERRQCKVKESKLHHYRYQWIEKRSGKLRLIEIPKPRIKAIQRRILREILNRVPPHPAAHGFCRGRSCRSFVASHLGKPVLLRMDLKDFFHSVPIARIGALFRRVGYPAHVAWLLQGLTTHSTSPALAGEAFERLPWQRRKHLIDKHLPQGAPSFPALANLCAWRFDCRLQGVAERFGLDYTRYADDLAFSGDRNLLRLAPFLKGLIGAIAIEEGFEINHRKTRLRTQAQSQRLAGMVINQQPNLPREEFDRLKAILYNCTRWGPESQNREGVEDFRAHLEGRVAYALWLNPEKGRRLKDLWRYIQWSE

SEQ ID NO: 5386 - protein, 347 aa, unidentified
  source 1..347: note = Related to NZ_MARB01000009.1; note = Candidatus Thiodiazotropha endolucinida
MGRPPDKLLTFPLPSLSTVKDLQQWLGLFDHELAWFADRERRQCKVTESRLHHYRYQWIEKRSGPPRLIEIPKTRLKMLQRQILREILNRVPPHPCAKGFVRGRSIKHFVEPHLGKEVVLRMDLKDFFHTVPVYRIGAMFHRLGYPWSVAYLLQGLCTHTSSALLAGDTFNALPWAMQKRLRDKHLPQGAPTSPTLANLAAFRFDCRLQGVANRFSLDYTRYADDLAFSGARELLRLAPFLQGLIGAITIEEGFEINHRKTRVQTQAQSQRLGGMVINQRPNLPREEFDRLKAILHNCVRWGPESQNREGVDDFKAHLGGRVAYAVWLNPEKGKRLRQLWKRIQWLD

SEQ ID NO: 5387 - protein, 433 aa, unidentified
  source 1..433: note = Related to JAGRGZ010000050.1; note = Gammaproteobacteria bacterium
MRRLMLSIQFGRWDRESLGDRLRRALDGGPPDPDRLAARLLFQFPPGHPPSRSQLAGLLAADRELAAASQSGGKGFEARIVLDTSVMQAPTGHFSTLPLPTLDHARDLGLWLGLNQRELAWFADCESRQTSVRNPKLHHYRYRWLARRSAPPRLLEIPKARLKLMQRQVLHHLLDCVPPHPAAHGFRRHRSCLSFATPHLQKPAVLHMDLEDFFPSIPAPRVGALFRRLGYPPGVARVLQGLCTHAVAPALVGAEFDALPWETRRRLQAPHLAQGAPSSPAIANLCAWRLDCRLQGLADRFELDYTRYADDLAFSGPASLLRRGPFVQALIGAIAAEEGFRINHRKTRLNTQAQSQRLAGVVVNQRPNLQRRDYDRLKATLHNCARFGPEGQNHEGRQDFRAHLAGRIAHVAWLNPDRGARLKALWARISWPD

SEQ ID NO: 5388 - protein, 451 aa, unidentified
  source 1..451: note = Related to JAGRGX010000033.1; note = Gammaproteobacteria bacterium
MPTHRTKIRRLTQALSTGLWQKDTIADRASRALHGGPPDPRRLTARLLLQFGDAQHPPPAELEAFLRHDHEVASALRSITDNNTPALLLDPSTMQPQRHRISLPLPVLDTVRDLQQWLGVSAGELAWFADCDGRQAKSTTQRLHHYRYRWAEKRRGGWRLIEQPKSRLKAIQRQVLREILDRVPPHPAAHGFRRGRSCLSFVAPHCGRPLLLRLDLRDYFTRVPVARIGATFRRLGYPAAVAHTLQGLCTHAMSASLADPPAGAVDWQQRQYLRSKHLPQGAPTSPALANLCSWHLDARLSGLAHRYGLAYTRYADDLAFSGTDALRHDAPFLRDLIAAIALEEGFRINHRKTRLVTAAQRQRLTGIVINAHPNPPRSEFDRLRATLFNCVRYGPQSQNRDARTDFAAYLAGKLAYVTQLNPNKAVRLHRLWRQIDWQEYDGTSTMHDDGS

SEQ ID NO: 5389 - protein, 382 aa, unidentified
  source 1..382: note = Related to JAGRGY010000021.1; note = Gammaproteobacteria bacterium
MEAMLAGDAEVRAALDRSDDPDLPAILLDPPVMHPPADRRISLPLPRIETWRDLRQWLGVFDGELAWFADREGRQADVVEPRLHHYRYRWLAKPAGGWRLIEQPKTRLKAIQRQILRGVLDRVPPHPAAHGFRRGHSCRSHAAVHTGRAVVLRMDLQHFFTSVPVARIGAMFRRLGYPAGVAHLLQSLCTHCLSPPLAAAPDGALNWEQRQRLRAKHLPQGAPTSPALANLCAWRLDCRLDGLARRFGLDYSRYADDLAFSGPHGLVANVDFIEGMVGAIALEEGFRVNHRKTHLATRSQCQRLTGIVVNARPNLDRRAFDRLRATLHNCARYGPAGQNRDGVADFRAHLAGRLAYARWLNPDKARRLERLWRQIDWPSDGD

SEQ ID NO: 5390 - protein, 435 aa, unidentified
  source 1..435: note = Related to SCTB01000034.1; note = Alphaproteobacteria bacterium
MPRKFKQAEWLASSVCTGAWERAAVAERLARALPADGPDPVALAASIRNRFYEDGPPNLKALTLFLIDHPLLQPVFQKGGIRGLLLDPPVMGRRQDNLAPLQLPELPTLRDVGLWLCLSDAEISWFADTRLRQGRVTEEKLHHYRYLWIPKRSGGIRLIETPKVRLKEIQRMIVSRILRHVPPHDSAHGFTRGRSIKTFAAPHLRQQVVLRLDLKDFFHSVPVARIAALFRRLGYPPNAARVLQGFCTNSVSPSLAGKPFTRLSWHDRKRLQGRHLPQGAPTSAQLANLCAWGLDCRLKGLADHYGYQYTRYADDLAFSGPSSLAGRARFIEALTGAIAQEEGFSLNHRKTRLRLASQRQRLAGVVVNERVNCSRADWDRLKATLHNCVKHGPESQNHDKHPDFKAHLKGRVTHAAWLNPSRGGKLQFLFNQIVW

SEQ ID NO: 5391 - protein, 421 aa, unidentified
  source 1..421: note = Related to WGNE01000059.1; note = Alphaproteobacteria bacterium
MHAGAWDRAALAERLAKVLPAGAPDPARLAARIYRRFGEGPPPSVTALAAFMREEKLLEPLFEGKGIRGPSLEPYAMGRRPDLLAAVPLPDLPTLRDVGRWLGLSDEEVSWFADVRFRQDKLTEPKLHHYHYSWIPKRSGGLRLIEMPKFRLKEIQRRIVREILGRIPPHDCAHGFTRGRSIRTFAEPHTGQYAVLRLDLKDFFHSVPIARIAALFRSLGYPPKIARVLQGLCTNAISPPLAGKPFEKLPWHERKALQDKHLPQGAPSSAPLANLCAWRLDCRLEGLAIRYGYRYTRYADDLALSGPSSLARRAEFIEALVGAIATEEGFCLNYRKTRLRLSSQRQRLAGVVVNEKANCGRAEWDRLKATLHNCAKHGPEGQNRGNHPAFKSHLEGRVAHFAWLNPARGEKLKSLLGRIVW

SEQ ID NO: 5392 - protein, 438 aa, unidentified
  source 1..438: note = Related to PBDO01000002.1; note = Pseudomonadales bacterium
MTNSVRARRLALSIIDGEWTQPAVTDRLRRVLELHPQDIKQLAARLCFLYEQPPASFKRLATLLLNEPLLEYFWQHAAQQDIPGILLDTPQMQPPPANLRCFPLPRLDTLKDVALWLAVQPRELDWLADINGRQAQVVEPRLHHYRYRWVNKRSGGQRLIEIPKSQLKRIQRLILHDILDRILPHDAAHGFVRNRSCASYVAAHVGQPVILHLDLKDFFHSVPITKVLAFFRTLGYPAAVARTLMGLCSHGVSPSLAGKPFADQSWQRRRQLRHPHLPQGAPTSGALANFSAYRLDCRLAGLARRYGLRYSRYADDLVFSGPETLRPQAAWIESVTGAIALEEGFCLNHRKTRVRSQSQSQRITGLVINEKINISRTDYDQLKATLHNCVRHGSESQNRCAHPDFRAHLAGRIAHVTHINPQRGKKLQQLFNAVHWED

SEQ ID NO: 5393 - protein, 456 aa, unidentified
  source 1..456: note = Related to NZ_AONC01000057.1; note = Imhoffiella purpurea
MNTLRRDIQTLAASLLAGRWALPDLTDRLQRALHWPHPPASLLAARLLRDLGEHHAPEARTLASWLLQDALLLAHLERGSDARPHIEWLLDAHVMEAQPPAMAADVPQLPTTGDLADWLRISPGELGWFSDLWCSQARASREPLRHYRYQWRHREDRPRLIEIPKPRLKRLQRRVLHEILDPPQPHPAAHGFRAGRSCLTYARPHTGQPVVARMDLRDFFQSVPIRRVTAFFRCLGYPAPVARVLRGLCTHGVSRDVLTRAGLDLPWERRQRLASPHLPQGAPTSPALANLCCYRLDCRLTGLADKLGLRYTRYADDLAFSGAESLRHGFERFHILVARIALEEGFELNTRKTRLMTAAQRQSLTGILVNAHPNLPRREYDSLKAILHNCIRTGPAAQNRAGLPDFRGHLRGRIAYLAQINPDRGARLLRLWEAIEWPDRRATDSADAETAGRRAR

SEQ ID NO: 5394 - protein, 447 aa, unidentified
  source 1..447: note = Related to JAAIJQ010000073.1; note = Thiorhodococcus minor
MSRLRRDLRTLSASLLAGRWARPDLSDRIQRALEWTHAPASQLAARLTRDLGDHHPPQAQRLEDWLRQDSTLVARLERGSDHHPQVRWLLDAPVMEAQPAALAARVPQLPTIGDLAAWLRLSPGELEWLSDRWCQQSRETREPLRHYRYQWRPRAGRAPRLIEMPKPRLKRIQRRILRHILDPLQPHPAAEGFRRGRSCLTHAEAHTGQAVVVRMDLEDFFQSVPVRRVTALFRCLGYPAPVARVLRGLCTHCVSGDAWTRSGLDIPWERRQRLSSPHLPQGAPTSPALANLCCYRLDCRLTGLAARLGLRYTSYADDLAFSGAETLRHGFQRFHVLVARIALEEGFALNTRKTRLMTSAQRQILTGILVNARPNLPRPEYDLLKATLHNCIRYGPKEQNREGLPDFRGHLLGRIAHLSQVNPERGARLRRLWEEIDWSNEASEDRL

SEQ ID NO: 5395 - protein, 436 aa, unidentified
  source 1..436: note = Related to JAGRGW010000386.1; note = Gammaproteobacteria bacterium
MSQLTRNARLVALCIVDTAWNLPALTERLTIVLAGGPPDPQRLVARLLFHCEAGRSPSFQRIVDVLEADVDFVRHHADAAYHLQPGAATMQPLPDSLVTFPLPTIPTLRHLATWLGLSDRELAWFCGGHRRYTTDPNPVFHHYRYHWQDRCSGIPRLIEQPKPKLKALQREVLRNILDRVPPHDAAHGFRRHRSCLTGATPHTGQATLLRMDLQDFFTSINRARVAGVFRILGYPAAVATALAGLCTNRSVLKLSDNPIANIPWQTRKKLEAWHLPQGAPTSPALANLCAWRLDSRLTGLAAHWDANFTRYADDLALSGGRQLRKHKSHKEALIAAIVLEEGFRINHRKTRWSTSAQRQRYCGVVVNRHANVERAEYDRLKAILNNCVRHGPVEQNRAEHPDFRRHLQGRISHVAQLNPARGNKLSKLFDRIHWPQ

SEQ ID NO: 5396 - protein, 518 aa, unidentified
  source 1..518: note = Related to LUKZ01000009.1; note = Acidovorax sp.
MSAPIRALARALALALLADADSPERRSLRALAARAGHCLGHAAPEPGNPPLPEVLFEQLRRLSTVSTAEWVRLEPEDLATWLCRGFWWRKAGVRNGTAPWPLQDDGELITEDDDGDGDDPSATPWHLRTDAQLAQSFRTWAASPRTRGPLHWLLRPGTAGPAPAWMGRAPQCSAPVLATAQDLVQLLGVPLEDLLWLAPDHAHWREPQGGCALPASHYRYRLLPKPSGGLRLLEAPRPRLATAQRRILDRLLADIPVHEAAHGFVRGRSVGSHAQAHTRQAVVVRFDLADFFTHINATRVRTLWRALGHGRPAAELLTRLTTTRTPAPVRERLWEGSAPTSAQTIVQRRTTHARLAQLHLPQGAPTSPALANLCAFGLDLRLHALAQRFGARYTRYADDLVFSGPQNLQGQFGALRAWVGAIAQDEGFALRGDKTRLMPAHRRQSVTGLVVNQRPNYSREQFDILKARLHRLARLPGVDVAERARLEGEIHWAGQWLAPTRKEKLQRLFGAIRFTDAP

SEQ ID NO: 5397 - protein, 532 aa, unidentified
  source 1..532: note = Related to NZ_NOIG01000002.1; note = Acidovorax kalamii
MTLSAPIRALARALALALLADADSPDRRSLRALVARAGHCLGHAAPEPGPSPLPEVLLEQLRRLSTVSAAEWARLEPEDLANWLCRGFWWRKAGVRNGTAPWQLQDGGDLVTEGDDIGFWDPEDNDGDAPSATPWHLRTDAQLAQSFRTWAASPRTGRPLHWLLRPGTAGPPPAWMGSAPQCSVPMLATAQDLFQLLGVPLEDLLWLAPDHGHWREPQGGYALPASHYRYRLLPKTSGGLRLLEAPRPRLATAQRRILDRLLAGIPVHEAAHGFVRGRSVGSHVQVHTRQAVVVRFDLADFFTHINATRVRALWRALGHGRPAAELLTRLTTTRTPAPVRERLWEDNAPTSAQTIAQRRSTHARLAQLHLPQGAPTSPALANLCAFGLDLRLHALAQRFGARYTRYADDLVFSGPQDLQGQFGALRAWVGAIVQDEGFALRGDKTRLMPAHQRQSVTGLVVNQRPNYSREQFDILKARLHRLARLPGVDVGERARLEGEIHWAGQWLAPTRREKLLRLFGAIRFTDAAQDKG

SEQ ID NO: 5398 - protein, 529 aa, unidentified
  source 1..529: note = Related to NZ_CP035951.1; note = Acidovorax sp.
MTKTPARTRALAKALAMAVLADAREPERRTLQALAARAGACLGNNTTLADSPVPLPPPLLEQLRRLSHASGAEWARLEPEDVATWLCWGVWWRKAGLRNGSTLQSLTTTFSQQEEKDQDAWDELVGDDDENAEPALPLHQWPDPQLARAFRTWAASPRTGEPLHWLLRSATAGAHPAWMGRERTTPVLLTATDVTETLAISLDDLLWLAPEHAHWRERQDGGHALPLSHYRYRLLPKPSGGLRLLEAPRPRLASTQRRILDSLLAGVPVHEAAHGFVRGHGVGTHAQVHTQQAVVIRFDLADFFMCITATRVRALWRALGHGRPAAELLTRLTTTRTPQAIRERLLEAAPLPREAIAHRRAINTRLKQPHLPQGAPTSPALANLCAFGLDLRLNALAERFGARYTRYADDLVFSGSKALHQQWVDLRAWVTAIAQDEGFTLRADKTRVMPAHQRQYVTGLVVNERANYSRTQFDILKARLHRLGQQPQVDISERARLTGEIQWASQWLAPTRRAKLQRLLHAIRFSNEL

SEQ ID NO: 5399 - protein, 529 aa, unidentified
  source 1..529: note = Related to NZ_AFBG01000026.1; note = Acidovorax radicis
MKKISARTRALAKALAMAVLADAREPERHTLQALSARAGACLGGRTTPADSPDPLPEPLSEQLRRLSNMSDPEWARLEPEDVATWLCWGIWWRKAGVRNGSALQALTANRGQDAEEQDAWDHLADEGDEDAEPALPVHQWPDPQLARAFRTWAANVRAGETLHWLLRPAAAGPQPAWMGRDSTTPVLLTATDVTEALAISLDDLLWLAPEHAHWRERQNGGHALPLSHYRYRLLPKPSGGLRLLEAPRPCLASTQRRILDSLLAGVPVHEAAHGFVRGRSVGSHAQVHTHQAVVIRFDLADFFTSITATRVRALWRALGHGHPAAELLTRLTTTRTPQAVLDRLLEATSIPPEAIAQRHTIGARPKQPHLPQGAPTSPALANLCAFGLDLRLHALAEHFGARYTRYADDLVFSGPKALLHRQWVDFRAWVTAIAQDEGFTLRADKTRVMPAHQRQYVTGLVVNQRTNYSRTQFDTLKARLHRLAQQPPVNISERARLAGEIQWASQWLAPTRSAKLQRLPHAIRFSNEA

SEQ ID NO: 5400 - protein, 506 aa, unidentified
  source 1..506: note = Related to JAHUWH010000023.1; note = Acidovorax sp.
MAVLTDAQGGPERRTPHALAARAMACLGTPAAQDAILPDSLTEQIRRLSLVSALEWARLELDDVATWLCWGRWWRKAGVRNPHAVHSEPEIDDDATFLFDMSEDEEAHEQGSADVPLALWAPQDLARAFREWAASPRSGAHLRWLLRPATTGPQPAWMDHAPGFALLATAADVTQALTLSREDLQWLAPEHAHWREHHNSGLALPPSHYRYRLLAKPSGGLRLLEAPRPRLAQAQRRILDKLLASVPVHEAAHGFVRGRGVGSHAVAHAHQAVVIRFDLADFFTSINATRVQALWKALGHGRSAAQLLTRLTTARTPSAVRERLLEALGSSSAHLAQRRALNQRLSRAHLPQGAPTSPALANLCAFRLDVRLQALAQRFGANYTRYADDMVFSGPRALRGQFAALQSWVSAIAQDEGFTLRADKTRVMPAHQRQYVTGLVVNERVNYSRAQFDKLKAQLHRLSQQPRVAASERSRVAGEIQWASQWLATTRAAKLKRLFDTIRFSP

SEQ ID NO: 5401 - protein, 534 aa, unidentified
  source 1..534: note = Related to AKJX01000004.1; note = Acidovorax sp.
MKTPVRSRVLAKAISMAVLADAQTPEHRTPQALVARVQASLGLEPAAGSPLPAFLLEQLQRLSAMSSPEWARWEPEDVAAWLCWGRWWRSAGLRWGTEHSGAGVEDGASAWDGDDEDIAEPDGDGEGDDILPGLPPTDWTAPRLGQAFRIWTATARSAVPRRWLLRPAGAGPLPAWMDRGTTVPVLATATDVAQVLAVSVEDLLWLAPQGAFWRERHSEGHSLPASHYRYRLLPKPSGGLRLLESPRPRLVHAQRRILYTLLANIPTHEAAHGFVRGRSVGSHARIHTGQAVVIRFDLADFFTQIHATRVRALWRALGHGRAAAELLTQLTTARTPAGVRDRLLESMPELPTSIAQRRATAQRLARPHLPQGAPTSPALANLCAFGLDVRLQALAQRFGANYTRYADDLVFSGPDMLRRQFIALRAWVAAIAQDEGFALRADKTRVMPAHQRQFVTGLVVNQRANYSRVQFDTLKARLHRLAQQAQVDAGERARLEGEIRWASQWLAPARTAKLQRLLAAIRFGSMDSGLAAKG

SEQ ID NO: 5402 - protein, 533 aa, unidentified
  source 1..533: note = Related to JACHLK010000020.1; note = Acidovorax soli
MKTPVRSRVLAKAIAMAVLADAQTPGHRTPQALVARVQACLGLEATAGPTLPACVLEQLRRLSAMPSLEWSRWEPEDVATWLCWGHWWRSAGLRQGGLPWAAGHGDAPTWEGDGDDFAEPEGEGDGGGTLPGLPPTDWTAPRLAQAFRIWAATARTAVPRRWLLRPAEAGPPPAWMERSTAPPLLATAADVAQMLAVSLDDLSWLASQGAFWRERHATGHALPPSHYRYRLLPKPSGGLRLLESPRPRLMHAQRRILDTLLAAIPLHEAAHGFVRGRSVGSHAQVHTGQAVVIRFDLADFFTQIHATRVRALWRALGHGRAAAELLTRLSTTPTPAGVRERLLECMPEVPAFVAQRRAMAQRLARPHLPQGAPTSPALANLCAFGLDVRLQALAQRFGANYTRYADDLVFSGPETLRRQFIALRAWVAAIAQDEGFALRADKTRVMPAHQRQTVTGLVVNQRANYSRTQFDTLKARLHRLAQQAWVEAGDRAQLEGEIRWASQWLAPARAARLQRLFDAIRFAPVDGEAAAKD

SEQ ID NO: 5403 - protein, 524 aa, unidentified
  source 1..524: note = Related to JAFKGX010000054.1; note = Comamonadaceae bacterium
MHVHVHARVLAKAIALAVLADAQAPQRRTVEALRARVQACLGHAPGEEQRPLPAPLQEQLRRLATLPTREWARLGAEDIGTWLREGFWRRMAGVRTGAPSARGARVPDDSFDEEDNDTDDDGMPAAPPSQWTARALAEAFRQWASHVTPKRWLLRSATTGPLPAWRDSDGARAGPLLATAADLAGALAVSLEDLLWLAPEHVHWRERQPDGGHAMAPSHYRYRLLPKPSGGLRLLEAPRPRLAQAQRRILDLLLAPIPVHEAAHGFVRGCGVGSHAQVHAGQAVVIRFDLADFFTHIHATRVRALWQALGHGHAASDLLTRLTTARTPAAVRERLRDACTPLGHPSSEHWHATGRHLASAHLPQGAPTSPALANLCAFGLDLRLEALARRFGARYTRYADDLVFSGPQTLLHAFVRLRAWVSAIAQDEGFALRASKTRVMPAHQRQYVTGLVVNHRVNWSRAQFDTLKARLHRLARQACVDPGERARLAGEIQWARQWLAPTRSAKLQRLFEAIRFADSGSRDG

SEQ ID NO: 5404 - protein, 527 aa, unidentified
  source 1..527: note = Related to JAGOEM010000124.1; note = Ottowia sp.
MATPSRILSKAVAMALLADAQTGAAARRPSALAARASHCLASNAGAPSGAQPLPATFLEQLRRLSQLPAREWQRLEVEDLATWLRHGRWWRQAGLVASSGPGEELDEPVGDFADEDLFFDDDDESIPDPPAPALQSNAQLAQAFRVWAAQPSVQVRRWLLRPAQPGPQPPWLDERTHGSRAAPRWATATGLAQALNLELDELLWLAPAHAHWRERAGLAMPPSHYRHRLLPKRSGGLRLLEAPLPRLAQVQRSLLDQALNPIPTHEAAHGFVRGRGVASHVAMHAGQAVVARFDLRDFFTQVHTTRVRALWRALGHSRAMAELLTGLTTTRTPSAVRERLLDAVPTVPSAAVAGALAQRRARAQALARGHLPQGAPTSPAIANLCAFGLDVRLAALAQRFGARYSRYADDLVISGNEDLRRQWPNLRAWVSAIVRDEGFALNADKTRLMTASQRQHVTGLVLNTRPNLPRAQFDVLKAQLHRLAKQAGVPLQERPRLLGQLQWARQWLVPTRAAKLQALFDAIRFAD

SEQ ID NO: 5405 - protein, 510 aa, unidentified
  source 1..510: note = Related to NZ_JADKYZ010000005.1; note = Diaphorobacter sp.
MKAANHVRHAALAVAHAWLADSDAEGGRLGHALMARAQSSLGLAPQDQPDWLRAWSLRLQNLPDPMWARLDVWRLASTLCGETSLGAACYPERRMAGLTDENATLPDPAASWNWGEEGEEDVVDWLDDEHPARAETDFEIWVERSHRRVRRWLLRPARMQVATMALHDLELPTWPDSALLAEALAISVDDLAWLARPAWQLAPRDQPHKALSASHYRHRLIPKARGGLRLLEVPKQRLAAAQQQIRVQLLERIPVHEAAHGFARGRSVLTHAATHAGQPFVCAFDLQDFFHSITAAQIRALWRTLGYPAGIATELTALTTTVTPAPVRERLLEDASVTRTQARRLALPHLAQGASSSPALANLCAFQLDLRLSALAERFGARYSRYADDLVFSGPASLQRHFAALHGWVRGIAEDEGFALHPEKTRRMPRHARQRITGVVVNDQPNLARHDYDLLRAELHQLSLQKEAVSDEVLASLRGRVAWACQLVTPARQEKLKALLIRCSAGSQTP

SEQ ID NO: 5406 - protein, 511 aa, unidentified
  source 1..511: note = Related to NZ_CP060783.1; note = Diaphorobacter aerolatus
MALAVAHAWLADSDADGGRHQRSLIARAQNCLGLASSDQPDWLVTWSLRLHHMPDPMWARLDVQRLASALVEQQSLGAACYPQWRVITQAAAEKGIPDDEEPDPHGLGIGWAEGYGEEDDDTESTNAAPNFSQWVQQERPAVRRWLLRPARMQIAAMALHDLGLPNWADSQQLAQALGIGVSDLDWLARPAWQFAPRDQHGKSLAASHYRHRLTPKARGGLRLLEVPKQQLAAVQKKIHVQLLSRIPVHEAAHGFVTGRSVLTHAALHAGQPVVCTFDLRDFFHSITAAQIRALWRSLGYPAGIAAQLTALTTTVTPAGVRERLLEDASATRSQIKRLATPHLTQGAASSPALANLCAFHLDMRLSALAERFDARYSRYADDLVFSGPDSLRRHFASLRGWVRGIAQDEGFALHPDKTRRMPDHTRQRITGVVVNEKPNLSRADYDLLRAQLYRLAAQQDPASDELLATLRGRVAWACQLVSPSRQEKLKTLLSRIPRDDAPHKMVKPIFQ

SEQ ID NO: 5407 - protein, 443 aa, unidentified
  source 1..443: note = Related to RDZW01000120.1; note = Burkholderiales bacterium
MNDRHWIARGIARALLARFRENGDFSAEGLLAQASMALNGNPPWLKRLIRPLAKLSLPTWQNFTVDTLSERLMKDARFDEAFRQVESPRIRQLFMHRATMGLRPFALQDCELPAITDDVMLAEFLKVSTEQLHWLAPELPLERLPGAGHYRYRLIPKASGGLRLLEMPKARMKAAQRQLLDKLLNRIPLHEAAHGFCAGRSVISHALMHSGQDVVIRFDLKDFFTSITAARVHAIFRTLGYPEGVSKALTTICTNRTSRMIVERLLDERGVHAGAAQRLRIPHLAQGAPSSPTLANLAAFSLDLRLSGLADKFGARYSRYADDLVFSGEKHLRADFRVFAVWVKAIIESEGFILHPDKTRCMPAHQQQRITGVVVNTKTNLSREEFDHLKARLHQCVVNGVASQNSMGHPDFKAYLQGRIAWARQLNASKAQRLQRLFDQITW

SEQ ID NO: 5408 - protein, 470 aa, unidentified
  source 1..470: note = Related to NZ_BCWR01000006.1; note = Hydrogenophaga taeniospiralis
MPPAHHRRWLATGLAHAFLADHEQPGARTPEALLARAKVCLGCEGAAPGWLASLAQAVAIRWARQGLIDTVDSLAQMLLQRPEWALDKQAFDEGDEEPSDDSANRPEPVPVGQWAVRHWLLRPARMAAPPWGLQHIDTPDLPTAADWVQWLGIEPDRLLWLTHPSQHWREGSERPHATVAHHYHHRLLPKRSGGLRLIEAPKSELKQVQRLLLDRLLAQLPTHEAAHGFVRGRGVHTHAQVHAAQPCVISFDLRDFFPSIGAARIRAFWRSWGYPEAAARMLTQLCTTRTPVAVRERLREAQALDFNAAKRLATPHLPQGAPTSPALANLCAFGLDLRLEGLAHRFGARYSRYADDLVFSGPAPLAQRFRQLHAWVGAIAADEGFALHPGKLRRALSHQQQRITGLVVNAQPNIARADYDLLRAELHHAVRSASVDAQQRAHLQGRVAWACQALAPSRVAKLQALLARIA

SEQ ID NO: 5409 - protein, 470 aa, unidentified
  source 1..470: note = Related to PHCR01000005.1; note = Betaproteobacteria bacterium HGW-Betaproteobacteria-15
MTTTQHRRWLATGLAHAFLADHEQPGARTPDALLARARACLGCEGAAPEWLVSMAQAVATRWARQGLIDTVDSLAQTLVQRPEWSAGENALDDDDETVDDTATHPEPVSVGEWTVRHWLLRPARMAALPWGLQHIDRPDLPTTEDWAQWLGITTDRLLWLTHPSQHWREGNERPHATVAHHYHHRLLPKRSGGLRLLEAPKTELKQVQRLLLHRVLAHQPAHEAAHGFVRGRSVHTHAQVHAAQPCVISFDLRDFFPSIGAARIRAFWRSCGYPEGVSQMLTQLCTTRTPAAVRERLREAKALDFQAAKRLASPHLPQGAPTSPALANLCAFGLDLRLEGLAHRFGARYSRYADDLVFSGPASLASRFRQLHAWVDAIAADEGFVLHPGKLSRRLSHQQQRITGLVVNAQPNIARQDYDQLRAELHCAARMGPVGAQQKAYLQGRVAWASQALAPARVTKLRSLLAQVQS

SEQ ID NO: 5410 - protein, 472 aa, unidentified
  source 1..472: note = Related to NZ_CP063400.1; note = Hydrogenophaga sp.
MTTSHRHGLAIGLAHALLADHERPGGLTASALLGRASACLGCEGAAPSWLRRLTQSIATRWQRHGAIDTLDTLAQALLDLPDWGALFHDDDDAEGDDTPAVNPDEDKLPLSAWRVRRWLLRPARTVPPVWGLPAIDRPDWPSASDWADGLSLTPERLAWLTHPSLHWRESSERPHQRVASHYRHALLPKRSGGLRLLEAPKPELKQAQRRLLDTCLTQLPCHEAAHGFVRGRDVHSHAAVHAGQPCVIAFDLRDFFPSIGAARIRALWRSLGYPEPTADLLTRLCTTRTPAAVRERLREDGGLHFLAAKRLARPHLPQGAPTSPSLANLCAFGLDLRLDGLAHRFGARYSRYADDLVFSGPVSLQQQFRSLQAWVKAIAADEGFVLHPGKQRQMRAHQQQRITGLVVNQHANLPREDYDRLRAELHQAARSGPVDASKQARLQGRVAWASQHLAPTRITKLKALLARVEARA

SEQ ID NO: 5411 - protein, 511 aa, unidentified
  source 1..511: note = Related to NZ_BCTF01000032.1; note = Hydrogenophaga flava
MATSDGWHTRRAIRAAPLAQDRSHPTGWLAHQVHYPHHTPRMTALHRRLGLSIGLAHAMLADHRRPGGSAAPALLARACVCLGCEDAPPPWLASLAQAVALRWQRHGPIDTLDSLAQFLAGQLECDDTEPDEDDDLAAPAINDLWSDRPPSTWRVRHWLLRPAQTAQPAAGLPAVERPDLPTEDAWAAWLGLDPQRLRWLSHPSVDWREDHHRPHRRIAAHYRHVLLPKRSGGLRLLEVPRPDLRQAQRRLLDGWLSLVPAHEAAHGFVRGRNVHSFAQVHAGQACVIRFDLQDFFPSLGAARIQAFWSAWGYPEPVARMLTRLCTTTTPAMVRERLQEAPSMDAMSLKRLARPHLPQGAPTSPALANLCAFGLDLRLDGLARRFGAVYARYADDLVFSGPQSLYREARALQAWVQAIAEDEGFALNAAKQRQMRAHQQQRVTGLVINERPNLPREDYDRLRATLHRAALSGPADPAARARLQGQVAWACQSLAPSRVAKLQALLARIAPT

SEQ ID NO: 5412 - protein, 453 aa, unidentified
  source 1..453: note = Related to NZ_CP071796.1; note = Ottowia testudinis
MAADRTPRSNAIALAHALLADAEVPGARSLTALHDRVAACLGLTAPLPPGLFQICTELAAWPEPMWRQHGLDSLADVLLQRPEWPAPPHAWQARHWLLRPARMQLAPMALAGVALPELPTHAALAAWLGTTPDDLQWLAHPSQRWRESQPTDRPHRSVAPHYRYQLLTKPGGGLRLLEMPLPRLKTLQRRLLHGLLARVPVHEAARGFVAGRGVRGHANLHAGQPCVLCFDLRDFFGSVGGGRIHALWRSLGYPEGVARTLIQLCTTRTPPAVRERMADAGSLDRPAARRLASAHLPQGAPTSPALANLSAFGLDLRLDGLAWRFGARYSRYADDLVFSGPAALRRDFRVLHAWVEAIALDEGFALNPAKTRCLPAHRQQRVTGVVVNERPNLPRADYDRLRAELHALGHQTRVPAALKPRLQGRIAWARQWLAPERAAKLQRLLERIAFDGA

SEQ ID NO: 5413 - protein, 463 aa, unidentified
  source 1..463: note = Related to NZ_CP011514.1; note = Mitsuaria sp.
MTVAAPLTYPRWIALALARALQADDESPRAREADALQARAEQCLGVESRPWLKPLCVALARWTTPVWRAHSIRSFADALLEMDAFHEGFDLERFSRPTVRRLLLRPSRMRPLPFALEHLVLPDLATEADLAAWLGLTLDELDHFAGPARRYREAVATPERPHVAPTPHYRCLLVPKRRGGLRLVEAPLPRLKAVQRRLLDGLLNTLPCHEAAHGFVPGRNVATNAAVHTGQDFVIRFDLRDFFPSIGRARIAATFRTLGFSDAVVERLTTLCTARTPAPVRERLREDGSIDFDGAKRLASPHLPQGAPTSPALANLCAFPLDMRLDGLAHRFGARYTRYADDLVFSGPATLRRDQREFRAWVQAIVEDEGFRLRRDKTRAMPAGGRQQVTGVVVNEKPNLAREDFDRLKAELHRLVGSTDVDPAQRSVLLGRLAWARQFLAPMRVEKLQRMFDAIAFGAAKNL

SEQ ID NO: 5414 - protein, 463 aa, unidentified
  source 1..463: note = Related to FOZE01000001.1; note = Mitsuaria sp.
MSLAAPLTYPRWIALALARALQTDDDAPRGREAHALQARAEQCLGAEARPWLTPLCAELARWARPVWLAHSMASLADALQALEAFHAGFDPERPRPTVRRLLLRPSRLRPPPLALASLVLPDWSTEADLAAWLGLTLDELDHFAGPARQYRERTATPRRPHAHPTPHYRGLLVPKRRGGLRLIEAPMPRLKAVQRRLLDDFLQPLPCHEAAHGFVRGRNVATHAAGHAGQDFVIRFDLRDFFPSIGRARVSATLRTLGLPDAVVERLVLLCLTRTPAPLRERLREDGSIDADGARRLASFHLPQGAPTSPALANLCAFPMDLRLDGLAQRFGARYTRYADDLVFSGPASLRRDQRALRAWVTAIVEDEGFRLRRDKTRAMPAGGRQSVTGVVVNTRPNLARERYDGLKAELHQLGLRSRSAPVDPALRGPLLGRLAWARQFLAPSRVEKLTRMLAAIQFNADR

SEQ ID NO: 5415 - protein, 460 aa, unidentified
  source 1..460: note = Related to NZ_BCYP01000018.1; note = Mitsuaria chitosanitabida
MSHATPLTYTRWIALALARALQTDDETPGGRGARALQARAEQCLGVEARLWLRPLCVVLARWPDPVWRAHSVRSLADELQDTSAFLDGFDAALHPRPRVHRVLLRPSRRRPLPFALEHLSLPDWQTEAELAAWLGLSGEELDHFAGPSQRYRETVATPRRPHIAATRHYRCLLIPKRRGGLRLIEAPMPRLRALQRRLLDGLLHALPCHEAAHGFVPGRDVASHTACHAGQDFVIRFDLQDFFASVGRARVAAIFRTLGYSDGVVERLATLCTTRTPAMVRERLREDGALDLDGARRLAAPHLSQGAPTSPELANLSLFGLDLRLAGLAERFGASYSRYADDLVISGPATLRRDQGRLRAWVRAVIEDEGFRLRPDKTRAMPAGGRQQVTGVVVNQRPNLAREDYDRLRAELHRLAGMPRVDAALRDPLRGRLAWARQFLAATRVAKLDRMFDAIVFGEA

SEQ ID NO: 5416 - protein, 458 aa, unidentified
  source 1..458: note = Related to CP013729.1; note = Roseateles depolymerans
MTSSASLTYPRWIALALARAFQTDDDAPGGRSPQALLGRGMACVGEEHRRWLLPLCQHLASLSAPVWLGMTPRTLAEHLDQRPEFFDAWDPAGPRLQVRRLLLRPARMTPPPFALEDLPLPAWHTVADLAAGLGIDLSMLDVLAGPAQRYREAEARPHRPHVQAIRHYRAVLVPKRRGGLRLIEAPMPALKAVQRRLLRSLLDLVPVHEAAHGFVAGRNVASHAGLHAGQDWVFRFDLQDFFPGIGAARIRALFRTLGMEEAVAEYLTTLCTVRTPRAVRERLQDDGGLTWIDTRRLAAPHLPQGAPTSPQLANLCAFRLDLRLDGLAARFGAQYSRYADDLVFSGAGTPALDAVTLHAWVKAIVEEEGFRLRPDKTRLMRAGGRQTVTGLVVNETPHIARADYDRLRAEMHRLGREPAVDLSLRAPLLGRLAWARQFVAPTRAAKLQRLFDAISFVQ

SEQ ID NO: 5417 - protein, 458 aa, unidentified
  source 1..458: note = Related to JACHXO010000004.1; note = Roseateles terrae
MTPPAPLTYSRWIALSLARACQTDDDAPGGRTASALLGRATACLGAEHRAWLLPLCEQLARLSLPVWQQMTPRLLADHLELMPAFVAGFDPERPPVHVRRLLLRPSRMRPPPFALEHLPLPPWHTLADLAAGLGLELSMLEVLAGPAQRFREADPTPHRPRVQATAHYRSLLVDKRSGGLRLIEAPLPALKAVQRRLLRTLLDRVPVHEAAQGFVAGRNVAGHARMHAGQAWVFRFDLKDFFPSIGAARIRALFRTLGFTEAVADTLTTLCTVRTPRAVRERLRDEGGLSWLEARRLASAHLPQGAPTSPVLANLCAFALDLRLDGLAVRFNAQYSRYADDLVFSGPTTEGLDAVSLHAWVRAIVEDEGFVLRADKTRLMRAGGRQTVTGLVVNETPHLSRPDYDRLRAQLHRLGHEAQVPMSLRAPLLGRLAWARQFVAPSRAEKLQRLFNAIAFVQ

SEQ ID NO: 5418 - protein, 475 aa, unidentified
  source 1..475: note = Related to FOAV01000002.1; note = Roseateles sp.
MTLAAPLTYHRWIALALARAIQADDDQPQGREAHALLGRTSECLGKEHVPWLRALCQALARMTKPQWDRFTTHTLADHLESMHEFFGWAHVRGDGDPDDESEEDPDGEPFPTPRVRRLLLRPARMTARPYALEALELPVWHTLPDLANGLGIDLDMLEVLAGRAHHYRDAVATPLRPHVRATHHYRSLLVPKRREGMRLIEAPMPALKAVQRRLLDVLLARVPVHEAAHGFVTGRNVASHAAAHTGQHWVLRLDLQDFFPSIGRARIAALFRTLGYAEGVADRLTTLCTVRTPVNVRERLRDAGAIDFHGAKRLASPHLPQGAPTSPHLANLCTFSLDLRLEGLAYRFGAHYSRYADDLVFSGSRDTRLAPTALHAWVRTIVEEEGFRLRRDKTRLMRAGGRQTVTGVVVNLKPNLSRPDYDRLRAELHRLSHQAAVDGALRSPLLGRLAWAQQFVAASRAAKLRRLFGAIRFVP

SEQ ID NO: 5419 - protein, 449 aa, unidentified
  source 1..449: note = Related to JACORT010000001.1; note = Ramlibacter sp.
MTRSSSYRNWIATALAHAFLADAAQAGGRSAEALHARAVQCMGEDAPWLRALAASIATEFSRRRDAHTVPTLSAWLCELPQLDDAFDPEREHPRVRRLLLRPARMVRAPCALEGLRLPRWDTPADLAAWLGVPLERLEWLVGRAQDFRETQAGRTRSAHYHPLLKAKRSGGLRLIEIPKPALKQVQQKLLSGLLDAIPTHESVHGFVRGRSAISHAREHAGRAVVIAFDLRDFFNSIGVARVRALWRTLGYAEGVAEALARLTTTRTPLAVRERLVEAGGIDFMAAKRLASRHLPQGAPTSPALANLCAFGLDLRLDGLAWRFGAHYSRYADDIVFSGPRELAARSRNLQAWVEAIVRAEGFTLHPGKTRRMRAHHRQQVTGVVVNERPNVARDAYDRLRARLHSCAASGCDAETWMQLQGQVGWACQLVAASRAEKLQRMLAAVPVRR

SEQ ID NO: 5420 - protein, 450 aa, unidentified
  source 1..450: note = Related to RKMB01000020.1; note = Ramlibacter sp.
MTHSYRHWIATGLAHALMADADQPGGQSAQALQARAQQCMGTRGTWLKPLAEAVAREFARNPRHHTVATLADHIFELPQFDAAFAPGQPRPRVRRLLLRTARMAAPPFELAGLELPSLPTLTDLAAWLDVSLERLQWLIAPSQNFRETEPAPGRANVPPGLHYHALLKPKRSDGLRLIEIPKPDLKRVQRRLLSGLLDRIPVHECVHGFSKGRSVLTHAAEHTGQAVVICHDLRDFFNSIGIARIRALWRTLGYPEGVSAALAALCTARTPRAVRERLLECGSIDRRGAARLASPHLPQGAPTSPALANLCGFALDLRLDGLAWRFGARYSRYADDLAFSGPADLMPRRRNLQAWVQAIAHAEGFALHPDKTRAMPSHRRQRLTGVVVNERPNLERCAYDRLRAQLHALAALGCDEATRMRLQGQVSWASQLVCGSRARKLDRLLAAISS

SEQ ID NO: 5421 - protein, 466 aa, unidentified
  source 1..466: note = Related to JAHBZO010000019.1; note = Ramlibacter sp.
MPKPNHSYRRWVATGLAHALLADAHKPGGATSQALHARAIQCLGADHPWLLPLIAAMGPHSVGQWRRHSVASLAEYIDQLPAFDAAFLGQDSHPHIRRLLLRPDRMLAPPFELAQLGLPRLASHADLAQWLGISPERLQWLIEPAQNFRESEAAPGQPHCHPGRHYRQLLKQKNSGGLRLVEAPKSELKRVQKRLLSGLLNKIPVHEKVHGFVRGRGVLTHASEHAGRHTVLAFDLSDFFSSIGVARIKALWQTLGYPEAVARALAALCTTRTPLAVRQRLMDAGGINFFQQRRLASAHLPQGAPTSPALANLCAFMLDLRLDGLAWRFGANYSRYADDLVFSGSELLARDQRKLTGWVAAIVEAEGFRVHPRKTRVLLKYGRQRVTGVVVNTRPNLGRDDYDRLRAELHRLAGADRLDKGVKQRMWGRISWACQTVCASRAAKLYRLFEALPNDHQGAGYDASTS

SEQ ID NO: 5422 - protein, 455 aa, unidentified
  source 1..455: note = Related to NZ_JABRWJ010000001.1; note = Aquabacterium terrae
MPASSTYRQWLARALAHALLADALLPGGCLRDALLARAASTLGKRPAWLAGLVDALLPFDPLREDVQALGRRIAVLPAFDPAFDAEHPPRIRHLILRPATMLRRPLGLHELELPALATHADLASWLGLDSEQLAWLAAPARAWRPPGAGGRAAATHYRCLLMPKRSGGLRLIEAPMATLKAVQRHLLDGLLDHVPAHEAAMGYVSGRSVIDHAAAHAGRAVVLRFDLRDFFNSIPASRVHALWHTLGYPDGAARTLTALTTARTPVALRERLQDDGGLDVLGAKRLASAHLPQGAPTSPALANLCCFRLDLRLNGLAKRFDASYTRYADDLVISGPAACAKRRRELQAWVEAIVRDEGFALQPRKTLTMPAHQRQQVAGIVVNAHPNLDRASFDRLKARLHRCTRDGPSPADDPQQLRGQLAWVTQLNPARGAKLQKLFEGIRWLNVAPSSTPVR

SEQ ID NO: 5423 - protein, 474 aa, unidentified
  source 1..474: note = Related to NZ_CP045644.1; note = Variovorax paradoxus
MPPPPSSIGLITFMTRELSYREWLSRSLARALLADARQPGGTAPDALHARAAATLGTDAAWLKPLAEVLGKRSQATWQRTDLPALAKAIHDMPELDLAFAQDELPHVRRIILRPAQMLPRPLGLDHFALPEVPTLADLARWLELEPDRLAWLTSATQVFREPDASSPCPASHYRYQLQPKRLGGLRLLEIPKADLKRAQRRILDDLLQHVPVHEAAHGFVQGRSVASHAAAHAGKDVVIGFDLRDFFPSVRASRVHAMWRTLGYPEGVARALTALCTHRTDSAVIERLRDDGGLDWLGAKRLAAPHLPQGSPCSPALANLCAFRLDLRLEGLAWVFGATYTRYADDLVFSGPATLRAQFTALRAWVSGIAADEGFALHPRKVRCMPQHRQQRVTGVVVNDKANAPREDFDRLKAVLHRCVMHGPAAQNHAKLDDFRGHLLGHIAWIGQFSPTRKVRLMRLFDRIDWPDAAQPPS

SEQ ID NO: 5424 - protein, 462 aa, unidentified
  source 1..462: note = Related to NZ_CP046508.1; note = Variovorax sp.
MTTREPSYREWIARGLAHALLADARQPGGTTPDALRARAEAALGANPPWLTLLAEDLGKRSLATWERTDLPGLTQAILETPALELAFEQDEPPRIRRLILRPADMFPRPMGLDHFALPRLPTFANLAQWLEIEPDRLAWLTAASQAFRAPDASSPRPASHYRYQLQPKRLGGLRLLEIPKADLKRLQRRILDDLLQRVPAHEAAHGFVQERSVASHAAAHVGQEVVIGFDLRDFFPSVRASRVHALWRTLGYPDGVARALTALCTHRTSAAVIERLRDDGGLDWMGAKRLAEPHLPQGSPCSPALANLCAFRLDLRLEGLAWAFGATYTRYADDLVFSGPATLREQFNALRAWVDGIAADEGFALHPRKVRCMPRHHQQRVTGVIVNEKANTPRVDFDRLKAVLHQCVLHGPASQNRAKVTDFRGHLLGHIAWIGQFNPARKARLMRLFERIEWPAVSQPPG

SEQ ID NO: 5425 - protein, 502 aa, unidentified
  source 1..502: note = Related to NZ_RXFT01000006.1; note = Variovorax guangxiensis
MASHSGAQAALRIRADQLAHHRLVEGPGATTFIGFAASGFMTRELSYREWIARSLARALLADAKQPGGTDPGALRARAAATLGADAPWLKPLAQALGNRSQATWRRTDLPALARAIHDMPEFDAAFEQNEPPRVRRIILRPAQMLPRPMGLDHFALPHIPTLAELAQWLELDADRLAWLTSAAQAFRAPTDPDTRQPASHYRYQLQPKRLGGMRLLEIPKADLKRAQRRILDDLLRHVPAHEAVHGFVLGRSVASHAAAHAGKEVVIGFDLRDFFPGIRASRVHATWRTLGYPEGVARALTALCTHRTDDAVIERLRDDGGLDWIGARRLAAPHLPQGSPCSPALANLCAFRLDLRLEGLAWVFGASYTRYADDLVFSGPASLRAQFNALRAWVSGIAADEGFELHPRKIRCMPRHRQQRVTGVVVNDKANTPREDFDRLKAVLHRCATQGPASQNRAKVDDFRGHLLGSIAWIGQFSATRKTRLMRLFDRIDWTDATQTPS

SEQ ID NO: 5426 - protein, 454 aa, unidentified
  source 1..454: note = Related to FOLP01000001.1; note = Variovorax sp.
MSRSLARALLADARQPGGTAPGALRARAAATLGADAPWLKAFAEALGQRSQATWQRTDLPALARAIDDMPAFDAAFAQDEAPRVRRIILRSAEMFPRPLGLDHFALPRIPTLAELAQWLELDAERLAWLTSPAQALRTSHEHDAPGTAPASHYRYQLQPKRLGGLRLLEIPKADLKRARRRILDDLLQHVPVHEAAHGFVQGRSVASHAAAHAAKEVVIGFDLRDFFPAVRASRVHATWRTLGYPDGVARALTALCTHRTGAAVIERLRDDGGLDWMGAKRLAAPHLPQGSPCSPALANLCAFRLDLRLEGLAWVFGATYTRYADDLVFSGPASLRARFTALRTWVGGIAADEGFELHPRKVRCMPQHRQQRVTGVVVNDKANAPREEFDRLKATLHRCALHGPAGQNRAQVPDFRAHLLGRMAWVGQFNPARHARLLRIFERIAWPSASPTPS

SEQ ID NO: 5427 - protein, 460 aa, unidentified
  source 1..460: note = Related to FOWG01000009.1; note = Variovorax sp.
MTREPNYREWIARSLARALLADARQPGGTAPGALRARAAATLGSDAPWLAPLIEALARRSPATWRRTDLPALAQAIHDLPEFDAAFEQDEPPRVRRIILRPAQMFPRPLGLDHLALPALPTQAELARWLDLDPQRLEWLASPAQAFRTPQGTSPAPARHYRYQLQPKRLGGLRLLEIPRPELKRAQRGILDALLARVPVHEAAHGFVPGRSVASHAAAHAGKAVVIGFDLRDFFAGVRASRVHATWRTLGYPDGVARTLTALCTHRTDAAVIERLRDDGGLDLMGGKRLAEAHLPQGSPCSPALANLCAFRLDLRLEGLAWVFGATYTRYADDLVFSGDESLRLRFDALRAWVGGIAADEGFELHPRKLRCMPRHRQQRVTGVVVNDRPNAPRADFDRLRALLHQCTLHGPASQNAAGLADFRGHLLGRIAWFGQFSPTRQARLRRLFDRIEWPAGAAPA

SEQ ID NO: 5428 - protein, 474 aa, unidentified
  source 1..474: note = Related to FPBM01000001.1; note = Polaromonas sp.
MRETRFRHLIARGLARALLADAGKPGGTALPALQARAAAALGQRPAWLRELLQPLTLLSPITWQKFDITSLARRLEDSPAFGLAFGDEDDDEDEDGEADSSEPQASQAIDDRDDPEPERPPRIRRLILRPPAMRPRPLGLQACTLPDITTDADLARWLQLSREQLRWLAPATRPVVEHYRYSLQAKQAGGLRLLETPKVELKRVQRHILHALLSEVPVHEAAHGFTAGRSVKTHAAAHVGQAVVIRFDLRDFFGSIGAAQVNAVWRTLGYPEGVARSLTALCTHHTAGMVIERLRDDGGLDWMGAKRLASAHLPQGAPTSPALANLCAFNLDLRLEGLAWVFGASYTRYADDLVFSGPASLRLQFRALHAWVAEIVRDEGFALHPDKTRCLPRHQRQRVTGVVVNVRPNVPRDDFDRLKACLHQSALHGQASQNKERLADFRSHLLGRIGWVGQFSMTRQARLMRLFDKIDWAN

SEQ ID NO: 5429 - protein, 462 aa, unidentified
  source 1..462: note = Related to FNJA01000002.1; note = Rhodoferax sp.
MRDISYRTWIARSLARAMLADSDQPGGTSAAALQARAAATLGDNPAWLHTVVAPLAQLPAVSWQKMDLDSLTQRILAPAPRQPTVVDDENDDEEIQAESPFDAAFANGARPHIRRLILRPASMQPRPLGLEGCELPDLPTVHDLAEWLKMPLDRLAWLGPETPLGAEHYRYKLLPKRTGGLRLLEIPKVDLKQVQRAVYSGLLQHVPVHEAAHGFVPGRSVATHAAMHAGQAVVIRFDLRDFFGGIGAARVMALWRTLGYPIGVARCLTALCTHRTARMVVDRLRDDGGLDWLGAKRLRSAHLPQGAPTSPTLANLCAFGLDLRLDGLAWAFGARYTRYADDLVFSGPAALRPQFRALQAWVAAIAEDEGFALHPAKNRCLPQHRQQRITGVVVNAQPNTPRQDFDRLKACLHQCVHQGPASQNHANLVDFRGHLQGRIGWVGQFNAARAAKLMGLFEQIRW

SEQ ID NO: 5430 - protein, 452 aa, unidentified
  source 1..452: note = Related to JACRAZ010000105.1; note = Burkholderiales bacterium
MPPSTHRLWIARGLAHALQADCQQPGGTEAHALLARATRALGHRPPWLPPVIEALGAAAVRRLDLQGLSERIAGLPAFDAAFAPGQPAPRIRRLMLRPPHMAGAPLGLHEAPLPALTTHEALGDWLGLAPERLAWLVSEAQHYREPPGGRPGAARHYHALLRPKRLGGLRLIEAPKAELKLAQRRLLDGLLNAVPVHEAAQGFVPGRSVRAHAQAHAGAPVVLRFDLQDFFPSVPASRVHAIWRTLGYPAGVARALTALCTTRTPAAVRARLREAGAIDGGGAQRLAAAHLPQGAPTSPALANLCCFRLDLRLAGLAAHWGARYTRYADDLVFSGPAVLRERRLALTSWVGGICADEGFTLHARKTRCMPQHRQQCITGVVVNQHPNLPRDEFDRLKACLHRRLLHGATDAAEREALRGRIAWAAQLNPARGEKLLALFAQIRWPQPGSVPG

SEQ ID NO: 5431 - protein, 446 aa, unidentified
  source 1..446: note = Related to SCTQ01000267.1; note = Aquabacterium sp.
MRSWTYREWIARGIARALLAGDDRSMPALRSRAAQALGGSPPWLGHFLGRLKSMDAGIWARTDLDALTWRLLRGETLSRAVGAEDRPRIRRLMLASPVMLPPPMGLDVLGLPALPTTGDLADWLGLTVDRLDWLAGEQLDWREDARRARHYVLHASPKSAGGLRLIESPKPELKRAQRRLLAGLLDRVPVHEGCHGFVRGRGVRSHAQVHAGQALVLRLDLQDFFPCVRAAQVRAVWRTLGYPREVAEVLTRLCTTRACAADLRPLRAAGRLEWTAAKRYAARHLPQGAPTSPMLANLCAFDLDLRLDGLAQAFGGEYSRYADDLAFSFAQPLGGRQAAFHAWVAAIAKDEGWSLHPQKSRAMPAGAQQRVTGLVVNEKPRPARVDYDRLKAVLHQCTLHGPASQNHAQVEDFRAHLLGRIAWIAQGSEARARKLQALFERIAWTG

SEQ ID NO: 5432 - protein, 401 aa, unidentified
  source 1..401: note = Related to NZ_LMDI01000005.1; note = Rhizobacter sp.
MAQRCADMPGERWRRLTVRSLATWIEQDGHYDDGWRAHEKPHARRYILREAAVMQPLPVGLEQCQVPYWPHVGALADWLGVPAAGLWRLTRAPQWQRQAPLGEQHYHAQLLAKRTGGWRLLEVPAPHLMPLQRRVLDDLLDRIPPHEAAHGYTRERSARSHAAAHTGQAVVLKFDLQDFFTTVRPSRVSALFAKLGYSEEVARALTALCTTATPEPVLRRMHEAGQLTWEQLQRLRESHLPQGAPTSPALANLCAFRLDLRLDGLAFALGARYTRYADDLVFSGPTHLATARERITARITRIVVEEGFSLNTRKTRCQKAGGRQSVCHIVVNERPNLPRDEFDRLKAILHLCVRDGASRQNRDAHPDWQAHLRGRVAWATQLNPAKGLRLKRVFDRIDWGV

SEQ ID NO: 5433 - protein, 444 aa, unidentified
  source 1..444: note = Related to CP015118.1; note = Rhizobacter gummiphilus
MASLVRLTALALARALQVGQRTPDGMAARIRACLGAEASWCGPLVERCAAMAGERWRRLSVRSLADLIERDQGFHFAWIAHEPPCVRRYLLREADRMNPLPLGLDRCQVPFWPHAGALAAWLGIGTGGLWRLTRPSDWQRRTPMVEQHYRSHLRPKRTGGWRLLEVPEPYLMPLQRRVLDDLLDRIPPHEAAHGYTRERSVIDHARRHCGQAVVLRFDLKDFFTAVKASRVHALFTTLGYPEEVARALTALCTVATPEPALRRLRAEGGMDWEQVQRLRDPHLPQGAPTSPALANLCAFGLDVRLAHLATSLGARYSRYADDLVLSGPARLRTAFARIERHVSRIVIEEGFALNPRKTRCTGAGRRQTVCHVVVNDRPNLPRDEFDRLKAILHQCVRDGPATQNRENRPDWRAHLRGRVAWATQLNAAKGARLARLFERIDWAA

SEQ ID NO: 5434 - protein, 434 aa, unidentified
  source 1..434: note = Related to PTEU01000001.1; note = Ideonella sp.
MARAMQAGPRTPQGLAARMRACLGCAEHPWITALSARCARMAAERWQRLSARALAGLIERDAGFEHAWQQDPRPFVRRYILRPGGHLRTAPLGLDTVERPAWTDEAALAQGLGLSDAALWRLTLPTPWQRAAPLSQQHYAWRWQLKRHGGWRPLEVPAAYLRAAQRKLLKHLLDGIPPHEKVYGFVRGRSVIDHAQVHTGQPVVIKFDLQDFFTSIKASRVHALWTTLGYPETVATLLTRLCTVATPEPVLQRWRQEGGATWHQVLRAREPHLPQGAPTSPALANLSAFRLDLRLDGLAQAYGARYSRYADDVVISGPRALLAARGRLEAAVQGIVEAEGFALNQRKTRCETQASRQTVCHIVVNQRPNVARSEFDRLKAILHGCLREGPSAHNRAGLADWRAHLHGRVAWVAQLNPAKAKRLQAMLQHIDWAL

SEQ ID NO: 5435 - protein, 416 aa, unidentified
  source 1..416: note = Related to DXIO01000116.1; note = Candidatus Aquabacterium excrementipullorum
MHACLDNKPSWCKPLAERCAQMPRERWRRLSVRTLASLIEEDIGFAHAWLAHQKPGVRRYILRVRQGMGSLPLGLHRCQLPYWPNTGILGPWLGVSAGSMWRLTRPSAWQRRMPLGEQHYRCLLLPKRTGGWRLLEVPHPYLMRLQRQLLDHLLDRIPAHEAAHGYVRERSVVHHAQAHAGQAVILKFDLQDFFTSVRASRVHALFHTLGYPDSVARELTALCTTATPEPVLRRLHQEGQLPWHRLQQLREPHLPQGAPSSPALANLCAFRLDLRLDGLAHALDARYTRYADDIVISGGTGLRASYQRIAQWVARIASEEGFALNFRKSRCQTIGSRQTVCNIVVNQHPNLLREEFDRLKAILHNCVRHGPASQNRDAHPQWQMHLKGRLDWASQLNPGKAERLQRLYARIDWKQP

SEQ ID NO: 5436 - protein, 447 aa, unidentified
  source 1..447: note = Related to NZ_JAJNKD010000019.1; note = Ideonella azotifigens
MTSVRRFTALAMARAMMAGPPRVDGLAARLQACLGRKAAWYRSLAERVAQLPGEHWRAATPQALNRLADLVEADDSFEAAWLAHERPQVRHYFLELPGGMQPRPLGLDELELPDWPDVPALSRWLGIPAAGLWRLTLARERQRKQPLGQQHYRSQLLPKRSGGFRLLEVPEPYLMALQRKLLDAVLNRVPPHEAACGYTPGRSVLDHARAHAGQAVVLKFDLQDFFASVRHSRVHALFATLGYPAAVARALAALCTVATPEPVLHRRHQAGSLSWPQLQRLRDAHLPQGAPTSAALANLCAFRLDLRLDGLAFALGARYTRYADDLVISGGAELGGLAERVERWVGRIALEEGLALNHRKTRCQTAGRRQSVCSIVVNQRPNLPRDEFDRLKAVLHQCVTAGPAAQNREGHADWRGHLQGRVAWAAQLNPAKAAKLQGLLAQIDWAR

SEQ ID NO: 5437 - protein, 445 aa, unidentified
  source 1..445: note = Related to nan
MPSIQRVTALAIARALLAGPQEPGGLAARVRLCLGTGACDWHGELAARIAKLSALHWQYLTPRALARLVEIDPGYQHAWISDERPTAHRWILREAQGPRPAPLGLERIQRPAWPHAGALAAFLGMPIEGLWRLTLPADRQRRRPLAEQHYRCRLLAKRSGGMRLLEVPEPHLMAVQRRLLDALLDFVPPHEAAFGHARGRSVVDHAAAHAGQAVVLKFDLRDFYSSVRASRVHALFATLGYSDEVARALTALTTVATPEAVLRRLREAGSLTWEQLQRLRDPHLPQGAPTSAALANLCAFGLDLRLDGLAYALGARYTRYADDLVLSGGPELARWRDRIERWVGRIAREEGFALNHRKTRCQRSGARQTVCSIVVNAKPNLPRAEFDRLKAILHRCVVDGPAAQNRDGIERWREHLAGRIAWAAQLNAAKAARLQSLFARIDWER

SEQ ID NO: 5438 - protein, 437 aa, unidentified
  source 1..437: note = Related to JAEKKG010000289.1; note = Burkholderiales bacterium
MSHRTTAIAIARAVLATPVSRSQILERMARCTGFSEATDRALVDGLLEAGLASHWTIAQVADALGADPFFQATCQETRHRPLIRGWFMTRASTLAAPPVPLRAVERPAWPGVGHLADDLGVSAEGLWRLTRSASWQRQAPLALQHYRYELLPKRTGGWRLLEVPEPYLRTLQRRVLDRLLAHVPPHEAACAYVRGRSVADHARAHVGQAVLLKFDLQDFFATVRASRVQATFATLGYSQPVARALARLCTTATPEPVLERLRIEGGLAWTQAMRLRDAHLPQGAPTSAALANLCAFRLDVRIAALARTLGARYTRYADDIVLSGDAGLLRAADHVEARLGAFALDEGFALNHRKTRRVTRARRQQVCNIVVNARPNLPRDEFDRLKAQLHLCATRGAAAQNRAGLPDWEQHLRGRVAWAETVRAACREFWTADAGTP

SEQ ID NO: 5439 - protein, 436 aa, unidentified
  source 1..436: note = Related to JAJTWU010000010.1; note = Pelomonas sp.
MGHARMMTARALAHAMLAGAPREEALAARMAACLDARPPWLADLARAMARVPGEVWQRLDVAALGERVEAHAGFADAWVSDARPDARRWLLRSPEDLPPAPAGLARPHWPTVGTLARGLGLTPAGLWRLTLPADWQRRRPLAHQHYRQQLVPKRSEGWRLLEVPAPHLRAIQRRLLAQLLSGLPPHDAAFGYTPGRSVVEHAMRHAGQARVLRLDLSDFFSTVRAARVHALFRTLGYSAAVARALTALCTTATPEAWLRAEPRLAFLQRQRLRDPHLPQGAPTSPAVANLCAFALDARLTGLAEAFGARYSRYADDLVFSGPASLPVRTLVAWVTAIAEDEGFAVNPNKTRAQGVAQRQSVCGIVVNERPNLPRDAFDRLKATLHRCVVDGPAGQNREGHADFRAHLQGRVAWAAQLNPAKARKLQALFDRIDWRA

SEQ ID NO: 5440 - protein, 438 aa, unidentified
  source 1..438: note = Related to NZ_LMFP01000011.1; note = Pelomonas sp.
MDAARTTTARALARAMLAGPHEAGGLAARMAACLDARPPWLAALAEAMARVPGEVWRRLDVATLARRVDAHDGFAEAWFSAARPEARRWLLRAPDAPAPAPAGLERPDWPTVGALARGLGMTPAGLWRLTLPTDWQRCRPLAQQHYRQALIPKRGEGAGWRLLEVPEPHLRAVQRRLLAQLLNGLPPHDAAFGYARGRSVVQHAARHVGQGRVLRFDLGDFFSTVRAARVHALFKTLGYSTAVARALTALCTTATPEAWLRAEPRLGWLQRQRLRDPHLPQGAPTSPAVANLCAFALDARLTGLAERFGARYSRYADDLVISGPAALPVRSVGAWVAAIAEDEGFVVNPRKTRSLGIAQRQSVCGIVVNDRPNLPRDEFDRLKAVLHRCVVDGPAGQNRDGHADFRRHLQGRVAWATQLNPGKAEKLKALLDRITWPG

SEQ ID NO: 5441 - protein, 438 aa, unidentified
  source 1..438: note = Related to JAJTWT010000006.1; note = Pelomonas sp.
MDHARRMTARALARAMLAGARREDALAARMAACLDESPPWLAGLAAAMARMPGEVWRRLDVDALAARVEAHEGFLEAWCGDGRPEARRWLLRPPQEPGAAPAGLERPHWPTVGALARGLGMTPAGLWRLTLPADWQRRRPLARQHYTQRLCPKRGDGAGWRLLEVPAPHLRAVQRRLLTQLLDGLPPHEAAFGFTRGRSVVQHAARHVGQGRVLRFDLADFFSTVRAARVHALFATLGFSTAVARALSALCTTSAPEAWLRQEARLPWLQRQRLRDPHLPQGAPTSPALANLCAFALDARLSGLAAAFGARYSRYADDLVISGPAALPVRAVSAWVAAIAEDEGFVVNRRKTRSLGAAGRQSVCGIVVNEHPNLPRDAFDRLKAILHRCVVDGPAGQNREGRADWRAHLQGRVAWAAQLNPARGARLKALFDRIDWHR

SEQ ID NO: 5442 - protein, 432 aa, unidentified
  source 1..432: note = Related to JAACZV010000015.1; note = Comamonadaceae bacterium
MTARALARAMLAGPRDAAGLAARMAVCLGERPPWLAALAQAMARVPAEVWRRLEVATLAERVEAHEGFAAAWAGEARPRARHWLLRPPDELAPAPAGLERPHWPTVGALARGLGLTPAGLWRLTLPVDWQRRRPLVQQHYRQALVAKRGDGAGWRLLEVPAPHLRAVQRRLLAQLLDGLPPHEAAFGYAAGRSVVQHAAQHAGQARVLRLDLSDFFSTVRAARVHALFKTLGYSTATARALTALCTTAVPEAWLRGEPRLSWPQRQRLRDPHLPQGAPTSPALANLCAFGLDARLAGLAARLGARYSRYADDLVFSGPASLPVRQIAAWVSAIAADEGFTVNPRKTRSLGVAQRQAVCGIVVNAHPNLPRAEFDRLKATLHRCVVNGPAGENRDGHADWRAHLQGRVAWAAQLNPAKAGKLSRLLARIDWSR

SEQ ID NO: 5443 - protein, 430 aa, unidentified
  source 1..430: note = Related to JAEKLF010000057.1; note = Burkholderiales bacterium
MTARALAHAMLAGPRFEAALAARMAVCLDEQPPWLAGLARAMARVPGEVWRRLDVQTLGERVEAHEGFAEAWFGEHRPEARHWLLRSPDELPPAPAGLERPHWPTVGALARGLGMTPAGLWRLTLPPDWQRRRPLAQQHYRQQLIPKRSAGWRLLEVPAPHLLAVQRRLLGQLLNGLPPHAGAFGYARGRSVVQHAALHAGQGRVLRFDLSDFFSTVRASRVHALFKTLGYSAAVARALTALCTTSTPEAWLRAQGRLDWQQCQRLRDAHLPQGAPTSPALANLCAFALDARLAGLAEQFGARYSRYADDLVISGPAALPVQAISAWVAAIAADEGFVVNPRKTRSLGVAQRQSVCGIVVNTHPNLPRDEFDRLKATLHRCVVDGPASQNRDGHADWRAHLQGRVAWAAQLNPAKAERLRKLLGRIDWAR

SEQ ID NO: 5444 - protein, 447 aa, unidentified
  source 1..447: note = Related to QAJN01000008.1; note = Paucibacter sp.
MARLSRLTALALARALLAGPHQAQGLAARMTNCLGLGLEPRPWLETLALRLARMPGERWARLEPRSLATLIEKEQAFRDACASAAPPRPQRYLLRPREHKAGAPLGLEACDLPDLPHVGALADWLGLPLGGLWRLSKPRDWQRREPLSAQHYRFQLMAKRSGGWRLLEVPEPHLMGVQRKILRGLLQQLPLHEAAMAYAPGRGVREHAALHAGQAVLLRYDLCDFFAAVQAARLRALFLTLGYPHEVAVSLAALCSVATPEPVLRRMHEAGQLTWTQLQKLRGAHLPQGAPSSATLANLCAFRLDLRLDGLAQALGARYSRYADDLVFSGPQHLRQAQARISAWVGRIALEEGFALNHRKSRCLSAGGRQMVCGVVVNALPNLPRAEFDRLKALLHQCVLHGPASQNRQQHADWPAHLRGRVAWAAQLNPAKAQRLQALLARVDWTR

SEQ ID NO: 5445 - protein, 446 aa, unidentified
  source 1..446: note = Related to LMHL01000001.1; note = Rhizobacter sp.
MYASRLRHLDALALARALWAGPQTPASLKARAEQALGASPHWLADFIDELPTVSGATWQRQEVDDLAARIEQTRAFVNAPRVPGLPFVRRWILRASRMRPAPLGLDDLDLPPLPHSAAIADWLGITLDDLDWFTHDRRPALPLHAQHYAFTLQPKRSGGGRLIESPRSRLKALQGRALHELLDKVPVHEACHGFVAGRSVLTHARLHVGQPVVLHFDLKNFFGHILSSQVAAVFHTLGYPPGVARQLAALCTVSTPEPVIERLRDDGWVDWQDARALRRAHLPQGAPSSPMLANLSAFQLDLRLDGLAHVLGATYSRYADDLVLSGPPSLRNSFDRIAAWVGRIALEEGYALNHRKTRMATQASAQRVCGVVVNAHPNLPRREFDRLRAVLHRCALHGPASQNRDGHADFRAHLWGRVQWATQLNAAKAPRLHALWSRIEWIASPA

SEQ ID NO: 5446 - protein, 443 aa, unidentified
  source 1..443: note = Related to FRCQ01000002.1; note = Rhizobacter sp.
MHAHRHRHLNALALARALWAGPQARTSLRARATHALGHEPAWLTLLLDELQPVSEATWQRQSVEDLADRLERTDTFADAVRTTPRPFVRRWILRASRMHPAPLGLEGLGLPPLPHSAAIAAWLGITLDDLDWFTHDRRHLLPLQSQHYGFTLQPKRSGGGRVIESPRSRLKALQGRVLHDLLDKVPVHEACHGFVTGRSVLTHARLHTGQPVVMHFDLKNFFGRILSSQVAAVFHTLGYPRGVARQLAALCTVSTPEPVIERLRDDGWVDWQDARALRRAHVPQGAPSSPMLANLCAFQLDLRLDGLAHVLGATYSRYADDLVLSGPASLRSAFERIATWVGRIALEEGYALNHRKTRLATQASAQRVCGVVVNEHLNLPRAEFDRLRAVLHQCALHGPASQNRDGHADFRAHLWGRVQWATQLNPAKAERLQARWQRIDWAP

SEQ ID NO: 5447 - protein, 354 aa, unidentified
  source 1..354: note = Related to VBCX01000083.1; note = Betaproteobacteria bacterium
PLGLHDLLLPELDHTEALAQWLGVSLETLRWFTACPPRRRHADLQRQHYAFRLLPKRSGGGRLIEAPRSRLKALQRRILDGLLDAVPVHEACHGFTRDRSVLTHARVHVGQPVVIRFDLMNFFASITAAQVRATFQTLGYPAGVAQDLTALCTLLTPEPVIARLQDDGWLDWHQARCLRSPHLAQGAPSSPILANLCAFQLDLRLAGLADTMGARYSRYADDLVFSGPASVGSSFDRLAAWVGRIALEEGYTVNHRKTWLASQATQQRVCGVVVNQHPNLPREAFDRLRALLHQCATHGPASQSDRALDEFRLHVLGRMTWAEQINPSKARRLRKLFDRIVWDAAPAQELPQSG

SEQ ID NO: 5448 - protein, 438 aa, unidentified
  source 1..438: note = Related to JACKEI010000001.1; note = Sandaracinaceae bacterium
MTRDRRTGSRLELLALACLELWQDVVSAGWPPSDTLLTALERVFDDVPAPLRTAARAVTPADLGLPPTAGVADAEAVAARLGALLDPEAQELLARLPVRRVPLPPLSNDARVLAPADVAQRLGLRWDELMWLADPQERLRRGAPEQGHYRYVRVPKRRGGERLLECPRPRLLSVQRAVLRRFLEPLVPHDAAMGFRPGVGFVDHAALHAGQAVVLRLDLASFFQTVRRALVVRALMHGGLARPTAQLLGAIATHVTHPSALRGVSESERARLRSPHLPQGAPTSPALANLVCRRLDARLTGLAASVGARYSRYADDLVLSGGGHLARDAERLVTTVGAIAIECGFTLNMRKTRVMRASQRQQLGGVVINAGPSLPRHELERLEATLTNCVRHGVAGQNRAGVPDFRAHLQGRVAWARALRPSRGDALARIFEQIDWST

SEQ ID NO: 5449 - protein, 429 aa, unidentified
  source 1..429: note = Related to JACKEJ010000006.1; note = Sandaracinaceae bacterium
MALRLEALALSAVEQHASREDGSTLADALDHIATDASPRLRRACRRVPLSALSAELAHPPVDLDRLMRAIGARLSTRARSELATLRVRRFPLVSLGDPAQPFPSFGPSGLDTRLGLSSTELHWLADPQCRRDRLTVTESHYRYVVVPKRRHGVRLLECPLPRLRRAQRALLDEVLAPLPVHPCAAGFRRGMGFVEHAARHAGQDVVLRVDLRDFFPSIHRGMVVRALVDGGTPLATAHLAAALATHTTHRDVARRFDGSTRARLRSAHLPQGAPSSPALANLVCRRLDARLHGLAESLGATYSRYADDLVFSGPRHLLDDAARIVSLVGRIASSCGFALRPEKTRVMSAAQRQSLGGVVVNTRPTLARPELERLEAILTNCVRHGPAGQNRADVADFASHLRGRVAWVEQLHPARGAKLRNLYAQIAWG

SEQ ID NO: 5450 - protein, 445 aa, unidentified
  source 1..445: note = Related to JACRCU010000218.1; note = Deltaproteobacteria bacterium
MNASRPLWRHRLARALAAAFLCGPWRHAELVARGAACLGEKPPWLPIAARWTRHAFPSPPASIEPVVERLLRLPSFQLATTGRPPTPKWRKAFLYVPPDPVARFAVPPLPSDGALARWLAIPEPLLAWLADVRGLNRRTAEARLHNYHPRWLPKAHGGVRLLEEPKPLLKQAQRRILAGLLAHLPPHAAAQAFCSGRSVHSHAALHAGQAVVIRIDLADFFGSIGRARVRALFEAAGYPRPVARSLAGLCTTATPPLVVARLPRPVDAAEVPYAASQRRHLLAPHLPQGAPTSPAIANLCAWELDVRLTALATTFGARYSRYADDLTFSGGPEVARRAGHLVELAMFAAYACGFAVRHGKTRVVRSGARQVVTGLVVNERPHVARAERDQLKAILHNCVRHGPAGQNRENHPDFRAHLLGRLGWVAAGDPRHGAKLRALFDRIAW

SEQ ID NO: 5451 - protein, 334 aa, unidentified
  source 1..334: note = Related to JACKDN010000045.1; note = Myxococcales bacterium
DAGVPPLPTPGDLAAWLGLTTDRVDWLADRLRPEERPAAGAVHYHHRWKGRRLIEAPKRTLRSVQRRILDGILADVPPHPAAVAFRPGVSVVDGAARHVGQPMVVRFDLRDFFASVRRARVRAIFARLGYPDPVADLLANLTTHATPAAVFDAVAPRDAEAHRAHVERRRRFAERHLPQGAPSSPALANLSVYGLDCRLAALARTLGATYTRYADDLVLSGDFAPNPVVRLVDRIVRSEGFALNAAKTRVMAASQRQRVTGVVVNARPNVARADFDRLKAVLTNCARHGAASQNRDAHPAWQAHLEGRVAWVASVHPERGARLRALLAQIDWSA

SEQ ID NO: 5452 - protein, 417 aa, unidentified
  source 1..417: note = Related to JACKIB010000005.1; note = Planctomycetes bacterium
MDADTLADAWLSGDWTLAGMRSRTQRLIHPDRLSKSLASMILGFWLELRDRPHERRRATLAAAITAHRAFFRIARTNTYGTVLDAPKMVPPPRAWDVLPLDTPATAGAWLGLTATDATWLTDPRGIARHYDRYWSGTRLIEAPRRRLKAAQRRIAAELLAAIPPHEAAHGFRRGRSVLSAVHPHAGREVLVVADLTAFFPSVRVSRVHAMFQRVGYPEEVARFLTRMCTTRCRTLPKAEHEVTPGQAQLYRARHLPQGAPTSPALANLCAFHLDARLAGFASSLGGTYTRYADDLIFSGPAVLGRGGFLATVSTIAVEQGFRLNTAKSRVMRRSQCQLVLGMVVNEAPTLPRAQLELLEAELFRCARRGPPVHHQHGVAWLRDHLAGRVAWAKHVNPRRAQRLVELLAAIDWSGAHS

SEQ ID NO: 5453 - protein, 430 aa, unidentified
  source 1..430: note = Related to MDLA01000158.1; note = Chromatiales bacterium (ex Bugula neritina AB1)
MPPVNKLNFFSKHLAMWLSQADWHFVTLLSTAIECVDELPDDCDSLINELLLRYPEKPSEPALAGHLQSSYRLSSWFKRGQSAPKIMRFNLDSPTFIERDNREYPRIDTPGDLADWLKITPSQLEWFSNCWRFDSNTPRYLQHYQYQLMEKRDGRMRLIEKPKTTLKRLQRKIYQEILSTLETHPAVHGFRKDRNCISHASVHTGKKYLLMFDITDCFQSIHWPMVKVVFKRMGYPDAVSILLTALCTHSVRLKPAQLKLFDTAQRNRLRQRHLPQGAPTSPALTNAALHRLDIRLTGLAHHFGLDYSRYADDLAMSGNTHRDWRFLEPLIGGICLDEGVTLNYKKTRIKKSHQKQRVVGIVVNSKTNIDRNYFDTLKAILTNCTKYGLDSQNRYRHPHFRAHLLGRIQYVKSLNERRGAKLEKLYQAIN

SEQ ID NO: 5454 - protein, 427 aa, unidentified
  source 1..427: note = Related to JAHQWB010000596.1; note = Granulosicoccus sp.
MNTKGFFCRHLAIWFYEETWHFTTLLAIFIDVVENLPSDADLLVHETLLEFPDKTSAENIAAFLSRSQRVLHWFSDGADKPAIIRINLQQSPVVKLVNSKLPELNSIGDLAGWLGISIGQLDWLADLKRYDSSRPERFNHYHYRTTEKRDGRLRLIESPKRLLKSIQRQISDDILIYAPVHNAAHGFCKGRNCQSHASNHIGKNYLFLFDLAHCFQSVHWLQVFRVFTQLGYTRTIARYLTSLATHRAYSNHVLLDRLDVDQRIRLRQRHLPQGAPSSPALSNAVLSRLDKRLNGLAKSLRLDYSRYADDLAFSGNEHRDWRFLESLVGAICNEEGFALNYRKTRLVRPGQRQKITGVVVNQKTNIDRRYYDSLKAVLTNCLRNDLDSQNRFNHSDFRAHLRGRIQHVKSLNESKGTKLEKIFEQFP

SEQ ID NO: 5455 - protein, 430 aa, unidentified
  source 1..430: note = Related to MABD01000012.1; note = Gammaproteobacteria bacterium 45_16_T64
MNKKIRFCRQLAEWFLVSDWHYSTLLAVFIDVADELPGDADDLVSELLAEFDTKPELNPIVDYLMQSLRLGCWFYDDHGPRVVPVCLINSQLSRLSNDALPVLNTESDVANWLNVSIQELTWLAELYRLDPTSPSYFKHYHYSIAKKRNGSPRLIESPKSRLRAIQRKVYSEILDHAVIHDSAHGFLKGKGCKTHASQHSGKDILFTFDLSHYFHSIRWPNVYAIFSGLGYTNSVSKILTALTTHRCYMKDRCLGELDTDHRSLLRERHLPQGAPTSPSLSNAVLYFLDCRLSGLAASLNMKYSRYADDLAFSGDTGRDWRFLEPLVGSICLEQGFRLNHRKTRIMKSHQKQRLTGVVVNTKPNVDRKHYDRLKATLTNCLRHGLESQNRDNHPDFFAYLEGSIAHVGHLNSARGKTLKAMYDRVIATQG

SEQ ID NO: 5456 - protein, 424 aa, unidentified
  source 1..424: note = Related to NZ_ML660090.1; note = Exilibacterium tricleocarpae
MIQTFTRELAQCLYHSEWHFTTLLAACIQRIDNLPDDIDGFISQLLNVYNEKPALELLAGFLEQSRWVRSWFVVPARAPRFRIYNLEPVSGTTRAELPPLDSPAGLSLWLGLSPGHLDWIAGLKRVDASRPRRLDNYHYSLLRKRHTGSRLIESPKTILKAVQRRILNRILCHAPVHRAAMGFRKGCSSLDHARLHCRKRYVFCFDLENYFQSIQWLPVWRVFRTLGYPKKTANYLSALCTHACPPGALARFGLGDHYNRLLRERHLPQGAPTSPALSNAIMLGLDRRLSGLARRLELDYSRYADDLVLSGNGKRNWDFLAPLVGSICLDEGFSLNHRKTRRLTRSQSQKVVGVVVNEKINIDRRYYDDLKATLFNCVRFGPDSQNRGQHKDFCAHLLGKIHYVASVNTSKGQKLLQLFDRIAF

SEQ ID NO: 5457 - protein, 444 aa, unidentified
  source 1..444: note = Related to NZ_CP035490.1; note = Hahella sp.
MRYDRWLAARLADAYQSGAPIAREMQQRAAMALGEQPAWLAPLTRRMWRRFQQVWETTSAHTLTEAILADRGFQRGLALSSRPIQVRRIFLPPPQELAPDSLAARYRLPALRCAGDLMHWLRLTPEDLDWLTQARGAPSGASSALGHYIYRWLDKPRGGARLLEAPKPWLKTIQRRIHQEILAPLPLHEAVHGFRAQRSSLTHARIHIGQTLLLKFDLKDFFPSVSYAQIYRAFRRLGYGHQVARLLSKLCSHVTPDEILRQPLAGYLERGNELFRRAHLPQGAPTSPALANLAAAHLDRRLSALADSMGRRYSRYADDVVLSGPRMSPGAIARLQALVGAIALEEGFVLNTRKSAVIGQGARQQVGGLVVNAKANIPRKDYDELKAVLHNCLRFGPDGQNRQGHGDWAAHLRGKIAYMAGINPEKGRKLLALYQRIVWPQESV

SEQ ID NO: 5458 - protein, 444 aa, unidentified
  source 1..444: note = Related to NC_007645.1; note = Hahella chejuensis
MRYDRWLAARLADAYQSGAPTVREMQQRAVVTLGEQPTWLASLTRRMWRRFQQGWEGASAYALSEAILADRGFQQGLAVSARPVQVRHIFLPPPRALPPDSLASQYGLPALRCAGDLMHWLRLTPEDLDWLTQARGAPRKAASALGHYTYRWLDKPRGGARLLEAPKVWLKGIQRRIYQEILAPLPLHEAVHGFRAQRSSLTHARVHVGQALLLKFDLKDFFPSVGYPQVYRVLRRLGYGHEVTRLLSRLCTQVTPNEILRSPAARHLERGEELFRRAHLPQGAPTSPALANLVAAHLDRRLSALADSMGRRYSRYADDFVLSGALMSPGAIERLQALVGAIALEEGFVLNTRKSAVIGQGARQQVGGVVVNAKANISRKDYDELKAVLHNCLRFGPDGQNRQGHGDWAAHLRGKIAYVAGINPQKGRKLLALYQRIIWPQESA

SEQ ID NO: 5459 - protein, 445 aa, unidentified
  source 1..445: note = Related to NZ_AQXX01000078.1; note = Hahella ganghwensis
MNYQRWVATSLAETLLSGPRDVASQRQRLTKVLGEEPEWLSPLVALGRSPDFVKGEDSETLKRQLTEAILDCEDFLLAFVEEDTTPRIRHIKCQTLPPTFPSNCPVEVCNLPKLATEGDLLAWLHLSHHDLLWLINEYREEFGQDSRLQHYHYRWLEKPRGGARLLESPKPLLKSLQRRIHREILSPLPLHSGVQGYRQGHSCLTHARLHQGQSLLLKFDLKDFFLSIGYQQVYRIFRRLGYNHRVTQILSRLSTNKTPRAKLRPPPGIMTERDIQLFRRPHLPQGAPTSPILSNLAAAMLDNRLSGLAKKMGYRYSRYADDFVLSGPGMSQHAAEKLQHLVGAIAEEEGFSLNTRKSAVVGQGQRQQVAGIVVNEKTNLSRKQFDSLKAMLNNCARHGPISQNHQQLPNFQAHLKGKIAYLRSLNPQKGDKLMTLYQKIQWPDQ

SEQ ID NO: 5460 - protein, 440 aa, unidentified
  source 1..440: note = Related to MRYI01000026.1; note = Hahella sp.
MNYKRWVASCLADAFIIGPRDSSAILLRWSKVLGEQPEWLRRLSKEILSPETAHHENLNFSMVLERIQASEDFDEAFSESDQPPRVRYVYLPEAEYSFSAEQHELPKLAGISDVLNWLNLTVNDLEWLCGNYRNAPGASSKLAHYHYRWLEKRRGGSRLLESPKPLLKSIQQKILHDILSAVPQHPAVHGFRAGHSCVSHARQHLEQPLLLKFDLKDFFASIHYPMVFQVYRKLGYPPTVCRILTKLSTNVSPVKILKSRPDTCIDKDDNYFRRPHLPQGAPTSPALSNLAASKLDKRLTGLADTMGFRYSRYADDLVFSGPRLKRGSIDKLQSLVGAIVLEEGFLLNTRKSAVVGQAQRQQVTGIVVNRKANISRQQFDQMKAILHHCIHQGPHHQNRDQVPDFQAHLKGKISYMQSINPQRGNKLMKLFQQIQWQNAD

SEQ ID NO: 5461 - protein, 427 aa, unidentified
  source 1..427: note = Related to JABLXQ010000049.1; note = Gammaproteobacteria bacterium
MNAHRYFAYTLARICLQSSWEREPMAEAVELSLQGQGPWVNSLIRQVLHRFPRRPGLPALFDFLRQSEGLAAIRLRYQPRICRYPLTLPHVVLPSSLPPLDSVGALCEWLRLAPADLDWFADRSNRAAGHAAPKVRHYHVTTIPKRQGGMRLLEVPKSRLKQIQRRIHDDILLQLPLHPAAQGFVRGRSPVAHAGLHVGQAVVLRFDLRDCFLHVHGGRVFQAFRALGFPEDVSRLLMGLCTHRLPQWLSTQLPLDEVQRQKARQNHLPQGAPSSPLLSHFALRGVDVRLSAYASALGANYSRYADDLVLSGGEHLRHSFRAIEARVGAIVAEEGFALNFRKSRCVSAAQRQQVTGVVVNRQLNVPRVQFDALKAELHNCVQQGWVSQRPTHVADYRAHLLGRIGWVMQVNPQRGAKLRGLFERIDW

SEQ ID NO: 5462 - protein, 464 aa, unidentified
  source 1..464: note = Related to VISH01000001.1; note = Alteromonadaceae bacterium 2753L.S.0a.02
MYGGARCARKYTQNQRLVLEPLILNDMDAHYKKLLIRQLARAVLIGEHSPAGITRSITHCLGIGTEQARALAVEISAEHLFRAYPHHAELFLRTTLQESTTLTAIFAGRDLRVINWPLAALQSQQNPPAKYLWQLPVIKSAEQLADFLDVQLNDLYWFAQRFAKPNSSFKQQHYYYRFITKSDTSLRLLEIPKSRLRCLQRTILKKVLQPMPVHEAAHGFVKNKNCASFAEPHVAKSLIVSMDLENYFLHIPVARITRLFQVAGYPVDVASLLAGLCTHRTPNQIIANTPGSHSKYLHIRHLPQGAPTSPMLANLASFWLDVRLNALAKTMGYHYTRYADDLAFSCDSDNHNPKRLIRSVSDIIQAEGFRLNHQKTRVQKPGQRQCLAGLVVNEKLTIPRNIVKRLQAELYNCVQHGPESQNRLNKADYKSHLAGRIAQVAGVSNVKAEKLFALFDQISWPQER

SEQ ID NO: 5463 - protein, 432 aa, unidentified
  source 1..432: note = Related to RCHN01000046.1; note = Ketobacter sp.
MNYRKLLIRQLALSLLEGAHHPVGLANSIAGCVNLTLRDALPLAEELARNLDWGSLTVMQLEQWLEASERLAVLYRSQRLRVVKWPLTAIPAPQRAALGSAWGLPPFHNTDHLAQWCGLSPGDLNWYSQRYPNQRPDARKLQHYHYQPRHKSDGSQRILETPKSRLKSLQRKLNHDLLNKVPVHDAAHGFVAGRSVKSFSRLHVDRPVVLAMDLKHFFLSIAPGRLVRLFQRLGYDLAVSKALIGLCLNQTPEAVLSPIHCLATRQRYRQPHLPQGAPTSPVLANLMAFRLDLRLEAAAHGQGFCYTRYADDLAFSSHRHDRAATRILQRQVRSIAADEGFAIKEEKTRVMTRAGRQQLAGVVVNKKQSLPKAEIKQLEAILNNCVRYGPHSQNRARHPQFRAWMEGKLAYVQHLAPHHFERLQRHFELIQW

SEQ ID NO: 5464 - protein, 445 aa, unidentified
  source 1..445: note = Related to JABJPU010000111.1; note = Methylococcales bacterium
MSNQNQIIGFISHAILAGEWQTDAIKERIGRSIGYQFNARLLIKELMSEFELTQAQTQHTAIQQFLKNNVTFQQCWGEQRQLIQLDKIYIPKQDRCRPPRQLNHIELPALNTEQQLGDWFKISVNDLIWLSGIWEKPYDAKSCKLYHYHYQWLKKHNGKKRLVEIPKSRIKSLQKKISIQCLDSIPIHQNAHGYCKNKSCQTLVQQHIAKPTILKMDLQNFFASIDYRKIFNLFFSLGYNKDISRLFAHLCTTATPLSVLSAELIAGQQKDYWHQRKLYRERHLPTGAPSSPVISNLCFFNLDCRLTAFAEKMGLNYSRYVDDMVFSGGREFYNKSDYLIKTISKICQSEYFFINHKKTQLLKPHQSQQVCGLVVNQKPNLTRKNYDQLKAILYNCVRTSPKQQNRLNHANFKEHLAGKIAYLSQINPQKGQKLADLFDQICWME

SEQ ID NO: 5465 - protein, 431 aa, unidentified
  source 1..431: note = Related to CP065008.1; note = Alphaproteobacteria bacterium
MQNLARTSRLLAASIIDGPWETGPLARRIAHAISLRGFNPERLALALVRRFGKGKTPVLRDLTAAIAANEHFAVCFESTGRPAWFRMGVEPPQMTRPPSNLVTFPLPVIETAKELSAWLNVDLSTLEWLADTRRRQKNAKDFRFVNYSYIWKKRPGKPPRLIESPKSKLKATQRKILTEILNKIPPHEAAHGFCRNRSIITHALLHTEKDAVACFDLKDFFHSIPPARIMAMFRTIGYPQEVSRRLTNLCIHTPNPEFLGKTLETLPWAVRKKILIPHLPQGAPTSPALANLCSFHLDTRLQALAESMNLTYSRYADDLTFSGGKELKSRFSYLRGTVQGIAQDEGFTINPEKTRLMTQAQRQVVTGVVVNKRPNISRTEYDRLKATLYTYSKSTGLDGLIKAQLRGKVEFVRALSPQRGEKLFELWKKIP

SEQ ID NO: 5466 - protein, 432 aa, unidentified
  source 1..432: note = Related to JAGRIJ010000030.1; note = Alphaproteobacteria bacterium
MPGYKQTTRLLAASIIGGPWESGPLSRRIHHAISLKGLNSERLALDLVHRFGEGRTPSVKELASAIAANKHFEKCFMASEGQAEWLRMGVEPAQMNPPKGDLATLPLPALATSRDVCEWLEIDQPALEWFADTRKRQPHVRDERLLHYTYLWKRRRGKSPRLIESPKGKLKKFQRKILSEILNKIPPHEAAHGFARNRSIITHALLHTEKECVASFDLKDFFHAVPPARIASLFRALGYPHEVSRILSGLCLHAPDAHYLGSPLTNLPFPVQKKILSPHLPQGAPTSPALANLCAFRLDVRLQSLAQSMDLTYSRYADDLTFSGGKDLKKQFSYLRGTLSEIAAQQGFKLNPEKTRLMTQAQRQVVTGVVVNKRPNISRAEYDRLKATLYQCAEGEEKDALLKQSLRGKVEFVRTLNPQRGEKLLRLWEKIT

SEQ ID NO: 5467 - protein, 350 aa, unidentified
  source 1..350: note = Related to QFQP01000062.1; note = Archangium gephyra
MGPSKWNVPELHVVGDVAAWLSVSPEELRWFSDTSGVERARRRQSARNYVHQWVARGEKLPRLLEAPKAKLKALQRAVLHGLLGKIPVHDAAHGFVAGRSALTHARLHVGKKVVVRFDLRHFFTSIDTARAFGVLRWLGYTHEVSAVLIGLCTTRTPNHVLGRAPIPDLAEGEVLNQRFMMLRQLEAWHFPQGAPTSPAWANLCAWWLDVRLSAYAKKFGLTYSRYADDLVFSGDQLSSISRLRDVVDGVVRAEGFVINRAKTKVMHAHARQFVTGVVVNERPNVTRVEFDQLKALLHRCEMKGALSQSKGPVDQFRAELEGKVAWVAQLNAARGAKLKAQLSRIDWTEG

SEQ ID NO: 5468 - protein, 450 aa, unidentified
  source 1..450: note = Related to JAACJQ010000409.1; note = Archangiaceae bacterium
MNERERSPWPTPTSLRRNDARFIARQPWNRTDLLRALSVAFGSSGIPLRDLVDRLLRAVTAPQRELIAIQRVLEGSPFGVERYRAFERRPNAVDRFDLPRISSAPALHDWLGLPTEWASWFTDFRELERKRQPPKTKHYPRWWTARRWSIPRLIEAPKSQLRRMQRKLLHELLERVPFHPAAHGGVRGRSAVTHASLHTGRRVVAQFDLADFFPSITFKRVSGFFVALGYPKPVAREVAALTTTTTPAELLDLQQLHSGGDRVVFHQLVMRLRERHLPQGAPTSPALANHLTFMLDQRLSEAAKSMGLTYSRYVDDLAFSGDVPVSLERLERIVESNVISEGFTLRHRKSRLHTSSTRQRVTGLVVNVKPQPGRREFDRFRALLHQQAKTPTLPLAELEGKAEWFSTGRPARRAKLRRLLDAINSAAASAAAGAAASTAAESRAGADRAR

SEQ ID NO: 5469 - protein, 445 aa, unidentified
  source 1..445: note = Related to JAEUIQ010000011.1; note = Planctomycetaceae bacterium
MVFDKLAELLLDSDWTHEAIVRLLTACYRPPLSLRKTRPPKHELLATSILTAFPSPPSQARLIEHLRLSPGARRGFRYGKVQQVKLDAQMAGGQMRHTPTLQSGWDYPRISNLRELAECLGILDQTLNWLARGPRGNHACAAHYRIQAVEKRAGGCRLIEAPKATLKRTQREILRHVLNRLPVHVAAHGFVPQRSTLSHARLHVGQKWMLRMDLEDFFPSIDGSRVFGLFRSLGYPYEVVQALTNLTTHVLSIDAIRESVRHLARNARNERTITDLARLYFRRHLPQGAPTSPMLANLIAYRFDCRLTGLAKTCHVTYSRYGDDLLFSGSSTCHSSLSKIEDHVGAIAIEEGFRVRHRKTAFIPNSQRQAAVGIVLNEKPNVARHEYDQLKAILHNCVRYGPESQNRVGHDNFAAHLLGRIQWLRSLHPQRGEKLFECFKRIHFG

SEQ ID NO: 5470 - protein, 478 aa, unidentified
  source 1..478: note = Related to JAGFNH010000001.1; note = Candidatus Accumulibacter sp.
MDELSDRSSYASAAQRRVATALARACMAGEASPPAMRARAERVLGHPTPWLVPLALHLHFECAPPAGEVWHPRQHDQVVAAILAFPAFLAAFEQPEGAPGVRAYYPFHQPMGHPPEPLAGLLLPSLATIGDLADWLEMTPSLLDWYADAAAWSVRSRVEKRDHYHSRWVAKAAGGARLIEAPKENLRFIQRRILREILNRVPVHEAAQGCVRGRSVVDNARRHLGSALLLKLDLRDFFVGISGARVHALFRTLGYPRETARYLTGLTTRCSPAWLLRQVPQEAYPSPEERCRRRDWARQFMGRHLPQGAPTSPALANLCAYRLDLRLAGAARECQAGYSRYVDDLVFSCADGDLARGRRIVSMVQEIILEEGFSPNWRKTRLAPACASQRITGLVVNERLNLPRTEYDRLKAILTNCRRHGPASQNHRGVPDFGAHLQGRLSWFRQVNPERGARLQALFDAVPWEHDRPDDSVPGLAR

SEQ ID NO: 5471 - protein, 465 aa, unidentified
  source 1..465: note = Related to JADKJO010000032.1; note = Propionivibrio sp.
MDEIPDLPNYPLNATRKVAIALARAFLAGEGSPAAMRVRGERVLGRSYSWLVGLTLHIHFALGPALGRGWQPELHDQIVTHILAFPDFLAAFEIPDEVPQVRGYFPFHASMRSPPVPLAGLALPSLATPGDLADWLDVSPSMLDWYANTAAWVYAPGASKLDHYHYRWVAKARGGVRLIEAPKENLRFIQRCILREILDRVPVHEAAYGCVRGRSAVSNARLHSASPLLLKLDLRDFFVSIPGARVHAMFRTLGYPQETARYLSGLSTHNTPARVLREVPQEEYPSPEEHRHRKEWARQFTGRHLPQGAPTSPALANLCAYRLDLRLSGVARECQARYSRYVDDLVFSCADDDPARGRRILTMVQGIILEEGFVPNWRKTRMAPASTSQRVTGLVVNDRPNLPRREFDILKAILTNCRRHGPASQNRLGLPDFRAHILGRLSWFQQVNAERGERLKLLFDQVSWD

SEQ ID NO: 5472 - protein, 459 aa, unidentified
  source 1..459: note = Related to NZ_AUCH01000007.1; note = Azovibrio restrictus
MDEPWFPPPITPHIRQVAEALTRAFLYGDDRPGPMRERGTRLLGSPWPWLTDLCLRLHFELGQGRPWQPEQHDEILALILAYPPFLGATPPRVRGFFPLQPRMAPRPGALAGVALPALASTGELADWLELSPTQLDWFANPGGRRPQAPELGHYHYRWMQKRQGGARLIEAPKARLRALQRRILAEILNRVPVHPAAQGCVRGRSVLSNGALHTGAPLLLKLDLRDFFVSIPGARVHALFRTLGYPRETARYLTGLTTHGTPPGVLRQVPQEEYPSPEERRQRQAWARQFMERHLPQGAPTSPALANLCAYRLDLRLAGAAREAGAVYSRYVDDLVFSLPSHDPGRGRRILTMVQEIILEEGFTPHWRKTRILPASTRQSVTGLVVNQQLNLPRQEYDRLKAILTNCRRHGPASQNREGRPDFRAHLQGRIAWFAQVHPPRGARLMALFAGIDWDGLRS

SEQ ID NO: 5473 - protein, 498 aa, unidentified
  source 1..498: note = Related to NZ_CP075192.1; note = Ferribacterium limneticum
MSSSSATRQAGEGTAFHRIAKAPMDEFSESPEPPDLPEKAMRQVAVALARSFLAGERSPAGMRQRGTAALGHAWPWLVQLSLHLHFELGQDLQARKHDQIVAFILAFPRFRAAFDTPGQHPRVRSYFPFHPVMGTPPPPLAGLAFPALATPGDLADWLGITPRELDWFANDWNSTAAQPKFKHYHYRWLAKRSGGARLIEAPKENLRAIQRHILHGILDHVPVHEAAHGCVKGRSTLDNARRHAGAPLLLKMDLRDFFVSIPARRIHALFRSLGYPVATASYLTRLTTHATPAYLLQQVPQAEYPSPEERRQRQIWARQFMERHLPQGAPTSPALANLCSYRLDLRLAGAARECNARYSRYVDDLAFSCDDNQAHGRRILAMLQDIILEEGFTPNWRKTRLASAATTQRLTGLVINAHPNLPRKEFDTLKAILTNCRRFGAASQNRDGRPDFRSHLQGRIAWFRQVNPERGEKLRRLFEQIDWASAETIRNRARISLT

SEQ ID NO: 5474 - protein, 462 aa, unidentified
  source 1..462: note = Related to JAGTRU010000007.1; note = Proteobacteria bacterium
MDEFSDDPELPELPTKAMRQMAVALTRAFLAGEPNPAGMRERGGIALGQAWPWLVPLSLHLHFELGSELQAREHDRIVALILAYPRFRAAFAVPGERPKVRGYFPFHPPMGRPPPALADLALPALATPGDLAGWLGLTPGELDWFANAWHQPAATGKLDHYHYRWLAKRSGGARLIEAPKENLRAIQRRILHGILDRVPVHEAAMGCVKGRSVLDNARRHAGSPLLLKMDLRDFFVSIPARRVHALFRSLGYPSATARCLTGLTTHATPAALLRQAPQTKYPSPEERRQRQQWARQFMEHHLPQGAPTSPALANLCAYRLDLRLAGAARAGQARYSRYVDDLAFSCANGDPRHGRRLLNMLQDIVLEEGFTPNWRKTRLAPASTAQRLTGLLVNAHPNLPRGEYDRLKAILTNCRRHGPASQNRDGLPDFRAHLLGRIGWFGQVNPARGEKLHRLFEQIDWA

SEQ ID NO: 5475 - protein, 466 aa, unidentified
  source 1..466: note = Related to WBUO01000290.1; note = Dechloromonas sp.
MNDPDDFDDDFDPDDLLPARAMRSVAIGLVRAFLAGSSDPASLRERGRRALGESPRWLPSLVLHLHLELGSQFTTRQHDALLDAVLAYRQFRNAFLPGSTRPRILCHFTFHPPMDEPPAVLAGVAVPTLPTSGDLADWLGLLPNELAWFCGNWREQPSQPKLGHYRYRWLNKANGGRRLIEAPKETLRSIQRRILHGILDKLPAHTAATGCVRGLSVVDNARRHADSPLLLKMDLRDFFASIPAGRVFALFRTLGYPPASAHCLTQLCTHATPMRVLRELPQDGHGSWEWRRQQQEWARRFNTRHLPQGAPTSPALANLCAYRLDLRLAGLARECRATYSRYVDDLAFSLPRHDSARAHRIQLLAEEIILQEGFAPNRRKTRLCPAGQTQTLTGLVVNRHPNLPRAEYDRLKAILTNCRRHGPTGQNHDQHPDFRAHLQGRLAWLRQVNPPKGEKLLVLFGEIDWG

SEQ ID NO: 5476 - protein, 465 aa, unidentified
  source 1..465: note = Related to JAGRFZ010000003.1; note = Rhodocyclaceae bacterium
MDDEEAHPPFGPEHAGRDKARVALGLASAFLAGSPEPASLRERGRRALGRDWPWLPALALRLHHTFGKAFPPHRLDDLQRLIVRDPDFIASFADSEGGPRIRAWFPLHPRMAPPTIPGLPALPQLATLDALADWLEVRLEDLDRLAEPQAWRPPRSASPLEHYRYHWRQKRDGGLRLIEAPKPRLRRLQRRILHGLLDLVPVHPAAMGCVRGRSVIDHAGQHAGQPRLVKLDLRDFFPGNRASRIHALFRSLGYPTMVARHLTGLTTHCSPPRILRTLPHGEYDSPEQRLRTRRRAMALCDRHLPQGAPSSPALANLCAFRLDLRLAGAALACGARYSRYVDDLSFSGAFDAARGHRMLAMIDDIVRDEGFDPNWRKAAVVGAGAAQRLTGLTVNRHPNLPRAEYDRLKAILTNCRRHGPTSQNKAGHRDFRAHLLGRVAWACAVNPARGEKLRSIFDRIVWPEG

SEQ ID NO: 5477 - protein, 465 aa, unidentified
  source 1..465: note = Related to JAGRFY010000153.1; note = Rhodocyclaceae bacterium
MDEEEADLPFGPAHAGRGLARVALGLAAAFLAGSSEAAGLRERGRQALGRDWPWLPSLALRIHFAFGSEFSPDRLEDLQSLILGDPGFAKALADPDGGPRIRAWFPLHPQMASPVVPGLQALPQLATLDQLADLLELSVDDLDWFADPQAWRAPKPDSPIARYRYHWRRKRDGGLRLIEAPKPRLRRLQRRILHGLLDPVPVQPAAMGCVRGRGVIDHAGLHAGQPRLVKLDLRDFYPGIRASRIHALFRSLGYPTKVARYLTGLTTHCSPPRILRALPYGEYDSPEQRMRTRRRAVSLCDRHLPQGAPSSPALANLCAYRLDLRLAGAARACGARYSRYVDDLCFSGAFDAAQGHRILAMIDDIVREEGFEPNWRKAAVVGAGAAQRLTGLTVNRHPNLPRAEYDRLKAILTNCQRHGPSSQNKGNHRDFRAHLQGRVAWACAVNPARGEKLRSLFDRIDWRQG

SEQ ID NO: 5478 - protein, 460 aa, unidentified
  source 1..460: note = Related to NZ_KB892867.1; note = Uliginosibacterium gangwonense
MSRLPKPPIDPAILHVARGLARAFLHEAGGITDLQQRGKAALGTAHDWLPRMVRRLDQHFGLPLRPAQFEDIVTCIATLPSFIGAFERRPVPKIRRYFSFQPQMAALPRTLAGLDLPALPTVGDLAAWLALSMDELEWLADVHSISSKTGSEALRHYHYQWKAKASGGHRLIESPKPLLCAIQRKILHGLLDKIPVHDAAHGCVPHRSILSNAQVHAGSPLILKMDLQDFFTSIRASRVHALFRTLGYPEEVTRYLTALTTHVTPSFIFHTQPRPEGLTSKALQTRRKQAESYRARHLPQGAPTSAALANLCAWRLDLRLAAAAQESGVRYTRYVDDLIVSFPSHTRAHAWRISLMIDTIILEEGFTPHPRKTRLTSQSQAQWVTGVLVNEKPNIARSDYDRLKATLTNCMRHGPHGQNREALPDFRARLQGRIAHVKHINPARGEKLQTLFDAIGWQAI

SEQ ID NO: 5479 - protein, 507 aa, unidentified
  source 1..507: note = Related to JAEUNN010000841.1; note = Rhodocyclaceae bacterium
MEGRTAFGAKAAEGGRVEDSYDDEEAAAAWLAARARATQAVATALARAFLAACASQAQTAADAGGPVAAPHTATGARAAAAAMQACGRRVLRRKYPWLARLVRHVQAAAGDCPRPAQHDEVRALILEFPPFRSAFEDDEPPRVHAWFPWHECMRAPPRRLAGLNLPQLDTPGDLAAWLHVSVGELAWFADPGGWAEASGVEALRHYRYRWNAKAGGGWRLLEIPKPRLAALQRKILREILDRVPPHAAAQGAVRGRSALGNAAMHADCGLVLRLDIEDFFPRLAGARIAALFRTLGYAPAVARLLAGLCSHATPAAVSSTAPCAGLPGIDGLRARRDLADMYGSPHLPQGAPTSPALANLAAYRLDLRLDGAARACGWRYTRYVDDLFFSGPGGSPAHALRTAQMLQGIVLDEGYRPNFRKTRVMPRGRRQLVTGLVVNRRAAIPRDQFDRFKAMLTNCLRHGAASQNRDGVADFRASVAGRLAWFEQVNVARAAKLRALFDAINWA

SEQ ID NO: 5480 - protein, 487 aa, unidentified
  source 1..487: note = Related to JAHCAA010000009.1; note = Rhodocyclaceae bacterium
MRIAQQGEGEEPYAHRFAAPTAAMDAVAIALARAFLAAVTQTADSAAGAAEAMEPSQRALAAAMQACGRRVLARKWPWLARLVRHILSETGPQLRPAQHDEVRALILGFPPFRLAFAADQPPAVHAWFPWHDAMRSAPRALAQLALPQIDTPGDLAAWLGLTVGELAWFADSGGWAARSDTERLRHYRYRWLAKPSGGWRLLEIPKPRLAALQRKLLREILDRVPPHGAAQGAVRGCSAATNAAAHTGRGLVLRLDIENFFPTLGAGRIAALFRTLGYPGAVASLLAALTTHGTPAAIAGAAPLGEYAGAADLRARRDIAQLYRRAHLPQGAPSSPALANLAAYRLDVRLAGAARACGWIYTRYVDDLFFSGPATTPAQARRNAQMFLSILCDEGYTPNCRKTRIMPRGRRQCVTGLVVNERPGIARDEFDRFKALLTNCLRHGAASQNRAGVADFRASVAGRLAWFEQIDSARAAKLRRLFEAIEF

SEQ ID NO: 5481 - protein, 477 aa, unidentified
  source 1..477: note = Related to JADJSA010000006.1; note = Sterolibacteriaceae bacterium
MRAAPMHDESHPRFDSQYIEPDLLALATQLANALLAGEQRSPALRKRLQTVLGRNWPWLAQLIRQVRLDFGDGISSAEHDELVRSILAFAPLRRAFESDGEVPRVRGWFPFQPPMGAPPARLGAIDLPALATPGDLADWLGLRIGELDWFAGSLRPQVAANGPLWHYSYCWLAKRRGGYRLIEIPKPRLRNLQRRILRDILERVPVHPAAHGCVRGRSVVSAALPHTGTDVVLQIDLREFFSTVTAARVHAVFRTLGYPPAVARLLTGLATHSTPHSVLRAAPVAEHADAQAKRSQMQRQVLLTVPHLPQGAPSSPALTNLCAYRLDLRLSGAAAACGVGYTRYVDDLIFSGDVAFARKIERFKSMVYSIIVDEGFEPHFQKTRARTQATPQHVVGLVVNRRLNVPRCEFDALKALLHNCRCHGPAGQNRHAHPMFRQHLLGCIARVAQVNPARAARGCCGISAPSTGPDRAKPRCA

SEQ ID NO: 5482 - protein, 368 aa, unidentified
  source 1..368: note = Related to JADJHQ010000003.1; note = Sterolibacteriaceae bacterium
MGEPPASLRAKAKELPRLATPGDLADWLGLPIGELDWFAASLRSDLTADGPLCHYRYRYRYRWLAKRRGGYRLIEIPKPRMRGLQRRVLHRILEQVPAHDAAHGCVSGRSTISAALPHSGKNLVLQIYLQDFFTGVTAGRLHAMFRTLGYPPAAARTLTGLVTHSTPYSILRASPSPELGQNDDAGTKSRRHAMLRIAHLPQGAPSSPALANLCAYRLDLRLSGAAAACGIGYTRYVDDLIFSGDDAFARKMERVKSMLYSIIVDEGFEPHYRKTRAQRQATSQRIVGMVVNQKPNVPRREFDTLKAILHNCRRHGPQGQNHLCHPHFRQHLLGRISRVAQLNANRGERLLREFRQIDWSPAVLPKAG

SEQ ID NO: 5483 - protein, 502 aa, unidentified
  source 1..502: note = Related to NSJF01000001.1; note = Vandammella animalimorsus
MAFALPHPMGLNPHDDVALRAFAQHLARALLAGPWTPMAMRARLRRALGLARGGASPDWLRQLVRQLHAQPPFALPAQPQRRKAAGAATGPVPGSAHLQAVADAVAQCPALQQAWSATPAHAPWRIKGFFLPPPPPKPAAIAKLQPFVRELPPLAQVGDIAAWLELEPGQLDWLANCQDRPTPSPKLAHYRAHWLPKGQGGLPRLIEAPKARLKQIQRRILQELLAPIPLHNAAHGGVRGRSALSHAQAHAGMPVLLKFDLRDFFPSIRAARIHAIFACLGHTPAVCRVLTALVTTRTAHGVLRTAPLTAPPQSAPCGAGTGPSLAVQQAQLRQLYGQRHLPQGAPSSTLLANLATARLDMRLAAAAAALQGRYTRYVDDLAISLPQLPRAQLLRMQRLVRRIVHEEGFVLNEAKCGLYTASQAHYLTGICINAHPNLPRAAYDQLKAILHQCVLHGPSSQNRDGHRDFRAHLQGRIAWCRSLNPARAAKLQRLFERIDWQD

SEQ ID NO: 5484 - protein, 431 aa, unidentified
  source 1..431: note = Related to JAKGTI010000001.1; note = Maritalea sp.
MDKRLFSHNLAVHLSLCPWSLDQISACLRRNLPKGAHKYTTEIANELHIGLPTIFTPSVSAIEIVLRRAIRLESTYQFCRKQGKWPALNLSSPTMCPTPAFEGLDIPQLPTTASVADWLSISERRLDYLADEQNRHEEHGEASINHYHYIFKNKNGGGIRVIEAPKENLKSIQRAILKNIIGIVPPHDAAFGFVKGRNCLKAANRHVGEKVVLCFDLKNFFPSIGAGRVFGLFRCLGYPDAVARVLTSLCTSLTPRRILERFPLEERSIYNKRHLPQGAPTSPALANQICFGLDKRLNALAKCLGAQYSRYADDLTFSGDKHIARPLQYFLPVIAQDEGFSLNRAKTRVMPRASRQTVTGVLVNEHLNIDRRSFDKLKAIIHACGKPGDRRLLDPSFRKSLMGKIDWVESVNPHRGQRLRQLLSKAVENHI

SEQ ID NO: 5485 - protein, 430 aa, unidentified
  source 1..430: note = Related to FNUZ01000001.1; note = Thalassococcus halodurans
MNRNEVSLNLARSITRGEWSKEFINSNLLRRLPSTVHKLVPAISEDLVTELSARYAPTEKYVAEHLLYDRNFERIYRYCARKGIWPTPDLSPPVMAPIPAFQKIDLPQIPTLSALAEFLFLTPEQLEYLADRNGRHEEHGDMAVNHYHYVLKPKRTSGHRLIEAPKERLKAIQRHILRSILDKLPTHPDTFGFVRSRNCLQGANRHAGEQVVLRFDLKNFFPSISAGRIFGLFRCLGYPHNVAVDLTALSTTKTPARVLERLFYPDRGLYKTTHLPQGAPLSPALANHAAFGLDRRLAGLAKRLDANYSRYADDLTVSGDHTITSNLLRLVPQIIKDEGFALNTSKTRVLPQTTRQTVTGIVVNDHLNIDRKTFDHLKAVIHAFQKEGDHRLSDPAFRASLEGKIAWVEAINPSRGQKLWRLLDNAEKPS

SEQ ID NO: 5486 - protein, 424 aa, unidentified
  source 1..424: note = Related to JAESRD010000022.1; note = Rhodobacteraceae bacterium
MAASLSATQWQAHALERVFRSRLPTPLAQYAAEFSAGLIAALPSAYAPEPAAVAAVLVHLTSFEQVTAWAVKNGHWPVPDLRETQFLPIAAFADLSVPKLATMAQLGDWLGLSQERLAYLADTQARHEEHGETAINHYHYVLQRKKGPGLRLIEAPKQRLKAAQHQILRQMLDPLPVHDDAYGFVRGRSCQAHAARHAGTQMVVSFDMRQFFPSISAGRVFGLFRCLGYPSAVAHHLTGLCTSATPPRILQRLPYADRVVYRAAHLPQGAPSSPALAYHVAFRLDRRLSALADSLDATYGRYADDLSFSGDRRITEPLMRLVPQILREEGFCLNPSKTRAMPQTARQSVTGIVVNQHLNIARGQYDRLKAVVHACGKPDDSRLADPVFRGRLEGQIGWVASLNRARGAKLQALFNTALDGALGG

SEQ ID NO: 5487 - protein, 455 aa, unidentified
  source 1..455: note = Related to VICH01000004.1; note = Aliiroseovarius halocynthiae
MSCTLRLTMERHERHMNDQHLALLLATRLTGPWSVQDITQSLCRHLPAPLHTQAEAISQKLLRIHPGPYAPPIKQIARTLRNADEFPRIKAHCVRYNVWPAANLTPPQMMPIGALASLDLPQIPTLEDLADWLLIPTDQLNYLADPQKRHEAHNEMAVNHYHYHIHPKSNGASRLIEAPKQRLKAAQAQILRGILAHVPDHDEAFGFTKGRNCMSGATRHVGEQVVVGFDVKNFFPSIGAGRIFGLFRCLGYPESVARFLTAICTNVTPSRILNRLQAPERQQFRHPHLPQGAPTSPALSNKVAFTLDRRLSGLATRLGANYSRYADDISFSGDVGITHPLLQQVPRILRNEGFAPNPAKTRVMPRGGRQSVTGIVVNQHLNISREKFDHLKAVIHACRLPTDLRLDDLAFRMKLEGQITWIECINPVRGCKLRRLLKKSLKARIAETTKTGRAL

SEQ ID NO: 5488 - protein, 443 aa, unidentified
  source 1..443: note = Related to JABDJG010000107.1; note = Hyphomicrobiales bacterium
MDKRDLASNIAISLTNGTWSKDQVTAQLMRRFPKSLHRFSNQLSAELLAACPTIYAPSANAVQNVLQMSAIFERIFRYCQRRNIWPNPVLVEPIMAPTATFSELEIPQLPTVEALADWLLVPIDRIDYLADPIGRHENHEVAAVNHYHYLLHPKKSGGLRLIEAPKHALKSIQRQILRGILDKVPTHDDAFGFVRGRCCVGAAARHAGEQVVVNFDLKDFFPSVGTGRVFGLFRCLGYPNTVAGLLTGLCTTRTPHRLLKRLNPADRAQYRERHLPQGAPTSPALANHVAFALDRRLAGLARSIGANYSRYADDLSFSGDLQISATLLGIVPQIVHEEGLSLNPHKTHIMSAGSRQLVTNIVVNRHVNVTREKFDKIKATIHACAKPDDERLSDPVFRAKLLGQIGWVETVNPKRGLKLRKRAIEAIRKATIRSPSRNTSTQI

SEQ ID NO: 5489 - protein, 432 aa, unidentified
  source 1..432: note = Related to JAGRLY010000042.1; note = Alphaproteobacteria bacterium
MDSKSLARNLAQSLAMGPWSRQFIRATLVRRLPRQLHRMIAGLSEELIKSLPCAYAPSVKTVAGALGRSDRFEKILRHCIRHDVWPDPDLSSPAMAPVAAFATLDLPQLATLDALAEWLFLPPDRLEYLADKDSRYEEHRDAAVHHYHYIEKVKASGGVRIIEAPKPHLKAAQRRILRGILDKVPVHADAFGFVSGRNCLNGANRHVGEDVVVCFDLRNFFPSIGLARIFGLFRCIGYPHEVARLLTGLCVTTTPMHVANTLTTVDRQTYRRPHLPQGSPASPALANLAAFPLDRRLSGLAKSLDTNYSRYADDLSFSGDRESVGALLRAVPGIVADEGFELNQTKTRIMSATSRQMVTGIVVNDHLNIDRREFDRLKAIIHACGRPGDTRLADPVFRSALLGKIAWVEAVNSQRGQKLLTLLSLSITSRHA

SEQ ID NO: 5490 - protein, 314 aa, unidentified
  source 1..314: note = Related to JABDRA010000277.1; note = Anderseniella sp.
MSPVAVFAALDIPQLATLDALSDWLLLPIERLDYLADLHSRYENHGDTQVNHYHYVLHRKKSGGMRVIEAPKATLKTVQRQILHGILDKVPAHPDAFGFAKGRNCLDAANRHAGEQVVICFDLKDFFPSIGAGRIFGLFRCLGYPHQVASCLAALCTSVTPSRVVEHMSGPDRDTYRKPHLPQGSPASPGLANLAVFTLDKRLSALAKSVDANYSRYADDLSFSGDSHVAGILLRAVPQIIEDEGFQPNSAKTRIMSKTSRQVVTGVVVNHHLNVTRKAFDQLKAIIHACGKAGDLRLNDPVFRTSLLGKIGWV

SEQ ID NO: 5491 - protein, 319 aa, unidentified
  source 1..319: note = Related to JABURO010000157.1; note = Rhodobacteraceae bacterium
MDRGALAVNLAQGLCSGGWSAPEVGAILARRLPGAARRLAPRIASELVTAAPGPYAPTARITRAVLQRCESFERLYRWCNRNDIWPAPDLSRPSMAPVAAFARLDLPGLATQKALADWLLLPPERLDYLSDPASRHERHGDFAVNHYAYVLHRKTHGGLRLVEAPKPTLKSLQRQILRGILNRVPPHDDAFGFVRGRNCRGAARRHAGEQVVICFDLKDFFPSIGAGRVFGLFRCLGYPQPVARHLTGLCTNTSPSRITDRLPPPDRPMYRRPHLPQGAPCSPAMANLAAFGLDRSLSGLARSLGAGFSRYADDLAFSG

SEQ ID NO: 5492 - protein, 434 aa, unidentified
  source 1..434: note = Related to NZ_JAEHHL010000001.1; note = Proposed Thermohalobaculum xanthum
MKPRALAYRLAVSATQGAWSLPEVQAVLARRLPPAHRHLAKDIAAAMLSCGEGSDLTPPPQVVARALPGTPAFENLYLHCRNTNVWPAPETEPPVMRPLPPFDGLDLPQLPTEGELAAWLMLSPERLAQFADLAGRAEASPETAINHYFYRVVPKRAGGVRLIEAPKPALKGLQRQVLRGILDPVPVHRDAFGFVRGRGVTAGAARHAGEAVVLRFDLADFFHSVGRGRVFGIFRAMGYPHNAARCLAGLTTTAAPPWIMERLGAGDRPYLRIPHLPQGAPTSPALANLSAFGLDRRLAGLARRLGAAWSRYADDICFSGDPDIVAPLMAAVPGIVAEEGFRLNAAKTRVMRAQARQCVTGLVVNRHLNLPREEFDRLKAIIHRAASPGDARLADPRFRAALAGRIAWAEAVNPARGAKLRARLEAALAQKVAL

SEQ ID NO: 5493 - protein, 424 aa, unidentified
  source 1..424: note = Related to NZ_FOIZ01000001.1; note = Cognatiyoonia koreensis
MTPQSPKRLAQNLAESLSLSVWDKRGIADCLCRRFPPALQRFTQLQTQGLLDHFPTQIAPGRTAVASALAQSSVFARIHRYCVLNSVWPAPDLRAPKMQPLQAFAHLEIPQLATLGDLADWMLLTPQQLDYYADQTGRHEEHGDMAVNHYHYHLSPKIGGGHRLIEAPKPRLKSLQRLILRAILDHILPHPNAYGFVQGRNCIEAAARHVGEKAVVAHDLRDFFSSIQGGRIYGIFRALGYPPNVAHALTGLCTVTTPARIRNRMGFHQRQALRVAHLPQGAPTSPALGNLAAHGLDRRLTGLARSLGATYTRYADDLTFSGDEHIIRAICVAVPDIVSEEGFALNPAKTRLMPSHRRQVVTGIVVNNATNVDRREFDQIKAAIHARAWQTDPALQARLSGQIAWVRQLNPARGAKLERLMARA

SEQ ID NO: 5494 - protein, 386 aa, unidentified
  source 1..386: note = Related to NZ_BLJE01000002.1; note = Litoreibacter roseus
MIVEFPQRYAPDANRIAEMLSKQLVVRRLFKHCNKADVWPSLPLEPPRMLPVAPFDALVLPTLHTAIDLADWLLLTPEQLDAFVDRNGWRETHPMPGVNNYFYRMSPKSSGGLRLIEAPKPRLKSLQRLINHRILAKVPTHPDSFGFVRGRNCIGAAQRHAGEEVVIGLDLKNYFSSLRYGRVYAFFRHLGYPVSVAHGLSGICTIVTPSRIRQRMPYEQRQTLMEPHLPQGAPSSPALANLLTYRLDRRLAGLARSLGANYTRYADDLTFSGDSGVRDAVLTTVPEIVEEEGFRIRTGKTRIMPCYRRQMVLGIVVNETINISRKEFDRLKAIIHQKAWKNDPAEFEKILGQIGWVEQVNPSKAQKLYAKLELANAREHVQGSST

SEQ ID NO: 5495 - protein, 436 aa, unidentified
  source 1..436: note = Related to JACXGQ010000004.1; note = Yoonia sp.
MHPDQRNSLKIFARLVAPSLAKGRWAVSDVTGALKRRLPAQFQREAQLIAEDLVAFLPAMTAPNAGAISKALCACDAFVRLHGECLRRGLWPDPDLNSGKMLPLFPFARLDLPNIPTFAALADWLVIDGGRLMYMADIANRHNEHPDAPVHHYLYGLRPKPTGGYRVIEAPKSGLKALQRQILRGILDKVPVHSDAFGFVRGKSCAQAANRHCGAQTVVGFDLRDFFPNLAAARVFGLFRRLGYPDAVARTLTGLCTTTTPQRVRARLPHLQGQLMRTPHLPQGAPSSPALANLIAFTLDRRLAGLARALDAQYSRYADDLTFSGDAGIAPVLTRAVPHILQEEGFVLNPRKTRVRNAAQRQVVTGIVVNQHINVPRARYDLIKAKINALRHTDDLGRLGHAHCLSLEGQIDWVCTLNPSRGQKLRQLYARAINGG

SEQ ID NO: 5496 - protein, 411 aa, unidentified
  source 1..411: note = Related to NZ_PKFN01000009.1; note = Yoonia maritima
MPELTGALQRRLPPQFHREAQLIAADLIPLLPVMVAPTDGAITKGLLNCGAFARLHRECLRLGIWPAADLQSDQMRPYAPFAQLDLPDLRTEANLADWLMLDYSRVAYFTDISNRQNDHPDAPVHHYLYGLRRKSSGGLRVIEAPKSNLKSIQRRILHGILDQVPVHTDAFGFVRGRSCVQGAARHCGEECVVRFDLRDFFPSIQSKRVLGLFRRLGYPRWVAQSLTGLCTTATPGRVLVGLPPQQRQQMRVPHLPQGAATSPALANLIAFTLDRRLSGLARSVGAGYSRYADDLTFSGDIGITGVLEDAIPQIIADEGFVINPNKTRVTHRSERQTVTGIVVNQHLNISRKQYDQIKAIIHALRRPDDPRRLDQAFCLSLEGKIDWVCAVNPHRGNKLRRLYQVTIEDFG

SEQ ID NO: 5497 - protein, 433 aa, unidentified
  source 1..433: note = Related to NZ_JADCKQ010000007.1; note = Paenihalocynthiibacter styelae
MNRTQFASSLAPSLLAPRWSETELSQCLLQRLPGQQKALSARLTAELLQTFPGPVAPPERQLVAGLRGRPTFERLYRHCAKQAIWPAPVLTQTRMQPASGLGRPEVPHLDTPGDFADWLPLPEDRLNYLADVDGRYACHAYRTIRHYHAVAEAKKSGGHRLIEAPKSQLKAVQRQILQGILRQIPVHEAAYGFAPGKGCADAARLHCGRDEVVCFDLADFFPSVSFAWVFGVFRHLGYPEAVTRLLAGLCTTETAPDVLVQFPFAMRQLYRIPHLPQGAPTSPALADILLFNLDCRLNALATKLGASYTRYVDDLTFSGPAGLGRGLLKLVPEIIRDEGFRSNPGKVRVMPSGGRQVVTGIVVNAHLNMRRAEFDQLKAEIHACGRPGDLRLSDPHYRARLIGRIQWLRHLNPIRGEKLLTLLGRAEAQKITA

SEQ ID NO: 5498 - protein, 437 aa, unidentified
  source 1..437: note = Related to FWXB01000002.1; note = Roseovarius aestuarii
MARYTKQDLLFGPLSQGLSQLEWTFWDIRHHLEQRLPSRLRSVSHRLARELKQTFPATAAPDDRQILLYLKQSPATDPLFRHFTLTGAIPDPLIDPPQFRPVPALDGLGLPVLTTSDDLAAWLALPPLQLTRFADLLGLSANADSAFAPHYRHHLIAKRNGTLRLIEEPRPFLKKLQRRILRDMIAHIPTHPAAFGFCRGKNCAQAAARHAGEEMVVSFDLSGFFPSIHHHRIYGLFRSFGYPAAVARHLAGLTTALTPRDVLATAHLADRDHLTGRHLPQGAPTSPALANLAAFTLDTRLAGLARSLGANYTRYADDLTFSGDAPIANPLQRMVPQIVRDCGFVLNAAKTRIQPAHRRQTVTGLVVNRHLNLPRADYDHLKAVIHHLRDPVDPRRADRIFIDQLAGRIAWFEQVNPTKGAKLREWLANALQTGTIG

SEQ ID NO: 5499 - protein, 441 aa, unidentified
  source 1..441: note = Related to DQCI01000287.1; note = Rhodobacteraceae bacterium
MSGRSVSDRVFGPLAASLVRQAWTALTLRQHLQARLPQALSAEAPGLARDLKAAFPGTAAPDRKRVALWLSMCPLAGDLVTIARASGAPIPPPLDPDRFQPPPAFAGLDLPPLGTLADLADWLALTLPQLSRFSDLHGISAAQDNPFAPHYHHHLLEKRDGTQRLLEEPKPVLKHLQRRVLRQILARIPPHPAAFGFCAGRSCLQAAQRHAGEALVVCFDLKAFFPSIGWHRVYGLFRAFGYPPAVARHLAGLCTAITPPRVLAAPRLAARDLLTNRHLPQGAPTSPALANLTAYALDARLAGLARSLGLTYTRYADDLTFSGDTRPAAALHRAVADIVRDCGFTLNRDKTRVQPRHRRQVVTGVVVNRHLNLPRADYDRLKAVIHHLRNPDDPRRADRVFLDRLAGRIAWLEQINPAKGAKLRDRLAAALATTRATRHHG

SEQ ID NO: 5500 - protein, 433 aa, unidentified
  source 1..433: note = Related to NZ_NSBT01000024.1; note = Actibacterium ureilyticum
MSVLVDPVFAALASGLVHVDWTADQIAAHLRRRLPRRFQSRAGDIARHLHDRFPGAASPDEERIAAALSDGPAARALVRFSDKTGELPAYIWTPARFQPIPAFATCGLPALTTPEELADWLGLTTAQLTRFADLKGLSAQTDNAFAPHYRHHLRPKRDGTLRLIEEPKPLLKTLQRRILRGILARVPPHDAAFGFRAGRNCTMAAARHAGEGGVVRFDLAAFFPSIAQHRVYGLFRGFGYPAPVARHLTGLCTAHTPARVLTTPGLAAAGHLSSRHLPQGAPTSPALANLVAFTLDTRLAGLARRLDATYTRYADDLCFSGDARIAPVLRAALPGIVADCGFHLNPAKTRVQPAHHRQTVTGIVVNQHLNLSRRDYDRLKAQIHHLSDPADPRRGDRAFLTRLEGRIAWLEQLNPHKGAKLRARLAAALSPGP

SEQ ID NO: 5501 - protein, 438 aa, unidentified
  source 1..438: note = Related to NZ_BMYJ01000004.1; note = Gemmobacter tilapiae
MLSLHVLLPLAHRLANQPWDQPLLAACLRSYLPPPLNRQANRLANRLIKDFPGTTAPDAQQIAKALGQTTTAARLATLARQQTRPPSPDLNPPHFRPNPALHIPAIPVMETIPDLAFWLGLTEDQLTRFADLRGLSARSHPEFGSHYRQHLIPKSDGTLRLIEEPRPFLKRLQRRILTGLLNHVPPHPAAHGFRPGHSVLTAARAHAGEQIVLRFDLRHFFASITIARVYGLFRTMGYPATIARPLAGLTTAITPTEVHKTPHLAGAELFAARHLPQGAPTSPALANLAAWFLDLRLAGLARSVNAQYTRYADDLTFSGDRRIAPVLLDALPHIITETGFRLNLSKTRIMPAHQRQTVTGLTVNRHLNLPRDQYDRLKATIHHLTCPDDPRRQDPAFLAQLSGRITWAEQANPHRGAKLREALAAALERLPPPPISPI

SEQ ID NO: 5502 - protein, 441 aa, unidentified
  source 1..441: note = Related to NKIU01000001.1; note = Pseudorhodobacter sp.
MTRPLRPPFPDRAALAPLAASLAQQDWTEAALVLHLRQRLPGDQPARAARLARSLLQSFPARSAPDAAQILRHLQQSPQGRAVLAHARRYQLLPAHSLTPPAHRPIPPLHHLALPPLATEAELADWLAITPDQLTRFADLRGLSARTDSPWAPHYHHHLIAKSNGQLRLIEEPKPFLKRLQRRILAGLLNHIPPHPAAYGFVPGRNCIQAAARHAGEQIVLCFDLAQFFPSITDRRIYALFRALGYPAHCARSLAGLTTALTPAHVLHTANLAARDQLSNRHLPQGAPTSPALANLSALQLDRRLAGLAHSLGASYTRYADDLTFSGDARIAPILQRAVPQIVAEQGFRLNPAKTRAQPAHHRQTVTGITVNETLNPARGSYDLLKATIHHLSRPTDPRRHDRAFLANLHGRIAWVAQINPAKGAKLHDRLHAALLTPQDS

SEQ ID NO: 5503 - protein, 395 aa, unidentified
  source 1..395: note = Related to JADJTJ010000002.1; note = Rhodobacter sp.
MPASFVRAPETLAEALIRAFPGPVAPDPALILGLLAHQPEIARLLSHARRHDVAPAVWLQPPPFRPAPALADLPLPRLATCDALADWLALPPDRLTLYADLRGLSARTDSPFAPHYHHHLLPKADGSLRLLEEPKPILKRQQRQVLHGLLSRVPPHDAAFGFCPGRNCIGAAARHAGEAVVLGFDLVDFFPSIGIQRVYAVYRTLGYPRAVAWALAGLCTALTPPKILATPALAAREALSTRHLPQGAPTSPALANLCAHALDRRLAGLARSLGASYTRYADDLAFSGDTRIAPILRTAVPRIVAEEGFRLNPAKTRQMPAHHRQCVTGLVVNAGVNTPRAAFDQLKATLHRLARAGDPRRTDPGFLARLSGQIAWVEQVNPARGARLRTRFDAL

SEQ ID NO: 5504 - protein, 445 aa, unidentified
  source 1..445: note = Related to NZ_WCHR01000012.1; note = Gemmobacter serpentinus
MPPAFNRPVVSLAVLGPIASSLVQAEWKEASLKQVLLQRLPVRMRNQAGRVAGRLIQAFPGGSAPDVGRLRRMLQDLSISARLRDHARRTDSLPAPVLDPPRFRPVSALDRLDLPKLATPGDLADFLAITPEQLIRFADLRGLSAHSTDPFGPHYLCHLRPKRNGGHRLIEAPRPFLKTLQRRILRGILDHVPPHHAAFGFRRGRNCVQAAARHAGERVVLGFDLTDFFPGLDVARVYGLFRSLGYPAATARDLAGLCSALTPRRYLLGHDPTLTGRLHARHLPQGAPTSPALANLLAFRLDCRLAALARSLDAQYSRYADDLSFSGDARIAPILLRAVPEICAEEGFRPNHRKTRVMPSHQQQKVTGILVNHHTNLPRVEYDRLKAILHRLQQPDDPRRQDMAFLGHLSGRIAWLAQLNPHRAARLSQSLQLVSASARTVPPAR

SEQ ID NO: 5505 - protein, 440 aa, unidentified
  source 1..440: note = Related to NZ_VKKX01000051.1; note = Gemmobacter caeruleus
MAPLHPDDPPPLPPVAAVFGPLAASLSQSPWQEDALHRLLLTRLPGPLRAQARRIAQGLIGAFPGSVAPDAARLCKVLRDLPGARGLRAHAARTGLRPAPELTPPTFLPAPGLAGLALPVLTSPADVADFLAISPDQLIRFADLRGLSARSPDPFGPHYLCQLRPKRRGGWRLIEAPRPFLKTLQRRVLSSLLAHVPPHPAAYGFRRGRNCIMAAARHAGEPLVAGFDIADFFPRLTVARVYGLFRALGYPAAVARDLAGLCTAITPAATLAALPARDAPIWRTRHLPQGAPTSPALANLLAWRLDCRLAGLARILGATYTRYADDLTFSGPARIGPILRDAVPAILRGEGFAPNLAKTRLMTAQGAQIVTGVMVNRHVNLPRAEFDRLKAVLHHLARPDDPRRQDAGFLAALSGRIGWVEQINPARGAKLRARLVALTG

SEQ ID NO: 5506 - protein, 401 aa, unidentified
  source 1..401: note = Related to CP059262.1; note = Exiguobacterium profundum
MPTSLRRLASPLAAELRAAFPGLSAPDAARLLAHLLASPLGQRIADHAARTGTRPASVLDPPAFQPLPALADLPLPRLSSPGDLAEFLALSPDQLIRXADLRGLSARSPTPFGGHYRIHLMPKPANGLRLIEEPKPFLKKLQRRLLHGLLDAVPPHAAAHGFRXGRSCIGAAAAHXSEAMVACFDLADFFPTFGFARVYGLFRSLGYPAAVARDLAXLCTALTXPDILRGTPGLAAGRXTNRHLPQGAXTSPVLANLMAFALDSRXRGLARSLGARYTRYADDLTFSGDARIAPILARAVPEIVAEEGFRLNPSKTRLQPAAHRQVVTGLTVNTRVNIPRSEYDQLKAILHHLANPADPRRADPAFLSSLQGRIGWVEQVNPHRGARLRHALATLALDGAR

SEQ ID NO: 5507 - protein, 427 aa, unidentified
  source 1..427: note = Related to NZ_WQIE01000002.1; note = Ruegeria sp.
MHLQQAIRSLAASLSQAQWTYFDTKLILQQRLPPRLRNLAPSLARRLVSALPQPYAPSARTIAQTLASFPETGQIARYTEPRKLVAPFPIAPQKFAPIDIFRSLNLPDLSSCDELAEWLAIPPIQLVRFADLNGLSNRTKNAFAPHYRFHIIPKRDGTSRLIEEPKPALKRLQRRILRSILNQVPTSPHAFGFVQDRTCIQAAARHCGEPVVVSFDLKNYFTSITYPRIFGVFRCLGYPADVARHLTGLVTLVIPAHVRAQLGRIGHHDLRRRHLPQGAPTSPALANLCSYNLDRRLAGLAQSLDATYTRYADDLTFSGETHIARTLCSVVPDIIRDERFTTNPDKTRVMPSHTSQVVTGIVVNHHVNITRKDFDRLKARIHRLRSQGKDDLETLQHLDGQIAWVEQVNPLKGAKLRQRFEHALSLT

SEQ ID NO: 5508 - protein, 395 aa, unidentified
  source 1..395: note = Related to NZ_RYZK01000009.1; note = Shimia sediminis
MAFASHLASEILLWYPKTYSPCQSDLATTLSRLPEIADVWNYARQKNVWPRSRIDTPEFLPAPALEGLDIPHLATCADLADWLLISQDQLTRFADLKSLSASTDNAFAPHYRYHTISKASGQARLIEEPKPFLKTLQKRILKGILNHVPTSEISFGFTRGRDCLQAASKHCGEDVVVTFDLRSFFPSVRQSRVIGLFRCLGYPDAVARHLAGLTTVITPAFVLKRLRLENDRFLPNRHLPQGASTSPAIANLSAYALDRRLMGLARRLDAQVTRYADDITFSGPREITTPLKHAVPEIIADSGFVVNPQKTHIMPRTQCQVTTGLVVNDHINILRRDYDNLRAELHHLLTLDDPRRRDASYLFALDGRITWVERVHPVRGQKLRESFNQVLLRGN

SEQ ID NO: 5509 - protein, 429 aa, unidentified
  source 1..429: note = Related to NZ_JABUFE010000011.1; note = Sulfitobacter algicola
MNRANLAQSLAGSLVCCDWTLWAVEHHLTSRLPSGWSKTASNLASELIAAFPAPYVPSQAALVQRLISSDYLTRILDHAMKHDLRFSPILDSARFAPIPAFEGLDIPQMTTLSDLADYLALNTDQLVRFTDLMGLSNGTDNVFAPHYRFHLIAKRNGRQRLIEEPKPVLKSLQRRVFQTILNKVPVHDEAYGFVPGRSCRDAAARHTGEQVVIGFDLRNFFPSVSYGRIYGLFRALGYPDGVAHHLCGLCTIRTPPHIRARMSYDDGRGLEARHLPQGAPTSPALANLVCHRLDCRLSGLAHSLDARFTRYADDLTFSGDRRMANAILKVVPQIVTSEGFALNPTKTRCQGQHGRQVTTGIVVNSHINLPRETYDYLKAVLHHLIQPKDPRRGDPAFLKSLSGQIGWVEQINPGKGAKLREKFDQIIQH

SEQ ID NO: 5510 - protein, 443 aa, unidentified
  source 1..443: note = Related to NZ_JAKJIC010000019.1; note = Pleomorphomonas sp.
MQEERTPPIGRTALASALVHALSTTAAWTETALVDTFTHVLQGAAPGSVASLARLLAADASVACGPERRLGQIIEDAPSFVRILQTVQRRRLVLAPPLTPPLFRPASRFAGLPLPCLATSGELAAWLGLTPTELDWFAATLPQRGETQPPLQHYSLRAVAKASGRLRLIEAPKTRLKAIQRQILAGILAHVPAHPAAHGFIAGRSVLTAVNPHAGEGLVVAVDLADFFPSTPIGRVWRLFRHLGYPDAVAHLLTGLVTTRTPSPALDGLLLPPETRRRLRVRHLPQGAPTSPALANLAAYGLDVRLSSLASRLDASYSRYADDLVFSGSGPQLRQSQRFLRLVSEIAAAEGYALHPDKTRIMPSSGRQQVLGVTVNAHLNLPRPSYDLLKAILTNACRHGLASQNREGLPHFRDHLNGRIAWFEQVNPARGLKLRALFDRIAE

SEQ ID NO: 5511 - protein, 440 aa, unidentified
  source 1..440: note = Related to JAIENJ010000270.1; note = Parvularculaceae bacterium
MTARAAQYLGKRAPRSLQRLIEHVIASARTPYPPSSEHVARALLNSTYFDAAARAVLQADSPPKAVLHSPAFAPARAFAGLPIPRIETAGELAAWFKLSVDELDWLADTRRGHGRASQAQLQHYSYALAAKRVGAPRLIESPKPRLKAAQRRILHEILDHAPSHSNAHGFVRGRSCISGAQIHAGEPVVLRLDLQRFFTGIRASRVHGLFRALGYPSETARLLTGLCTTCTPQIATAAIEDWRIRQEYGAPHLPQGAPTSPSLANLCAWRLDQRLGGLARRLAINYSRYADDLCFSGDRALAARAPSFVSLVETIASEEGFVVNSDKTKVMRASSSQRVTGVVVNQHVNAQRHDYDALKATLHNCRTSGDPETQNRKGLPDFRAHLEGRINWVEQLNPHRGMKLRLMFDAIHWPAGARDAGDRRADASRRPPLPFAGEAD

SEQ ID NO: 5512 - protein, 442 aa, unidentified
  source 1..442: note = Related to JAEUMS010000015.1; note = Hyphomonadaceae bacterium
MADRALIARELAAFLLAGAWTKGRLLARTRQYIGNSAPKALQRLIEHVFALVETPYPPAPDELARMLMASRDFDVAARRMLRADRPLQLALHSPKFAPCRSLAGLPVPKLETPGDLAAWLGLPMELVDWLADTRRGHAHAATTQLQHYSYTFVPKRIGAPRLIEAPKARLKAVQRRILHEILDHLPPHSSAHGFVRGRSCISGAQLHVGEYIVVRLDLRRFFSSIGSARVHGLFRSIGYPWAAARLLTGLCTTCTPAKTLAALTDWRERQEYTAPHLPQGAPTSPTLANLCAWRLDNRLTGLGRRLGINYSRYADDLCFSGGRAFAKHMPRFLSLVGTIVGEEGFALNGRKTSLLRANAAQRVTGIVVNQHVNVAREQYDALKSILHNCRVSSDPTTQNRDSHPDFKAHLDGRIGWVEQVNPHRGRKLRLMFDQIKWASARA

SEQ ID NO: 5513 - protein, 438 aa, unidentified
  source 1..438: note = Related to JAEUMQ010000004.1; note = Hyphomonadaceae bacterium
MASSTTIAKGLAAALVAGVWTERALLARCEGFLGAATRASQKKLISALLVRAYDRYPHSPASLVRWLLRSPAFERAAAPLLRAGPKPPVVLKPPLFWPAPPLAGLDVPKLATPRDLADWLEISVEQLDWFACAKRQAIALSFPKLRHYECALVRKRSGGSRLIEAPRRRLKAIQRRLLREVLDHVPTSDRAYGFVRGRSCIDGAQVHAAEEVVVTLDLQRFFQSIAARRVHATFRGIGYPWAVARLLTGLCTTRAPSWGFADVPYTEFDWRARKMLEAPHLPQGAPTSPTLANLAAWRLDRRLAGLARRLDANYTRYADDLAFSGRRNIASPTFLRAVGEIVVDEGFVLNRPKTHIMRRGARQEVTGIVVNEHVNLPRDAYDALKATLHNCIRNGAAVENRDGHTDFRAHLDGRIGWAETVNPHRGARLRAMFERITW

SEQ ID NO: 5514 - protein, 433 aa, unidentified
  source 1..433: note = Related to NZ_LMUJ01000042.1; note = Acidisphaera sp.
MPTRHWAANNLAARLLAGPWTQEAIAIVIDAVLGPVDLRARADLITDVAALAEATYPPTPQALTTYLVRSRSFKPHPERPIPAVLAPPRFAPTPPFAGLPIPALATQGDLAAWLGQSPEQLDWLADERRRHSRVTRPPLRHYHYTFASKRTGAPRLIEAPKPRLKAIQRRILREILSPVPTHPRIHGFVAGRSCLTGAQIHAGEAIVATFDLTQFFPSIGLPRIHGLFRSLGYPWAVARRLTGLCTTTTPSGVFPDPQHPDHALYRVPHLPQGAPTSPALANLLAWTLDRRLDGLARSAEANYTRYADDLAFSGDEAFVARIDRFRRTVETILEEEGFALNTAKTRIMPRSTRQRVTGIVVNEHCNIGRAEFDTLKAILHNCTRTGPAAQNREAIPDFRTHLDGRIAWVEQVNFPRGLKLRRLFDQIDWTPPP

SEQ ID NO: 5515 - protein, 418 aa, unidentified
  source 1..418: note = Related to JADLHI010000158.1; note = Hyphomonadaceae bacterium
MEARAAAYLGKSTKRWQKRLIAEIVSANGAGYPPSPAALADRLLASSHFDRAVAIVLRQKTPPPMVLDPPAFAPAPAFAAMHPPRIETIGDLATWLEIPIARLDWLADEKRQHSRANLPILQHYHYRFVPKSSGAPRLIEAPKAQLKALQRRILVEILDLAPVHPRAHGFVRGRSCLTGAQVHAGEQLVVCADLRDFFPSIRAARIHGLFRSFGYPTAVARALTGLCTTSTPRSIFQRIDEGQQFDWFTRRRYSAPHLPQGAPTSPALANLCAWRFDQRCDGLARALGGSYTRYADDLTFSGDAAFAARTSRLIAALGKIIGEEGFAINESKTRLMRRARPQRVTGIVVNDHVNVPRRGYDELKALLHNCCKHGPASQNRDRRTDFRAHLDGRVGWVEQVNPNRGAKLRTAFDAISWS

SEQ ID NO: 5516 - protein, 443 aa, unidentified
  source 1..443: note = Related to JADFVY010000399.1; note = Proteobacteria bacterium
MSFENWTAWHLAEILIATDWTPQAMEDAARKALGGNRQRKWLPRLIADIMGSSPTAYAPSPRTVAGLILDSRAFRGLRLNDRERPLFDRYFLPAPIFSPTPAFRDLAVPELANALDSARWLNLSPRHLDWFADIEGYRSSAAAESTRHYVQAWIPKRTGPPRLIEAPKQILKDLQRKILREILDPVAVHDSAHGFRRGRSCITAAQLHAGEDMVITMDLKDFFPSVPIRSVHGIFRSLGYPWAVARLLTGLCSTTAPASLFDNPPGDSGHDEETRRLFHQRHLPQGAPTSPALANLCARRLDGRLNGLAHCMEARYTRYGDDLAFSGDRDFAARSGAFLRMASAICAAEGFAVNHRKTRIMRQGDCQRITGLTVNSHINVPRGAYDRLKAILHNCTRHGPANQNRENHPDFRAHLDGRITWVENVNPPRGLRLRLMFMAVEWG

SEQ ID NO: 5517 - protein, 400 aa, unidentified
  source 1..400: note = Related to JAEUME010000009.1; note = Hyphomicrobium sp.
MLRRLAAFADHSGQPPSPDWLTDFFLAAPEFAGAVARILKEPQILHCVLKPAKFAPAKKFAGLNVPKINSSGDLAAWLGLSNEHLEWLSDTRRQHSRTAIPVLQNYQYTFVLKKHGPPRLIEEPKPRLKTIQRRILREILDRVPVHACAHGFVAKRSCVTSAQAHCGEFIVLAADLKDYFASIPAARIQGIFRAIGYPSSVARLLTGLCTSGTPTSVFASRSGGRMCDWQTRKLYEQPHLPQGAPTSPALANLVSFSLDRRISGLAARFGAKYTRYADDLAFSGDEIFDRRVDTFLEHVAMIAVDEGFMLNAAKTRIMRRSQSQRIIGVTVNDHINLPRGTFDELKAILHNCRKFGPNTQNLLGVANFEEHLRGRIAWAASLNPARGAKLHAMFNLIRWT

SEQ ID NO: 5518 - protein, 441 aa, unidentified
  source 1..441: note = Related to JACMJQ010000424.1; note = Chitinophagales bacterium
MNTPPWIARNLAASFLGSAWNKNDLRLAATKTLGLATRAAQRALINRLFDAHNAPTPPSEDWLTSYFLMSEWFEIASLRAREHPRGVNAVLTPPRFAPSQRFADFGAPKLTAPGELAKWLAVSIEYLDWFADRKRMQAKTDIPLLQHYSYKFAPKKSGPPRLIESPKPQLKAMHRLILREMLNCAPVHECAQGFVRRRSCLTAAKIHAGEHVLITADLKDFFLNTRLSRVHGVFRNLGYAQPVARLLTALCSTSTPQSLFARLPVSQRHDWETRKRFEAPHLPQGAPTSPALANLCAWRLDCRLFGLAKSFGANYTRYADDMAFSGDKAFADRVAGFVAALETIAADEGFALNRRKTRVMRGHTSQRVTGVVVNEHVNIARKDYDRLKAILHNCRRNGPEAENRAQIRTFRAHLDGRVNWVETVNPNRGTKLRRIFNEISW

SEQ ID NO: 5519 - protein, 376 aa, unidentified
  source 1..376: note = Related to JABFRX010000116.1; note = Alphaproteobacteria bacterium
MKKDDPAKALAAALLAGEWSRSALEKRAITALGARSKRRASRIVDDIWTNHKAPYVPHRNELRRLIYASNAFAGLGETAITRLNELKPKEQPPRFAPLPRFQNANLPPLATAGDLAQWLGLSPSQLDWFADERRTLARASDTLQHYSQTWLPKRSSGWRLIEAPKPRLKDIQRRILRGILDPIPTHDAAFGFVPGRSCTTAAAKHAGEGVVVTLDLRDFFVSVPAHRVHALFRCLGYLWSVARLLTGLCTAATPHATLASDQLDHETRQRLRARHLPQGAPTSPTLANFAARRLDARLDGLARRFEARYTRYADDLTFSGDERFHTSVPRFLIAVAQIARDEGFALNAAKTRIMPRHTRQTVTGIVVNDHINVARP

SEQ ID NO: 5520 - protein, 441 aa, unidentified
  source 1..441: note = Related to JAIOQG010000119.1; note = Alphaproteobacteria bacterium
MKSNRHLVPILAFMLLDGPWTPMALKRRAVRILGRRSRTRAIELVEEILASIKTPYAPQFKQLERAIVSCSSLHKIGEATADRLGKLSVTVPPPRFAPLAPFRGAGLPGFTTTAALAHWLAVPLGQIEWLADSKHTLSHATSDVLHHYACHWIPKQTGSWRLIESPKPRLKAIQRRILHDILDHMPVHDSAFAFIKGRSCATAAARHAGEDVVITVDLKDFFLTTPPRRIHAIFRCLGYPTSVTRVLTGICTTATPAAVLETNADIAARNHETRKRYASPHLPQGAPTSPTLANLAARGLDCRLTGLASRFNARYTRYADDLTFSGDKALLARSNRFIRAIQEIVQDEGFALNASKTRIMPRSTRQSVTGLVVNQHINIARPDYDNLKATLTNCARHGAPSQNREGHADFRAHMDGRVAWVENVNRRRGEKLRRIFEKISW

SEQ ID NO: 5521 - protein, 436 aa, unidentified
  source 1..436: note = Related to JAEUML010000192.1; note = Alphaproteobacteria bacterium
MSRRTDHFPVLALALLQGRWTRNALRKRARDLLGPRSKTRANRLVDEILAVHRLPYTPGWRTLTKIVAGASALHGLSDATIERVASTPGRQHPPRFEPIAPLQPASAPTLATTADLATWLEIPIDHLDWFADERRTLDREQDKALSHYAYHWRLKRSGAWRLIEAPKPRMMAVQRRILKDILNRLAPHEAAHGFVAGRSCVTAAAKHAGEHVVVTVDLRDFFLSAPVGRVHAIFRCLGYPHAVARALTGLCSTSTPRHVAAEHFDHEAQRRHATRHLPQGAPTSPALSNLAALGLDRRLAGLANRFGARYTRYADDLTFSGDSPFCARVPGLLKAVADIARDEGFALNAAKTRIMPRHQRQSVTGIVVNDHINFARDDFYRLKAALTNCVRHGPASQNRDAHPDFRAHLDGRITWVERLNLRRGEKLRRLFDAIAW

SEQ ID NO: 5522 - protein, 447 aa, unidentified
  source 1..447: note = Related to JADMJM010000043.1; note = Hyphomonadaceae bacterium
MPSQNQIAGDLAAALLGGAWTRRALLRRLSGYLRNKAARSNARLVDEILERTEGSYPPSPFALKRFILDSRAFPRAAAVLLRTTVPVAAVLTPPRFWPAAGNAAPGVPEIETPGDLAIWLGVPISRLQWLADEQRRHHTTAIPMFQNYRYRFMPKASGGWRLIEWPKPHLRAIQVKILREILDRLSVHEAAHGFVRGRSCKTAAAMHAGEAVVACMDIRDFFGSVRLQRIHAIFRRIGYPWAVARLLSCLCVTSTPASVFARAPDDAGLDWETRKRFSERHLPQGAPTSPALANLVVGEMDRRLEGLARHCDARYTRYADDLSFSGDETFARRIGGFLGSATDIVRDEGFSIHTAKTRIMRRGARQVVTGLVVNEHVNILRHDYDTLKAILHNCAKHGAESQNRSGVPNFPAHLAGRIAWVEHVNPVRGARLRTLYNKVAWTPRAEI

SEQ ID NO: 5523 - protein, 318 aa, unidentified
  source 1..318: note = Related to JABDIP010000422.1; note = Inquilinus sp.
LPPELDWFADTRRQHGVTEKRPLQHYSYAWVPKRRGAPRLIEAPKPRLKALQRQILRDILDRIPVHEAAHGFVKGRSCLGGAARHGGEAVVATLDLADFFPSVPLERVHGIFRCLGYPTAVARLLTGLCSTTTPRGVLAAAPGVKRPPGAFVPEAAPHLPQGAPTSPALANLSANRLDARLDQLAEYAGARYTRYADDLAFSGDDEFAAGIGSFLATVEEIIRAERFAPNRRKTRIMRRAGRQQVTGLVVNQHLNVPRPDYDRLKAILHNCARHGPAGQNRDGHPDFRAHLDGRVGWVQTVNPHRGLKLRLLFEAIAW

SEQ ID NO: 5524 - protein, 445 aa, unidentified
  source 1..445: note = Related to JAFECD010000003.1; note = Proteobacteria bacterium
MHWPNSSRHRLIARNIAVTLLAGAWTERAMADRLETLLGSTTRSTQRGLIGAIFDKSGGPYPPSLAELTASILEAPQFPAAARLALEYTTRLDIATRQPRFAPIARFADLEIPRLTTPGDVAAWAGLSIPELEWFADERRQHGRTAIPIFQHYTYAFRKKSSGPPRLIEAPKPRLKTIQRKILRDILDHIPVHPAAHGFVEGRSPRTGAAQHVGAPVVIAVDLENFFLSVPVGRIHALFRSVGYPDEAARALTRLCTTMTPRSVIDRVPNPARHTRAALAPYLDPHLPQGAPTSPALANLVAWRLDVRLAGLANSFGAKLTRYADDIVFSGDLTAPGKTQSLIAAIAEIVEDEGFGLNDKKTRIMTASQRQSVTGIVVNSRLNARRDSYDSLKAILHNCRLNGFEAENREGHADFRAHLEGRIGWIESLNPTRGRRLRDIFSRIP

SEQ ID NO: 5525 - protein, 434 aa, unidentified
  source 1..434: note = Related to JABFRT010000004.1; note = Hyphomicrobium sp.
MARNIANVLLSGLWAERAMLLRLQTALGKATAKSQRALIAEVLKANPASYPPPAAELVRTIFSAPSFEKAAASALLSKAPLHMALRPPKFAPTADLSDCDVPALPTSGDVARWLGLPLEHLDWFTDERRQHGRTAIPDLQHYVYAFRAKPHGPPRLIEAPKPRLKTMQKRILHGILDSVPVHEAAHGFVKGRSCKSGAEQHAEAAIVICFDIADFFLTSPLGRVHALFRGLGYPHAAARVLTRLCSTSTPETVFDRISSPRKHTRAALQAYCEPHLPQGAPTSPALANLVARRLDIRLTGLALSLGGRYSRYADDLTFSGDAAFAKKTNSLMAAVAGIVEDEGYALNERKTRVMTSSRRQQITGIVVNARTNAPRDAYDQLKATLHNCRKTGLAAENRDGHADFRAHLAGRIGWVASLNPARGDRLRAMLTEIA

SEQ ID NO: 5526 - protein, 449 aa, unidentified
  source 1..449: note = Related to JAEUMD010000019.1; note = Hyphomicrobiaceae bacterium
MRFEELIARNLAAAWLAGPWTEAGLFERGQEVIGKAGRRRFLQLVRAAIQAAPSDYPPSPGWITAFLRERDGLPDYTERFLNSRRSISLALEPAHFSSSLSLAPLDVPRLETPHDLAVWIGVPIEHLDWLADSRRQAYSTDIPMLQNYRYAFVPKRTGPPRLLECPKPLLMAAQRKILSGILDKIRAHDAAHGFVAGRSCLSGASRHAGEDIVIALDLKDFFLTTPVRRVHGIFRALGYPWAVARLLTGLCTSAVPLSVFRRLPPAERHDWKTRQLFNSRHLPQGAPTSPALANLAAYRLDVRLTGLARSLDATYTRYADDLAVSGSLTDRNAQKILATVRSIAREEGYEVHPSKQRVMRSDARQCITGVVVNRHVNVPREDFDRLKATLHNAARHGPRSQNRDGHADFRAHLDGRVTWVENVNPNRGAKLRRLFDAIVWKEGSGDAIG

SEQ ID NO: 5527 - protein, 354 aa, unidentified
  source 1..354: note = Related to JADKAD010000001.1; note = Deltaproteobacteria bacterium
MLDALDLPPLPHAEALASWLGIDADELVVLADCEGRERRRAARAQHYHYRRVAKPGGGERLIEAPKPRLKAVQRHILHGILDRVPPHDAAHGFVPGRSVWTGAGRHTGREMVIRVDLRDFFASVRGARVFALFETIGYPRSVCSLLTGLCTNATPATVWGTPSHAISTAALRERWHRIQRYAAPHLPAGAPSSPALANLAAHRLDRRLAGLAHAVDGSYTRYADDLTFSGDALRRGTLAFFSSVCRIVVEEGFEVHARKTRFHHRSQRQLVTGVVVNEHPAARRSAYDRLRAILFNCVRHGARSQADRDLAAFRAHLRGRIEWFAHSPARAAKLHALFDRIDFSEPDDDPPADG

SEQ ID NO: 5528 - protein, 333 aa, unidentified
  source 1..333: note = Related to JAEUJU010000311.1; note = Myxococcales bacterium
ALADVLALDDAALRGLADLEGHERRRRPTARHYHYACARKADGGERLIEAPKPRLKAAQRRVLRRLLDRVPPHDAAHGFVRRRSAVTSAELHAGQAMVIRVDLRDFFASIPASRVHAIFGALGYPVAVRRLLTGLCTNATPLAVWGPASPSLSSVALRERRRRLAQYAGPHLPAGAPTSPSLANLAALGLDRRLAALARSMDCRYTRYADDLTISGGDALRRGAHACVSTICRIAVEEGFVIHPRKTRLQPRGVRQTVTGLVVNARPNVPRDTYDRLRATLFNCVRLGPRTQSDLPLAELEAQLRGRVEWCAVNPGRAAKLRALFDAIDWSAA

SEQ ID NO: 5529 - protein, 352 aa, unidentified
  source 1..352: note = Related to JACMJN010001335.1; note = Deltaproteobacteria bacterium
MTEPLRFESEVELARWLALTPAELWWFADVEGIGRTRVNGPLAHYRYRFHAKPDGSTRLIEIPKLRLKLIQRRIARRLLAPLQLHDSVHGFVRGRSAITGARVHVGRALVLRVDLREFFASVSAGQVRAVLRRLGHADAVARALTGLCTNCTPRAAWTGSSTPANAEAVRQLWHRRQRYASPHLPTGAPTSPALANLVAGTLDLRLAALARSFGAAYTRYADDLTFSGDAPFRRDAERFFELVCGAVAEHGFAVHGRKTRFQGAETRQQVTGVVVNVHTSLVRRELERLEAIVHNCVRFGPAGQNRSGHPDFRSHLAGRIAHVASVHGRHGARLRERFAAIDWSPLDERSEA

SEQ ID NO: 5530 - protein, 423 aa, unidentified
  source 1..423: note = Related to NZ_NGFO01000034.1; note = Gordonia lacunae
MTDPFLRAHEAAEVAADFSRTYTSWTWPEVLTALRVLLPAEVTADVADRIFELSPHEPRHPATVVLEALAPWTHPEPQPRRPLVLHEPESSGTVLDDLPDLYDVEQVAHWLDFTVPELEWFADRGQWLRTARPPLRHYRIWRRDKREGVRVIEAPKPRMRETQRRLLRRLVERIPAHSAARGFVPGSSPAAFAWPHTDRPAVVRVDLRHCFESITVQRVRAVFRDAGFQPHIARLLAELCTTATPVDELRGLDHMHAALLRERHLPQGAPTSPHLANLVMRSLDRRLDGYARRNGLRYTRYGDDLAISGDAIDADRVLWTVLRIVDAERFTVHPDKVRIMHSHQRQRLAGLVVNDRPQVARSEYDNLRALLHNARRHGAASQNRADHPDFRAHVYGLIAWVGATGEARRRRLLDLAATVDWET

SEQ ID NO: 5531 - protein, 423 aa, unidentified
  source 1..423: note = Related to NZ_CP095552.1; note = Gordonia hongkongensis
MTEPFLQPHEAAEVAAAFSRTYTAWTWPEILAAVTAVLPAEVTSEVAAGIIELSPHEPRHPATVMIQALAPWTHPAPVAAQPVVVHEPRSAGTVSDALPDLYDVEQFAHWLDFTVPELEWFADRGQWLRTARPPLRHYRIWRREKRDGVRVIEAPKPRMRETQRRLLRRLIERIPAHPAARGFIPGSSPAAFAWPHTDRPVVLRVDLRHCFETITVPRVRAVFRQAGYPPHIARLLAELCTTATPVDELRGIDHTHAALLRERHLPQGAPTSPHLANLVMRPLDRRLDGYARRHGLRYTRYGDDLAISGDAMNADRALWTVLRIVEDERFTVHPEKVRIMHSHQRQHLAGLVVNDRPQVARSDYDNLRALLHNARRHGASSQNHDEHPDFRAHVYGLIAWVGATGETRRRRLLNMARTVDWDS

SEQ ID NO: 5532 - protein, 423 aa, unidentified
  source 1..423: note = Related to NZ_JAKOIW010000003.1; note = Gordonia sp.
MTDPFLTAADAAETAAAFARTYAAWTWPEVVAALRAVIPAHFVDDVAERVFELSPHEPRHAAELMTEALAPWTHPPEPVREPLILREPISPGTVPDELPDLYDITQLAHWLDFTVPELEWFADRGGWLRTAHPPLRHYRIWQRPKRDGVRLLEAPKPRLRETQRRLLRRLVEKIPAHRAARGFVPGSSAAAFAWPHTDRPVVLRVDLRHCFESITDRRVRAVFRDAGYPPHIARVLAELCTTTTPVDELRDIETGHAALLRERHLPQGAPTSPHLANLVMRPLDRRLDGYARRHGLRYTRYGDDLALSGDSMDADRALWTVLRVAEAEDFTAHDDKVRIMRRHQQQRLAGLVVNDRPQVARSDYDNLRALLHNARQHGASSQNHDDHPDFRAHVYGLIAWVGATRDERRRRLLTMADAVDWDA

SEQ ID NO: 5533 - protein, 422 aa, unidentified
  source 1..422: note = Related to RKME01000013.1; note = Gordonia sp.
MTPSLSADEIAEVAAAFSRTYAAWTWPEVLEAVHAVLPSSIADDVSVRLFELSPQEPRHPAAALTDALTPWTAPAPTVRPQISLQEPTSTGTVIDGLPDLYDVEQLAHWLDFTVPELEWFADRGGWLRQARPPLRHYRIWRRAKREGVRVIEAPKPRMRETQRRLLRRLVEQIPAHPAARGFVRGSSAAAFAWPHTDRPVVLRVDLRHCFESISVRRVRGVFREAGYPQHIARVLAELCTTATPVDELHDIEAGHAALLRERHLPQGAPTSPHLANLVMRSLDRRLTGYAQHNGLRYTRYGDDLALSGDEMNADRALWTTLRVVRAEGFTVHPGKVRIMHRHQQQRLAGLVVNDRPRVARADVDNLRALLHNAIHYGASSQNVDDHPDFRAHVHGLIAWIGATGEARRRRLLEMADQVDWDR

SEQ ID NO: 5534 - protein, 423 aa, unidentified
  source 1..423: note = Related to NZ_SLVY01000022.1; note = Rhodococcus sp.
MIEPSLPAVEVSEAAAVFSRIYTAWTWPEVLRALDSVLPGEIAPDVAHRLFRLTRAEPRHPAAALVDALAPWTIPRPAVPRHIELHEPTSTGSVLDGLPDLYSVEQCAHWLGLTVPELEWFADRGNWLRTAGPPLRHYRIWHRTKRDGVRVIEAPKPRMRETQRRLLHRLVGKIPAHPAARGFVPGSSPAAFAWPHTDRCTVLRIDLRRCFETITLRRVRGVFDRAGYPPRIARLLAELCTTTTPVDVLHGVTSAHAALLRDRHLPQGAPTSPHLANLVLRSLDRRLDGYARRNDLRYTRYGDDLALSGDTLDVDRTLWMVVRVVSAEGFVVHPDKLRIMHRHQRQRLAGLVVNDRPQVARSDYDTLRALLHNAIREGAASQNRSGHRDFRAHVYGLIAWIGATSPARRQRLLEMAAAVDWQS

SEQ ID NO: 5535 - protein, 424 aa, unidentified
  source 1..424: note = Related to NZ_FTNT01000002.1; note = Williamsia sterculiae
MAAPVLTVAEAAEAAADFSRGYGGWTWPEVLRAAGAVLPEGIAEDAVERLFAANPREPRHPAQAFTEALQPWTLPTPAPPRVIELSDPVPVGPMPYGLPDLYDVELLAQWFGLTVGELEWFADRGRWLRNARPPLRHYRIWRRHKRDGVRVIEAPKPWMRETQRRLLRRVVERMPAHPAARGFVAGSSTAAFAWPHTDRPTVVRVDLRHCFESITVGRVRRVFADIGGYRAPIARVLADLCTTATPVDELTGVEYGHAALLRDRHLPQGAPTSPHLANLVMRSLDRRLAGYARRNGLRYTRYGDDLAVSGDGIDADRVLWVVMRIVAAEGFVVHPEKVRIMHRHQRQQLAGLVVNDRPQVARDDYDNLRALLHNAIRDGAATQNRDGHDDFRAHVYGLIAWVGATSPARRQRLLEMARQVDWAR

SEQ ID NO: 5536 - protein, 422 aa, unidentified
  source 1..422: note = Related to JAADZU010000055.1; note = Gordonia desulfuricans
MSEPSLPAGEVAAAAAEFSRILTAWTRSEIVRAVIAVLPYDVAAEAGNRLFERTPHEPRHPAAAFVAALQPWTLPTPVTRTWDLTEPVRADGLPAGLPDLHDVEQFAYWLDFTVPELEWFADRGGWLRTARPPLRHYRIWRRAKRDGVRVIEAPKPRMRETQRRLLRRLVERIPAHPAARGFVPGGSTAAFAWPHTDRPSVLRVDLRHCFETVTTARVRRVFADVGYPPAIARLLAEICTTATPVDELTDIDHTHASLLRYRHLPQGAPTSPHLANLVMRSLDRRLDGYARHNGLRYTRYGDDLALSGDDFDADRALWVVLQVVGDEGFLVHPGKVRIMHRHQQQRLAGLVVNDRPQVARADYDNLRALLHNAIRDGAQAQNRDAHPDFRAHVYGLIAWIGSTGTLRRDRLLEMAARVDWDS

SEQ ID NO: 5537 - protein, 429 aa, unidentified
  source 1..429: note = Related to CP003119.1; note = Gordonia polyisoprenivorans
MLLDHSMTDATLAFDQVRELAAEFSRIYTGWTWPEVLRALRAVLARDLADAVAPRVFELAPTEPRHPEAVLVEALSPWTLLPPDPQLVLRPQEPRSSGTVPEGLPDLYDVTQLAHWLDFTVPELEWFADRGGWLRTSRPPLRHYRIWRRSKRDGFRVIEAPKPRMRETQRRLLRRLVEHVPAHPCARGFVAGSSTTAFAWPHSDRPVVLRADLRHCFETITTTRVRRVFHDVGYPAHIARILAELCTTATPIDELGGIDLAHRALLRDRHLPQGAPTSPHLANLVMRGLDRRLDGYARANGLRYTRYGDDLALSGDSMDADRTLWVVLKIIETEGFTAHPDKVRVMYRHQQQRLAGLVVNDRPQVSRASYDNLRALLYNAAAHGAQSQNHADHPDFRAHVLGLISWVGATNPTRRQRLLQMADAVDWDS

SEQ ID NO: 5538 - protein, 425 aa, unidentified
  source 1..425: note = Related to BAFC01000046.1; note = Gordonia sputi
MTRPQPPFTTDQVRVLAAAIADRIVDWTWPAVVRAVGIELPAEICVDVAQEAFALAPDEPTHTAEIFRLALVPWTVPDPPATRVVELPGPPPATALAHDLPLLSDVEQFAVWLDFTVPELEWFADRGTWLRTANPRLRHYRVFRREKRSGVRVIEAPKPRMRETQRRLLRRLVVRIPAHPAARGFEPGSSPAAFAWPHSDRTTVLRVDLLHCFESIGVGRVRRIFDEVGYPPHIARLLAELCTTSTPADQLSGIDYAHASLLRRRHLPQGSPTSPHLANLALAQVDRRIAGYANANGLRYTRYGDDLAVSGDDLDLPRALWTVTRIVDDCGFAVNTKKTRVMHRHQQQRLAGLVVNDRPRVSRHDYDALRALLHNAALTGAQAQNHHGHNDFRAHVYGLIAWIGATGEVRRQRLLDMADRVDWTA

SEQ ID NO: 5539 - protein, 425 aa, unidentified
  source 1..425: note = Related to NZ_BANR01000005.1; note = Gordonia aichiensis
MTRPEPPFTAAQARAISAAIADAMADWTWPEALRAVGAQLPAEISADIAQSAFAMAPAEPAHTAEVFRLALLPWTAADSPSGRIVELTGPTPVAGLPHGLPPLADVSEFASWLDFTVPELEWFADRGGWLRTANPRLRHYRVSRREKRSGVRVIEAPKPRMRETQRRLLHRLIARIPAHRAARGFEPGSSPAAFGWPHSDRPTVLRVDLQHCFESIGAGRVRRVVEDVGYPPHIARLIAELCTTSTPADQLTGIDHAHASLLRRRHLPQGAPTSPHLANLALAQLDRRLEGYANANGLRYTRYGDDLAISGDEFDAGRALWTVLRIVDDCGLHLNAAKTRVMHRHQQQRLAGLVVNDRPQVSRREYDAVRALLHNAAITGANAQNRHGHNDFRAHVYGLIAWIGATGEVRRQRLLEMADRVDWNR

SEQ ID NO: 5540 - protein, 425 aa, unidentified
  source 1..425: note = Related to NZ_CP085974.1; note = Gordonia otitidis
MTRPDPGFTTDQVRTVAAALADRIIDWTWPTVMRAVAAELPEEICVDVAQEAFAVAPHEPPHLAEVFRLALSRWTLPEPPIPRAVELPGPTPVTDLPYGLPPLHDVAQFAAWLDFTPAELEWFADRGTWLRTANPRLRHYRVFRREKRQGVRVIEAPKPRMRETQRRLLRRLVSRIPAHPAARGFEPGSSTAAFAWPHSDRPTVLRLDLEHCFESIGAGRVRRIFDDVGYPAHIARLLAELCTTSTPADQLGGIDLTHAALLRRRHLPQGAPTSPHLANLALARLDRRIDGYARANRLNYTRYGDDLALSGDDFDHGRALWIVRRIVSDCGFVVHPDKVRVMHRHQQQRLAGLVVNDRPQVSREDYDNLRALLHNAARSGARSQNLQGHNNFRDHVYGLIAWVGATGHERRRRLLDMADRVDWSR

SEQ ID NO: 5541 - protein, 442 aa, unidentified
  source 1..442: note = Related to NZ_BANX01000005.1; note = Gordonia soli
MTEPSRSAPQPFLSVADAAVVGALFARHHTAWTWPETLRAVDSALIDALQAGVTALADVPDGLARAISLRILDGGPLRDPVAVFVHAAARWTLPADAAPRSIETPGPTPSVGLPDELPELHDVEQFAHWLDFTVPELEWFADREGRLRTARPTLRHYRVWRRDKRSGVRVIEAPKPRMRETQRRLLRRLVERIPAHQAARGFEPGSSTAAFAWPHTDRPTVLRVDLRHCFESVPAARVRRVFADVGYPASVARLLAELCTTTTPIDELTGIDSEHAMLLRGRHLPQGAPTSPHLANLAMRSLDRRITGFAELNGLRYTRYGDDLAISGDEMDAGRALWTVARIIRAEGFTVHPEKVRIMGRHQQQRLAGLVVNDRPRVSRVDYDNLRALLHNAIRDGATAQNREGHPEFRSHVYGLIAWVGATDPARRRRLLAMAADVDWDA

SEQ ID NO: 5542 - protein, 423 aa, unidentified
  source 1..423: note = Related to NZ_AGFF01000003.1; note = Dietzia alimentaria
MTTPVLTADEVNDAAAWFSRTYTGWTWPELLRALESVLPAAIARDALPALLTLSPAEPRHPAESLRRALKKWTQPPARHPTVPMPEPPPRDTIADGLPQLYSVPEVAQWLDLTTGELEWFTDHGGWLRTAPTRLRHYRVWTREKRDGVRVIEAPKPRLREAQRRLLRLLVSRIPAHPAATGFIPGSSTADFARPHSGKATVLRADLRHCFESITAPRIAEVFRRAGYPPEIARLLADLSTTATPADQLAGVPAEHATYLRGRHLPQGAPTSPHLSNLVMRSLDRRLNGYARANGLAYTRYGDDLALSGDAMDADRALWVVLKVIASEGFTVHAGKVRIMRHHQRQNLAGLVVNDRPRVSRSDYDNLRALLHNAQRHGASSQNHSGHPEFRAHVLGLIAWIGANDPARRERLLHMANEVDWTRS

SEQ ID NO: 5543 - protein, 421 aa, unidentified
  source 1..421: note = Related to NZ_CP046569.1; note = Dietzia sp.
MTTPVLTTDEVNDAAAWFSRTYTGWTWPELLRALESVLPAAIARDALPALLTLSPVEPRHPAEALRRALKKWTRPPAKPTIVPPSVPPPHDTIAEGLPELYSVSEVAQWLDLTTGELEWFADHGGWLRTAPSRLRHYRVWTREKRDGVRVIEAPKPRLCEAQRRLLRLLVSRIPAHPAATGFIPGSSTADFAQPHSGKATVLRVDLRHCFESITAPRIAEVFRRAGYPPAIARVLADLCTTATPADQLAGVPAEHATYLRGRHLPQGAPTSPHLSNLVMRSLDRRLDGYARANRLAYTRYGDDLALSGNAMDADRALWVVLKVIASEGFTVHAGKVRIMRQHQRQSLAGLVINDRPRVSRSDYDNLRALLHNRSVSNQMRREVLGWAWLVSGDRASGSLMVAFSGSRGGRGRRVNRSGCLA

SEQ ID NO: 5544 - protein, 422 aa, unidentified
  source 1..422: note = Related to NZ_CP046567.1; note = Dietzia sp.
MTSPVLTVEEVGEAAARFSRTYTGWTWPELRRALDSVLPEAITRDALPILLAWYPDEPRHPAAALRQVLTEWTRPAGAPTTVPLPEPPPRTTIVDGLPQLYSEAEVARWLGFTAGELDWFADPGNWLRTAPPRLRHYRVWTREKRDGVRLIEAPKPRLREAQRRILRLLVSRIPAHPAATGFIPGSSTSAFARPHSGSATVLRVDLRHCFESITTPRIAEVFRRAGYPSSIARLLAHLCTTATPADQLADVPASHAAYLRGRHLPQGAPTSPHLSNLVMRSLDRRLQGFADANDLAYTRYGDDLALSGDAMDADRALWVVLRVIASEGFTVHAGKVRIMRRHQRQNLAGLVVNDRPRVSRAEYDTLRALLHNARLHGASSQNHSGHPDFRAHVLGLIAWIGATDPTRRERLTRMADRVDWAM

SEQ ID NO: 5545 - protein, 372 aa, unidentified
  source 1..372: note = Related to NZ_NTGA01000019.1; note = Dietzia natronolimnaea
MTSPVLTVEEVGDVAAWFSRTYTGWTWPELRRALDSVLPEAIARDALPTLLAGFPDEPRHPAAALRQEWFADPGNWLRTATPRLRHYRVWTREKRDGVRVIEAPKPRLREAQRRLLRLLVSRIPAHPAAAGFIPGSSTSAFAQPHSGSATVLRVDLRHCFESITTPRIAEVFRRAGYPPTIARLLAHLCTTATPADQLTGVPAAHAAYLRGRHLPQGAPTSPHLSNLVMRCLDRRLQGFAVANGLAYTRYGDDIALSGDAMDADRTLWVVLKVIASEGFTVHAGKVRIMRRHQRQSLAGLVVNDRPRVSRVEFDNLRALLHNARQHGASSQNYSGHPDFRAHVFGLIAWIGATDPTRRERLTRMADQVDWTR

SEQ ID NO: 5546 - protein, 421 aa, unidentified
  source 1..421: note = Related to DWWP01000013.1; note = Candidatus Dietzia intestinipullorum
MTERRLTADEAGDAAAWFSRTYTGWTWPELRRALDSVLPSDIAREALPALFQWHRVEPRHPAAALRRVLARWTVPPAPRPLSVAEPVDPGTITEGLPALYAVADLARWLDLTVGELEWFADHGGWLRTAAPRLRHYRVWARAKRDGVRVIEAPKPRMREVQRQLLRLLVSRIPAHPAATGFLPGSSTVDFARPHAGKATVLRADLRHCFESITAPRVTDVFRREGYPPAIARLLAEVCTTATPVDHLTGVPAEHAAYLRGRHLPQGAPTSPHLSNLVMRSLDRRLHGYAAANGLTYTRYGDDLALSGDRMDAGRALWVVLKVIASEGFTVHAGKVRVMRAHQRQTLAGLVVNERPRVSRAEYDALRALLHNARRRGASSQNHAGHPDFRAHVLGLIAWVGASDPDRRERLLRTADEVDWAS

SEQ ID NO: 5547 - protein, 423 aa, unidentified
  source 1..423: note = Related to NZ_JAIFXZ010000017.1; note = Dietzia aurantiaca
MTEPRPPARLSPAEVGDAAAWFSRTYTGWTWPELLRALDAVLPGDVAREVLPSLLMLPREPRHPAAALRRVLRPWTAPAPQLATMPVPARRDTVAEDLPALYSVREVADWLDLTVGELEWFADHGGWLRTASPSLRHYRVWTREKRDGVRVIEAPKPRLREMQRRILRQLVSHIPAHRAAKGFVPWSSTADFAWPHSAKAIVLRADLRHCFESITAPRIADVFRRAGYPPTVARLLADLCTTASPADKLRGVPSEHAAYLRGRHLPQGAPTSPHLSNLVMRSLDRRLYGYAAANGLTYTRYGDDLALSGHEMNADRALWVVLKVIASEEFTVHAGKVRVMRAHQRQTLAGLVVNDRPRVRRADYDNLRALLHNARRSGASSQNHAEHPDFRAHILGLIAWVGASDPVRRERLLRMADEVDWEA

SEQ ID NO: 5548 - protein, 426 aa, unidentified
  source 1..426: note = Related to DWWG01000159.1; note = Candidatus Dietzia intestinigallinarum
MSETHPPTQLSAAEAHDAAAWFSRSYTGWTWPELLRALESVLPPDIARDALPGLLASHRREPRHPAEALLRALRPWIIRTPKPPTTVTDVPPARDTIAEGLPTLYSVREVAEWLDLTIGELDWFADHGGWLRTAAPRLRHYRVWTREKRDGVRVIEAPKPRLREAQRQILRQLVARIPAHRAATGFIPGSSTADFVRPHSGKPTVLRTDLRHAFESITASRVADVFRRVGYPPAISRLLADLCTTATPPDRLRGVPSAHAARLRVRHLPQGAPTSPHLSNLVMRSLDRRIQGYARANDLTYTRYGDDLALSGEAMNADRALWVALKVIASEGFTVHAGKVRVMRRHQRQTLAGLVVNDRPRVSRADYDNLRALLHNARRHGAASQNHTNHPDFRAHVLGLIAWIGASDDVRRERLLRMADEVDWTR

SEQ ID NO: 5549 - protein, 433 aa, unidentified
  source 1..433: note = Related to DXGN01000154.1; note = Candidatus Dietzia merdigallinarum
MTDSDPAPRLSLAEAHEAAAWFSRTFTGWTWPELLRALESVLPAEIAREVLPALLMRHRDEPRHPAQALLRVLRPWIIASPPAQLSVTVPDPHDPTTPPERDTITEGLPTLYTAGEVSEWLDLTIGELEWFADHGNWLRTAAPRLRHYRVWSREKRDGVRVIEAPKPRLREVQRRILRQLVSKIPAHRAATGFLPGSSTADFARPHAGQPTVLRADLRHCFESITAPRVRDVFRHAGYPPPIARLLADLCTTATPADQLRGMPAEHAALLRGRHLPQGAPTSPHLSNLVMRSLDRRLHGFAAANDLHYTRYGDDLALSGHEMNADRALWVVLRVITDEGFTVHAGKVRIMREHQRQRLAGLVVNARPRVSRAEYDNLRALLHNARHHGAASQNHAGNEDFRAHVLGRIAWVGAGDEVRRERLLAMAAEVDWEN

SEQ ID NO: 5550 - protein, 352 aa, unidentified
  source 1..352: note = Related to JAKWBF010000007.1; note = Gordonia sp.
MRRWQQPEHRGHPIDLPGPAPIDSLPYELPVLTGVDDVAAWLALTPAEVDWFADRGSWLTTARPALRHYRVSHREKRTGTRIIEAPKPMLRETQRRILRRLVQRIPAHPAARGFVPGGSTAAFAWAHSDRPVVLRADLRHCFESITVSRVRHVFAQAGYPAGVARVLAELCTTTTPPDQLIDVDPAHAGLLRRRHLPQGAPTSPHLANLALLRLDQRLDGYARRNQLRYTRYGDDLAVSGDAMDADRALWTLLRIVEDCGFVVHPEKVRIMPAHQRQRLAGLVVNDRPQVSREDYDRLRALLHNAARHGPESQNHSAHPDFRAHVYGLIAWVGATSETRRRRLLDMADHVHW

SEQ ID NO: 5551 - protein, 440 aa, unidentified
  source 1..440: note = Related to CP045804.1; note = Gordonia amarae
MTPNELSGDELRAVATHAADAITDWTYPRIRGAVHAALAATTPRRFALPHVVADRVATDALALSPDRPDNVAAFIGEALQPWRRPDPPPPPPDTRLRLQPAEPQPPTGMRHGLPPIAGYEELAFWLNLTVGELDWLADRGRWLEHARYPLQHYRITRREKRGGHRIIEAPKPLLRETQRRLLRRVVEHIPAHPAARGFVRGSSTAAFAWPHADRAAVVRVDLRHCFESIGISAVRAVFTSAGYPPHIARVLADLCTTTTPADQLHGIDWEHRDLLRRSHLPQGAPTSPHLANLVLRRLDRRIDGYAKRNDLQYTRYGDDIAVSGDSIDAHKTLRVVLAIVEDCGFTAHPGKVRIMYAHQQQRLAGLVVNDRPQVSRADYDALRALLHNAVHHGPDSQNHHGHPDFRAHVHGLISWVGATNPTRRRRLLDLAAQIDWNTEQ

SEQ ID NO: 5552 - protein, 430 aa, unidentified
  source 1..430: note = Related to NZ_BMCS01000002.1; note = Williamsia phyllosphaerae
MSDPLFSPDEAAEIAAHVEAHLTAWTWPEMQRALIAAGLSPEFADVVGLRLFDPSDDVVAGASDIESRILGALRDRTAPLPETDDRSAPAVWELTEPSSTGRVRDDLPDIYDVEQLAHWLNFTVPELEWFADRGRWLRNAREPLRHYRVFRVEKRDGFRVIEAPKPRMRETQRRLLRRLVERIPPHPAARGFVRGSSTAAFAWPHTDRPVVLRVDLRHCFESIDARRVRHVFSAAGCSPAIARILTELCTTATPPDAIHGLDPVHAGLLRERHLPQGAPTSPHLANLVLRGMDRRLAGFAAHNDLRYTRYGDDLALSGDRMDADRVLWTVLRVVADEGFTVHPAKTRIMHAHQQQRLAGLVVNDRPQVSRADHDALRALLHNAIRTGGAAQNHDGHPDFRAHVYGKIAWIGATSPARRDKLLDMASHVDW

SEQ ID NO: 5553 - protein, 437 aa, unidentified
  source 1..437: note = Related to NZ_RBKV01000001.1; note = Williamsia muralis
MTTDSTHPGDSTDSAHPDDLGGLGPEIRIPARSLDLLINRLEVDPRWSVHALGDMLAATTAPATATALLGLLLEKFPERPEPEAVRRALWSMVIENRSHVFGELPTPEMTFALTPLADATDVARWLGLTVGELEWFADRGLWLRSKKTALAHYRYVTIPKRDGVRVIEAPKPHLREIQRRILREILDRIPPHRAAQGFVAGRSTASFAWPHSDRNVVLRVDLRNCFPTITSARVRAVFAAVGYRRTSRLLSEICTTATPPDVLRGLDFAHASLLRARHLPQGAPTSPALANLVMRTMDRRIWGYARHNNLHYSRYGDDLAISGDVMDAGQVLWTVLRIIADEGFTVHPDKTKIMYSHQRQQLAGLVVNDRPRVGRVDYDNLRALLHNAIRTGAHAQNRDDHPRFREHVYGKIAWIAATSPSRRNTLLAMAERVDWDR

SEQ ID NO: 5554 - protein, 425 aa, unidentified
  source 1..425: note = Related to NZ_JAFRDR010000008.1; note = Williamsia soli
MNDSYSLGGLGPRMRLTADSVEHLLTRLEVDPRWTVSALVEMLVATVEQPVVTELLGMLLDRFPERPTDLGDVRTFLAPLIGEPRSREFDDPADPVMRFDLPRLPDYSDVARWLNLTVGELEWFADRGHWLRTKDGPLQHYRYWQVPKRDGVRMIEAPKPHLREIQRRVLRTILDHIPPHRAAQGFVPGTSTASFAWPHTDRPVVVRLDLRDCFSSIGTARVKAIFAAVGYERTARVLAELCTTTTPIAHLRDIDHRQAALLRQRHLPQGAPTSPALANLVMRAMDRRIWGYAQRNRLHYSRYGDDLAISGDHMNPEAVLWVVLRIVADEGFTVHPDKTKTMRAHQRQQLAGLVVNDQPRVARRDYDNLRALLHNAIRTGAQAQNRSAHPNFRAHVHGKIAWIGASSPRRRNTLLALAEQVDWDR

SEQ ID NO: 5555 - protein, 436 aa, unidentified
  source 1..436: note = Related to NZ_CP011853.1; note = Gordonia phthalatica
MGDLFGGPQGVSHPRRYDSAQVRLAVHAIDRLRRPVTPDRSAEVWTSREINGALVTVLDPVVADDVTRLLVTAFAAPPHRDDLAAFLAAIPADRTVRVAEPVVSHPVFAVRPIDDVTALAHWLAMSVTELDWFAARGRWSRRAKPQLRHYRVQRLPKRDGGFRIIEAPKERLATAQRRILDEILSAVPPHPAAHGFVRGRSVQSYASTHALHDTVVRVDLRRCFEHVTYPRVRAVFAAIGYAPAVAAYLASLCTTTIAIDDEKLVDPIHAALLRERHLPQGAPTSPALLNLVLRRIDFRIAGYAAKHRIAYTRYGDDLAFSGDDLDAGKLVWFVTRVAAAEGFVVHPSKTRIMHDHQRQQLGGLVVNRGVRSSRADFDALKALLHNAIRHGAQSQNRDGHPDFRAHVYGRIGWVSTGSPARRKRLRDMAARVDWES

SEQ ID NO: 5556 - protein, 435 aa, unidentified
  source 1..435: note = Related to JAAYXO010000187.1; note = Gordonia sp.
MSDDRTSPGIGARRRFDSVQVDRIVIAIDELLRSVEAPRVADVWTSREIDGALVDVLDPVDADDLTRALLAAFPAPPRSGPVAAFVADLPAAPRVVVPELRVSAPVFEVRQVEDIAALAGWLNMSLEELEWFTASGRRSRRLKPALRHYRVSRIPKRDGGYRIIEAPKERLATAQRKILDQILTGLPPHPAAHGFVRGRSITSFAAKHALHDTVVRVDLRRCFEHVTYPRVRAVFAAIGYAPAVAAYLGSLCTTTIAVDDEALVDPHHAALLRERHLPQGSPTSPALLNLVLRRLDFRVAGYADKHHITYTRYGDDLAFSGDQIEIGRLLWFVERVAAAEGFVVHRRKTRIMHDHQRQQLAGLVVNRGVRAGRAEFDALKALLHNAIRDGAHSQNRERHPDFRAHVYGRIDWLSTGSPQRRERLRTMAAQVAWDR

SEQ ID NO: 5557 - protein, 863 aa, unidentified
  source 1..863: note = Related to NZ_AEUD01000002.1; note = Gordonia neofelifaecis
MEQWITTSEAAARLGVKRGTLYSYVSRGVLTSRRMPGQNESLFDRTQIDSLAAAKHDGRRSGDRLLRFRAVASGVSAIRDDRLYLRGRDIEELCADMDFADVAQLVLDSSEARPVPDVDTTVVHGVSIERRIPLTVALVAAADPLRADLSDVGARVLGLLPHLAAAVPEIDFAHRWVDLLATVLIDNGLAASTTAARVAASARAGIFDALLAGYAALAGPLHGGAPATARALLDAVVGGAAVDRALADAVVGGLVPGFGHVIYSGPDPRAQIVLDRVRAERPRSSALAAAEAVEQRVGRPMNIDFAGAVVTHELGLPARSGEVLFVGSRRAFREPPPAASSLCGGGVRRGPAALARQSDGLSCSAAAVRTLSSRRSPRTTTRHLIGGASGAFTVGPRSRAQAAHSVCWVRADDDKSGRTVLPAAEREDVIEPGMRSPFRFDQHRVHRAVGAVVGLLGAAAGDDAGDDAGSLRTAPELDGALVAVIDPVDADDLAQALIREFASPPSSERLTAFIAAIPAAPRVRWPEPRTSAPRFDVRQVADVEALAHWLNLDLGELEWFAARGRWSRRTAEPLRHYRVKRIVKRDGGFRIIEAPKERLATVQRKVLDEILVHVPPHPSAHGFMRGRSVESFGSRHALHDVVVRVDLRRCFEHVTYPRVKAVFSAIGYAPAVASYLACLCTTSRAIEDRHRVDFDHAVLLRERHLPQGAPTSPALLNLVLRRLDYRVAGYAARHGVTYTRYGDDLAFSGDDVDVGGLLWFIERVVKAEGFAVHRDKVRVMRDHQRQQLGGLVVNRGPRSCRSDYDALKALLHNAIRDGAESQNRDDRPDFRSYVYGRIGWVSTGSARRGEKLRTMAAQVDWHR

SEQ ID NO: 5558 - protein, 432 aa, unidentified
  source 1..432: note = Related to BAOP01000031.1; note = Gordonia malaquae
MGAGLSRPRRFTARETAMMAGAVAQRLMRVRGSDLGPEWTRPELTDLLMRVVSPADAEEVARAILEAFPAPPADPREAIRELIDAMCDGPFRFVADPDVSTPVFDVKRIADVEALAAWQNMSLPELDWFAARGRRSKRLPERLRHYRVWRIPKAHGGFRIIEAPKERLATAQRRILDDVLAAVPPHPAAHGFVRGRSAVSFAGPHSLHDTVVRIDLKHCFEHANYRRVKAVFTAIGYTPGVCEYLAALCTTTCAIDDAAQLDPFHAALLRERHLPQGAPTSPALLNLILRRMDIRIAGFAEKNRLTYTRYGDDLALSGDDIDPKLVTWVVSSIVHDEGFRVHPDKLRVMGDHQRQQLAGLVVNAGPRARRTDFDALKALLHNAVRDGGESQNREGRGDFRGYVYGRIGWVSTGSPTRRRKLMALAAQVDWSV

SEQ ID NO: 5559 - protein, 433 aa, unidentified
  source 1..433: note = Related to NZ_JACIFP010000001.1; note = Gordonia humi
MTGQGLEPPQRFTGHDANAMGFAVSRRMMRLRPAERADAWTWLTLQEMFADTVWPDDADEIAQAVLAVYPEPPSRIQEALTAVIVAMPGRREPFAADPGSSSPVFDVRQIADVEELAAWQNLSMPELDWFAARGRGSRRAPTRLRHYRVWQIPKRHGGLRIIEAPKERLATIQRRILDDVLAHVPPHPAAHGFVRGRSVTSFAGPHALHDVVLRIDLRHCFEHVTYPRVKAVFTAIGYQPGVAAYLTALCTTTIAVDDQRLTDSLHAALLRERHLPQGAPTSPALLNLVLRRTDIRIAGFAAANRLTYTRYGDDLALSGDDVDVGRVLWAVSSIIRDEGFTVHPDKVRVMGEHQRQQLTGLVVNAGPRAARADYDALKALLHNAIRDGGQSQNRAGRDDFRAYVYGRIGWVSTGSQARRRKLTEMAARVDWER

SEQ ID NO: 5560 - protein, 433 aa, unidentified
  source 1..433: note = Related to NZ_JABBNB010000006.1; note = Gordonia asplenii
MVGKQTAAQPDRFSRNDIHRMSAVIRRLLGPPLDDGYAERVWTRRELNGALVTAVDPVDAEEVARELLMRYPTPPPLPGIADAVRRVVAVLTAPVIREPVGPPRFGLPEIGDVGALASWLNVSVDELDWFADHGLWLQRATPRLRHYRVTRIPKRHSGFRVIEAPKERLATLQRRILDAILADVPAHPAAHGFVRGRSPYSFAAPHSLHDTVIRVDLKHCFEHITAAQVRAVFTAVGYRSATARCLAEICTTATAFDDLPGDDPFHAGLLRGRHVPQGAPTSPALVNLALRRLDFRIAGYAAKNGLAYTRYGDDLALSGDEMNVGQLLWVVRNVIVDEGFTLHPEKVRVMGDHQRQQLAGLVVNVGPRSRRSDFDELKALLHNATCTGARAQNRGAHADFRAHVYGRIGWVATGSAARRRKLLALAAEVDWDG

SEQ ID NO: 5561 - protein, 423 aa, unidentified
  source 1..423: note = Related to JAHCSG010000002.1; note = Williamsia sp.
MTAGLRSEQRFSADRAASLANWILEDRDLLWDSWAVSARLSWQLPPEIADEVADAILVALPEQPSAPEVLAEFLAAIPSEPVIIIPSEPNPPVVAAGLPVITDVGELAASLNLDIGELEWFADRGTWLRTARVPLRHYRITRIPKRDGVRIIEAPKPRLAEIQRKILRRILDHRDPHPAACGFRRGKSVAHFAWPHTDRPVVLRLDLRHCFTTIGTARVRRVFADCGYSPAVSRVLAELSTTTTSSDALGDLDPWLAAMLRARHLPQGAPTSPALANLVMIRLDRRLAGYARRHALRYTRYGDDLAFSGDAMDADRVLWAVLRIVAAERFVVHPDKTRIMGRHQRQQLAGLVVNDHPQVPRAEFDALKALLHNAITTGASTQNHAGHPDFRAHIYGRIAWVGATNASRRERLLALADQVDWSA

SEQ ID NO: 5562 - protein, 417 aa, unidentified
  source 1..417: note = Related to NZ_JXYP01000014.1; note = Williamsia herbipolensis
MRRYPRSTAEMLAAIVDAADPEWTREGLADALSAHRRGLDDAQADAVAGHLLVAFPRQPPDRRDAIAGRIVELAMPPMRERPALRELWDGLPRYTDYYALAAAYDMTVPELDWLADRGTWLRSRTGPLQHYRVTPIPKRRGARVLEIPKPRLRETQRRILRRVLDRLPPHPAAQGFVAGTSPATFSSPHAGRPVVIRIDLRRCFETITVARVRAVFAAVGYPPAVARALADLCTTTTPAERLVGVDPVHAAILRSRHLPQGAPTSPALANLVMRTLDRRITGYAHRHGLVYTRYGDDMALSGTIDDPSAVVWVVRQIVADEGFTVHGDKTRIMYAHQQQRLTGLVINDRPRVCRSEYDDLRALLHNAIRTGARAQNRDDVGDFEAHVRGRIAWVGATSPARRQKLLEMASRVDWSSD

SEQ ID NO: 5563 - protein, 427 aa, unidentified
  source 1..427: note = Related to NZ_AUFT01000012.1; note = Nakamurella lactea
MTGDYLYSPDWARLLADLVVAARARWRRSDLAAAMAEVLDDAEADGTAHRILQAFPREPVDVRATLAGYLVELRSVSEPLSEPQTGALLAASARTPVLWAGLPVLNTPAELASFLDLTIGELDWFADHGNWLRSHRGPLQHYRQRRIAKRSGLRLLEIPKPRLREIQRKLLRTLVSVIEPHPAAHGFRPGRDARSFAAPHAGGPIVLRVDLRDFFASVPGARIRAVFVAVGYPPPIAALLADLCTTATPIAALCGLDPAIAGLLRGRHLPQGASTSPALSNLVLRNTDRRIAGYVARHGLRYTRYADDLAVSGSGFDPAAVRWVIEKIVTDEGFRLHPDKTSVMRSHQRQRLASLVINTRPQVNRSEYDALRALLHNAASTGAAAQNRGGHEHFREHVFGRIGWAGASNPDRRRVLLGLAERVDWSR

SEQ ID NO: 5564 - protein, 421 aa, unidentified
  source 1..421: note = Related to JABEND010000002.1; note = Nakamurella aerolata
MADWAFDSGTAARLARVVVESRTSWRAADVAEALTQLLPPEQAEELAARMLAAMPSPPVDVGPAVTGYLAGLRRQDAPATIAFEVRTAELWAGLTPLADPAALARLLDITVGELEFFADRRGWLRTKPTALQHYRYRTLPKQSGLRVLEIPKPRLRELQRRVLRHCVAPIPPHPAAHGFVPGRSVHTFAEPHTGSRVVIRVDLRDFFLTVARPQIEATFHTVGYPPAVGEVLAALCTTATAPAAFAGIDSATAARLRRPHLPQGAPTSPALSNLAMFEVDRRLAAFAGRHGLSYTRYADDLAFSTGLGEPAIAVSAVLAVTRKVVAAAGHRLHPRKVLVRRAQQRQQLTGLVVNRTPQPPRAEFDTLRAILYNCARFGPESQNRDDLADFRGHLLGRMQWVASGSATRRRALAELFDRIAW

SEQ ID NO: 5565 - protein, 425 aa, unidentified
  source 1..425: note = Related to NZ_CP070357.1; note = Tsukamurella tyrosinosolvens
MTVVEVARRVPRSWRHAVADRVVLLTEEMWTAETIASLVRGTVPDELVGPVVEALLSGHPQPPVQVVDGHVRRPRTAPLVAALDAVRIVETLDSGGPVDVPGLALPDVASIARMLDLTVPELEWFADHGRWLRHARPPLRHYRVARMVKPAGGFRVIEAPKPRLAEAQRRILLRVLDPAGAHPAARGFRPGGSVLAYASPHVGSLSVVRLDLRDCFSTVAVPRVRSVFRRLGYPAPVATVLADLCTVATPADELRGLDPWRAATLRSRHLPQGAPSSPALVNLALHRLDARLTGLAHAQGARYTRYGDDLAFSGARDPALIAGVAPKIVAAEGLSVNPRKTRIMRAGARQELAGVVVNARAQVPRAEYDDLRALLHNAARSGGESQNRDGHPDFRAFVYGRIAWVAQGNEQRRLRLLAMAARVRW

SEQ ID NO: 5566 - protein, 425 aa, unidentified
  source 1..425: note = Related to NZ_VIGX01000010.1; note = Tsukamurella conjunctivitidis
MTAVEIVRGLPRAQRYAVAGRVVSLTEDLWAADVIAPLIRGAVPDELVDAAVQALLAGHPEPPVRFVDGDVLQSGPGPLVAALDGVRIVVALEPAGPGDVPGLALPDVAAVTRLLDLTVPELEWFADHGMWLRHARPPLRHYRVSRMDKPAGGIRMIEAPKPRLAEAQRRILRRVLDPAGAHPAARGFRPGGSVLAYAAPHVGARSVVRLDLRDCFSTVTVPRVRNVFRRLGYSAPVAGVLADLCTVSTPADELHGLDPWQAATMRSRHLPQGAPTSPALVNLALHRLDARLTGLARAQGARYTRYGDDLAFSGALDPALIAAVVPKIVAAEGLSVNPRKTRIMRAGARQELAGLVVNARAQIPRSEYDALRALLHNAARSGGEIQNRDGHDDFRAHVYGRIAWVAQGNDARRERLLAMAARVRW

SEQ ID NO: 5567 - protein, 425 aa, unidentified
  source 1..425: note = Related to NZ_UHII01000001.1; note = Tsukamurella pulmonis
MSAVEISRRLPRAWRYAIADRVEMFTEEMWTADRVAVAIRGIVPGELVPTVARELLAAHPAPPLAIIDGTPVAPDRDAIVVALDTVRTVERLGARAPLEVPGVALPDVAAVARMLDVTAPELEWFVDHGQWLRHATGPLRHYRVRRMAKPSGGVRVIEAPKPRLAEAQRRILHRVLDPAGAHPAACGFRPGGSVLAYAAPHVGARSVVRLDLRDCFSTVTVDRVRGAFRRLGYPVPVAGLLADLCTTSTAVDELRGLDPWQAAVLRSRHLPQGAPTSPALVNLVLRGLDARLTGLARAQGARYSRYGDDLAFSNARDAALIAGVVPKIVAAEKLSVNPRKTRIMRSGDRQELAGVVVNARAQVPRAEYDALRALLHNAARFGPESQNRDGHEDFRAHVYGRIAWVAQGNDARRERLRAMAERVRW

SEQ ID NO: 5568 - protein, 425 aa, unidentified
  source 1..425: note = Related to JAIULG010000072.1; note = Tsukamurella sp.
MTGVELSRRLPRAWRYAIADRVEFFTAAQWTEEFVAAAVADLVPVDHAVPVARTLLAEHPAPPLSIVDDLPVAADRNALLSALEAHRTVQLLESKGSGTPPGIALPDVGSIARMLDLTIPELEWFADHGQWLRHAGRPLRHYRVRRIAKPAGGVRVIEAPKPRLAEAQRRILRRVLDDAGAHPAARGFRPGGSVLAYAAPHVGTRSVVRLDLRDCFPTVTAPRVRAAFRRLGHPAPVAAVLADLCTVATPGDELRGLDPWQAAALRGRHLPQGAPTSPALVNLVLRRLDARLTGLARSQGARYTRYGDDLAFSGALDSSLIAGVVPKIVASEGLSVNPRKTRIMRAGARQELAGVVVNARAQTPRGEYDDLRALLHNAARFGAASQNRDGHPDFRAHVYGRIAWVAQGNEHRRERLLSMAARVHW

SEQ ID NO: 5569 - protein, 426 aa, unidentified
  source 1..426: note = Related to AP025688.1; note = Tsukamurella sp.
MTSVEVTRRLQRAQRYTIAARVEWFTPTQWTVDRVAGAISGVVPADEASAVAAALIAAHPRAPLDPQDDGPPVLANPAALVAALDGYRTVELLEPDGPLDVPGLALPDLSAVARMLDLTAPELEWCADPGGWLRHSSKPLRHYRVRRIPKPAGGVRVIEAPKPRLAEAQHRVLRRVLDPAGAHPAARGFRPGGSVLAYASPHVGASSVVRLDLRDCFSTVTVSRVRDVFRRMGYPAPVARVLADLCTVATPGDELRGLDPWQAAVLRSRHLPQGAPSSPALVNLVLRRLDSRLTGLAQSQGARYTRYGDDLAFSKPRDPSLIAGVVPKIVAAEGFSVNSTKTRVMRAGSRQELAGVVVNARAQVPRAEYDALRALLHNAARFGAESQNRDGHSDFRAHVYGRIAWVGQGNESRRERLLTMAARVRW

SEQ ID NO: 5570 - protein, 425 aa, unidentified
  source 1..425: note = Related to NZ_LSRF01000001.1; note = Tsukamurella pseudospumae
MTAVEVSRRLPRGTLYAIAARLEWFTASQWTGEFVAAAIGDLVSTDLAGPVARFLIAAHPDAPLRIVDDRPVRADLGALRAALDGFRTVDLLDAPGVLDVPGRALPDSAAVARMLDLTAPELEWFADHGQWLRHSAAPLRHYRVRRMDKPAGGVRVIEAPKPRLAEAQRRILRHVLDPAGAHPAARGFRPGGSVLAYATPHVGARSVVRLDLRDCFSTVTAPRVRAVFRRLGYPAPVARVLADVCTTATPGDELRDLDPWQAAVLRARHLPQGAPTSPALMNLVLHRLDARLTGLARAHGAMYTRYGDDLAFSGAPDPMLIAGIVPKIVVAEGFSVNPAKTRVMRAGTRQELAGVVVNTRAQVSRDEYDDLRALLHNAARFGAESQNREGRADFRAYVYGRIAWVGQGSERRRERLLAMAAAVRW

SEQ ID NO: 5571 - protein, 415 aa, unidentified
  source 1..415: note = Related to CP001966.1; note = Tsukamurella paurometabola
MPAVEIARALARAQLRQAIRIAVQLHPEEWNRVELAADLGAVLPAELAEEVARFVIASAPTKPRGAILANLLQDFRVESLLEPEPARETPDRPLVDLAAVAAMLDVTVPELEWFADTGSWLRHSSRPLRHYRVRRMSKPAGGVRVIEAPKPRLCEAQRRILRHVLDAAAPHPAARGFLPGGSVLRYAEPHVGAGSVIRLDLKDCFTTVGASRVRAVFHRLGYPNAVARVLAALCTTETPADELHGLDAWQAATLRFRHLPQGAPTSPTLMNLSLRQLDSRLTGLARAQGARYTRYGDDLAFSGAPDASLIAGVVPKIVAAEGFAVNPRKTRIMRRGSRQELAGLVVNDRAQVPRHEYDALRALLHNAARFGPASQNRDGHDDFRGHVYGRIAWVGQGNRERRERLLALAERVPWE

SEQ ID NO: 5572 - protein, 414 aa, unidentified
  source 1..414: note = Related to BPMV01000001.1; note = Tsukamurella sp.
MPSVDLSRPLTRAQQAQSALLVGRIDPAEWNRIELAADLGAALPAELAEEVALFVTEAAPTKPHPAVIRRLLQTYRVDSALEPEAGGAVPGRVLADLDGLAAMLDLTVPELDWFADTGRWLRHSAAPLRHYRVRRMPKTAGGVRVIEAPKPRLREAQRRILRHVLDPAAPHPAARGFVRGGSVLHYAEAHVGSAAVVRLDLKDCFTTVGENRVRAVFRQLGYPAPVARILAALCTTATAGDELRGLGAWQAATLRARHLPQGAPTSPALMNLALRRLDSRVAGLARAQGAHYTRYGDDLALSGARDPSVIAAVVPKIVRSEGFSVNPRKTRIMRSGTRQELAGVVVNARAQPPRRAYDDLRALLHNAARFGPDSQNHDGHDDFRAHVYGRIAWVAQGNPTRRERLLAMAARVPW

SEQ ID NO: 5573 - protein, 414 aa, unidentified
  source 1..414: note = Related to NZ_CP070609.1; note = Rhodococcus koreensis
MTERPALPPEFARRLAAAAIDGTWTRAGLVLRFEESGVPDAARIAARLHDLMPTPPIDGIDSVFRLLSDLPLIERAEPIVDEVSGNDWRFDVPQWSRTAAVAEAVGLTSAELDWFADPGGWLRTKAPPLQHYRYRIRPDNRLLEAPKERLREVQRRILRTVLDRVPPHAAAHGFVRGRSVHTFAGPHAGHEVVLRIDLRAFFPSVSRTRVRAVFDALGYPTRVSRVLAGLCTTSTPPGVLAELPFDAASRLRGAHLPQGAPTSPALANLVAHRLDRRLAGLARAHRVAYTRYADDLAFSGSDLAVDRLIHAVGRIVTDEGFAVHPGKTRVMRAHRCQHLAGLVVNTRPQASRAEYDDVKALLFNCVRHGPDSQNRDGRPHFREYVYGRIAWVGESNESRKRSLHALAARVDWTG

SEQ ID NO: 5574 - protein, 405 aa, unidentified
  source 1..405: note = Related to RRBB01000228.1; note = Rhodococcus sp.
MASTNATQARDSGETPARAGLILRFEETGAPDAGRLATRLYDLMPTPPIDGVDSVYRLLSELPQIEQPEPVVEVSGNGWKFDVPRWSRTSSVAEAVGLTPAELDWFADPGGWLRMKAPPLQHYRYRIRSDNRLLEAPKERLREVQRRILRSVLDGVPPHAAAHGFVRGRSVHTFAAPHAGHDCVLRIDLRAFFPSISQTRVRAIFDALGYPAPVARVLAGLCTTSTPPGVLAQIPFDAASRLRGAHLPQGAPTSPALANLVAHRLDRRLTGLARAHHSGYTRYADDLAFSGSDLAVDRLIQAVGRIVADEGFSVHPGKTRVMREHRRQHLAGLVVNTRPQTARADFDDLKALLFNCVRYGPESQNRDGRPHFREYVYGRIAWVAESNESRKRSLHALADRVNWAG

SEQ ID NO: 5575 - protein, 416 aa, unidentified
  source 1..416: note = Related to CP003949.1; note = Rhodococcus opacus
MTAGRALQPEIARRLAVEATVGAWTRAGLILRFEEAGEPDAGRIATRLYDLMPTPPIDGVDGVYRLLSELPQIEQPETVVESSGSDWKFDVPRWSHTAAVAEAVGLTPAELDWFADPGGWLRTKATPLQHYRYRIRSDNRLLEAPKERLREVQRRILRSVLDRVPPHAAAHGFVRGRSVHTFAAPHTGHDVVLRIDLRAFFPSVSQTRVRAVFDALGYPTRVSRVLAGLCTTSSPSGVLAQLPFDAASRLRGAHLPQGAPTSPALANLVAYRLDRRLTGLARTHRAGYTRYADDLAFSGTELAVDRLIHAVGRIVAHEGFSVHTGKTRIMRAHRRQHLAGLVVNTRPQAARTEYDDLRALLFNCARYGPDSQNRDGRPHFREYVYGRIAWVGECNASRKQSLHALAARVDWADQRR

SEQ ID NO: 5576 - protein, 413 aa, unidentified
  source 1..413: note = Related to NZ_CP058638.1; note = Rhodococcus sp.
MTGRRALSSAVARRLAAVATSGSWTRAAIAQRFEEIGTPDADRIATRLFDLLPTPPVEGVDSVYRLLSELPHIDEPAPVVEQPDHEWRFDVPKWTHTVAVAQAVGLTPAELDWFADPGEWLRNKAPTLQHYRYRIRSDHRLLEAPKERLREVQRRILRGLLDRVPPHAAAHGFVRGRSVHTFAAPHAGRDVVVRIDLRAFFPSISQARVRAVFDSLGYPPRVSRVMTGLCTTSTPPDVLARLPFDTASRLRGSHLPQGAPTSPALANLVAYRLDRRLTGLARSSRAEYTRYADDLAFSGVDLAADRLISAVGRIAADEGFSVHPRKTRIMRAHRRQHLAGLVINSHAQAARTEYDQLRALLFNSLRTGPDLQNRDGRPYFREHVYGRIAWIGESNPNRKRALLALADRIEWTG

SEQ ID NO: 5577 - protein, 409 aa, unidentified
  source 1..409: note = Related to NZ_VLNY01000005.1; note = Rhodococcus cavernicola
MTDQRALPPVMARHLAEVADAGPWTKYALTQRFEEAGARDAVSIAHRLFDLMPSPPIEGAESVYRLLVELPRIDRPAPIAPRVLWKFGVPQWSQTAAVAEAVGLTPTELDWFADRGGWLRTKAPPLQHYRYRTRGDRLLEAPKERLREVQRKILRAVLDSVPTHPAAHGFVVGRSVHTFAAPHAGREAVVRIDLRAFFSTITQARVRAVFGALGYPDHVARVLAGLCTTATPAKVLAPLPFESATRLRTPHLPQGAPTSPALANLVCHRLDRRLTGLARSHRAAYSRYADDLAFSGSELAVDRLVHAVGLIVADEGFTVHPRKTRIMRAHRQQHLAGLVVNDRPQAARSDYDDLRALLFNCVRYGSHSQNRDDLPHFREHVYGRIGWIGESNETRKRTLLSLADRVDWA

SEQ ID NO: 5578 - protein, 412 aa, unidentified
  source 1..412: note = Related to JACHWS010000003.1; note = Hoyosella altamirensis
MPSRPPRAFTRLEADLLAAAAVAGPWTRSGLEERLGEAGAADPVLLARRVLDLMPGEPIEGESTVRNVLAELPELPARPVEVTVESSLWKFDVPRWQTPHALCQAFDLTMPELEWFADVQGRLRGKPGRLHHYRYHNGARLIEAPKVRLREVQRRILRKVLDRLPVHAAAHGFRRGRSVHTFGSGHAGADLVVRIDLRWFFSTITAARVRAVFLAVGYPPSVASLLAGLCTTATPVPILRGMPFEQATLLRTRHLPQGAPTSPALANMVARNLDRRLAGLAQSQGLYYTRYADDLAFSGDVVNVEQLLWTVGAIVRDEGFFVHPSKTKVMRAHHRQRLAGLVVNAHPQASRDDYEALKALLYNCVRYGPASQNRDGRTHFREHVSGHIAWVGESNSRRREKLRRLEQRIVWS

SEQ ID NO: 5579 - protein, 317 aa, unidentified
  source 1..317: note = Related to NZ_QRCM01000001.1; note = Rhodococcus rhodnii
MSRALDAGWAARLAAAAMSGPWTKNALAQRFSEIGFDRAEEIARRLHDLAPTPPVDGVDAVDRLLAELPRLEGPIPVRAQRPQWLFGVPRWNTLPALASSLNLTPGELDWFADPRGWLRTKPDRLQHYRVKTLPSGRVVEIPKERLREVQRKVRVSVLDAVPPHPAAHGFRAGRGVVGFAAAHSNSEVVIRVDLRAFFTTITATRVRAVFAALGYPPWVAGRLAGLCTTSTPPAALAGVPFEIASLMRAPHLPQGAPTSPALSNLVAGNLDRRLSGVARRHALTYTRYADDLAFSGSDVDVSRLLAMVPPCVRTRAS

SEQ ID NO: 5580 - protein, 435 aa, unidentified
  source 1..435: note = Related to NZ_CP018082.1; note = Nocardia mangyaensis
MQRSTVDEGFWSLHHRRIFMSRMISVELAAELARAFELLDDEWAQARLAEAFGAVIEPGLAEEIARRVVDLMPVVPVDPVATLCRLLAELPKLPTIVVPLDPPEVRMRFGAVEIPDLATLAMLLNVTPSELEWFADRGGWLRRSTQPLSHYRYRRLPKANGTRLVEAPKVRLREIQRRILHKVLTGIPADPACHGFEKGRSAATFGAPHAGAPVVVRMDLRDFFPTIGLARVRTVFTACGYSPAVARVLAELCTTASPVAELRGLDHAQRTLLAVPHLPQGAPTSPRLANLVARGLDRRLTGYANRHGLTYTRYADDLALSGNANTAHLVWTVTRIAEDEGFTVHPAKTRIRRAHQRQILAGLVVNAHPTAPRDRYDAVRALLHNCLRTGATAQNLHGHNDFRAHVYGLISWIGETSPHRRDKLLTMADRVDWTR

SEQ ID NO: 5581 - protein, 418 aa, unidentified
  source 1..418: note = Related to NZ_BDBG01000003.1; note = Nocardia salmonicida
MSRAIGLELAVRLARSFELLDDDWGLSPLAEAFAEVIEPGSAQEIAGRVIDLIPIEPVDPVNTLRRVLVDLPKLPTTVVALDPVVVPMRFGAVEIPDLAALALLLNVTPAELDWFADRGGWLRRASQPLSHYRYRRLPKATGVRLVEAPKVRLREIQRRILHRVLAGIPADPACHGFEKGCNAATFATPHAGAAVVIRQDLRDFFPTVAVARVRAVFAACGYSTVVARVLAELCTTTSPVAELRGLDYSQRTLLGARHLPQGAPTSPRLANLVARGLDRRLTGYANRHGLTYTRYADDLALSGDADLDTARLIWTVTRIARDEGFTVHTGKTLIRRAHQRQVLAGLVVNDRPAAPRDRYDAVRALLHNCLRTGVSAQNRDEHNDFRAHVYGLISWIGETSPHRRDKLLAMAERVDWTG

SEQ ID NO: 5582 - protein, 430 aa, unidentified
  source 1..430: note = Related to NZ_JACVEE010000002.1; note = Nocardia sp.
MSGAVPPDLARELAYSFEFLGAEWSRSNLAEAFAEIVEPGRAEELARRVTDLMPSEPLDPVGTLQRLLAELPKLATIVVSLPPAADELADELPRTQPARTRFGAVDIPDLAALCALLNVTPAELEWFADHGNWLRRAAQPLSHYRYRQLPKTSGVRLVEAPKVRLREIQRRILHRVLSEIPAHPACHGFEKGRSATTFAAPHAGAEVVVRVDLRDFFTSIGVARVRAVFAACGYSPTVAQVLADLCTTATPVAELRTLDFNQRNLLRARHLPQGAPTSPRLANLIAHGLDRRLAGYATQHGLVYTRYADDLAISGKSDLDPGRTIWLATKIAKSEGFSIRPGKTRIRRPHQRQILAGLVINTHPAVPRDRYDALRALLHNCLRTGPATQNRDGHNDFRAHVYGLISWVGETSPARRDRLLAMADQVDWSK

SEQ ID NO: 5583 - protein, 418 aa, unidentified
  source 1..418: note = Related to NZ_JAGGMR010000001.1; note = Nocardia goodfellowii
MTGAVPAELARELAYAFEFLDAEWTRSNLAEAFAEIVEPERAEDLARRVTDLMPSEPLDPVGTLCRLLAELPKMATVVVPLEPLSAPVLFGAAELPDRAGLCALLNVTPDELDWFADHGGWLRRASKPLTHYRYRRLRKSDGVRLVEAPKVRLREIQRRILRHVLSGIPAHPACHGFEKGRSASTFAEPHAGAEVVVHLDLRDFFTSITVARVRAIFAACGYAPAIAQILADLCTTATPVAELRGLDYDQRNLLRARHLPQGAPTSPRLANLIAHGLDRRLTGYAIRRGLEYTRYADDLAISGKSDLDAAEILWLVTKIAKSEGFAIHPGKTRIRRPHQRQILAGLVVNSHPAVPRDRYDALRALLHNCLRTGPTAQNRDGHHDFRAHVYGLIAWIGETSPSRRDRLRAMADRVDWSK

SEQ ID NO: 5584 - protein, 416 aa, unidentified
  source 1..416: note = Related to NZ_BAGK01000206.1; note = Nocardia thailandica
MSHAVSGGLAAELAAHYADAEIGWERAALAEVFAEVIEPGRAEELAGRVVGLMPSEPLDGAATLRRLLAELPVLTVSTVALEPARRRMRFGATPIDDLAALAALLNLTQPELEWFADRGGWLRRSARPLTHYRYRRLPKSTGVRLVEAPKVRLREIQRRILRHALAGVPAHPACHGFEKGRNTATFGAPHAGAAVVVRIDLRDFFSSIEAARVRAVFAACGYAPAVARVLGELCTTAAPVAELRGLDHTQRTLLGARHLPQGAPTSPRLANLVARALDRRLDGYARAHGLAYTRYADDLAFSGPADADALAWAVTAIARDEGFAVHPGKIRVRRAHQRQVLAGLVVNAGPAVPRDRYDAVRALLHNCLRNGAAAQNRDGRPDFRAHVYGLIAWIGETNPHRRAKLLAMAARVDWDA

SEQ ID NO: 5585 - protein, 440 aa, unidentified
  source 1..440: note = Related to NZ_BDAY01000016.1; note = Nocardia altamirensis
MNRPALPALVAARLADEFGRCGGRWHRDDLAEAFAAVLDRERAEVFAVRVIGLMPTEPIDSVVTLRALLTELPALPIVIAQLEPVPDELRFGAPELPDTSAVARMLNLTPDELDWFADHGGWLRRTREPLAHYRYRRIPKKDGVRLVEAPKPRLREMQRTIARRILAGIPAHPACHGFEKGASAATFAAPHARAAVVVRLDLRHFFPSIGVARVRGVFRACGYRENVATVLADLCTTATAIRALTGLDHEQASLLRTPHLAQGAPTSPRLANLIARNLDRRVSGYARRHGLTYTRYADDLALSDPADTDVDAMIWALTRIIEDEGFEVHRDKTSVRRPHQRQVLAGLVVNDRPAVARAQYDAVRALLHNCLRTGAAAQNHNAHPNFRAHVYGSIAWIGATSPTRRQKLLDMAKRVDWTQSDAAGSGLAADAVEDFHEGGG

SEQ ID NO: 5586 - protein, 419 aa, unidentified
  source 1..419: note = Related to NZ_JAEMNV010000003.1; note = Antrihabitans stalagmiti
MTRRAVPPQLADLLADEFDAADRTWQRSDLAEVFGSFVNAVRAEELAQRVIALVPTEPVDRRNSLRSILAELPVLQRVVNLVEPAQHELRFGVPELTDLRSVASMLNVTPAELDWFADRGGWLRNSTEPLTHYRYLRRPKASGVRLIEAPKPRLREMQRTIARKVLASVPAHPACHGFEKECSAASFADPHTGSDVVVRVDLRNFFSSIGVGRVRAVYRAIGYDYAIANVLAHICTTATAVSALRGIDNQHASLLRMPHLAQGAPTSPRLANLIARNLDRRVAGYATKHDLTYTRYADDLAFSGPATTDVDALLWAVSHMVDDEGFTVNRRKTSVRRRHQRQLLAGLVVNSQPRAPREAYDALRALLHNCARTGAHEQNTDGHTDFRAHIYGRIAWIGETDPRRRQRLLDMAARVDWNR

SEQ ID NO: 5587 - protein, 451 aa, unidentified
  source 1..451: note = Related to NZ_BCRU01000034.1; note = Smaragdicoccus niigatensis
MRRISWQQRPKPLGTLRVRPGDKDKSRSSATVARPLMQGRFSLPHAQAIARAFGRRELSWRRENLAEVFAGFVEAGLAESLASQVIDNVPLEPIEPYPTLVAQLRSLRWEIDLNPPLAKPLRFGVPELPDVSALAQFLNLTPSELDWFADCGGWLRTASGPLSHYRYRQLPRRSGRRLVEAPKPRLREIQRTINRRILACLPVHSACHGFESGRNPATFSAPHSSAGLLIRMDLKNYFSSIGEPRVRAIFEAMGYSEVVSRSLAGLSTNASSIAALRGLDHEQRTFLRVPHLPQGAPTSPKLGNLAARGLDRRLSGFALRVGMTYTRYADDLAFSGADGINAGSIVSAVERIIAAEGLFVNRQKTLIRRSHQRQILAGLVVNDHPQVPRDSYDKVRAILHNAARTGAAAQNRGGHADFRAHVLGLISWIGETNPDRRERLLDLAAEVDWTT

SEQ ID NO: 5588 - protein, 416 aa, unidentified
  source 1..416: note = Related to VLIY01000014.1; note = Skermania sp.
MTPRAVSPAVAHALADEFARGGFRWRHSELAEAFAAIIDPVEAESLALRVVGLIPREPIDPQTTLQAVLADLPELPETVVAPEGEPGGLRFGVPEILDCGALATMLNLTTAELEWFADHGGWLRTAREPLSHYRYRRLPKSTGVRLVEAPKPRLREIQRTINRRILSGIPAHPSCHGFEKGRSAETFAMPHAQADVVVRVDLRDFFSSITVARVRAVFRACGYPDSVATALADLCTHASAIAPLRGLDHRQRTLLRVPHLPQGAPTSPRLANLVARNLDRRISGYARRSGLAYTRYADDLALSGTMDADSAVWAVTRIAEAEGFLVNPAKTSVRRQHQRQILAGLVVNNRPAAPRYAYDQVRALLHNCQRTGAAAQNRQGHNDFRSHVYGLIAWIGETSPARRQRLLAMAELVDWD

SEQ ID NO: 5589 - protein, 420 aa, unidentified
  source 1..420: note = Related to JAFBBK010000001.1; note = Rhodococcus corynebacterioides
MSETFWHHHTARMVAARLVDIEWNSTELGEVLARFEHVADVETLITRLLERRIHAPDSTEVAAELLEVIGYPGDPFVLPAPPVRPTPTVRFGVPAFATTAELAASLDVTVSELDWFADVGGWLRRAAPPLRHYRAREVAKSRGGTRILEIPKPRLREMQRRVLHRVLDHVVPHPAAHGFRAGRSAVTFARPHEGRDVVVRVDLADFFPTVTRPRARAVFEACGYPYRVASVLAGICTTAMPVDEVAGLPRSQAALLGVPHLPQGAPTSPALANLVARGLDRRVAGLARARGLVYTRYADDLALSGPSDTDVSTLLWALDRIVRDEGFVVNGDKTHVARAHRRQTLAGLVVNESAAAPRDRYDALRALLHNSVRTGAAAQNRAGVPDFRASVYGQIAWIGESSPSRRSRLLAMADRVDWES

SEQ ID NO: 5590 - protein, 408 aa, unidentified
  source 1..408: note = Related to LMRP01000002.1; note = Rhodococcus sp.
MPWTGAELGEVLGPFDRWFDVETLITRLSDAVRDAPDSVEAAVELLEGVGYPGLPFIPTPPPRIRPYRFGVPEISTPADLATSLGVTVPELDWFADLGGWLRRAAPPLRHYRAVEVPKKAGGKAGGRSDLGNIRILEVPKPRMREMQRRVLHRIVDHVDPHPAAHGFRTGRSAVTFARPHEQQDVVVRVDLADFFATVTAPRVRAVFEACGYPSKVAALLAGICTTAMPVDEASRLTTRRAAVMRTPHLPQGAPTSPALANLVARRLDRRVAGLARARGLTYTRYADDLALSGPSSTDVGTLLWALEHIALDEGFEVNAAKTHVRRSHTRQTLAGLVVNRSAAVPRDRYDDLRALLHNAARTGAAAQNRDELPDFRAHVYGLIAWVGESSPIRRVRLLDMAASVDWDA

SEQ ID NO: 5591 - protein, 450 aa, unidentified
  source 1..450: note = Related to JABUBR010000003.1; note = Rhodococcus corynebacterioides
MHAPRAALRRRRESMVAPVPLPLATVTPPPENPHWARHHVPAIAPLLVDTAWTRAALDEMLVPFGGFLDVDTLRRRLMDAITGAPYTVDIAVRVLLEAGFPGPPPRISIPRAPLVVRPWRFDVPRYASAAELAASLDVTLDELDWFADLQGRLCRAPTPLRHYRALTIPKSAGAHRLLEIPKPRLREMQRRVLRRIVERIEPHDAAHGFRRGRGVHTFAAPHRQQDVVIRMDVRNFFPTITFARIRGVFAACGYPDAVAAVLAGICTTSLPVDEARPLPWREATDLRGRHLPQGAPTSPALANLVARGVDRRLAGLARARGLAYTRYADDLALSGPSSTDVRTVIGTVDRILRQEGFTPNEAKTRVRRSHRRQSMTGLVVNVSPQVPREEYDALRALLHNCRRTGAAAQNHDGVPDFRAYVLGRVAWVGESNDTRRRRLLALADEVDWAS

SEQ ID NO: 5592 - protein, 399 aa, unidentified
  source 1..399: note = Related to NZ_BMCU01000001.1; note = Rhodococcus trifolii
MLVDARWTRSGLEEALESFSHRHDVDALVTRLLDLMPSAPLDVESGLSLLRGMPVLPMYLPPRPKPPSWHFDVPRYSSNIDLARSLDVTPWELEWFADLGGWLRTKPYPLQHYRTRTIDKRDGHRLLEVPKPRLREMQRRLLTRILDRIPPHDAAHGFVRGRSAVTFARPHEYADVVIRMDLADFFTSIRRPRVAAIFASAGYPRTVARTLAGICTTETPAERLSGLPHDRAVALRAPHLPQGAPTSPALANLVARRLDRRLAGFARKNGLTYTRYADDLAFSGSADVRVDKLITVVTTIVRAEGFSVNVRKTRIRRAHRRQVLAGLVVNESAAVPRARYDALRALLHNCSITGASEQNRDGLPDFRSHVYGVIAWIGESNEVRRAVLHDLAARVDWDS

SEQ ID NO: 5593 - protein, 415 aa, unidentified
  source 1..415: note = Related to NZ_CP032762.1; note = Rhodococcus sp.
MSRQFSPQMAAWLASLAAEAPWTRGGLEEAFMPLLGDKAARLAYRLIDLLPSAPYDTESLRGLITGLPLLPEPRSVEPSRRRDGVKPWLFEVPRYVTTGDLAESLNLTIPEIEWFADAHSRLTVAPEPLRHYRVTPIPKRVGARLLEIPKPRLREIQRKILRRILDNVPAHAAAHGFVKGRSPRTFGIPHAGREVVMSVDLKDFFPTVGINRVVAVFDALGYPRNVAWNLAYLCTTSTPAGQLGGMPYATASLLRSRHLPQGAPTSPALANLVARRLDIRLTGLARSMGLRYTRYADDLAFSGSADVDAVLWVARQVIVDEGFVVNPVKTRVRRAHKRQILTGLVVNDWPAVPRKEYDELRAILHNCAVTGPEPQNRHGVPDFRAHLFGRIARIGETNSARRRRLLEMAEQVDWA

SEQ ID NO: 5594 - protein, 407 aa, unidentified
  source 1..407: note = Related to NZ_NPFR01000010.1; note = Rhodococcus sp.
MAAWLASLAADALWTRSGLEEAFLPILGEKAPRLADRLIDLSPVAPYDPESLRGLITGLPLLPEPATVEPSRRTDGFKPWLFEVPRYASTGDLAESLDLTISEIEWFIDAQSRLRTAATPLRHYRVTPVPKRVGFRILEIPKPRLREIQRKILRRILHNVPAHSAAHGFVTGRSPRTFGIPHAGHTVVVSVDLKDYFPSIGIERVVAVFDALGYPKSVAWSLAYLCTTATPAEQLGGFPYATASLLRTRHLPQGAPTSPALANLVSRRLDIRLTALAKSLGARYTRYADDLAFSGDIDADKIIWSASKIIADEGFAVHPYKTRVRRAHKRQQLTGLVVNDWPSVPRKEYDALRAILHNCAVTGPDPQNLSAIPDFRAHLYGRIARIGATSAVRRRKLLELAERIDWE

SEQ ID NO: 5595 - protein, 472 aa, unidentified
  source 1..472: note = Related to NZ_LVCV01000404.1; note = Rhodococcus sp.
MAHGRVSVRATDLRGNPWVGKKNWALRPTPVRTLRVHDGAEHERFRSPVAAAPWIAMTERQFNAQLAAYLAQLAADAQWTRERLEEAFMPILGERAPRLADRLIDLYPSQPFDQASVHRLIAELPRIPEAISHEPVRRSNSPKPWRFDVPRYFTTGDLAESLNLTIPEIEWFADAHSRLTTASPPLRHYRTTAIPKRVGARLLEIPKPRLREIQRKILRRILDHVPAHGAAHGFVKGRSPRTFGIPHAGKEVVISVDLKNFFPSIGISRVIAIFDALGYSRSVAWNLAYLCTTSTPAGQLNGLPYATASLLRTRHLPQGAPTSPALANLAARMLDIRLTGFARSMGLRYSRYADDLALSGDADVDKVLWVARRIITDEGFILNPLKTRVRRAHERQQLTGLVVNDWPAVQRREYDELRAILHNCTRTGPTSQNRSDMEDFRAHLYGRIARIGETSPTRRRTLLEMAERVDWT

SEQ ID NO: 5596 - protein, 416 aa, unidentified
  source 1..416: note = Related to NZ_JABFAO010000002.1; note = Rhodococcus sp.
MSERQYIPPMAAALARLAADAPWTRERLEEAFMPLLGARASRLADRLVELHPAPPFDEASVHRLIADLPLLPETASITPERRTSSFAEWRFEVPRYVTTGDLAESLNLTIPEIEWFADAQSRLRTAPEPLRHYRTTPIPKRVGARLLEIPKPRLREIQRKILRRILDRVPPHSAAHGFVKGRSPRTFGIPHAGHEVLVSVDLKDFFPSIGIDRIVAIFGALGYPRTVAWNLAYLCTTSTPAEQLSGFAYPSASLLRTRHLPQGAPTSPALANLAARKLDIRLTGLAGSMGLRYTRYADDLAFSGSCDADVLLWTIRQIVRDEGFGLNPGKTRVRRAHKRQQLAGLVVNEWPAVPRREYDGLRAILHNCILTGPAAQNRAGVPDFRAHLYGRIAHIGETSAARRRRLLEMAEQVDWS

SEQ ID NO: 5597 - protein, 407 aa, unidentified
  source 1..407: note = Related to LVHI01000032.1; note = Rhodococcus kyotonensis
MAAFLAELASDVPWTRDRLEEAFMPVLGVKALRLADRLIDLYPSPPFDEESLYRLIADLPRLPDKKSEEPERRTSGPKPWRFDVPRYFSTGDLAESLNLTIDEIEWFADAQQRLKTASSTLRHYRATSISKRSGARVLEIPKPRLREIQRKVLRRILDQVPAHGAAHGFVTGRSPRTFGIPHAGRDVVLAADLKDFFPSIGIGRVVAIFDALGYPRTVAWNLAYLCTTSAPAGELAGVPYETASLLRTRHLPQGAPTSPALANLAARMLDIRLTGLARSMGLRYTRYADDLAFSGTCDVDRVLWVVRHIVRDEGFMLHPNKTRVRRSHKRQQLTGLVVNEWPAVPRSEYDELRAILHNCARTGPEAQNRSGHGDFRAHLYGRIARIGETSATRRRKLLELAERVNWS

SEQ ID NO: 5598 - protein, 418 aa, unidentified
  source 1..418: note = Related to NZ_CP010797.1; note = Rhodococcus sp.
MTERELTPQAAATLARLAADAEWTRSGLAEAFEPLVPAKATWLADRVINLYPSPPFDEASIFVLLRDLPFIPEPSVSSQRPTRNSDKPWRFEVPRYETTGQLARSLDLTISEIEWFADLQGRLRTAPFPLQHYRSARLDKRQGIRLLEVPKPRLREIQRKILRRILDRIPSHPAAHGFAKARSPRTFAMPHSERDVVISVDLRRFFPSIGFDRVVAIFEAVGYPRTVAKTLAALCTTVTPASELTGMDRPTAARLRATHLPQGAPTSPALANLAARQLDIRATGLARSGGARYSRYADDLAFSGGPDLDVDRLLWLITQIAHDEGFTIHPDKTRVRRAHQRQQLTGLVVNSWPAVPREEYDTLRALLHNCIASGPAEQNRHHHNDFRAHVYGRIARIGETNETRRAKLLSMASRVNWD

SEQ ID NO: 5599 - protein, 441 aa, unidentified
  source 1..441: note = Related to NZ_JABFAU010000077.1; note = Rhodococcus sp.
MTERELTPRAAAILARLAVDADWTRSGLDEAFARLIPAKATRLADRVMNLYPSPPFDEASIFVLLRDLPFLAEPSISSEIPTHFGGKPWRFEVPRYETTGDLARSLDLTISEIEWFADLHGRLRSAPYPLQHYRSARLDKRQGIRLLEVPKPRLREIQRKILRRILDRIPPHPAAHGFRKARSPRTFALPHSGRAVVVSMDLRRFFPSIGFDRVVAIFEAVGYPGTVAAHLAALCTTVTPAVELIGMDRPTASRLRATHLPQGAPTSPALANLVARQLDIRASGLARSVGAHYTRYADDLAFSAAADLDVDRLLWVMSQIAYDEGFAVHPGKTRVGRAHQRQQLTGLVVNSSPAAPREEYDNLRALLNNCIRAGVSGQNRRGADDFRAHVYGRIARIGETNEARRTKLLNMAARVDWPTPVFEPRNSGSRTAHTPATEEDR

SEQ ID NO: 5600 - protein, 422 aa, unidentified
  source 1..422: note = Related to CP015235.1; note = Rhodococcus fascians
MNDRELSPRAAATLARLAADAEWTQSGLEEAFSRFMPAKASRLADRIIDLYPSPPFDEASIFVLLRDLPLIAQSSKSSQRSPIRGRVVPWRFEVPRYETTGQLAQSLDLTISEIEWFADLQGRLRTAPFPLQHYRSARLDKRHGVRLLEVPKPRLREIQRKILHRILDRIPPHPAAHGFRKGRSPRTFATPHAEREVVVSVDLRRFFPSIGFDRVVAIFEAVGYRRRVAANLAALCTTVTPAGELTGMDRATAARLRTTHLPQGAPTSPALANLAARQLDIRAAGLARTMGARYTRYADDLAFSGPADLDVDKLLWVLSQIVRDEGFTIHPDKTRVRRAHQRQQLTGLVVNAWPAVPREEYDNLRALLHNCLGSVAAQQNRNGLTDFCAHVYGRIARIGETSETRRRKLLEMAARVDWEGSG

SEQ ID NO: 5601 - protein, 416 aa, unidentified
  source 1..416: note = Related to NZ_CP039254.1; note = Rhodococcus sp.
MADRELTPRSAAVLAALAADVQWTRSGLQEAFAALVPARASWLADRVINLFPMPPFDESSIFRLLRDLPFIPEPLVSSHTPPPGGNVKPWRFEVPRHETTGQLAQSLDLTIDEMDWFADLQGRLTRAPFPMQHYRSARIDKRVGSRLLEVPKPRLREIQRKVLRRILDRVPAHPASHGFRRGRSARTFAIPHAGREVVVSVDLKNFFPSIGFDRVVAIFEAVGYPPTVASNLAGVCTTVTPAAELVGIDRPTASRLRSTHLPQGAPTSPALANLAARQVDIRLTGLARSMGLRYTRYADDLAFSGSPEVDTLLWVVGQVAQDEGFALHPDKTRVRRAHQRQQLTGLVVNDWPAVPRAEYDALRALLHNCMTTGADVQNLNGSADFRAHVYGRIARIGETSSTRRERLLAMAARVDW

SEQ ID NO: 5602 - protein, 416 aa, unidentified
  source 1..416: note = Related to NZ_CP007255.1; note = Rhodococcus erythropolis
MRDFELDPELARRLAVAAADAPWTLSGLEEAFGTVFGVSPTLLAVRVLDLMPAPPFEPQTLYRLLRELPRLRPVPLSLDTNESSVWRFDVPRYNTSVDLARALDLTISELEWFADRGEWLRTKPLPLRHYRPMQISKKTGARLLEVPKPRLREIQRKILRRILDLVPPHDAAHGFVRGRSPLTFAAPHAQSEIVIGVDLAQFFPSISGSRVHAVFTALGYPPAVAGVLTGLCTVATPADTLRGLPYAQASQLRTAHLPQGAPTSPALANLVARKLDIRLSGLAQANWLTYTRYADDLAFSGIEVADVGTLLWSVEQIARDEGFAIHPRKTKVMRPHRRQHLTGLVINDQPSYPRDDYDRLRALLYNAASTSAQEQNRDGIENFRAHVYGRIAHIGETSTTRRHTLLRLAERVDWDG

SEQ ID NO: 5603 - protein, 444 aa, unidentified
  source 1..444: note = Related to JAGRPD010000186.1; note = Verrucomicrobiales bacterium
MSLDRVPLVQQLVRRALDGRWESHAILARWHTLGARPCITLRALAHLAVHCAGRGIRPTEKRLIRTLLSSPLLSRWLRQQHRTLLPLPPPAPKFEPVEKLAHLALPPLTTETDLAQFFHMELAELSWHADPQLRLRHQPDGRLQHYTYRWLPRRNGSPPPRLLEIPKPWTRQLQRRIWDQLLRPVPVHAACHGFVPGRSRLTAAAPHCGKEALLRIDLKDFFVSIPRWQVRALWMTLGYPEAVARLLAGLCTTVTPAAVLDACPAPPQDPSQRWWWRKRASTPHLPQGSPCSPALANLCAWRLDTRLTAYATAAGLDYTRYADDLLFSGSARTLRRPQRRHALMEIIRSEGFCVHPDKVRLMTQSQSQQALGLVLNQRLNLPRASFDQLKAELHHALHHQGLPSEASARSQKLAQLRGRIQEMIDIHPRRGQKLLALWQRLLRD

SEQ ID NO: 5604 - protein, 334 aa, unidentified
  source 1..334: note = Related to JAJTHZ010000014.1; note = Xanthomonadaceae bacterium
MPPTRSARAPALDSLDQLRRWLRLSTGELLWFCDVYGNGRRACATALRHYRHRWIAKRSGGLRLLEIPKARLKRMQRRILDELLSHAAIHPAATGFVRGRSCLDHARTHVGARWVVTSDLRDWFGSIPRARIAAQFRRSGASKHVADALARLCTACTPSAIVDLAAVPDRAHLRVPHLPQGAPTSPALANLVASRLDRRLAGYARHAGLNYSRYADDIALSPQPGVETPPQRALEALQRIARSEGFRVNPRKIRIKRHGSRMTVCGIVINERLNLARDAYDRLRAAVHRLASSTDVDPLEIARVRGRLSWLESLNPRRAAKLRRLLESRGTPST

SEQ ID NO: 5605 - protein, 458 aa, unidentified
  source 1..458: note = Related to NZ_JACCBH010000001.1; note = Microbacterium pseudoresistens
MTDAATPASRVLARTPHPLPRDVAAALGDAFLAAEAWERAALIDAGADVLGARRRWLGPLVRDVLTELARPPSDAPRLLVSVIVRSSAFLEAVRKAEERGSPLRIRHRVIAPSVSREPTGALPAIGDVTDLAALLEIDLGRLQWLADVKHWNRRARSPALQHYRYEWRRRPGRVPRLLEIPEQRLRRAQRRLLHAVLALIPVNDAAHGFLPGRSAATGAARHIGAETVISLDLTTFFARVTAPRIYGVLRQSGFSEPVAHTMTGLCTTAVPPAVLAAMPPGGSPDERFALRRALASTHLPQGAPSSPMLANLAIRRLDSRLTGWADALDATYTRYADDLAFSGGPALARRADAFIRGARRIIADEGHEANARKTRVRGRGVRQSVTGIVVNERLNVSRDDYDRLKAIVHNCVVHGPATQNRGGVADFRAHLLGRISWVESLNARRGERLRAEFARIRW

SEQ ID NO: 5606 - protein, 456 aa, unidentified
  source 1..456: note = Related to NZ_BMCM01000001.1; note = Microbacterium murale
MAATTASRVLARTPRPLPSSVAASLADAFLASEVWAPKELIRTGAFVMGARRRWLTPLVGDVMSAFVRAPVDAPRLLTSVILRAPDFIEAVRKADERRSPLRIHHHVVGPSTSQPPSGPLPRIDSIPDLAVLLDLDVGRLQWLADTKQWNRRARPGPLHHYQYEWRARPGRIPRLLEIPEQRMRRVQRTLLERVLGLIPVNGAAHGFVPGRSAVTGAAHHTGSDIVISLDLTTFFARVTAGRIFGTLRQSGLSEPVSHVITGLCTNAVPPRVLAAMPPGGSPEERFALRQALATSHLPQGAPSSPMLANLAIRRLDSRLTGWADAVDATYTRYADDLAFSGGSTLAKRPDAFIRGVQRIIEDEGHLANPRKTRVRRQGVRQTVTGIVVNQRANVSRADFDRLKATIHNCVLHGPHTQNHRSLDDFRAHLLGRISWVESLNPPRGARLRQEFLRIRW

SEQ ID NO: 5607 - protein, 459 aa, unidentified
  source 1..459: note = Related to NZ_PCOT01000008.1; note = Microbacterium sp.
MTEALTPATRVLARTPRAGASAIATALADAFLAADAWTAPHLVDAGSFVLGARRRWLPRVVDDVMVDFVRAPVDSPRLLIAVIRDSPAFRAAIEKADAARTPIRIHHHVVATTRSREPAAGLPRIDDIAALAVLLELTDGQLAWFADTKRWNRRARPGPLHHYRYEWRSRPGRVPRLLEVPEERLRRVQRRLLERVLGLIPANDAAHGFMPGRSAVTGAARHVGAGIVVSVDLTTFFARVSAGRVYGTLRQSGYSESVAHTIAGVCTSAVPPRVLAAMPPGGTPEERFALRRALAANHLPQGAPSSPMIANLAVRRLDSRLTGWAAAVDAAYTRYADDLTFSGGPSLAARPDAFIRGVRRIVEDEGHSLNERKTRIRRQATRQAVTGIIVNERLNLVRGDYDRLKAIIHNCILHGPSSQNRAGVADFRAHLRGRISWVESLNAQRGARLRAEFARIVWA

SEQ ID NO: 5608 - protein, 465 aa, unidentified
  source 1..465: note = Related to NZ_JAFBBQ010000001.1; note = Microbacterium keratanolyticum
MTSTAAARALGHSPQPAASAIARALADAFLETPSWTRPELMAAGARVLGARRRWLGPVVDEILGDLVRAPHDSPRLLATLIEDSPAFREGVSKAAARRAPQQIHYRPLAPQHPPALSHPLDPEPPLPRLRTLPELAALLDLSLGHLEWLADTKNWNRRARPGSLHHYRYEWRTRPGRVPRLLEVPEDRMRRTQRALLDQLLSRIPANDAAHGFLPGRSAVTGAARHVASDIVISLDLTTFFARVTATRIYGTLRQAGYDEQIAHAITGLCTNAVPPRVLAAMPPGGSPEERFALRRALAASHLPQGAPSSPMLANLAVRRLDSRLTGWAEKAEASYTRYADDLTFSGSGVIARRPDAFVRGVRRIIADEGHIANPAKTRVRRQGTRQAVTGIVVNQHPNLSRVEFDRLKAILHNCAVHGPAAQNRSDASDFRAHLLGRISWVESLNPGRGAKLRREFSRIDWGSP

SEQ ID NO: 5609 - protein, 469 aa, unidentified
  source 1..469: note = Related to VFRA01000001.1; note = Rhodoglobus vestalii
MSGSFGKRAVPNTAVVIMAAHRSYRAPHPSPSAISHALAYAFLASDVWETKQLVDAGWSVLGAHRRWLRAVVADVVAAYHRPPTDSSRELAAFIRNSPAFVDAIAKARQQRRPIRIHHLVVAPSQARDVGGLVPRINTVAELAELLGLTIGQLDWYADTKNWNRRAPVGPLQHYRYEWRTRPGRTPRLLEVPEERIRRVQRLLLDAVIALIPVNDAAHGFIANRSAVTGAALHTGREIVVSLDLTTFFTRVTASRIYGVFRQSGFPETVAHILTGLCTNSVPPRVIAAMPPGGDADERFALRHALAANHLPQGAPSSPMLANLAIRRLDSRLTGWAHSVGAIYTRYADDLAFSGDRDLARRPDAFIRGVQGVVREEGQTINPRKTRVRRSGVRQTVTGIVVNDHTNISRHDYDLLKATLHNCATLGVERQNRGGHNDFRAHLLGRIAWVETLNPLRGEALRQKFALIRW

SEQ ID NO: 5610 - protein, 465 aa, unidentified
  source 1..465: note = Related to NZ_CP035375.1; note = Salinibacterium sp.
MTDAPPQTTGSPISGVPRVRRVPHPTPAAIAGALSYAFLAADQWATNSLIDAGARVLGARRRWLRTVVADVVAVYHRPPADSSRELASFVVQLPAFVEAIAKAKQQRRPIGLHHFPAAPSQARDRGDPVPVVDTVGELATLLGVTVGHLEWCADTKNWNRRAPAGRLQHYRYEWRQRPGRTPRLLEVPEERIRRVQRTLLDTVIGLIPTNVAAHGFVASRSAATGAALHTAREIVVTLDLTTFFTRVTAARIYGVFRQSGFPESVAHILTGLCTNSVPPRVIAAMPPGGSADERFALRQALAGNHLPQGAPSSPMLANLAIRRLDSRLTGWANAIGATYTRYADDLAFSGDRDLARRPDAFIRGVHRIVLDEGHNVNPRKTRVRRSGTKQTVTGIVVNERTNISRHDYDALKALLHNCAQHGPDSQNLSHHVDLRAHLMGRIAWVTALNPHKGEVLHTKFALIRW

SEQ ID NO: 5611 - protein, 470 aa, unidentified
  source 1..470: note = Related to nan
MSLRFWSMTMDAASSTRAKAGLRGIRRPHPAPSAVSQALAYAFLASEVWAAKELVDAGSLVLGARRRWLRPVVADVMAAYHRAPTGSTRELAAFIATVPAFVDAVAAAAQQRRPIRIHRVVATASQARPAGGPLPAIDTVADLAVLLGLSLGELEWFADTKNWNRRAPAGALHHYRYEWRARPGRTPRLIEVPEQRLRRAQRALLECVIGMIPLNDAAHGFVPGRSAVTGATLHTGREIVVSLDLTTFFARVRASRVYGVLRQAGFAESVAHVIAGLCTNSVPPRVIAAMPDGGSAEERFALRHALADRHLPQGAPSSPTLANLAIRRLDSRLSGWATSVGATYTRYADDLAFSGDRELARRPDAFIRGVERIVHEEGHSVNPQKTRVRRSGVRQSITGIVVNEHTNISRREYDQLKAILHNCAAHGPESQNRDHHNDFGAHLLGRIAWVSTVNPLKGRSLRQKFALIDW

SEQ ID NO: 5612 - protein, 338 aa, unidentified
  source 1..338: note = Related to LMDN01000001.1; note = Leifsonia sp.
MPVPRLDTLADLSALLGLDIGELEWFADARGWNRRAPERLQHYRHEWRTRPGRTPRLLEVPEQRMRRAQRTLLDTVIGVLPAHDAAHGFMPGRGVISGAEAHLGSAVVISLDLVSFFSRVSARQIYAVLRRAGLPEVVAHRVTALCTHAVPPAVLAGMPPGGSPEERFALRQALARPHLPQGAPSSPMLANLAVRRLDARLSGWSDAAGARYTRYADDLSFSGGAELSRRSDAFVRGVARIVAAEGHELNERKTRVRRAGERQSVTGVVVNDRLNLARRDVDQLKAILHNCAVHGPESQNRAGHPDFRAHLEGRLNWVESLNPARAARLRRDFERIAW

SEQ ID NO: 5613 - protein, 463 aa, unidentified
  source 1..463: note = Related to NZ_JPRS01000007.1; note = Cryobacterium sp.
MSDSPGATGAGRAALVLGREPHPSSAGVATALAFAFLAADVWSPSGLSTAGTAVLGVRRRWLGPLIRDVLEAYRQPPHDASLELSRVIGATESFRAAVRLADSRGAPLRVLHHKVAESRAREMPGLVPHIDTPADLARLLELSVGDLDWFADAKQWNRRSAVAALHHYRYEWRLRPGRTPRLLEIPETRVRAAQKRLLVEVLGLIPTHDAAHGFVPGRSAVTGASRHTGSDVVVSLDLTTFFARVTGAAVYGTLRRAGLPEAVAYAITGLCTTAAPPRVLSAMPPGGDPDERFALRKALASTHLPQGAPSSPMLANLAIRRLDARLQGWAAAAGGTYTRYADDLAFSGGGQLARRPDAFVRGVQHIVIAEGHTANPRKTRVRRASVKQTVTGVVVNARTNMSRRDVDRLKAIIHNCVLHGPESQNTAAHADFRAHLLGRLSWLESLNPERARTLRTEFRRIEW

SEQ ID NO: 5614 - protein, 432 aa, unidentified
  source 1..432: note = Related to NZ_PJJO01000056.1; note = Cryobacterium sp.
MALAFLAADDWSATRLSAAGSLVLGARRRWLGPLVRDVLAAYREPPHDASRELTTVISGSDAFRAAVDRADARGAPLQVTHHLVAQSRGREAPAPAPLLDTVSGLARLLDLSVGDLDWFADTKHWNRRAPAGALQHYRYEWRLRPGRTPRLLEIPGSRLRATQRKLLVGVLGFIPTHDAAHGFVPGRSAVTGASRHTGKNVVISADLTSFFARVSGARVYGTLRRAGIPETVAYTITGLCTTAAPPRVIAAMPPGGNLDERFALRKALAATHLPQGAPSSPMLANLAIRRLDARLEGWSSAAGAVYTRYADDLAFSGGGALARRADAFVRGVDRIVTSEGHTLNSHKTRVRGASLKQTVTGVVVNKHTNMSRRDIDELKAILHNCVVNGPDSQNQGAHPDFRSHLLGRLSWLEAVNPARGQKLRVEFGRIHW

SEQ ID NO: 5615 - protein, 461 aa, unidentified
  source 1..461: note = Related to NZ_JACHBQ010000001.1; note = Cryobacterium roopkundense
MTSKLRGATPAALVLARRPHPSSSEVASTLALAFLSSKFWHATALSEAGSAVLGARRRWLGPLVRETLTVYREAPHDAPRALTAFIAAADVFRAAVAHADASGVPIGLAHHRIPLTRARPVPGVVPPLGTLAELADFLELPIGDLDWFADTRQWNRHAPSGALQHYRYEWRARAGRTPRLLEIPGARLRSAQRTLLTGVIGLVPTHDAAHGFVPGRSAVTGASRHTGTDVVISLDLTTFFARVTGARIYGTLRRAGLPEAVAYTITGLCTTAAPPRVIAAMPAGGRPEERFALRQALAATHLPQGAPSSPMLANLALRRLDSRLAGWAAAASSVYTRYADDLAFSGDLTLARRADAFARGVERIVAAEGHLVNPHKTRVRRASVKQTVTGIVVNTQTNMSRQESDRLKAIIHNCARHGPESQNRGAHPEFRAHLLGRLSWLETLNPARGRKLRAEFSRIHW

SEQ ID NO: 5616 - protein, 467 aa, unidentified
  source 1..467: note = Related to NZ_QZVS01000068.1; note = Cryobacterium melibiosiphilum
MSAGAAVPRPTPAALVLARRPHPSTDALAATLAAALLGAKTWSKTEMIDAGAHVLGARRRWLGPLATEILSSYPRAPTDSPRELAAHIIDCAAFSNAIEAATSRGVPNIIAHYPLTPPLTPPQARAVTSALPRLDTLGDLAAFLTLTPGELDWFADTGQWNRTARPGALHHYRHEWRVRPGRTPRLLEVPGTRLRALQRTLLHDLLGLIPTHGAAHGFVPGRSAVTGAARHTGTAAVISLDLTTFFASVTGSAIYGTLRRAGYPESVAHSITGLCTHAVPPRVIAAMPPGGDPAERAALRRALAAPHLPQGAPSSPVLGNLALRRLDARLAGWADAAAATYTRYADDLAFSGGTDLRRRADAFVRGVTRIALAEGHTVNPHKTRVRPASVRQSVTGIVVNEHPNISRVDADRLKAILHNCELHGPAGQNRAGHADFRAHLLGRISWVEQLNPERGARLRASFGRIRW

SEQ ID NO: 5617 - protein, 417 aa, unidentified
  source 1..417: note = Related to SOHE01000083.1; note = Cryobacterium sp.
MIEVGARALGARRRWLGPLASEILSSYPRAPTDAPRELAAHITGCTAFSNAVEEATSRGVPITIASYPLTPPQAGAVTSALPRLDTLGDLAALLGLTPGELDWFADTGHWNRRARPGVLHHYRYEWRARPGRTPRLLEVPGTRLRALQRTLLNDLLGLIPAHPAAHGFVPGRSAVTGAARHTGAAVVISLDLTSFFASVSAQNIYGTLRRVGYPEAVAYSLTGLCTHAVPPRVIAAMPPGGDPGERAALRRALASAHLPQGAPTSPVLGNLAIRRLDARLDGWAEAAEATYTRYADDLAFSGGDALHRRADAFVRGVTRLVTAEGHTVNPHKTRVRPASVRQSVTGIVVNARPNLVRVEADRLKAIVHNCVVHGPAGQNRGAHPDFRAHLLGRISWVEQLNPQRGARLRATFARIRW

SEQ ID NO: 5618 - protein, 391 aa, unidentified
  source 1..391: note = Related to NZ_JAALGE010000001.1; note = Marisediminicola senii
MIRGHTPHSSTADVASALAGAFLAADAWTERDLVAAGAHVLGARRRWLPPLVRETLAAYRRPPVDAPRELGDFVEMTAAFGLAVVAAHDRRTPIRIEHRVLVAARAVPATPAVPRVDGLDDLADLLGLTPGELDWFADRRHYTRRATDTRLQHYRHEWRTRPQRTPRLLEVPGSRLVAVQRTVLAELLGPLPVHGAAHGFVPGRSAITGAARHTGAAVVIALDLSTFFSRVTAGRVYATLRRAGYPEAVAHAITGLCTHAVPPRVIAAMPSGGDADERFAARRALAAAHLPQGAPTSPMLANLSVRRLDARLSAWAERVDATYTRYADDLAFSGPPALARRSDAFIGGGERIVTAEGHPPNARKTPGRPARPPPRGPGNAGTDPPHTPRTG

SEQ ID NO: 5619 - protein, 370 aa, unidentified
  source 1..370: note = Related to JABMLG010000003.1; note = Microbacteriaceae bacterium VKM Ac-2855
MRAALRRAVKRGTPVIIAHHVLAEPVAPASASPVPRLASVTELAAALHLEIGELEWFADTRLQLRRASSTRLQHYRYEWRERPGRLPRLLEVPGRRLRAAQRAALDAVIGLAPLHDAAHGFVPGRSARTGAERHVGSEVVIALDLTTFFARVTARDVYRALRAEGLPESVAYVLTGLCTHAVPYRVAAHPPRGGDLDERFALQKALTVPHLPQGAPTSPALANLCVRRLDARLAGYAEAAGAVYTRYADDLAFSGGPALARRADAFARGVRRIVASEGHELNDHKTRIRTASVRQSVTGIVVNTRPNVTRAEYDALKATLHNCIRDGPASQNRAGHAEFRAHLLGRISWIASLNPARGERLRAEFDRIPW

SEQ ID NO: 5620 - protein, 364 aa, unidentified
  source 1..364: note = Related to JABMLH010000001.1; note = Microbacteriaceae bacterium VKM Ac-2854
MRAALADAAHRGRPLGIAHHLIAEPPSGTHPGSLAELAALLELTPGELDWFADTQLRQRRAPDGPLQHYRYEWRERPGRLPRLLEVPGRRLRAAQRVLLEEVVGLLPLHDAAHGFVPGRSVRTGAERHLGQEVVIALDLTTFFARVSARDVYRLLRGASIPEAVAYTITGLCTHAVPYRVAAHPPRGGDLDERFALQKALTVPHLPQGAPTSPALANLSLRRLDARLAGYAAAAGAAYTRYADDLAFSGGPALARRADAFIRGVERIVAAEGHLINAHKTRVRKAAVRQSVTGVVVNRVTNVTRTEFDALKATLHNCVVHGAASQNRGAHPDFRAHLLGRISWVAALNPARGAKLREEFDRIHW

SEQ ID NO: 5621 - protein, 459 aa, unidentified
  source 1..459: note = Related to NZ_CP017146.1; note = Marisediminicola antarctica
MKETTVSAAALVLARHPHPSVPALATALGHAFLAADQWTARELIASAARTLGARHRWVGPLVAEVLAAYHRPPIDAPRELASMIEAAEAFRAAVARAEQRRAPIRIAHYAVEPGTARPMPAGVPRINGHGALAELLGLSPGELDWFADTALWNRRGTSERLQHYRYEWRQREGRVPRLLEVPQRRLKGVQRSVLASILGPIPAHDAAHGFVPGRSAVSGAALHTGNDVLIALDLSTFFARVPARRIFGTLRQAGLPEAVAHTVSGLCTHAVPPRVIAAMPRGGTAEDRFALRRALATPHLPQGAPTSPALANLAIHRLDARLSGWADAAGATYTRYADDLAFSGGPPLARRADAFVRGVTRIVEAEGHSLNRLKTRVRASSVRQVVTGIVVNDRTNLPRAEFDRLKAVLHNCVMHGPHSQNRAGHSDFRAHLLGRISWVEALNPGRGPRLREELERIRW

SEQ ID NO: 5622 - protein, 491 aa, unidentified
  source 1..491: note = Related to nan
MNETGPIPGDDDPTGPATARRRGGRHVPSPRSTRGSATLGREPAPGAPGLSLLLAYAFLAAPDWRQEELIAVGAVLLGARRRWLGPLARGVLTGYPRRPVGAPRELARWIAAQPAFTDAIARASARGMPISPARYLTAVTEGPAPAGSAPGSAVATPGTRDLAWLARELRLTPGELDWFADTRHWNRRAASRALHHYRYEWRVRPGRVPRLLEVPGIRLRTVQRHVLDHILAPIPLHDAAHGFAPGRSARTGAAVHTGADVVVALDLVSFFAHITPGRVFGVFRQAGFPEATAHALTGLCTHEVPDAVLQSMPDGGGSGERFALRQALRAAHLPQGAPSSPALANLAVRRLDARLAGWAAAAGGSYTRYADDLAFSSPAPLARRADAFIRGVERIVVAEGHAVNRPKTRVSGASVRQTVTGVVVNARTNVARTDYDALKAILHNCRVHGPESQRRGQADFRAHLAGRIARVESLNPQRGRRLRDAFERIRW

SEQ ID NO: 5623 - protein, 492 aa, unidentified
  source 1..492: note = Related to NZ_CP095501.1; note = Arthrobacter sp.
MDRTGPTTGDDDRMRPATARDGGGRGRPSPRPTPASATLAREPAPGVPGLSLLLAHAFLAAPQWRREELIVAGAALLGARRRWLGPLVRGVLSGHPRPPDGAPRELARWIAAQPAFTEAVARASARGTPIGPAHHLPAVPEERTPLRTTASADAVRTPGTRDLAWLARELRLTPGELDWFADTRHWNRRAAHRALHHYRYEWRVRPGRVPRLLEIPGIRLRTLQRRVLDHILAPLPLHDAAHGFVPGRSARTGAAVHTGADVVIALDLVAFFARVPPGRVFGVFRQAGFPEATAHALTGLCTHAVPDAVLRSMPDGGSAGERFALGRALRTAHLPQGAPSSPALANLAVRRLDSRLAGWAAAAGGTYTRYADDLSFSGPASLARRADAFVRGVERIVVAEGHTVNRLKTRVGGAPVRQTVTGIVVNVRTNVARTDYDALRAILHNCRVHGPESQRRGQADLRAHLAGRISWVESLNPQRGRRLRDAFERISW

SEQ ID NO: 5624 - protein, 484 aa, unidentified
  source 1..484: note = Related to NZ_PRKW01000004.1; note = Arthrobacter pityocampae
MDGAGPRAVRGPARPRRGRGAPEGPTSASATLAREPAPGVPGLAFLLAHAFLAAPDWRREDLVAAGAALLGARRRWLGPLVRGVLAGYPRRPEGAPRELARWIAAQPALTDAVARAAARGEPVRPARYLPPAPEEQAFGDRSAPGGVEASGARDLAWLAREVRLTPGELDWFADTRHWNRRAGAPALHHYRYVWRARPGRAPRLLEIPGIRLRTVQRRVLDHLLAPIPLHEAAHGFVPGRSARTGAALHTGADVVIALDLVSFFARVPPGRVFGVFRQAGFPEATAHALTGLCTHEVPDAVLRAMPDGGSAEDRFALARALRTAHLPQGAPSSPALANLAVRRLDARLSGWAAAAGGSYTRYADDLAFSGPADLARRADAFVRGVERIVVAEGHTVNRRKTRVRGAAVRQTVTGVVVNARTNVARTDYDALKAILHNCRVHGPESQRRGQADFRAHLAGRISWVESLNPQRGRRLRDAFERISW

SEQ ID NO: 5625 - protein, 488 aa, unidentified
  source 1..488: note = Related to NZ_CP024915.1; note = Arthrobacter agilis
MDDTESLPDDGGSFPARGGPVRASRGTAAARTLARTPAPGGPGLAFLLAGAFLTAPAWQREDLLDAGAAVLGGRRRWLGPLVRAVLAGYPRRPDGAPRELARWIRAQPVFTDAIGRAAARGVPITPARYLTAGAPEEGHRPSRVDLGTGAPAAPGAGDLGRLARELRLTPGELDWFADTRSWNRRAPSQALRHYRYEWRSRPGRVPRLLEVPGIRLRTVQRRVLDLVLAPIPLHPAAHGFVPGRSARTGAALHAGTDVVISLDLVSFFAHVSPGRIFGVLRQAGCPEATAHVLTGLCTHSVPEAVLRAMPGGGTPEERFALARALRAAHLPQGAPSSPALANLAVRRLDSRLAGWAEAAGGTYTRYADDLAFSGPAGLARRADAFLRGAERIVAAEGHEVNRHKTRVRSAATRQTVTGVVVNAHPNVARADYDALKATLYNCLVHGPESQRRGQADFRAHLGGRISWVESLNPLRGRKLREAFDRIGW

SEQ ID NO: 5626 - protein, 559 aa, Vibrio sp.
  source 1..559: note = Related to WNZI01000030.1; note = Vibrio cholerae
MLGWQRRIPAEAEHVHRARSSPGLPRGTQTDQHRAPQAPDCASRSSAPEQREQVGRDPSPADRQGGTGEGGHGGRRSNDGRQPDVSSRTRRAGPPPTTAGAALARLPTPGGPGLAFLLASAFLDSPSWQREHLVEAGAAVLGARRRWLGPLVRSVLSGYPRRPDGAPRELARWIAAEPVFSDAVGRARARRSPIRPARFLVQEDSERADPPEPVPPDAAVESGRTSGIKDLAWLARELRLTPGELDWFADTRHWNRRAGSALQHYRYVWRVRPGRVPRLLEVPGIRLRTVQRRVLDLLLAPMPLHGAAHGFVPGRSARTGARVHSGSDVVISLDLVSFFARVPPGRVFGVFRQEGFPEATAHVLTGLCTHAVPERVLRDMPDGGSGQERFDLAQALRAPHLPQGAPSSPALANLAVRRLDSRLAGLADAAGGRYTRYADDLAFSGPGALTRRADAFIRGVERIVEAEGHSVNRRKTRVRGASTRQTVTGVVVNVRPGVARPDYDALKATLHNCVVRGPESQRRGRADFRAHLAGRVSWVESLDPPRGRKLREAFDQIVW

SEQ ID NO: 5627 - protein, 487 aa, unidentified
  source 1..487: note = Related to LR131272.1; note = Arthrobacter agilis
MVSDERGHHRGSDGAPGAPGRPALISRATAPTSAASRALARTPDPGTAGLALLLAEAFLEASAWQREELVRVGAELLGARRRWLGPLLRGVLGGYPRRPGGAPRELARWIEAQPVFVEAVSTARAAGRPIVPVRYLVGERDGPRTPEDPEASEAECRDLAWLARELGLPPGELEWFADTRHWNRRAGLLLQHYRYVWRSRPGRVPRLLEVPGIRLRTVQRRVLDRHLLPIPLHPAAHGFVPGRSARSGATLHTGSAVVITLDLVSFFARVTPGRVFGVFRQAGYPEATAHVLTGLCTHSVPEAVLRAMPDGGTAEERFGLTQALRAPHLPQGAPSSPALANLAVRRLDARLTGWAEAAGGVYTRYADDLAFSGPAELARRADAFVRGADRIVTAEGHAVNPRKTRVRGSSVRQSVTGIVVNARPNVARTEYEVLKAILHNCTLHGPESQSRGQGDFRSHLAGRIAWVSSLNALRGKKLRDAFERISW

SEQ ID NO: 5628 - protein, 326 aa, unidentified
  source 1..326: note = Related to LMLU01000001.1; note = Arthrobacter sp.
MARELRLTPGDLDWFADTRQWNRRAVPVLQHYRYSWRQRPGRVPRLLEVPGPRLRVVQRRLLDRILAPLPLHPAAHGFVRGRSALTGAALHTGADVVISLDLTAFFAHVVPGRIFGALRQAGYPEATAHVLTGLTTHSVPDAVLRSMPDGGGPDERFALRRALRTAHLPQGAPSSPALANLAVRRLDARLTGYAEAAGGVYTRYADDLAFSGSADLARRADAFVRGVGRIVTAEGLAVNARKTRVRGSSVRQSVTGIVVNAHPNVARTEYDTLKAILHNCALHGPESQRRGRAEFSDHLAGRIAWVSALNASRGEKLRDAFERISW

SEQ ID NO: 5629 - protein, 427 aa, unidentified
  source 1..427: note = Related to LGIU01000097.1; note = Arthrobacter sp.
MARLLARAFLDAPTWQREDLLAAGADLLGARRRWLGPLVRTVLSGHPRRPAGAPRELAAWIERAPAFEEAVARAAAAGTPLAPSHFLLEDAPADTHDLGELARELRLTPGELDWFADTRSWNQRTPQPALRHYRHAWQVRPGRTPRLLEIPGIRLRTVQRRVLDRILTPLPLHGAAHGFVPGRSARTHAAAHTGSDVVIALDLVSFFASVPPGRIFGVLRRAGYPEAVAHTLTGLCTHAVPERVLRAMPDGGTPEERSRLTQALRAPHLPQGAPSSPALANLSLRRLDARLEGWAEAAGATYTRYADDLAFSGPASLARRAHAFVRGVERIVTAEGHRVNPPKTRIRGASVRQQVTGVVVNRHPNVPRKEYDALKAILHNCRVHGPESQRRGRVRFLEHLAGRIAWVASLDPQRGRKLQDAFDAIGW

SEQ ID NO: 5630 - protein, 457 aa, unidentified
  source 1..457: note = Related to NZ_JAFMPX010000005.1; note = Arthrobacter sp.
MTNDYKAAQVLAHTPHPTPAIVATALSHAFLAAPDWTVEALVSAGAEVLGARRRWLGPLVRAVVCAYHRKPADALRELAAHIGASEPFAAAVDKAHDQRKPLRLAAYAVAEPELREGTHPVPEVAGLEQLAAVLGVKLGELEWFADTRHLNRLASRSCLQHYRYMWRERPGRTPRLLEIPGLRLRSIQRKVLHGLLAPIPLHNAAHGFVPGRSASSGAALHTGADVLISMDLLSFFANVTAGKVFGALRQSGYPEAVAHRLTGLCTHIVPPRVISSMPPGGSAAERFALTQALRLPHLPQGAPTSPALANLALRRLDSRLQGWAEAAGAKYTRYADDLGFSGGPALARRTERFLRGAKHIAADEGHKLNERKTRVRPRSTRQQVTGIVVNQHLNAPRREFDALKAILHNCMLFGPESQNRADHTDFRAHLLGRITWMESLNSARSVRLRRDFDRISW

SEQ ID NO: 5631 - protein, 488 aa, unidentified
  source 1..488: note = Related to VFOO01000001.1; note = Subtercola boreus
MLGATQSVFGVRHRWLPALVREVLVVFRTAPVDAPRELAAVIRRSAALTGALSRAGERGRPLAIAHYPVGEAEHPEPAPAAEPARASASASASAPEPARASASAAEPPPAPSAAEPAPALSGAEPAPAASALVPVPPPALALPLEPPLPPPMPLPRTLPALAALLDVTAGELDWLADTGGWNRRAREGPLHHYRYEWRTRPGRVPRLLEVPNERMRTAQRTLLAEVLGGLPLHDAAHGFVLGRSALTAAGLHTGTDVVITLDLVTFFTRVTAGRVYGTLRQEGVPERVALALTGIATNRVPPRVIGAMPPGGDPGERFALRQALATAHLPQGAPTSPMLANLAIRRLDSRLAGFALAADARYTRYADDLTFSGPLPLRRRADAFLRGVTRIVVDEGHTVNRRKTRVRPAATSQRVTGIVVNERTALPRAEFDRLKAILHNCAEHGAASQNRAGLEDFRAHLLGRISWARALNPVKAERLQREFDRIVW

SEQ ID NO: 5632 - protein, 532 aa, unidentified
  source 1..532: note = Related to NBXA01000026.1; note = Subtercola boreus
MRWSADEVDGSRRDPPSPGPPRGTQTDSGTSPQASHRTSSGRTPAQTHRSSAGHRSTIRAPRPTAAAAVLARRPTASAGQVATALALALLAAADWTPEGMLAVLQSVFGRRHRFLPVLVREVRAVYRTAPQDAPRELAAVIRQSAALTDALDRARAAGRPLAIVHHPVSPGSEDHRESALPHAPAALSAPAPSTAAPPPRTLTELAALLDVTPGELDWLADTGGWNRRAPAGPLHHYRYEWRSRPGRVPRLLEVPTERMRAAQRILLHEVFALLPLHGAAHGFVPGRSALTAARLHTGRDVVIALDLVTFFTRVTAGRVYGALRQEGTPERIALALTGLATNRVPARVIGAMPPGGDPDERFALRQALAAAHLPQGAPTSPALANLAIRRVDSRLAGYAEAADAVYTRYADDLTFSGPVALGRRADAFIRGVTRIVEDEGHLVNRQKTRVRPAATSQRVTGIVVNEHTALPRVEFDRLKAILHNCAERGPESQNHDGHSDFRAHLLGRLSWARDLNPSKTERLEREFARIRW

SEQ ID NO: 5633 - protein, 532 aa, unidentified
  source 1..532: note = Related to PSTT01000018.1; note = Subtercola sp.
PTPASLAAAGVPSPSSARAAPVSPGSGVLARRPVSTPDTVATALALALLAEGEWAGERMIARAATVFGVRHRWLPRLVRELLAVYRQAPEGSPRELAAVIRRTASFTAALEHATEVGRPLTIVSYPVAADGPPRLSPALSPPSAAVDGIPLVAASNPRDPRHGTAPAALATAAGPAALATATGPAALTPAAPPRGLAGLRTLADLAELLGVTPGELDWLADVGAWNRRASPGPLHHYRYEWRARPGRVPRLLEVPSARMRSAQRTLLHDVFALLPLNDAAHGFVPGRSAVTAARLHTGAAVVVTLDLTTFFATVTAGRIFGALRQAGAGERVALALTGIATNRVPPRVITAMPPGGDPDERAALRRALAAAHLPQGGPSSPALANLALRRLDSRLAGYAGAAGARYTRYADDLTFSGGTDLRRRADAFVVAVRRIVEEENHTVNLRKTRVRPAATSQRVTGIVVNEHTALPRAEFDRLKAILHNCAERGPASENRAGHDDFRAHLLGRLTWARSLNPAKAERLQREFDRIAW

SEQ ID NO: 5634 - protein, 532 aa, unidentified
  source 1..532: note = Related to NZ_NBXE01000029.1; note = Subtercola boreus
MRWSADEVDGSDADPSSPGLPRGTQIDSGTTSQAPLRTPSGRAPALQHRSSAGHRTPPPPTPATPASAVLARRPQPSAEAVASALALVLLAPPAAPDWTPTGMLSALQGVFGARHRWLPALVREVRSVYRTPPQDAPRELAAIIRHSQPFLDAVGRAEARGRPLAVLRYPITAEAPAQPPVAPGPTPATPGPIPATPAALAALLGVTPGELDWLADVRAYNRRARPGALHLYRYEWRLRPGRCPRLLEVPTERMRRVQRTLLHEVLALLPVHHAAHGFVTGRSALTGARVHSGSAVVISLDLTTFFARVTAAGVYGSLRRAGFSEAVATTITGLTTNRVPPRVISAMPPGGGPDERFALRQALATAHLPQGAPTSPALANGAIRRLDARLEGYAAAVGARYTRYADDLVFSGPVALQRRAEAFVRGVTRLVDDEGHEVNPRKSRVSPASTSQRVTGIVVNTGSSLPREEFDRLKALLHNCATLGPASQNRAGVPDFRAHLLGRISYSSSVNPLKTRRLIREFNSIDWGVPRE

SEQ ID NO: 5635 - protein, 561 aa, unidentified
  source 1..561: note = Related to RCUY01000005.1; note = Mycetocola lacteus
MPADASRRTAHGRLNRSIAPPRCRRSGSFSRRIVMGRPAGHTPAPSLAAVADSLAAAFLAAAHPKPARDRDPAQGSDPTGDREAASGPAPTQNQDAPQGQDSTQGTDLTGDRDPAFTIAWTRSVLIAAGADVLGARRRWLPGLVSAVLAAYPRAPFDRPRELGRWIAQSAELTAAAEQAAAAGRHLVLVRHALYEIPAAHGAGAAGERPASSGAEVLAREPASRRPRTPADLARLLGLDAGELDWFADLRGWNRLAPGTKLHHYRYEWRSRPGRVPRLLEVPGQRLMYLQRQLIAEVYTDLPVHPAAHGFVSGRSAITGAAVHAGSHVVIGMDLTTFFARVTRGQIHAGLCRQGWGEALVPILAGLGTHAVPPAVIRAMPPGGDPGERQALAAALRIPHLPQGAPTSPLLANLAMHRLDERLTGWANAVGARYTRYADDLTFSGDTRLAARSDAFIRGVEAIVTDSGQRINPRKTRVRPRGTSQRVTGIVVNEHPAMDRHAYDRLRAILHNCARTGPEAQNRDRHPHFRLHLLGRINWAIALTPERAPGLWRLWDAIEWTD

SEQ ID NO: 5636 - protein, 478 aa, unidentified
  source 1..478: note = Related to NZ_RCUX01000009.1; note = Mycetocola tolaasinivorans
MTPNPGHTPAPSIRAVADSLASAFLDAARVPLDPGSGGEVLGHGAAAREHGWNRPVLIAAGASVLGARRRWLSPLVRAVLDAYPRAPFDRPRELAAWIEASAVLGDACAAATARGQHLVLVRHAVYEPVGAASPLPATPAELAGLLGLDIGELAWFADQRGWNRRAGSARLQHYRYEWRARPGRVPRLLEVPGQRLMRLQRQLVHEVLTALPIHPAAHGFVPGRSARTGAAVHAGSHVVIGMDLTTFFARVGRSEITAALRRAGWGEAVAPVLAALATHAVPEAVIRAMPPGGNPEERFALAQALRLPHLPQGAPTSPMLANLAMRRLDDRLLGWAAAVGARYTRYADDLTFSGDQRLAARSDAFIRGVSGIVADCGQRVNERKTRVRPRGTSQRVTGIVVNAHPAVDRRSYDALRAPLHNCARTGPAAQNRENLPYFREHLRGRIDWVVSLTPKREPALRRLWEAIEWEEPGSAPLR

SEQ ID NO: 5637 - protein, 441 aa, unidentified
  source 1..441: note = Related to NZ_CP080203.1; note = Mycetocola spongiae
MISSALAHGFLAASTEADWARAPLIAAGSAVLGARRRWLPALVDDVLRAFPRPPLRGLRELREWIASAPGPIAAVEAAAERGRPLRLARHPVYHEPGAAPGGMPANPAELAALCSIAPGQLEWFADTRLWNRRLSGDQHRLEHYRYRWLERPGRVPRLLEIPGERLRAVQRSVLDCVLAELPVHPAAHGFVPGRDARSGAAAHTGRDVVIGLDLRTFFARVGYPQILRVLRAAGHTEAVATLIAGLSTHAVPPRILREMPPGGSPEERFALRRALAARHLPQGAPTSPALANLVSAGLDRRLAGWAQKFGATYTRYADDLTFSGDRALRSRATRFIRGVDLIIAEEGHALNPRKTRVQPAAISQRVTGIVVNRHPNLPRREYDLLRAILHNCALHGPASQNRAGHPDFRAHLRGRIGWAAALNPDREAALTAAFNRIDWDR

SEQ ID NO: 5638 - protein, 501 aa, unidentified
  source 1..501: note = Related to CP007595.1; note = Arthrobacter sp.
MPDSCTAGASLRSAQQRTRTDSQVIGETIAALTTQHGPEHAEPTTASVTAASATLKRTPRPSSSTIASTLAQAFLGSPDWSKPGLVDAGAHVLGARRRWLGPLAAHVLRGYPRPPVDAPRELAAVVLQCEPFLDALAKAAQQRKPIRLANYVLASAVARENLVQGAPRIDTLADLAALLHVNCGELEWFADTKHWNRRAGGTLAHYRYEWRTRPGRLPRLLEIPAPRLRSIQRTVLRELLYPLELHDAAHGFVPGRSAVTGAAQHTGRDVVVNLDLVSFFAKVTAGRVFGTLRQSGFTEAVAHRLTGIATHVVPPRVLSLMPPGGDPAERFALRQALSLPHLPQGAPTSPMLANLSLRRLDARLAGLVEKFDGGYTRYADDLAFSGGRDMARRADAFVRAATVIVKDEGHSVNRLKTRVRPAGVRQSVTNVVVNERTNVPRVDFDRLKATLHNCRVHGPESQNWNGHPDFRGHLLGRISWVAALNPARGARLRQDFDRIQW

SEQ ID NO: 5639 - protein, 454 aa, unidentified
  source 1..454: note = Related to CP013200.1; note = Arthrobacter alpinus
MTRAAATLKRTPRPSSSAIAQTLAQAFLASPQWTKAELVAAGAHALGARRRWLGPLAAQVVRGYPRPPLDAPRELGAMIGSCDPFIEATAKALQQRKPILIANYVLAPSVARENRHAGVPQIGTLGELAERLKLSGGELEWFADPKHWNRTAARKLQHYRYEWRTRPGRLPRLLEIPAPRLRALQRTVLRELLYPLELHDAAHGFVPGRSAVTGAAHHMGRDVVLNLDLVTFFAKVTAGRVYGTLRQAGYTEAVSHRLVGIATHVVPPRVLAQMPSGGDATQRFALRQSLSVPHLPQGAPTSPTLANLSLRRLDSRLAGLAEKFDGGYTRYADDLAFSGGQDLAQHADAFLRAATLIIEDQEHSVNQQKTRVRRSGVRQMVTSVVVNERTNVPRPDFDRLKAIIHNCRMHGPQSQNREARSDFRAHLLGRISWVAVLNPARGAKLLQDFHRIQW

SEQ ID NO: 5640 - protein, 504 aa, unidentified
  source 1..504: note = Related to NZ_JAGIOI010000001.1; note = Arthrobacter stackebrandtii
MPDPCTAGAALRSAQLRTRTDSRVIGEAIAAMTAQPRARAAGRADPAVAPVTAASATLKRTPRPSPTAIAATLAQAFLSSPDWSKPALMESGAQVLGARRRWLGPLAAQVLRSHPRPPVDAPRELAALVLVSEPFVEALAKSVQQRKPIHLARYVLAAGAARDSQVRGAPRIDTVGALAARLGLGVGELDWFADPRHWNRRADARLQHYRYRWLVRPGRVPRLLEIPRPRLRFLQRAVLRELLHPLPLHDAAHGFVPGRSAVTGAAQHTGRAVVVNLDLASFFAHVTAGRVFGVLRQAGFTEAVAHQLTGLCTHVVPPRILVQMPPGGDPADRLALRQALSLPHLPQGAPTSPTLANLSLRRLDSRLAGLAEKFDGGYTRYADDLAFSGGRDMLRRADALVRAAGTIVEDEGHRLNRLKSRVRPAGTRQAVTSVVVNERTNLARDDFDRLKAIIHNCRVHGPESQNRDSVPEFRSHLLGRISWLSSLNPARGARLRQAFDLITW

SEQ ID NO: 5641 - protein, 533 aa, unidentified
  source 1..533: note = Related to NZ_QJVC01000003.1; note = Arthrobacter psychrolactophilus
MVVSGDTVVSVSMGACDGFSDEAGSVFRRPSLPGVTPGHAVLPDPCTSDASLRSAQLGNRTDSQVIGETIAVLNPNIAHITPASATLKRTPRPSTLAVTETLAQAFLAAPQWNKAALMAAGAHVLGARRRWLGPLVSDVLRGYLRAPVDAPRELAARIHHAEPFVEALAKAAQQRKPIRLAHYVLAPAVARENAPRQTPRINNLGDLAHLLELTPGELEWFADTRHWNRMATRKLQHYRYEWRVRPGRLPRLLEVPAPRLRAIQRIILHKLLYLIELHDAAHGFVPGRSAVTGAAQHTGQEVVMNLDLVSFFAKVTAGKVFGALRKAGFPEAVAHRLAGICTHRVPPRILALMPPGGDPAERFALRQALSLPHLPQGSPTSPMLANLSVRRLDSRLAGLSEKFDGVYTRYADDLAFSGGKDLARRADAFVAAVTAIVRDDGHRINRLKTRVRPASVRQSVTSVVVNQRTNPARSDVDRLKAILHNCRTRGPESQNWDGHPDFRGHLLGRISWVATLNPERGAKLLREFHRIQW

SEQ ID NO: 5642 - protein, 461 aa, unidentified
  source 1..461: note = Related to NZ_CZJT01000056.1; note = Paeniglutamicibacter antarcticus
MTGSQKPVTPASSVLSRTPRPTDSAVAATLAQAFLNSSRWTSAGLIEAGAQVLGARRRWLGPVVTLVLRSYPRPPVDAPRELGAMILGCEPFAQARAKAAVQRKPLRLAHYVLEPMVARENGQPRVPRLDTLADLAAMLELTGGELEWFADPQQWNRLAVPALQHYRYVWRRRPGRLPRLLEIPAPRLRGIQRTVLRDLLYPLEIHDAAHGFVPGRSAVTGATRHTGQDLVLTLDLVTFFARVTAGKVFGVLRRAGYTEAVAHRLVGLCTHVVPPRVLSAMPPGGSPTERFALRQALSQPHLPQGAPSSPVLANLSLRRLDARLTGLADSFEAVYTRYADDLAFSGGKKLARRSAAFIRFATVTIGEEGHGVNQPKSRLRTAGERQQVTSVVVNERTNAVRSEFDRLKATLHNCWTHGPDSQNRDRHADFRAHLLGRISWMASLNSDRGARLLRDFQRIQW

SEQ ID NO: 5643 - protein, 522 aa, unidentified
  source 1..522: note = Related to NZ_CP013745.1; note = Arthrobacter alpinus
MAPCDGFFDEAGSGFWRASLPGATPGYAVLPDRSTSGAALRSAQLGTRTERQVIEETIAAMTTSSIPVTPASATLKRKPRPSTSAIAATLAQAFLNSPQWSKPEITVAGAQVLGARRRWLGPLAAHVLLSYPRPPVDAPRELTATILASEPFIEAVAKAASQYKPILLASYALAPTTARENRQARVPRIDTLAALAEKLHLTLGELEWFSDPQHWNRTAARKLQHYRYVWRSRPGRLPRLLEIPGLRLRNIQRTVLTELLYPLELHDAAHGFVPGRSVVTGAARHTGKEVVVNLDLTTFFAKVTAGRVFGTLRQAGFTESVAHRLTGICTHVVPPRILAQMPPGGDADQRFALRRALSQPHLPQGAPSSPVLANLALRKLDSRLAGLADTFDAGYTRYADDLTFSGGRELARRVNAFIRTATGIIENEGHGVNKLKSRVRPAAVRQVVTSVVVNQRTNINRLDFDRLKATLHNCRRHGPESQNREAHADFRAQLLGRISWVTALNPDRGAKLLRDFHLIAWE

SEQ ID NO: 5644 - protein, 392 aa, unidentified
  source 1..392: note = Related to NZ_JAAWVT010000016.1; note = Paeniglutamicibacter terrestris
MYPRPPIDAPRELAATIFLSDPFTEAVAKAAHQRKPLRVANYALLPATARENRQPKIPRLDTLASLAGLLELSYGELEWFSDPQHWNRKAERKLQHYRYEWRQRPGRLPRLLEIPAPRLRNIQRTVLRELLYPIELHDAAHGFVPGRSAGTGAAQHTGQEVVINLDLVTFFAKVPAGRVFGTLRQAGFTESVAHRLTGICTHSVPPRVLSLMPPGGNLTERFALRQALARPHLPQGAPTSPMVANLSLRRLDSRLSGLAEKFDARYTRYADDLAFSGGNELARRTSAFIRTAISIIEAEGHEANRLKTRVRPASVRQLVTSVVVNKHTNVTRSDFDRLKAILHNCLSFGPESQNREAHADFRGYLLGHVSWVAALNPDRGAKLLHDFHRIQW

SEQ ID NO: 5645 - protein, 471 aa, unidentified
  source 1..471: note = Related to NZ_JAJJBU010000018.1; note = Arthrobacter cryoconiti
MTTPTPGAAVLARTPNPSPRNVSTALAYAFLAAPTWSEAELAAATTYVVGKRGGTRSAKWHTQLASSVLRAYPRPPLREPRQLAVFIAGAKPFYLAVDRATRLHATLTIAHYVLPPTNVAELKSPLEERSLIPQTLAELAGVLDLTVGELDWFADPLQWNRTARNKRLVHYRHQWRLRPGRTPRLLEIPAPRLREIQRSVLRELLSPLPLHDAAHGFTPGRSPATNAAHHTGRNVVVNVDLTTFFARVTAGKVFGILRQAGFPETVAHRLAGLCTHTVPLGVIAEMPQGGGASGRFAFRQALATPHLPQGAPTSPALANLSLRRLDSRLAGLAASFDADYTRYADDLAFSGGPGFSHRSLAFVSLVHKIVEQEGHTVNDAKTRVRGSGVQQRVTGVVVNAHTNVSRAEFDRLKAILHNCAVHGPAGQNRCGPQGSEHSDFRGHLQGRIAWVRHLNPARAAKLERIFAAIIW

SEQ ID NO: 5646 - protein, 456 aa, unidentified
  source 1..456: note = Related to NZ_JAAKZI010000011.1; note = Arthrobacter silviterrae
MKPSQPTAAASVLVRIPHPSANTVATALAHAFLAAGDWSKPALTAAGADILGARRRWLGPLASHVLRNYHRPPADAPRELAAVVLGCPAFGEALAKAATQRRPIKLAHLAVAPAVAQAARVPRLDTVADLAGMLALTPGELEWFADPRHWNRTAGPRLQHYCYQWRSRPGRVPRLLEIPQPRLRTLQRTILRELLAPIPLHDAAHGFVPGRSAVSGAAMHTGADVVVSLDLAAFFAHVSPGKVFGVLRQAGFTEAVAHRLTGLCTHAVPVGVLAEMPPGGDPASRFALRQALAVAHLPQGAPTSPMLANLALRRLDSRLSGWAGAFDAVYSRYADDLAFSGGAELARRADAFIRGAGRIVADEGHSLNGLKTRVHKAGVRQTVTGVVVNERTNIARAEFDQLKAVVHNCAAHGPEGQNRGGHPDFRAHLLGRIAWVSSVHPARGARLRAAFDEISW

SEQ ID NO: 5647 - protein, 459 aa, unidentified
  source 1..459: note = Related to NZ_CP029642.1; note = Arthrobacter sp.
MIPAGQAVAPAAAVLARSSRPTPDALASALSHAFLAADDWSKPALMTAGTGILGARRRWLGPLATHVLRSYHRPPTDAPRELAAVVLGSEAFGEALEKAARQRRPITLVRYAAEPAVARAARVPRLDTLAELAEVLDLSVGELEWFSDPGQWNRTASSRRLQHYRYQWRSRPGRVPRLLEIPLPRLRGLQRTVLRELLSPIPLHDAAHGFVSGRSAVSGAALHAGTEVVVNLDLAAFFAHVSPGRVYGVLRQAGFTEAVAHRLTGLCTHAVPVGVIAEMPPGGEPGDRFALRKALATAHLPQGAPTAPMLANLALRRLDSRLSGWAGAFDAVYTRYADDLAFSGGTELSRRADAFVRGAARIVADEGHSLNRLKTRVHRAGVRQSVTGVVVNTRTNVARPEFDRLKAVLHNCLLLGPEGQNRDGHDDFRAHLLGRIAWVTSVNPDRGAKLRAVFDAISW

SEQ ID NO: 5648 - protein, 476 aa, unidentified
  source 1..476: note = Related to NZ_CP012479.1; note = Arthrobacter sp.
MKHTPDSTRPGPLADSTPGPTPASAVLGRTPRPSPKTVATALAHAFLAAESWSKPDLVEAGATVLGARRRWLGPLAGHVLASYRRPPADAPRELTAVVLGSAPFAEAVAKADLQCKPIRIARYAVPPAGMGEAAGVPAGVPRLDTLAELAAILGVDAGRLEWFADPKHWNRTTGNPRLQHYRYQWRTRQGRVPRLLEIPHPRLRAVQRTVLRELLAGIPLHASAHGFVPGRSAVSGAARHTGRDVVINLDLAAFFAHVTPGKVYGVLRAAGYPESVAHRLTGLCTHAVPVGVIAEMPPGGSAEDRFALRQALRKAHLPQGAPTSPALANLTLRRLDSRLQGWAGGFDAVYTRYADDLAFSGGPVLARRADAFLKGAARIVADEGHTLNATKTRVHKAGVRQSVTGVVVNRHTNVSRRDFDRLKAVLHNCVVHGPDGQNRDGHPDFRAQLRGRIAWVASVNPGRGARLLADFTLIDW

SEQ ID NO: 5649 - protein, 479 aa, unidentified
  source 1..479: note = Related to NZ_PPXB01000002.1; note = Arthrobacter glacialis
MGAPLRSAKRGAQTDRLVIIEAVAAMIPTLSAAVLARNPRPTPQAIATALAHAFLAAEDWSKPSLISAAASVLGARRRWLGPLAEHILGLYHRRPADAPREVVAVVLHSEAFETAVEKAAKARKPIIVAHYVVQPAVAREARVPHLDTLAGLAGLLGLSIGELEWFADPRQWNRTATSKRLQHYRYQWRSRPGKVPRLLEIPQPRLRALQRTVLHELLAPIPLHNAAHGFVPGRSAVSGARAHTGAEVVVNLDLAAFFTHVTPGKVFGVLRQAGFTEAVAHRLTGLCTHAVPVGVLAEMPPGGDPTDRFALRKALALPHLPQGAPTSPMLANLALRRLDSRLSGWAGAFDACYTRYADDLAFSGGSELARRADAFVRGAARIVADEGHSLNRLKTRVHRAGVRQSVTGVVVNQHTNVTRGDYDALKAVLHNCVSLGPEGQNRDGQANFRAHLMGRVAWVSSVNPGRGATLRALFERIVW

SEQ ID NO: 5650 - protein, 460 aa, unidentified
  source 1..460: note = Related to NZ_KI519454.1; note = Arthrobacter sp.
MAVATTGAATLARTPRTSPADLATALAHAFLGAESWSKAALVASAAGSLGARRRWLPPLAGHVLAAYHRPPADAPRELAAVVGQCDAFREALAKSARQRKPIRLAHLVPVAGKARDSATDIPRIDTLAELAGRLELSTGELEWFADPGQWNRSARTPRLQHYRYEWRSRPGRVPRLLEIPGTRLRAIQRRILRDLLQPIPLHDAAHGFVPGRSAITGAARHTGNEVVINLDLSTFFARVTPGKIFGVLRQAGYAEAVAHRLTGLCTHAVPARVLAAMPAGGDPGERFAVRQALARAHLPQGAPTSPLLANLALRRLDSRLAGWAAAVGASYTRYADDLAFSGGPDLARGADAFIRGAARIVADEGHDLNRRKTRVRGAATRQSVTGVVVNAHTNISRGDYDRIKAILHHCVLDGPGEQNRSGHPDFQAYLRGRIAWIESLNAARGAQLRAEFDRIQWQTA

SEQ ID NO: 5651 - protein, 454 aa, unidentified
  source 1..454: note = Related to NZ_PJIO01000003.1; note = Arthrobacter sp.
MSNNGSAVLARTPHALPMALSTALADAFLAADQWTAPALVQAGNHTIGSQRRWIPTLAAHIIATYPRRPLDAPRELAAVVRRSKPFARALARASRTGKPLPLANYCLDPASARESPLGIPVVDNLGVLSQHLGITPGELEWFADPKHFNRSAAPILQHYRYEWHTRPGRVPRLLEVPAPRLRTLQRTILANLLSPIPLHSAAHGFVPGRSAVSGAAAHAGNLVVINLDLATFFAKVSAGRVFGVLRQAGYAEAVAHRITGLCTHRVPARILSRMPAGGEPTDRFALRQALALPHLPQGAPTSPMLANLAVRRMDSRLSGWAGKFDAGYTRYADDLAFSAGTTLARGSDDFIAGVSRIVTDEGHSLNPRKTRVRGASLRQTVTGVVVNEHPNVTRADFDRLKAILHNCAVLGPELANRQAHADFRSHLLGRIAWVASVNPRRGAQLRADFARIVW

SEQ ID NO: 5652 - protein, 447 aa, unidentified
  source 1..447: note = Related to CP012677.1; note = Arthrobacter alpinus
MLARTPHPSPEAVSTALADAFLAAEQWNAEALARAGNHTCGSPRRWITTLAAHIVASYPRPPVDAPRELAAVVRQSKPFTRALARASRTGKPLPLKHYTLDPAVARHSPLDVPDIGNLSELARLLGITPGELEWFADPKHLNRNAAPILAHYRYVWHTRPGRVPRLLEVPAPRLRALQRVVLSQLLCPIPPHPAAHGFVPGRSAVTGAGAHTGKLVVVNLDLATFFAKVTAGRVFGVMRQAGYAEAVAHRLTGLCTHRVPARVLSQMPPGGDPADRFALRQALALPHLPQGAPTSPMLANLAVRRMDSRLAGWARRFDAGYTRYADDLAFSGGRDLARGADAFIAGVGRIVADEGHRLNHRKTRVRGASARQSVTGVVVNAHPNVRRTDIDRLKAILHNCATYGPSSQNLEGHAEFQAQLLGRIAWVAGVNPHRGAQLRAVYRRISW

SEQ ID NO: 5653 - protein, 489 aa, unidentified
  source 1..489: note = Related to JABBNV010000050.1; note = Acidobacteria bacterium
MSTNSTATRRATSSGLPTPSPEGLATALAHSFLAAKSWTAQDLKQSAADILGARRRWLGPLVRGTLAAYHRRPDGASRELASFIATSEPFFEAVSRARKQRKPIRLAHYAILGPLPPRHAIANQPQKTGKIPSVSGLEGLATMLGLEMGELEWFADIGGWNRRATAGSGTAGFTRETGRRYRHSKFQHYSYIWRSREGRAPRLLEAPLPRLKTIQRAVLDTFLAPIPLHPAAHGFVPGRSVVTGAAKHTGSAVIISADLSTFFARVTAGKIYDALRQSGYSEAVAHRLTGICTNAIPASVLNAVPPGGAPEERHALRQALATPHLPQGAPSSPALANIAIRRLDSRLAGWASKMNATYTRYADDLTFSGGPELARRADAFMAGVGRIVKDQGHTLNHRKTRVRRAGVRQTVTGVVVNQHVNTTRRSYDILKATLHNCVRYGPESQNPDSQTSADNAHFRERLAGQIAWVASVNPARGAKLRAKFQQISW

SEQ ID NO: 5654 - protein, 461 aa, unidentified
  source 1..461: note = Related to NZ_JADNYM010000009.1; note = Arthrobacter sp.
MMHAPRRIQSEGTRVLARTPHPTTSGVATAVAFAFLAAGEWTKAGLVQSGTELLGVRRRWLPSLAAQVLGWYPRPPVDAVRELAAVVEGCPAFINAVDRAARQRVPIRIARYVLAPGQARQTPFPIPRISSAGDLADLLELTSGELDWFADVKHWNGRAEPRLQHYRYVWRTRSGRTPRLLEIPAPRLRSLQRTVLRSILAPVPLHDAAHGFVSGRSAVTGARLHTGAQMVIALDLTAFFARVTAGKVFGILRQAGYSESVAHLLTGLCSHVVPPRVLSRMPPGGAVDERFALRQALSLPHLPQGAPTSPMLANLAVRRLDSRLSGWASVAGAVYTRYADDLTFSGGKELAGRADAFVRGAARIVGEEGHALNPRKSRVRAAGVRQVVTGIVVNERTNVARSEFDRLKAVLHNCVVHGPAGQNRDGHGDFRAHLLGRIAWLEALNPGRGARLRADFARIRW

SEQ ID NO: 5655 - protein, 451 aa, unidentified
  source 1..451: note = Related to NZ_JAATJL010000001.1; note = Arthrobacter pigmenti
MTTTTPGARVLARTPHPSPVAIATALAHAFLATDDWSKNGLLAAGAEVLGARRRWLGPVAAEVLRFYRQPPVDAPRELAAVVVLNDAFRAAVARAKKNGVPIRIAHFAPTPVRAPRGLNDLSDLARLLRLPAGELDWFADTRHWNRRAHSKRLQHYRYEWRSRPGRMPRLLEVPRPRLRELQRTVHREILAGLRVHSAAHGFVSGRSAATGARFHEGARVVINLDLATFFTRVRAGRVYGIFRRAGFAEPVAHALTGLCTHSVPSGIARNAPAGGTAGEWFELRRALVLPHLPQGAPSSPALANLAVRRLDFRLEGWATAAGAVYTRYADDLAFSGGDQLARRADAFVRGATRIIEAEGHLVNAHKTRVRGSSVRQTVTGIVVNERANASRPEYERLKAILHNCVRHGPESQNRSGHHDFRAHLLGRVAWMELLNPARGLKLRESFDRIEW

SEQ ID NO: 5656 - protein, 402 aa, unidentified
  source 1..402: note = Related to NZ_KI915009.1; note = Arthrobacter sp.
RWLPRVVAGVLGFYHRPPRDAHRELAAVIELSDTFRAAVERSVEQRRPIRIAHYVVGPGHGAKHAVLPLNDLADLTRLLGLTPDQLDWFSDTRHWNRRASSGSLQHYRYEWRARAGRVPRLLEVPRPRLREVQRKVLSLILSRLAVHDAAHGFVPGRSAATGARPHEGAKVLINLDLSTFFTRVTAGRVYGVLRQEGFPEAVAHTITGLCTHSVPPRLVTAAPSGGRLDERFVLRQALAVPHLPQGAPSSPMLANLAVRRLDRRLTGWAEAAGAVYTRYADDLAFSGGDDLTRRAGAFIRGVRRIVEDEGHFVNARKTRVSGWSVRQSVTGIVVNEHTNVTRSEFDRLKAVLHNCVLHGPGSQNRSGHHDFRSHLLGRIAWVAMLNPARGAKLRETFDRILW

SEQ ID NO: 5657 - protein, 462 aa, unidentified
  source 1..462: note = Related to NZ_JAAOYV010000002.1; note = Frigoribacterium endophyticum
MLAAPAWTEAALVAACAAALGPAAELSTTFHHDADPGDGGLRDDGSRDDGPHDDGPPHPWLPGLAHEALRAFPRAPHDEPRLLAEVLHTSGALGRGRARAAAQGASLRIVRVAVVTTPTRAADPRLRRLGSVADLAALLHLTVGELDWFADVRHWNRRHASGPLQHHRYEWRTRPGRTPRLLEVPGHRLRDLQRVALDEVLAAVPLHDAAHGFVPGRSAVTGAAVHTGAEVVVALDLRSFFARVGAGRVYGALRREGLPEAVAHVLTGLTTTSVPPAVLSAMPPGGDPSERAALRRALALPHLAQGAPTSPALANVASRRLDSRLAGWAAAAGARYTRYADDLTFSGGPGVAARSDAFVRGVGRVVADEGHELNPHKTRVRGAATRQTVTGIVVNEHVTVTRTSYDALRALLHNAERTGLEAQNRAGVPEFRAHLEGRIGWVEQLHPARGARLRELLARVPR

SEQ ID NO: 5658 - protein, 457 aa, unidentified
  source 1..457: note = Related to RKIE01000002.1; note = Frigoribacterium sp.
MTGAPDAVARGLALALLAVADADWTEPGLVTAASDALGLEPGDVDARWLPGLAHEVLRRFPRPPRDEARLLAVVVDRSGALGRGRERARTERRALRVVHPGVVAPGRTETDDAGAGAPDGRPELRGVGDLAALLGLTIGELEWFADTRLWNRRHPSGPLQHHRYEWRARPGRTPRLLEVPGFRLRDLQRVVLDRVLAGAPVHDAAHGFVPGRSAVTGAAVHQGSEVVVALDLRSFFARVTATQAYGALRREGLPEPVAHLLVGLCTNAVPAAVLSAMPPGGELDERVALRRALAVPHLAQGAPTSPALANLAMRRLDSRLAGWAAAAGARYTRYADDLSFSGGQEVAARADAFVRGVGRIVADEGHELNPHKTRVRGAATRQTVTGIVVNSGTNVTRASYDRLRAMLHNAASTGLEAQDRGGEPDFRAHVLGRIGWVEQLNPARGARLRELLARVPR

SEQ ID NO: 5659 - protein, 456 aa, unidentified
  source 1..456: note = Related to NZ_LMQR01000001.1; note = Frigoribacterium sp.
MSVRSPASAAGAHEPDPGPDAVATVLADAFLGAEWSVRGLAAAAGEAIDGSARFWRPLARDLVHALPRAPLDDPRTLAALIRRDPAFTEAVAEARRRGRPLRNVHHVPVTQEARSADPRLLRLGTVADVARLLHLTVGELDWFADPGRWHRRVDGGPLQHHRYEWRSRPGRTPRLLEVPGFRLRDLQRVVLDEVLAAVPLHDAAHGFVPGRSAVTGARRHVGREVVIALDLTSFFARVTAGQVFGSLRREGLPDAVAHVLTGLCTTSVPPGVLSRMPPGGSPEQRFALRHALAVAHLAQGAPTSPSLANVAVRRLDSRLDGYARAAGATYTRYADDLAFSGDGTLAARADAFVRGVGRIVGDEGHLLNQAKTRVRGAATRQVVTGVVVNQGTNTVRSEYDQLRAVLHNAATTGLEAQNRAGHPDFAAQLWGRIGWVEQLHPGRGARLRAAFARVPR

SEQ ID NO: 5660 - protein, 458 aa, unidentified
  source 1..458: note = Related to NZ_CP014619.1; note = Frondihabitans sp.
MDESSGSRRSHLVTRPGPPPAPDVATALAGAFLAAEEWSAPSLREAAAACLGSRRRFVGPVVTAVLTAHLRAPRDAPRELAALILRVDGFEDTVRRASRRRPVRIAQLSPTTTVSRVADERRPRVDTVADLARLLGTDVGHLDWFADTKLWNRRAPAGPLHHYRYEWRQRPGRVPRLLEVPGLRLREIQRTVLDELLAPLPLHDAAHGFVAGRGARSGAALHTGREVVIALDLVSFFARVDGRRIYSVLRQAGLPEPVAHSATGLVTHAVPPAVLSAMPPGGTSDERFALRRALAVPHLPQGAPTSPMLANLAVRRLDSRLGGYARAAGATYTRYADDLAFSGDAALAGRVDAFVRGVGRIVSDEGHRLNHAKTRVRRRGVRQTVTGIVVNESTTIGRREYDRLRAILHNCAAYGPSSQNRAGHADFRAHLLGRIGWVESLDPDRGRRLRAEFARIAW

SEQ ID NO: 5661 - protein, 478 aa, unidentified
  source 1..478: note = Related to NZ_PVTL01000004.1; note = Glaciihabitans tibetensis
MNARDLDAYTRTVATALAHAFLMADTWMKPALLDAGASVLGARRRWLGPLAREILATYRSRPTDAPRELVAVIRSAPSFVSAIEVSVERQAAIRIIHHPTSPTEARIRVDQVSAELALASLANAHTASANPASAHTPSAHTVTRLDSLVDLAALLDLTQGELDWFADVRLWNRRARPGRLHHYRYEWRQRPGRTPRLLEVPGQRLRAIQRTVLDEVLSPIPLHPAAHGFVAARSAVTGAAVHTGAAVVINLDLTSFFARVTAGRIYGVLRQAGLPEAVAHTLVGLAVHAVPPHILSQMPPGGSPGERFALRKVLAVPHLPQGAATSPALANLAVRRLDSRLAGWADAAGGQYTRYADDLAFSGGPELARRADTAIRGITRIVEDEGHTINPRKTRVRAAIVRQVVTGVVVNKRTNTPRREFDQLRSVLHNAATQGPDSQNRGSHSDFRAHLLGRISWMESVNPSRGPRLRAAFARIEW

SEQ ID NO: 5662 - protein, 442 aa, unidentified
  source 1..442: note = Related to JADKRN010000004.1; note = Agreia pratensis
MRQRSVAVGLSHAMLACPEWAFDALVDACGRALGVRPGWLWPLVDGVLGAYRRPPLDAHRELARWIEASDDFQSAFVAAREAGRVITLARLETVAASMAPTSLAVPSIAGLGELADFLEVSPSQLDWLTDTVHWNRRTPRGRLHHYGYDWLVRPGRTPRLLEVPTPRMRRVQRLVLREILGRLPLNDAAHGFVPGRSAATGAAAHVGAQTVITLDLRTFFARVPARRVFSVFRQAGYPEGVAHALTGLCTHAVPPWVGARMPAGGSSENRAALRRAISESHLPQGSPTSPALSNLAVRRLDSRLSGWAEASDATYTRYADDLAFSGVRLRGRAAVAFIAGVERIVRDEGHVLNESKTRIAGRGASQRVTGLVVNDVVAVDRAYFNELKAILHNCAAHGPRGQNRAGHPDFRAHLAGRLAWVESVSPSRGARLRRDWDRIDWS

SEQ ID NO: 5663 - protein, 442 aa, unidentified
  source 1..442: note = Related to NZ_FXAY01000002.1; note = Agreia pratensis
MRQRSVAVGLSHAMLACPEWAFDALVDACGRALGVRPGWLWPLVDGVLGAYRRPPLDAHRELALWIEASDDFQSAFVAAREAGRVITLARLETVAASMAPTSLAVPSIAGLGELADFLEVLPSQLDWLTDTVHWNRRTPRGRLHHYGYDWLVRPGRTPRLLEVPTPRMRRVQRLVLREILGRLPLNDAAHGFVPGRSAATGAAAHVGAQTVITLDLRTFFARVPARRVFSVFRQAGYPEGVAHALTGLCTHAVPPWVGARMPAGGSSENRAALRRAISASHLPQGSPTSPALSNLAVRRLDSRLSGWAAASGATYTRYADDLAFSGDGMRGRAAAAFIAGAERIVRDEGHLLNGSKTSIAGRGARQTVTGLVVNDSVAVDRPYFDELKAILHNCAAHGPRSQNRAGHPDFRAHLLGRLAWVESVSPSRGERLRREFDRIDWS

SEQ ID NO: 5664 - protein, 537 aa, unidentified
  source 1..537: note = Related to FUYG01000003.1; note = Agreia bicolorata
MAASIREEAAISRTSVPEENNGARRRRRLPLAWGNATDCGRGGWSRQTNTLSGVTPGYNSQPERTTAGTTPRFARSRARTDRSVARGSSHPFQGSVKEHSIAVGLSHAMLAAPEWAFDPLVDACGRALGARPGWLWPLVDGILDVYRRPPRDAHRELARWIEASTAFRGAIEAAREAGRSIALAHLETIPASMGPTPLTVPSIAGLGELADFLGVSPGQLDWLTDTAHFNRRTPRGRLHHYSYDWLVRPGRAPRLLEVPTPRMRRVQRRVLREILTALPLNDAAHGFVPGRSAVTGAAAHAGAETVITLDLQNFFARVPAQRVYSVFRQAGYPEAVAHALTGLCTHAVPPWVGARMPVGGSLEDRLALKQAISGSHLPQGSPTSPALSNLSVRRVDTRLNGWAAASGAAYTRYADDLAFSGEGLRGRAAATFIAGVARIVLDEGHLLNESKTRISGRGARQSVTGLVVNDGVAVDRLYFDELKAILHNCAVHGPHGQNRAQHADFRAHLLGRLAWVESVSPSRGVRLRREFDRIDWS

SEQ ID NO: 5665 - protein, 345 aa, unidentified
  source 1..345: note = Related to LMNF01000001.1; note = Agreia sp.
MAPTSAAVPSLDGLGELADFLEVTSPQLDWLTDTAHFNRRTPRGRLHHYSYDWLVRPGRAPRLLEVPTPRMRRVQRRVLRDILGPLPLNDAAHGFVPGRSAISGASAHAGAHTLITLDLSTFFARVPARRVYSVFRQAGYPEAVAHALTGLCTHAVPPWVGARMPSGGSPEDRAALRDAISRSHLPQGSPTSPALSNLTMRRLDSRLTGWAAASGAVYTRYADDLAFSGSDLRGRAATSFISGVDRIVRAEGHVLNRSKTRIAARGARQSVTGLVVNDGPSVDRPTFDELKALLHNCVVHGPASQNRAGHPDFRAHLLGRLNWIASVSQTRGTRLRRDFDRIDWS

SEQ ID NO: 5666 - protein, 451 aa, unidentified
  source 1..451: note = Related to NZ_LR882035.1; note = Agreia sp.
MRPGATAQPSATTLAAGLAHAMLACPLWTFDVLVDGCGRALGSRPGWLWPLVERVLSSYHRPPHDATRELARFIAQTRALHDAVEAARADGRTIALQHLETTPARSGENGARGVPRIDGLNQLAEFFAVTPGQLDWLTDTAHYNGRTRRGRLHHYSYDWMRREGRAPRLLEVPSRRMREAQRLVLAEILTPLPLHDAAHGFVPSRSAITGAAAHVGAETLITLDLSTFFARVPARRVFGILRRAAYPEAVAHALTGLCTHAVPSWVLARMPPGGSPEERAALRESLTRSHLPQGSPTSPALSNLSVRGLDGRLDGWAAASGFSYTRYADDLCFSGPHLTHRAAASFIAGAERIVAAEGHRVNRRKTRISGAGSRQSVTGIVVNERLNATREHVDELKAILHNCAVHGQASQNRFGHPEFRAHLEGRITWVAALNPGRGARLRRQFDLIDWG

SEQ ID NO: 5667 - protein, 395 aa, unidentified
  source 1..395: note = Related to NZ_KI914784.1; note = Arthrobacter sp.
MLAAYHRPPGGAPRELARFIAQTSAFGAAVARAVEKGVPIPVARYAVGFAAVGTSAGIAADVGALAELLDLTVGELEWFADTGHWNRRARPGPLRHYRYAWRTRTGRVPRLLEVPGPRLKAVQRRVLHQMLGSIPLHDAAHGFVPGRSVATGAGRHLGAEMLISLDLRAFFSSVGASRIHGIFRQAGMPEAVAYTLTGICTAAVPPAVLSRMPDGGSPDERFALRRALAAAHLPQGAPSSPALANLSVRRLDSRLAGWAEATGAVYTRYADDLAFSGSEPLARRADAFVRGVEGIVTSEGHLVNPRKTRVKGASVRQTVTGVVVNSVPNVPRPVFDELKAILHNCVADGPESQNGARGPAHRDFRAHLLGRISWVESLNPARGQRLRDDFDRIQW

SEQ ID NO: 5668 - protein, 432 aa, unidentified
  source 1..432: note = Related to CP047186.1; note = Rathayibacter sp.
MQGREVLVETLVHAFLGAEWTADALSAAAVDALGARRRWRGRVVAGVLVAFPHPPLDAPRELARCLDALLPDRAQPGVAHLAPVAARASASSSPVPRIDGWGDLARLLALTPGELEAFADVQHWNRRAPEGPVQHYDHVWRERPGRAPRLLEVPRPRLRAVQRSVLDQLVGLAPVHPAVHGFVPGRSAISGAAVHAGAAMVVTLDLQRFFAQVTAPRVFGVLRAEGLPEGVAHALTGLCTHEVPVAVLRRMPSGGTPEERAALRRSLSLAHLPQGAPTSPALANVALRRLVARLAGYAEAAGARYTRYADDLAFSGGPAFARRADAFARGAARLAAESGWAVNPRKTRLRPASTRQTVTGVVVNAHPNVRRADVDRLHAILHNCAVHGSAGQNRAGVPDFRAHLLGRVAWVAAVNPRRGAALRALFDSITWT

SEQ ID NO: 5669 - protein, 453 aa, unidentified
  source 1..453: note = Related to NZ_CP047180.1; note = Rathayibacter festucae
MHGRDAVVEALAHAFLGAEWTPAGLRAAAADSLGARRRWIGPLVTAVLVAFPHPPLDAPRELAQVVAGLLPERAQPVVAHLAPVPARAVPSSSPVPAIDGRDDLARLLGLAPAQLDGFADLGQWNRRTPHGALNPGALQNYDHVWRQRPGRAPRLLEVPRSRLRAVQRSVLDEIVGLAPVHPAAHGFVPGRSAITGAAVHAGSAMLITLDLQRFFAQVTAARVFRLLRGEGLTEAVAFALTGLCTHAVPVAAIHRMPAGGEPEERAALRRSLALAHLPQGAPTSPALANLALRRLDARLTGYAEAAGARYTRYADDLAFSGDARFARRAEAFARGAARIVEDAGYAVNPRKTRLRPASTRQSVTGIVVNAHPAVRRADVDRLRAILHNCAVHGPAGQNRAGVPDLQAHLLGRIAWVSAVHPGRGARLRALFERIPWPEPSGAAPSLDPAGPRP

SEQ ID NO: 5670 - protein, 434 aa, unidentified
  source 1..434: note = Related to NZ_FXBM01000004.1; note = Rathayibacter oskolensis
MQGRDVLVETLTHAFLGAEWTRDSLRAAAVDSLGARRRWLGPLATGVLVAFPHPPLDAPRELARCIAGLLPERAQPVVAHLAPVPARALPSSSAVPRIDGRDDLARLLAITPAQLDGFADLGQWNRRAAEGAVQHYDHVWRERPGRVPRLLEIPRARLRAVQRTVLEEVVGLAAVHPAAHGFVPGRSAISGAAVHAGSAMLVTLDLQRFFAQVTAPRVFGLLRAEGLPEAVAYALTGLCTRPVPIAVLRRMPTGGDVEARAALRRSLTLPHLPQGAPTSPALANLALRRLDARLTGYAEAAGARYTRYADDLAFSGDERFARRAEAFARGAARIVEDAGYAVNPQKTRLRPASVRQSVTGVVVNVHPNVRRADVDRLHAILHNCVVHGPSGQNRGAVPDFGAHLLGRIAWVAAVNPARGARLRALFDAIVWPGA

SEQ ID NO: 5671 - protein, 432 aa, unidentified
  source 1..432: note = Related to NZ_PZPL01000001.1; note = Rathayibacter caricis
MRGRDALVEALVHAFLGAEWTHDALRAAAADSLGARRRWLGPLVTRVLVAFPHPPVDAPRELGRCIAALLPDKAQPVVAHLAPVAASAAESSSPVPRIDGIADLAALLGLSVDALDGLADSGSWNRRAPEGRLQHYDHVWRERPGRVARLLEVPRGRLRAVQRSALDEIVGLAPVHPAAHGFVPGRSAITGAAEHVGSAVVVTLDLQRFFAQVTAPRVFGLLRREGLPEAVAYTLTGLCTHAVPVAVLRRLPEGGSPEERAGLRRALTLPHLPQGAPTSPALANLALRRLDARLTGYAEAAGARYTRYADDLAFSGDESFARRAEAFARGAQRVVEDAGYAVNPRKTRIRRASVRQSVTGVVVNVRPNVRRADVDRLHAILHNCAVHGPAGQNRAGVGDFRAHLLGRIAWVAAVNPGRGAALRAVFDRIEWG

SEQ ID NO: 5672 - protein, 477 aa, unidentified
  source 1..477: note = Related to NZ_LMMJ01000014.1; note = Curtobacterium sp.
MAEPTGVDGAHPFARTADVTIARTTDATTTRRTAVASARTAEIATVLADAFLAAEDWAVDALLAAGTAAVGPHRRFVPMTVLAALRGYPRAPRDAPRELAAFLQSVDGFAEAVRRSAERAPITVASRRATPTEAPPNTGHVPRIDTVADLARLLDLTIGRLEWFADTKQWNRRTHDAVLQHHGYVWRARPGRVPRLLEVPKPRLRAVQRTALDEILTFLPVHDAAHGFVPGRSAVSGAAQHTGRQAVVTLDLAHFFAAVSAPMVYGLLRRGGLPEPVAHTLTGLCIHVVPPRVIAAMPPGGTPEDRAALRRALATPHLPQGAPTSPTLANASVWRLDTRLAGWAASADATYTRYADDLAFSGDDRFAARVDAFVRGVGRIVTDEGHILNASKTRVRRRGVRQSVTGIVVNERPSVGRAEFDRLKAILHNCAEHGPDGQDRVGVPDFRAHLRGRVGWFEQVHPERGARLLAEFQRITW

SEQ ID NO: 5673 - protein, 437 aa, unidentified
  source 1..437: note = Related to LMPO01000009.1; note = Curtobacterium sp.
MVAGALADAFLAAEGWHRDELTAAGYDVLGVERTYVGVAVGVALEAYPRAPVDAPRQLAAVLASAPRLVRLHDSRVPLRPVRVLLRRATAVRARPIVASRLLVDTLPELARELDLTAGRLLWLADTKGWNRHRGPTSALHHHRHEWVQRPGRAPRLLEKPMAMLKRTQRTILDELLAAMPVHDAAHGFIAGRGVVSSAAEHVGCPVVLSADLTAFFANVRAATVYGVFRSAGFAEPLAHVLTGICTHRVPPHVLTAMPPGGDPDQRTALRRALTEAHLPQGAPTSPALANLALRHLDVRLAGWAAAVDATYTRYADDLTFSGGDALAARPDAFLRGVDRIVTEQGHTLNARKTRVRRAGVRQSVTGVVVNERTSPGRREVDRLHAILHNCVVHGPASQDRDGHADFRAHLLGRIGWVGQVHPVRGAALMTLFAQIRW

SEQ ID NO: 5674 - protein, 496 aa, unidentified
  source 1..496: note = Related to JALGRO010000013.1; note = Curtobacterium sp.
MEFPGEADGARDASTSPGSPRGTQYQQDDTPREARRAPRALPHGGTDRSPGNPTPTPLDVVARALADSFLAADRWNRDDLTAAGYDVLGVERTYVGLAVGIALDAWPRPPVDAPRQFAAVLASDPRLIRLHDSRVPLRPVRVLLRRATAVRAVPRVDSRLLVDTLPELARELDLTVGRLMWLADTRGWNRRPGPSSPLHHHRHEWVHRAGRAPRLLEKPMAMLKRTQRTILDELLVAMPVHDAAHGFVPGRSVVSGAAEHVGRSVVLSADLTSFFASVTAPSVYGVFRSAGFAEPLAHVLTGVCTHRVPPHVLTAMPPGGDADARGALRRALAAAHLPQGAPTSPALANLTLRHLDVRLAGWAAAMGGTYTRYADDLTFSGGDAMAARADAFLRGVDRIVREQGHTLNTRKTRVRRSAVRQSVTGVVVNERTSPGRREVDRLHAVLHNCVVQGPASQDRGGHPDFRAHLLGRIGWVEQVHPGRARRLRDEFARIRW

SEQ ID NO: 5675 - protein, 439 aa, unidentified
  source 1..439: note = Related to MJGI01000025.1; note = Curtobacterium sp.
MDVVAGALADAFLTAARWERDGLTAVGYDVLGVERTYVGVAVGVALDAYPRPPVDAPRQLAAVLAGAPRLVRLHEAREPLRPVRVLLRRAAPVQAHPTVASRLLVDTLPELARELDLTVGRLLWLADTRGWNRGPGPTSPLHHHRHEWLQRPGRTPRLLEKPYAMLKRTQRTVLDDLLAVLPVHDAAHGFVAGRSVVSGAAEHVGRPVVLSADLTSFFASVKSPTVFGVFRSAGFAEPLAQVLTGLCTHRVPPHVLTAMPPGGDPDERAALRRALAAPHLPQGAPTSPALANLSLRHLDARLAGWAAAVGGTYTRYADDLTFSGGDALAARPEAFLRGVDRIVTEQGHTLNRRKTRVRRAGVRQSVTGVVVNERTSPGRREVDRLHAVLHNCVEHGPSSQDRGDHADFRAHLLGRIGWVEQVNPGRARRLWAEFARIRW

SEQ ID NO: 5676 - protein, 436 aa, unidentified
  source 1..436: note = Related to MJGP01000013.1; note = Curtobacterium sp.
MAQALADAFLAADDWSRDALTAAGYDVLGVERTYVGVAVGTALDAYPRPPVDAPRQLAAVLATAPRLVRLHDSRGPRRPVRVLARQATAVRARPVTDSPLLVDTLPELARALDLTVGRLLWLADTRGWNRRPGASSPLHHVRHEWVARPGRTPRLLEKPMAMLRRTQRTVLDDLLAALPVHDAAHGFVPGRSVVTGAAGHVGRRVVLTADLTSFFATVRAPTVYGVFRAAGYAEPLAHVLTGLCTHRVPVHVLTAMPPGGSIDERRALRDALVEAHLPQGAPTSPALANLALRHLDARLAGWATAAGATYTRYADDLTFSGDDRLAARADAFLRGVERIVADQGHTLNPRKTRVRPAGVRQSVTGVVVNERTAPGRREVDRLKAVLHNCVVHGPASQDRAGHADFRAHLLGRIGWVGQVHPDRAAKLRALFARIEW

SEQ ID NO: 5677 - protein, 494 aa, unidentified
  source 1..494: note = Related to JACGXP010000002.1; note = Curtobacterium pusillum
MEFPGEAAGARDAPTSPGSPRGTRYQQDDTPRAGRRAPRATPHGGTDGSSGNPTPLDVVAVALADSFLTAEQWAHDELTAAGYAVVGVERAYVGLAVAAALEAYPRPPVDAPRQLAAVLASSPRLAELHRSREPRRPVRVLARRATAVRSRPETVSRLLVDTLPELARELDLTVGRLLWLADTRGWNRRPGPSSPLHHHRHEWVRRPGRTPRLLEKPMDMLRRTQRTILDELLTALPVHDAAHGFVAGRSVVTGAAAHTGQQVVVSADLTSFFASVSAPTVYGVFRSAGFAEPLAHVLTGICTHRVPPHVLTAMPDGGTPEERAALRQMLAAAHLPQGAPTSPALANTALRHLDARLAGWAAAVDAVYTRYADDLTFSGGHRLARRTDAFLRGVDRIVTEQGHRLNPRKTRVRRRGVRQTVTGVVVNERTSPGRREVDRLHALLHNAAEHGPASQNRAGHPDFRAHLLGRIGWVEQVHPGRARRLREEFTRIVW

SEQ ID NO: 5678 - protein, 494 aa, unidentified
  source 1..494: note = Related to JAFBBT010000001.1; note = Curtobacterium herbarum
MEFPGEADGARDASTSPGSPRGTQDQQDHTPREARRAPRARPHGGTDRSPGNPTPLDVVATALADAFLAADAWDVDHLTAAGYDVVGLERAYVGLAVRAALETYPRPPVGAPRQLAAALAGSPPLVRLHDARRDRRPVRVLLRRAVAVQAVPTVSSRLLVDTLPELARELDVTVGRLLWLADTRGWNRRPGPASPLHHHRHEWVHRPGRTPRLLEKPMDLLRRTQRTVLDELLAMLPVHDAAHGFVPGRSVVTGARVHVGQQVVVSADLTTFFASVRAPSVYGVFRSAGLAEPLAHVLTGLCTHRVPVHVLTAMPPGGDADERGALRRLLADSHLPQGAPTSPALANTVLRHLDARLAGWAASVGAAYTRYADDLTFSGGAELARRPDAFLRGVERIVTDQGYRLNAPKTRVRRAGVRQSVTGVVVNERTAPGRREVDRLHAVLHNCVVHGPVSQDRGGHADFRAHLLGRIGWVAQVHPAQAVRLRAEFDRIAW

SEQ ID NO: 5679 - protein, 316 aa, unidentified
  source 1..316: note = Related to QKLJ01000002.1; note = Curtobacterium sp.
MLADTRGWNRRPGSASPLHHHRHEWVRRPGRTPRLLEKPLDMLRRTQRTVLDELLAVLPVHDAAHGFVPGRSVVSGATLHVGQRVVITADLTSFFASVRARSVYGVFRAAGFAEPLAHVLTGLCTHRVPTHVLTAMPPGGDVDERAALRRALADAHLPQGAPTSPALANTVLRHLDARLAGWADAAGAVYTRYADDLTFSGDDRLARRADAFLRGVDRIVTDQGLRLNARKTRVRPASVRQSVTGVVVNDRTAPGRREVDRLHAVLHNCAEHGPESQNRSGHPDFRAHLLGRIGWVEQTNPGRADRLRREFVRITW

SEQ ID NO: 5680 - protein, 494 aa, unidentified
  source 1..494: note = Related to NZ_CP017580.1; note = Curtobacterium sp.
MEFPGEAADARDASTSPGSPRGTQDQQDDTPRAGRRAPRATPHGGTDGSPGNPTPLTVVAGALADAFLTAEHWGPDDLTAAGWAVVGVERAYVGLAVAAALAAHPRPPVDAPRQLAAVLEASPRLAELHRAREARRPVRVVARRATAVRARPETASRLLVDTLPELARELDLTVGRLLWLADTRSWNRRPGPSSPLHHHRCEWIRRPGRTPRLLEKPMDMLRRTQRTILDELLTALPVHDAAHGFVGGRSVVTGAAAHTGRQIVVTADLTSFFASVTAPTVYGVFRAAGFAEPLAHVLTGVCTHRVPVHVLSAMPDGGSPEERQALRAMLREAHLPQGAPTSPALANTALRHLDARLAGWAASVGAVYTRYADDLTFSGDERLAARPDAFLRGVDRIVTEQGLRLNPSKTRARRRGTRQSVTGVVVNDRTSPGRREVDRLHAILHNAAEHGPESQNRAGHPDFRAHLLGRIGWVEQVHPGRARRLHEEFARITW

SEQ ID NO: 5681 - protein, 494 aa, unidentified
  source 1..494: note = Related to NZ_CP081964.1; note = Curtobacterium sp.
MEFPGEAAGARDASTSPGAPRGTQDQQDDTPRAGERAPRATLHGGTDRSSGNPTPLSVVTAALADAFLTAERWEADELTAVGYVVVGVERAYVGLAVAAALEAYPRPPVDAPRRLAAVLAAAPRLVALHRSREDRRPVRVLVRRATAVRARPETASRLLVDTLPELARALDLTVGRLLWLADTRAWNRRSGPSSPLHHHRHEWITRPGRAPRLLEKPMDMLRRTQRTILDELLTMLPVHDAAHGFVPGRSVVTGAAVHTGQQVVVTADLTTFFASVSAPTVYGVFRAAGFAEPLAHVLTGLCTHRVPVHVLSAMPAGGSPEERHALRQALATAHLPQGAPTSPALANTSLRHLDARLAGWAGAVDAVYTRYADDLTFSGGDRLAARPDAFLRGVDRIVTEQGYRLNPSKTRVRRRGVRQSVTGVVVNERPSPGRREVDRLHAVLHNAAVHGPASQNRSGHPEFRAHLLGRIGWVEQVNPGRARRLREEFARIVW

SEQ ID NO: 5682 - protein, 494 aa, unidentified
  source 1..494: note = Related to NZ_CP027869.1; note = Curtobacterium sp.
MEFPGEAADARDASTSPGSPRDTQDQHDDTPRAGERAPRATPHGGTDGSPGNPTPLSVVASALADAFLTADRWAVDELTAAGYAVVGVERAYVGRAVSAALDAYPRPPADAPRQLAGVLAANPRLAALHRSREARRPVRVLARRATAVRARPVTDSPLLVDTLPELARALDVTVGRLLWLADTRAWNRHAPAGSPLHHLRHEWVVRPGRVPRLLEKPMDLLRRTQRTVLDGLLTRLPVHDAAHGFVPGRSVVTGAAVHTGQQVVLTADLTTFFATVSAPTVYGVFRSAGFAEPLAHVLTGLCTHRVPPHVLARMPAGGTPEERAALREALAVAHLPQGAPTSPALANTALRHLDARLAGWASAAGGRYTRYADDLTFSGDDRLAARSEAFLRGVERIVADQGHRLNPHKTRVRRRGTRQSVTGVVVNDLPSPGRREVDRLHAVLHNCVVHGPASQDRTGHPDFRAHLLGRIGWVEQVHPGRARRLREEFARIRW

SEQ ID NO: 5683 - protein, 437 aa, unidentified
  source 1..437: note = Related to NZ_CP076544.1; note = Curtobacterium sp.
MVATALADAFLAAEGWDTAHLTAAGLDVVGPERAYVGLAVRAALETYPRPPVGAPRQLAAVVARAPALARLHHRRADRRPVRVLQRRAVPVRAVPTVSSRLLVDTLPELARELDLTVGHLLWLADTRGWNRRPGASSPLHHHRHEWVRRPGRTPRLLEKPMDLLRRTQRTLLDELLVHLPVHDAAHGFVAGRSVVTGAAAHTGQEVVVTADLTTFFASVRAPSVYGVLRSAGYAEPLAHVLTGLCTHSVPVHVLRAMPDGGSLDDRAALRRALADAHLPQGAPSSPALANTVLRHLDARLAGWAAASGAVYTRYADDLTFSGGTALAGRVDAFLRGVDRIVTDQGHRLNPAKTRVRRRGVRQSVTGVVVNERTSPGRREVDRLHAVLHNCVEHGPASQDRAGHADFRAHLLGRIGWVEQVHPGRARRLHEEFARIRW

SEQ ID NO: 5684 - protein, 497 aa, unidentified
  source 1..497: note = Related to NZ_CP093378.1; note = Curtobacterium luteum
MEFPGEADDARGASSSPGSPRGTQDQQDTTPRAGRRAPRATPHGGTDGSPGNATPLDAIAVALADGFLAADAWDLPTLRAAGFDVVGIERVIVGAAVVAALDAFPRPPTDAPGSLAAVLARTPRLVSEHGRRTRRRPVRVLARPVSPVHAARHVEGPLLVDTLPELARALDLTVGRLLWLADTKGWNRHADPDGPLHHYRHTWTVRPGRTPRLLEAPMHLLRRAQRTVLDELLTTLPVHDAAHGFVPGRSIVTSAARHVGTEVVVTMDLTSFFATVRAPSVYGVFRNAGFAEPVAHVLTGLCVHEVPPHVLRAMPGGGGGSLDERVALRRALAEAHLPQGAPTSPALANLALRHLDARLTGWAVAAGATYTRYADDLTFSGGAALAARVDAFIAGVDRIVRDQGHEVNPHKTRVRRRGVRQAVTGVVVNDRLSPGRAEVDRLHAILHNCVRHGPASQNRDGHPEFRAHLLGRIGWVGQTHPARAARLRAEFDRIDWR

SEQ ID NO: 5685 - protein, 496 aa, unidentified
  source 1..496: note = Related to JAGGPH010000002.1; note = Curtobacterium sp.
MGFPGEADGVRGASSSPGQPRGTQEQLTHPPREARRAPRALPHGSTDQSPGNPGPLAEVAQALADAFLTADDWSRPALTAVGYDAIGVERAIVGLAVGAALDAYPRAPSDAPRQLARVLAAAPRLQSAYAARDPRVRPVRILARPVGAVRAGRSVDSPLLVDTVPELARALDLTVGHLLWLADPGGWNRRPDASSALHHYGYAWIPRGGRTPRLIEKPKPLLRRTQRLLLDGLLGALPVHDAAHGFVAGRSAVTGAAEHVGRQVVVTVDLTAFFASVTAGSVFGVFRTAGFAEPVARVLTGLCTARVPVHALRTMPDGGSVEHRFALRQALRLPHLPQGAPSSPVLANLSLRHLDARLAGLAAASGATYTRYADDLTFSGDDHFAGSVDGFLRAVGRIVVEQGHTINQAKTRVRRRGRRQSVTGIVVNERVAPGRAEHDRLKAILHNCAVHGPQGQNRAGHPDFRAHLEGRITWMMQLNPERGARLRAVFERIEWG

SEQ ID NO: 5686 - protein, 499 aa, unidentified
  source 1..499: note = Related to NZ_CP014513.1; note = Frondihabitans sp.
MARFRGEADDARRAPSSPGSPRGTQNDQQHTPREARRASRARPHGRIDGSPRNRGHTPLAVVAQALADAFLAAPEWTIPALDEAGFATVGVVRPFVRVTVVTALEAYPRPPRDAPRQLAAVILRSPRVVDLFEARAATNPVRVVSRSVGPVEARADHETASRLLVDTVPALARELDLTVGRLLWLADTRGWNRTAAEGPLHHYRYEWLARPGRTPRLLEKPLHRLKTTQRTILDDLLTALPVHDAAHGFVTGRSAVTGAALHVGQDVVISADLTSFFPSVRAGSVYGVFRDAGFAEPLAHLLTGVCTHRVPVGILSAMPPGGSPDERFALRQRLSAAHLPQGAPTSAALGNLVLRHLDARLAGWAKSAGSVYSRYADDLTFSGGASLASRADAFARGVDRIVADQGYALNPQKTRVRRQGVRQSVTGVVVNERTSAGRREYDLLKATLHNCLRDGPARQNRGGRPDFRAHLAGRVGWFEQCNPERGARLRSLFEQIAWA

SEQ ID NO: 5687 - protein, 512 aa, unidentified
  source 1..512: note = Related to QKTP01000001.1; note = Curtobacterium sp.
MRWSPGEADGARAAASSPGLPRGTRIDQEHTPQELGRAPRADAPERHDESSGDHQHADPPPTSRLVAPERSAGLVETAIALADAFLAASAWRPAELSAAGTTTVGRRPGLVEPAVAAVLAVYPRAPRDAPRRLAGVLASDRSFTAAFARLTARRPVRLRVRTVAPVVAAPVAAHVPVVDALPDLAALLGVTTERLLWFADTRGWNRRVPAGSPLHHYEHRWVQRPGRTPRLLEAPLHQLRTMQRVVLDQVLAPLPLSDAVHGFVRGRSALSGAEVHVGHDVVVSADLVSFFAAVPASRVYGIFRRVGYAEPVAHVLTGLCTHVVPDAVLRAMPPGGDLDERWALRQALATPHLPQGAPSSPALANLSLRRLDARLAGWAQAADAVYTRYADDLAFSGDGAIAARPDAFLRGVDRIVADEGHALNPRKTRVRRQGVRQSVTGVVVNAVPGVGRRELDRLRAVLHNCVRYGPASQDRGDHADFRAHLEGRVGWVEQVHPARGATLRAEFERIAW

SEQ ID NO: 5688 - protein, 506 aa, unidentified
  source 1..506: note = Related to NZ_LMNV01000002.1; note = Frondihabitans sp.
MQRPPGEAGGTRAVPPSPGLPRGTKIDENTTPREAERASRALPPAPADESFGGRSQHDANADIAHEPPGATLAEVARALADAFHAAPEWSAPSLLAAGSSVVGSRRAFVRVAVGGILESLPRSLPDSPRLLARLILDLPGFVASFRRGTRRTPVRIRSRAIAPTRAVGPGPRVDTVVDLARLLGVTVGRLEWFADTQGWNRLAEEGPLHHYRYKWRVRPGRVPRLLEVPLDRLRTMQRIILDELLTPMPLHDAAHGFVAGRSAITGAAEHTGRDVVIGLDLVSFFASVTAKQIYGLFRRAGLPETVAHLLTGVCTHSVPPRVLRAMPAGGSASARFALRQALSTPHLPQGAPSSPALANLSLQRLDSRLAGWADAFGATYTRYADDLAFSGDASLASMVREFVRGATAIVVDSGHTINAPKTRIRRAGTRQTVTGIVVNATTAPGRREYDRLRAVVHNCVTHGPEGQNREGHPAFRQQLLGRIAWVSQLHPERGARLRREFELIRW

SEQ ID NO: 5689 - protein, 473 aa, unidentified
  source 1..473: note = Related to RJUO01000002.1; note = Frondihabitans sp.
MTPREAKRASRTLPPAPADESSGGRLHARGGQPSGASPYEVAVVLADAFAAAPGWDVRSLSAAGTAAFGSGRRFVPLAVLGVLQALPRPILDSPRTTARLIVALPGFVEAVRRSAERAPVVVLSREVVPVAAVGPGPRVDTVADLARLLGVTVGRLEWFADTKGWNRRAPAGPLHHYRYEWVSRPGRTPRLLEVPLGLLKTVQRTVLDELLAPMPLHDAAHGFVPGRSAVTGAALHTGREVVLALDLVSFFAAVSARQVYGLFRRAGLAEPVAHLLAGVCTHAVPVHVLSAMPDGGSSTERFELRRALAAPHLPQGAPSSPALANLSLAGLDRRLDGWARAAEAVYTRYADDLSFSGDGELGGRVPAFLRGVERIVTDEGHTVNARKTRVRRAGVRQTVTGIVVNQTTSPGRTEHDRLKAIVHNCVRYGPASQNRDGHPAFREHLLGRIAWVEQLHPARGARLRAEFDLIRWD

SEQ ID NO: 5690 - protein, 457 aa, unidentified
  source 1..457: note = Related to NZ_UEXK01000004.1; note = Klenkia terrae
MKPPGTRTARALAAAFLGSPEWSAPALVEQGRVVLDPAPDWLPAVAAAAVAAHREPPRDAPRELAGFLLGVREELLDARPRLDDDGEPLPRPAEPRVRAWLPTTPRMGRARWPVHPLHDLADVAEMLGTDLDHLSWYADPQGRQRTEPAGHLQLYRRRWLPRPGRVPRLLEVPTPRLRAVQRVLLDRVLAPIPPHPAAHGFVAGRSALTGARQHVGAEELLTLDLAAFFATVRAGRVWATLRSAGYPEPVASLLTGLCTTSATRDDLATMPPGGSEGARAHVRAALATPHLPQGAPTSPQLANLAAHRLDRRLAGLAAAAGAVYTRYADDLTFSGRRGTAALRHRVAVVVADEGFALQPAKTRVRGRGARQAVTGVVVNERPSLPRAELDALRARLTNAVRRGPSAADLAAVDGDRQALRRELAGRGAWVTQVHPVRGERLAALLAAVDFAEPDTDL

SEQ ID NO: 5691 - protein, 484 aa, unidentified
  source 1..484: note = Related to NZ_FMUH01000007.1; note = Klenkia marina
MSVRSAHAYAGTTGQVDPHHRTPLFHVKQPPEQRTARALATALLADGPWTVEGLTARGRRALDPAPDWLPALAAATVAAWREPPRDAPGEFARYLSAAREHPPAEPPGYDDEEDLPPPVPEPRVREWLPTATRMGRARWPVHPLHDLSDVAELLATDLDQLRWYADPLDRQRTEPAGHLQLYRRHWLARPGRVPRLVEVPTPRLRRVQRVLLDAVLAPVPPHPAAHGFVAGRSALTGARQHVGAEQLLTMDLAAFFATVRSGRVFATLRSAGYPEPVAALITGLCTTRATRDDLATMPAGGTPGARDHVRAALALPHLPQGAPTSPQLANLAAHRLDRRLAGLAASAGAVYTRYADDLTFSGRRGTAGLRHRVAAVVAEEGFTVQPTKTRVRGRGARQTVTGVVVNDRTSLPRAELDALRARLTNAVRRGPSAADLAAFDGDRHALRRHLAGRVAWVAQVHPARGGRLAGLLAAVDWSGPDTDL

SEQ ID NO: 5692 - protein, 460 aa, unidentified
  source 1..460: note = Related to NZ_FNIR01000011.1; note = Klenkia soli
MNQRTPPGTHTARALSAAFLGAPHWTVDALVAHGRRALDPAPDWLAGVAAAAVEAWREPPRDAPREFARFLLAVRTQLAAVPPAYDDEEDLPPRPAEPRVRAWLPAATAMGRTPWPVHPLHDLADVAELLGTDLDHLAWYADPQGRQRHEPAGHLQLYRRRWLARPGRVPRLLEVPTPRLRAVQRVLLDAVLAPIPAHPAAHGFVPGRSALTGARQHVGADVVLTMDLAAFFATVTAGRVWATLRTAGYPEPVATLLTGLCTTRATRDDLATMPGGGTDAARDHARAALARPHLPQGAPTSPQLANLAAHRLDRRLDGLAAAAGAAYTRYADDLSFSGGRGTAALRDRVAGIVVDEGFAVQPAKTRVRGRGARQTVTGVVVNERTSLPRAELDALRARLTNAVRRGPSAADLAAFDGDVHALRRHLTGRVAWVAQVHPARGERLAALLADVDWGRRDTSL

SEQ ID NO: 5693 - protein, 545 aa, unidentified
  source 1..545: note = Related to LMQC01000019.1; note = Modestobacter sp.
MARGRGRRTAGRSGSSGDAPGTARRLHHDASGAALRSAQQSAGPTGQVDPRHRTRLFHVNPPTARTTARALADAFLGAREWQVPALVARGRLVLDAEPDWLTDLARAAVTAWRVTPHDAPAELARVLLAVPGVFEPPVPEMVTSGEDGEDDDEDGFLVWAADEEPEGWQGARAAAPGSPRVVRWLPAHTRMGRTPWRVAPLDDLADVAELLATDLDHLAWYADRQGRQRAEPSGRLQLYRRHWRVRPGRVPRLLETPRPRLRTAQRVLLDRVLAPVPPHPAAHGFVTGRSAVTGAQQHVGADVVLTMDLAAFFATVTSGRVYATLRTAGYPEPVADLLTGLLTTRATRDDLATMPPGGSDAARAHVRSALAAPHLPQGAPSSPQLANLCAQRLDRRLAGYAAAAGAVYTRYADDLTFSGGPDVARRVGALRHGVARIVAAEGFALQPAKTRVRGRGARQTVTGIVVNDRTSLPRRELDALRARLTNAVRLGPSVQDLAAFDGDRGALRAHLAGRVAWVAQVHPVRGERLAALLAAVDWDPVDTHL

SEQ ID NO: 5694 - protein, 449 aa, unidentified
  source 1..449: note = Related to CP043652.1; note = Geodermatophilaceae bacterium NBWT11
MNREVARALADAFLGAPAWRVSVLVDRGRAVLSTEPSWLGRAAVAAVTSWPEPPVDAPGELARFLLGVDVGPEDEEARPEPPPRVVRRVPTPTRMGRTRWPVHPLHDLADVAELLGTDLEHLDWYADRQGRQRAEPAGHLQLYRRRWLPRPGRVPRLLEVPTPRLRAVQRLLLDRVLGPVPAHPAAHGFVPGRSAVTGAAQHTGADVVLTLDLAAFFATVTSGRVHATLRTAGYPEPVVALLTGLVTTRATRDDLATMPPGGTDAARHQLRGALAAAHLPQGAPTSPHLANLGAQRLDRRLAGYAAVAGAGYTRYADDLTFSGGPDVARRVRALQHGIERIVADEGFVVHPTKTRVRGRGARQTVTGIVVNRGTSLPRAELDALRARLTNAARRGPSAADLAAFDDDRVALRAHLTGRVAWVAQVHPAKGARLAALLAAVDWDGPDTSL

SEQ ID NO: 5695 - protein, 453 aa, unidentified
  source 1..453: note = Related to NZ_JAABOZ010000008.1; note = Modestobacter sp.
MSTDRGQEVARALADAFLGAPVWLPSALLARAELVIGARPPWLAAVAVTAATAYQEPPRDAPGELAGFLAASSALEAGLLAGNPTVTARGRRRRAPVRVVRRLPASTAMGRTRWPVVPLDDLGDLARLLDVDPGHVAWYADGQGRQRLDPPGRLHLYRRAWLPRPGRTPRLLEVPTPRLRRVHRLVLDQVLAPVPAHPAAHGFVPGRSALTGARQHVGAGVVVSMDLLSFFATVHVRRVYWVLRTAGYPEPVASALAGICTVATPVADLRAMPAGGDDQERSALRRALAAPHLPQGSPSAPHLANLCAQRLDRRLAGYAGSVGAVYTRYADDLTFSGRFRAGPLISGVGAVVREEGFRLNVDKTRVRGRGSRQSVTGIVVNERPTVPRPEYDALRAQLFNAARRGPSARDLAEHPDLRAHLTGRVAWVAQLDPERGRRLRALLDRVDWSGPAS

SEQ ID NO: 5696 - protein, 354 aa, unidentified
  source 1..354: note = Related to JACCXW010000487.1; note = Geodermatophilaceae bacterium
MTGRGEQAVASALAGAFLAGDWTASELFERGSTTLGRRPRWLRRVVVEVLSLYREAPVDRPRELATVVLATDGFQTAASPAQRHEGPPLRVVRILVEPTRMVRSRWPVARVDTVTDLADLLELGVGHLTWYADTAGMQRRTRVQALQLYRYRWLDRPGRAPRLLEIPKPRLRRAQRLLLDRIVARVPAHAAAHGFVPGRSARTGATPHVGTDVVIGLDLAGFFASVPAQRIYGILRVAGYPEAVAHIITGLCTTATPIAVLAAMPAGGSADDRYALRRTLTMPHLPQGAPTSPQLANLSAYRLDCRLAGLVAALGATYTRYADDLRCPADPTWRGRPRGSSAASGGSSATRGSG

SEQ ID NO: 5697 - protein, 345 aa, unidentified
  source 1..345: note = Related to JACDAB010000197.1; note = Geodermatophilaceae bacterium
MAGSRWPVATVDDLADLAGLLDLSMGHLGWYADPAGMQRRNRVPALQLYRYRWLDRPGRAPRLLEVLKPRLRRAQRMLLDRIVGLVPAHAAAHGFVAGRSARTGAAPHVGTDVVIGLDLAGFFGSVSAHRIYGILRVAGYPEAVAHIVTGLCTTATPIAVLGTMPPGGPVDDRYALRRALTTPHLPQGAPTSPQLANLSAYRLDCRLAGLAAAVGATYTRYADDLSLSGGPEVARQTARIVGGVRRIVSDEGFRLNEGKTRVQPRAGRQTVTGIVVNERANAARADYDRLRAILHNAARTGAQGQNRGGHRDFRSHLLGRIAWVEALNPARGRRLRADFDRIDWT

SEQ ID NO: 5698 - protein, 443 aa, unidentified
  source 1..443: note = Related to JABEMA010000014.1; note = Pseudokineococcus marinus
MTTGPAVAQALADAMLAEGAWDAAALARAAARVVGPRRRWLPALAAEVLATCPRPPRDAPRYLGAVVAGAPSFARAEERAQRRGHPLPVLSRPVVATRAGGSRWPTAPLDDVGDLADLLGLDVGHLDWMADVRGLQRRAPAGPLHLHRYRWVERPGRVPRLLEVPSPRLRRVQRTVLDAVLAGLPAHDAAHGFVPGRGVLSGAREHVGRAVVVRADLTAFFAAVTAGRVFRVLRALGQPEAVAHVLTGLCTTRAPVRVLAAMPPGGRDADRHLLRRWLAEPHLAQGAPTSPHLANLAAHRLDVRLSSYAAACGAVYTRYADDLVLSGGDDVARRAGPLLEGVRRVVREEGYRVNEAKTRVQPRHRRQSVTGVVVNDRPGAGRRETDALRALLHNCVRHGPASQDRDGRGEGFRAHLEGRVSWVEHVSPRRGAALRGELGRIAW

SEQ ID NO: 5699 - protein, 441 aa, unidentified
  source 1..441: note = Related to NZ_QCXS01000003.1; note = Nakamurella deserti
MSAETALASALAEAMLAGTWHRRGLIRAMSATLNRTSRRVRWVRPLAVEVLAAYPHPPLDRPRELAGFVGTTPAVQRALGRRRPPKALVRVATPTTTVSRPFPTPRVDHVAQLAEFLAVDPDELVLLADPQSRARRAPSRRIAHYRYHWLDKPAGARLLEAPKPRLKALQRKVLDGLLTPIPVHPAAHGFVPGRSAVTGAAPHVGAAVVVTVDLEHFFAAVRAGRVWGVLRAAGYPEPVAHLLTALTTHASPVATLSAMPPGPDRGRDFRLRRRLATPHLPQGAPTSPQLANLVAFSLDRRLDAYARAAGVTYTRYADDLTFSGGPELSRAAEALLHAVDGIVRAAGYRLNPAKTRIRRSHERQSVTGIVVNRHTTLARPEYDRLRAVLHDCVTNGPEAADRNGHDDFRAHLLGRISWVAALHPARGARLRAAFDAVAWGD

SEQ ID NO: 5700 - protein, 422 aa, unidentified
  source 1..422: note = Related to QXCQ01000133.1; note = Nakamurella silvestris
MLAGKWAPKAARKRLGRTLGQQPKWLKRLVREVLTAYPRPPLDRPRELAAFVLRSAALERAHRKSGPLPRPVRRFSTPTSTVLRPFPTPVLDHAGALADLLDLDLDELELLADTALRARRAHDPRIAHYRYHWRMRPGGPRLIEAPKPRLLTVQRRILEEIIGLIPVHPAAHGFVPGRSAVTGAALHVGAGTVVNLDLEHFFAGITAGRVWGVLRAAGFPEPVAHLLTGLTTHATPVAVLSVMPDRPGEARNFRLRRSLGTPHLPQGAPTSPQLANLILYSLDRRLQAYADAAGLRYTRYADDLTFSGPQVRHPDSVVAAVTSMAAAEGFRVNDAKSRVRRHHQRQVVTGIVVNEWTNLARPEYDRLRAVLHDCRVNGPAAANRDGHDDFRAHLQGRVSWAGSLNPGRGAKLAAMFDRIVWD

SEQ ID NO: 5701 - protein, 440 aa, unidentified
  source 1..440: note = Related to NC_013235.1; note = Nakamurella multipartita
MTGPADRLATALADAMLAGSWDYQSILDRTRQVIARRPPWLDSLAREVLAAYQRAPADRPRELAAFVVSSAAMARARRSPPRLPTPVVRFSSPTRMIRRPFATPVLHHAGDLADHLGITLEALDAFADTRLRARRARAERIAHYRYRWMHRPGGARLLEAPKRNLRALQRTVLDDILAPIPTHPAAHGFVAGRSAITGAAEHVGAEVVITLDLEHFFASVTPGRIWGLLRAAGYPEPVAHLLVGLTTHATPVATLASMPASADPGRDFRLRRRLAGPHLPQGAPTSPALANLVAFSLDRRLDSYARAAGSRYTRYADDLTFSGDAALARRSAALIAAVKRMIRQEGFTVHPGKTREHHRSRRQVVTGIVVNDRTNIPRADYDRLKAVLHDCRRNGPLAANRDAHPDFRAHLLGRLSWVSALNPDRGARLRAIFDEIRWTS

SEQ ID NO: 5702 - protein, 509 aa, unidentified
  source 1..509: note = Related to SZZH01000005.1; note = Nakamurella flava
MSDTPDPGPPPRRSGDDPGGLVRRGGPPRPPSGGPPAPPIRPRRKRPRGRPSPFREDRPGRPDALVDAIAGALLADADDWTASGLIGRVAVVFAGPHDWVPRLVEQVLELYPRPPADRPRELQAVVGVLLNDLLDPAPDDDGDEPTTEIRPVPRPVHWPVASTRTVRRPFATPPLDDAGDLAALLGVDLVQLTALADTRLRGRRARSEQIANYRYQWLDRPSGPRLLEAPRPRLLSAQRVVLHELLDLIPTHPAVHGFVSGRSVVTGAREHVGAETVLTLDLEHFFAAVTAGRIWGVLRSAGYPEPVAHLLAGLTTTATPVRVLTAMPPGPDPGRQFRLRRRLAVPHLPQGAPTSPALANLVAFTLDRRLAAYAAAVGLKYTRYADDLTFSGPFRQRAHVRSFARAVGRIVADERFRINEAKTRWRGRHERQTVTGVVVNEHPAIARDEVDRLRAVLHDCRRSGPAAANRHGHPDFRAHLLGRISWVASVHPARGARLREQFDGIDWTA

SEQ ID NO: 5703 - protein, 444 aa, unidentified
  source 1..444: note = Related to NZ_JAERWK010000005.1; note = Nakamurella leprariae
MRSEHAVALADALLTGPWDAGRMVARARLVFAPVPVELAHVVDVVLAAHPTPPVDAPRSLQHLLLGLPLSAPVPVVAEGAPLLPTPRIRVVRRLLFTTSMVGSRFPLPRVDDVAALAERLGLTVGELDWFGDRRGWQRREPRSVLQHYRFRWLSRPGRTPRLLEAPRPRLKALQRQVLDELLAPVAVHPAVHGFVAGRSVLTGAAVHAGRDTVITLDLEQFFAGLTASRVAGVLRSAGYPEAVSWALTTLVCSTVPMAVLRAMPGAEAGGERFRLRRRLAAPHLPQGAPTSPHLANLAAFGMDRRLTALARRFGADYTRYADDLTFSGAPSLGRAADRLIGTVARIATAEGFSINPAKTRVRRAWQRQRVTGVVVNDRPAVARDEVDALRATLFNCVRFGPVSQNRSGVQDFRAHLLGRIAWVASTDARRGERLRALADRIDWN

SEQ ID NO: 5704 - protein, 511 aa, unidentified
  source 1..511: note = Related to NZ_JAERWL010000005.1; note = Nakamurella flavida
MAGRSFPRPHARPALVAAASDALLAGPWTAAAMLARLAESIDPVGPWGADLVGAVLAAHPFPPADAPREFMVFIDLALPPDVGVTTWQSVLVPAGEPTGAGHRADEQDEDEQDEDDGEDDDEEDDEEDGGGAFTGAWPALFEPVPGPVVVRRLAASTAMGPRRWPVPAVDYIAALASRLALTTGELLWFADTRGFQRRDTRSELRHYRFAWVERPGRVPRLLEAPRPRLRSIQRRILDGLLAPLPMHPAAHGVTGRSAITGARVHEDAAVVLTMDLESFFSAVTAGRVYGVLRSAGYPEPVAHLLAGVCTLRTPVDVRRRMPTGAAATTSAAWRLGRRLDVPHLPQGSPTSPALANLVAFTLDRRLTDYAARAGWRYTRYADDLTFSLPGGGTGGARAGRAALRLAEAVTGMVASAGFRVNEAKTRIRGAHQRQLVTGLVVNASAAVPRTEYDRLRAVLHRCGTDGPAAQADDHLRFREHLQGRIAYVAASHPGRGARLLAAFDAITWPDD

SEQ ID NO: 5705 - protein, 442 aa, unidentified
  source 1..442: note = Related to NZ_LT629799.1; note = Microlunatus sagamiharensis
MTHDPDEGLARGLAWAFLAAETWTRPALVGSAATALGRRPRWLGPVVDVVLQHHRSAPTDRPYALSRFLVRETTLLEHAARARRGRALRIVTVPTVTAATGRRRWPVPDVADLPSLAGLLELPLDQLVWLADARSQQRRAPDGPLHAYRHRWVERPGAVPRLLEAPTPLLRAVQRRVLERILVWVPTHPAAHGFVRGRSAISHARSHEGADEVVCLDLRAFFASVRVARVDGLFRGVGYPEAVAWTLACLCTHQTPVRVLHDMPAGGADDARAWLRAGLRERHLAQGAPTSPALANLACFALDRRLAGLAAATGRAYTRYADDLTFSGAAGGAGRLVSAVRAIVGDEGFALHPAKTRVRSRDQRQVVTGLVVNDRVGVPREYHEQLRAVLHDAGRHGPAVANRVGYPDFRSYLKGRVGWVESVSPQRGRRLRSQLDAIVWPA

SEQ ID NO: 5706 - protein, 443 aa, unidentified
  source 1..443: note = Related to nan
MSRHQDEALARGLAWAFLAAEAWTVPALVDAGATALGRRYRWLPRVAAAVVAAHRSPPTDGPYAFTRFVLQQTSLVEHADRASRRGSVVRVVRVPTLPGAMGVRRWPVPELPDLPALADALELPLDQLVWVADTHGLQRRTPDGPFHVYRHRWVERPGAAPRLLEVPTPLLRAVLRRVLDRILVWVPVHPAVHGFVRGRSAVTHAANHVGAESVVCLDLRAFFASITVNRVNGLFRGLGYPEPVAWALACLCTHPTPRVALAGMPGGGSASSRAWLRAGLRSRHLPQGAPTSPALANLAGFTLDRRLAGLAAATGLTYSRYADDLTFSGPRVDQGRFVSLVGAVVRDEGFALNPPKTRIRSAQQRQEVTGLVVNDRVNVPRAYHDQLRAVLHDATRNGPAAANRQAHPDFRSHLEGRVGWVESVNPVRGRRLRAQLEAVVWPA

SEQ ID NO: 5707 - protein, 443 aa, unidentified
  source 1..443: note = Related to JACHZG010000001.1; note = Microlunatus antarcticus
MSHRPDEGLARGLAWAFLAADRWTAPALVDAAGTALGHRYRWMSALVRQVLENHRFAPTDRPYELSRFLLGRTALVEHAERAAQRGRALRVVRISTVAGVMGERRWPVPEVPDLPALADLLELPLEQLDWVVDARGLSRRTPDGPFHLHRHRWVERPGAVPRLLESPTPLLRAVLRRVLDRVLVWVPVHPAAHGFVRGRSAVTHARTHVGAASVVCLDLRSFFTSITVGRVNGLFRGLGYPEAVAWALACLCTHQTPVAVLGRMPPGGSEAARAWLRSSLRARHLPQGAPTSPALANLACFTLDRRLAGLAATAGLTYSRYADDLTFSGPRGSAHRLVASVGSIVRDEGFDLNPAKTRVRGTGERQEVTGLVVNERLNVTRAYHDQLRAVLHDATRNGPSAANRADHPDFRSHLEGRVGWVESVNPVRGRRLRAQLDAIVWPG

SEQ ID NO: 5708 - protein, 448 aa, unidentified
  source 1..448: note = Related to AP012204.1; note = Microlunatus phosphovorus
MVMRIDPDEGIARGLAWALLAAAEWDKAALTSALGHALGRRHRWIPKVVTEVLAAYPRAPIDRPHELTGFLRTGTSLVHSLARARRQGRAVRLQHIPMVTGTMGLRHWPVPEIDDLGGLALLLELPLEQLIWAADTQGRQRATRSGPLHLYRHTWRPRPGAAPRLLESPTPLLRAVLRRVLDRILVWVPVHPAAHGFVPGRSAPSNARAHVGADVVICLDLRTFFTSITAARVNGLFRVMGYPEPVAWTLAALCTHQTPAHVLAAMPAGGDSTVRHRQRAELRVRHLPQGSPTSPALANLAAHGLDRRLAGLADRLGLTYTRYADDLTFSGSLGNGIGVPRLVGVIGEIVRNEGFVLNTSKTRVRHTGERHEITGLVTNQQLSVPRAYHDQLRAVLHDAVMHGPAVANRAGLPNFRDHLAGRVGWVESVNPVRGRRLRAQFDAIAWPD

SEQ ID NO: 5709 - protein, 448 aa, unidentified
  source 1..448: note = Related to LT629749.1; note = Friedmanniella luteola
MPVKRRDPTAHVARALAWSFLAAPDWTEAALRRSAWVTLGRRHRWVSALAGSAVATYRTAPLGRPHELAGLLAGSAVLTTALHRAARRGTPVRVRVLPTTPAAMGRRRWPVPEVDDGPALARLLQVPDEQLSWLADVQGRQRRTPAGPHHLYRYRWVARPGTVPRLLEAPTPLLRHVLRRLLDEVLVWVPAHPAAHGFVRGRSVLSHARRHVGADLVLGLDLRHFFAAVTAARVAGLWTLLGYPEGVVTLLTGLTTHRTPVHVLTAMPPGGDVSGRHLLRARLRAAHLPQGAASSPALANLACFTLDHRLSGYAAALGATYSRYADDLTFSGPRDLPAARLVRSVTTVVAEEGFAVNPTKTRVQRSSARQQVTGLVVNAGLGIPREDEDRLRAVLHDAVRRGPQAANRDGVPDFRAHLEGRVGWVTSVNPVRGARLRRQLEAVVWPPR

SEQ ID NO: 5710 - protein, 446 aa, unidentified
  source 1..446: note = Related to JAGIOB010000001.1; note = Microlunatus capsulatus
MRRADPVAHVARALAWAFLAAPAWTEPELRRSAWTTLGRRHRWVTPLVRLALVVHRTAPTGQPAELARLLAGTDELPAALHRAARRGAPVRVRVVPAVPARTASPRWPVPEVAGAPDLARLLGVPLEQLDWLADAQGRQRRTPAGPLHLYRYRWVERPGAVPRLLEAPTPLLRHVLRRLLDEVLVWVPAHPAAHGFVRGRSALSHARLHVGAAQVVSLDLRHFFAAVTAARVRGLWTLVGYPEGVTALLTGLTTHRTPVHVLTAMPPGGDASARHLLRARLRAPHLPQGAASSPALANLACARLDRRLAGYAAALGATYSRYADDLTISGPADLAAPRLVRAVSAVVVEEGFAVNPAKTRVQRSSARQQVTGVVVNARTSVPREEEDRLRAVLHDAVRNGPDAANRAAVPDFRAHLEGRVGWVSAVNPVRGARLRRQLDAVVWPGR

SEQ ID NO: 5711 - protein, 468 aa, unidentified
  source 1..468: note = Related to JACGWT010000003.1; note = Microlunatus kandeliicorticis
MPVHTRRDGDDGTRRESHRPRGVPVTLAPDDGLARGIAWGLLAAEDWTADALQAAVTRTLGRPCEWAGRVVGPVLAAYREPPTDRPDELARFLLLATPLTEIAHAVRQEHEPLRVRVLAPVPGRMGRRRWPVPDLPDLVALARLLEVPLDQLDWLADTARLQRRSPPGPYQAFEHRWRSRPHAAPRLLEAPGPLLRAVQRRILDRILAWVPVHPAAHGFVGGRSAITNAARHVGAPTVVALDLRSFFSTITAARVGGLYRTMGLPEAVVRVLTGLSTHATPGWVLSGMPAGGDPSERHRLRATLRSRHLPQGSPTSPALANLACFSLDHRLQRYAETAGLVYSRYADDLTFSGPVARPAALLATVSTIIVAEGFVVHPGKSRVRRTGERQTVTGIVTNRRPGIARSDRDRLRAVLHDARRHGPEAANRERHPHFREHLHGRITWVESVSPVQGRRLRAQYEAIVWPER

SEQ ID NO: 5712 - protein, 448 aa, unidentified
  source 1..448: note = Related to NZ_LT629772.1; note = Microlunatus soli
MSSKTVQDDLARRLGYRMLAVEWDRDHLLIGCRRALGSAPPWLGPVIDAVLQQYPVKPSGRHHELTALIASTEEFQDAVFVSRSGRHWQIRSLPVGDLDPDELRMATSRWPVPTLGTEAALADLLRVDLPVLLWLADPKRMLRRRPDGGLQPYRYRWLERHGRTPRLLEIPGPLLRHVQRRLLERVIDRIPPHPAAYGFVRGGGPHRNAAQHVGADWVINFDLRSFFAGVRTGRVAGIFTAAGYPASVVALLAGLVSRPTPEFVLRGMPDGGDPSDRALLRARLRAAHLPQGSPSSPAIANLVAFNLDCRLNRLAKNAGFGYTRYADDLTFSGSGPRPAAGFVPLVRKIIIDEGFAPNDRKLRIRGRGQRQLVTGIVVNQHTNLRRRDHDRLRAVLHDAIRNGPDAANRDHHPDFRAHLEGRVGWAEQLNPTRGARLRRQLELISWPS

SEQ ID NO: 5713 - protein, 447 aa, unidentified
  source 1..447: note = Related to NZ_BMMZ01000006.1; note = Microlunatus endophyticus
MTPEEDLALRLAYVFLSTSWRRADLTDAAIASLGGEPAWLGGLVSRLLGSIRERPADRPYDLARVIMGQQVYLDGLDRDHHQDTVWRVRSFPVGGLVAETERMAVPDWPVPRLGTERALADLLRVDLPVLLWLADPRGYLRRADDGLQPYRYRWIRRPGRTPRLIEAPGPLLRYVQRRLLDRVLVGIPVHPAAYGFARGRNAVRAARRHVGSDWVINFDLVSFFNGIRESRVRGIVRVAGYPEPVARLMAAIMTTATPVRTLQRMPDDGPDDDRAVLRSVLRTAHLPQGAPTSPAIANLACYRLDVRLAGLAESLGLRYTRYADDLAFSGHGTRPGRRFFRLVTEIVTDDGYCLNDHKQRLQTRRGRQTVTGIVVNDRANLRRSEYDRLRAVLHDAMINGPEHANRNGYPAFREHLDGRIGWVEQLNPARGARLRRQFELITWPEDR

SEQ ID NO: 5714 - protein, 443 aa, unidentified
  source 1..443: note = Related to JADJPO010000003.1; note = Kineosporiaceae bacterium
MRLSDSTLARALAMAFLDGDWEFDPLLDRAAQVLGGRRRWVRRLVKDLLAAFPRTPRDAPSALAGWIGAHPSLIEAAARARDAARPLRVAAIHPGHTEMGRRRWPVATLDDLADLAELLDLDQAHLAWFADQQHRARRAPDGPLHHYRRRWISRSGRTPRLLEVPLPRLRALQRTLTHEVLAHIPTHPAAHGFVRGRGAVTGAQQHVGRDAVLSLDLSAFFASVSAARVRAIWRAAGYPEPVADALTGVVTTLAPVRMLTAMPPGGPPEARALLRAWLRASHLPQGAPTSPALANLAAHRLDARLAGYAAAAGWCYTRYADDLTISGGPEMVRRTDAVVAALSRIVTEEGFRVNPTKTRLRTASQRQLVTGIVVNRRPGPGRSEYDQLKALLHNASRTGGQAQNRDGHPAFAAHVRGRIAWVAQLHPERGARLLATWHEVDWS

SEQ ID NO: 5715 - protein, 482 aa, unidentified
  source 1..482: note = Related to JAHBAY010000005.1; note = Kineosporia corallincola
MPRSAPRCYARALHDRSHPDATVMTSDRVRTLARGLGNAFLGAEAWATRPMAEAAVSVVGVGGRRRWPRKLAREVLAAYPRPPADRPRELARFIENSPVLWAALNRSAPPGRAPVLRARRIPPTPVRMADRRPWPVPELHDLADLAALLDLDPAHLDWFADVKGLQRRAAPGPLHHYRYRWTTPGSGRPRLLEAPRPRLRSVQRTLLDEVLALIPVHPAAHGFVPGRSAVTGARRHTGAAVVISLDLAAFFAHLNGGRVYGVFRTAGYAQPVAHALTGLCVHRTPVAVIAAMPPARPGSTPEAVSARPGLRRLLAGAHLPQGAPTSPALANLCVMALDRRLSGLAAATGLTYTRYADDLTFSGDLEPRAAQRVTEAVGRIVRSEGLALQPAKTRVRERSRRQEVTGIVVNEHSNLPRTEYDRLRAILHNAARSDPAVQNREQHADFRAHLLGRIAWATQLNPARGQKLRAQFERIVWPGEQP

SEQ ID NO: 5716 - protein, 447 aa, unidentified
  source 1..447: note = Related to NZ_JAJOMB010000003.1; note = Kineosporia babensis
MSDPRTRVLARALGNAFLTAPEWALRPLTDNAATVLGGRRRWTRRLAREVLDAYPRPPADRPRELAAFIQASPILFTAVLRSVETGRPLRVIRMPPAPVQMNTRRPWPVPKIDSIQDLARLLDLETAQLDWFADVKGLQRRAAPGPLHHYRYAWASTASKRPRLLEAPLPRLRSRQRTLLEQILARIPTHPAAHGFVPGRSAVTGAEPHAGAAVVIGLDLAAFFASIQVGQVYGIFRAAGYAEPVAHVLTGLCTTRTPVRVISNMPATSDVESRVRLRRLLAGGHLPQGAPTSPALANLCALGLDRRLNGLAAAVGMTYTRYADDLTFSAGEEVNARRLITAVDEIVRSEGFALQSAKTRIRRDFQRQEVTGIVVNAHPNLNRREYDELKAILHNALRHGPEGQNRAGHRDFRAHLLGRIAWVAQLNPERGRKLRETFEAITWPSLS

SEQ ID NO: 5717 - protein, 453 aa, unidentified
  source 1..453: note = Related to JAANNO010000010.1; note = Motilibacter aurantiacus
MSRRTTREAGLANALALSFLAGAWSVDGLEQRGTTVLGDRPRWLRRLVRLVTDAYPRPPVDRPRELAAYVLAAPPLRRAAYSAARRGHRLPAPRAWLAVPTAMAPTRMAPSRWQVPAIDDVGALADLLDLEMGQLEWLADARGLLRRAPQGPLHHYRYRWQPKAGGARLLEAPLPRLRRLQRTLLDTVLARVPVHPAAHGYVPGRSAVTNAAAHVGAAVVVSLDLEAFFSSLSAGRAYGVLRTAGYPEPVAHLLTALCTNAVPVHVLRGLPDSVPVDVRFRLRRALATPHLPQGAPTSPTLANLCAHALDRRLAGYAAAAGVTYTRYADDLTFSGGPGLLRAAPALVTAVRRIAAAEGHRVNVAKTRVRSSAQRQVVTGLVVNERLNLPRGEYDRLKAVVHDAVRHGPAAANRHGHRDFRAHLEGRVAWLEAVHPERGARLRAQLARVAWPVS

SEQ ID NO: 5718 - protein, 443 aa, unidentified
  source 1..443: note = Related to NZ_LT629710.1; note = Nakamurella panacisegetis
MRARDRLAAALADGMLAGDWAGAPMRAQGALVLGERHAWIRRLVREVLEFYPEPPADRPRELARLIGRTRTMEELERRARRRRRRLPIPQHRVTTPTTTVRRPFPVVSINDATALAECLGLSVPDLLWFADTKGLQRRAASVGLHHYRSTWVGTRSGSRLLEAPRPRLKEVQRQILQQLLAPIPVHEAAHGFVAGRSAVTGARPHVDAATVISLDLESFFSSVSGRRIYGLFRMAGFPEPVAHLLTGLCTQATPVDVLRRMPSGHPAAFRLRRKLAEPHLPQGAPTSPHLANLAAFGLDRRLAAYASRIGARYTRYADDLTFSGPDLRRRSRGVVAAVARIVAEEGFALNTTKTRVRGQDDRQTVTGVVVNRHPTVSRAEYDTLRAILHNCVRFGPESQNRLLHTDFRSHLRGRVAWVAALDPERGRRLLATYSQIDFSPSGT

SEQ ID NO: 5719 - protein, 441 aa, unidentified
  source 1..441: note = Related to NZ_CP060298.1; note = Nakamurella sp.
MPDGRARLAIALADAFLAGAWTSDGLRTQGQLVLGARHAWLRRLAREVIKAYPEPPSDRPRELFAFVLQTQAMAQVERRAARPGGGFPLPLHRLTAPTSMIRHPFPVTSLDHAGDLAALLGVSMEELLWFGDTNGLQRRARSDRLQHYRSTWVPSVSGGRLLEAPLSRLKAIQRQILAQILTPIPIHDAAHGFVVGRSARTGAAPHVGTGLLISLDLESFFASITGSRIYGVLRAAGYPEPVAHLLTGLCATATPVRVLAEMPGTAAPSAFRLRRRLAEPHLPQGAPTSPQLANLCAFAIDRRLSAYASAIGAVYTRYADDLTFSGDTLVVRQRGVVAAVARIVAEEGFRLHIDKTRTRGRDARQQVTGVVVNASTTVPRRDYDTLRAILHNCVTHGPSTQNRVEHNDFRAHLRGRISWVASLDAGRGRKLLATFEQIDWT

SEQ ID NO: 5720 - protein, 441 aa, unidentified
  source 1..441: note = Related to JAAALN010000029.1; note = Kineococcus siccus
MSEALVASALAAALLDGPWDAAALTTRATAALGGRRRAWVAGVVADVLAAHPRPPLDAPRSFTTELARHPALARAVHAAERRGRPLRPAHLEPVPSSMGRRRWPVPVLDGVADLAALLDLDLAELDWFADPRGLQRRASGTALHHYTSRWVAKRGTPRLIEAPKPRLRHLQRIVLHAVLDVVDVHDLAHGFVPGRSAVTGARRHTGADVVVRMDLSAFFASVGAARVYGEFRRLGYPEAVAHLLTGLCTHRTPLTVLRTLPAGGRAEDRFRLRQWLSAAHLPQGAPTSPALANLVAGPLDRRLAGLADSMGLRCTRYADDVTFSGGPQLRSGAGRLVRCVTAIAAEEGFVVNGDKTRVRGAEQRQVVTGIVVNERTSVPRDEFDRLKALLHNAVRSGPALQNRRGHPDFRAHLAGRVSWVEAVSPAKGRRLRATYDRIAWG

SEQ ID NO: 5721 - protein, 439 aa, unidentified
  source 1..439: note = Related to JALDAT010000072.1; note = Paenibacillus sp.
MSAAVAAALAAAFLDAPWEAPQLAAAGRWALGLRRAAWLDRLAADVVAQHPRPPCDAPRALTALLVAHPELASAQAVARRRGRPLRVRHLVAVPAAMGRARWPVPPLGGAADLAALLEVSPGELDWFADVRGWQRRAEGTALHHYRASWVAKRGAPRLLEAPKPRLRALQRRLLREVLGAVPAPPVVHGFVPGRSAVTGAREHCGAAVVVRVDLTAFFASVDAARTYRAFRSLGYPEAVAHLLTGLTTHATPARDLRGMPPGGDADERFALRHRLAAAHLPQGAPTSPALANLCARSLDRRLAGLAAALGARVTRYADDVTFSGGEELAAGAQRLVRCVTRVAADEGFTVNPAKTTVRGRGERQLVTGVVVNERPNPVRSEFDRLKAVLHRCAVHGPASVEAPGGVDLRSHLAGRVGWVEALSPSRGRRLRESFDAIAW

SEQ ID NO: 5722 - protein, 439 aa, unidentified
  source 1..439: note = Related to JACCBB010000001.1; note = Kineococcus aurantiacus
MAEPDAVAAALAAAFLDGPWTADALTARAREAVGVPRARWVARLAGEVTGRFGTPPLDAPRELRAAVAGSPAYAGARDAARRAGRPLRVAHLATGTTRMGRNRFSVPPLDTVDDLAAFCGLDPAQLDWFADVHRFQVRAGGSALHHYRARWVAKRGAPRLLEAPKPRLKAVQRKVLHEVLDRFPVHDAAHGFVPGRSPVTGAWDHVLARTVVRFDLEGFFASVPAARVHGTFRSTGYPEPVAHLLTGLVTHVTPLRDLRAMPDGGSAEARHRLRRNLSHAHLPQGAPTSPALANLCARGLDARLDGLARVLGATFTRYADDLTFSSTTGLDPVRLHRAVRAVVADEGFTLNPAKTRVRGAGSRQVVTGLVVNERPNVPREEFDRLKAVLHNCVRHGPTSQDREGHRDFRAHLLARVARVESVNPAKGRRLRRSFEQIAW

SEQ ID NO: 5723 - protein, 448 aa, unidentified
  source 1..448: note = Related to JAFAOY010000834.1; note = Solirubrobacterales bacterium
MYDARGRAFLGRCLADAFLAGVWNERALVDRAGRALDRRPRWVRAVAREVLAAYPRPPSDRPRELARLIELALRERPAPEGDSEPPRVRRWLVPEPAMGRRRWPVPEIASLGALAGFLQVSDGELAWLADARGLERTVENERLRHYRYGALPRPGRPVRVIERPKHRLKSIQRRVLHELLDWIPVHEAAHGFTRGRSVRTHARAHTGRFVVVRFDLEDFFASVRAARVYGIFRTAGYPESVAYALTVLTTNVVPATVWHELPRPVAPRLLGAHHHLGRRLATPHLPQGAPTSPALANLAAFRLDRRLDGLAKSLEISYSRYADDLTFSGDARLVRAAATVRRAVTQIAREEGFTVNESKSMLATRAGRQRVCGVVVNEHLNTPRREYDVLRAILHNSSRYGPQTQNRAAIPNFRAHLLGRISWIESVNPRRGDKLRRHFASITWQEDS

SEQ ID NO: 5724 - protein, 448 aa, unidentified
  source 1..448: note = Related to JAFARL010000184.1; note = Solirubrobacterales bacterium
MYDVRARAYLARCLADAFLAGVWTERAMVDRAGRALDPRPRWVRAVAREVLAVYHRPPADRPRELARFIGLVLADRSAPEDAPNPPQVRRWLIPEPAMGRRRWPVPEIASVGDLASFLGVSDGELAWLADARGLERMVKDERLRHYRYATLPRAGRPVRVIERPKHRLKAIQRRLLHEVLDWIPAHEASHGFTRGRSVRTHAGGHTGRFVVVRLDLADFFASITAGRVYGIFRTAGYPESVAHALTALMTNVIPAVLWHTLPRPAIPRQIAAHHHLGRQLATPHLPQGAPTSPALANLAAFRLDRRLTGLAGSLEISYSRYADDLTFSGPTQLVRRAGTLRRAVAQIAREEGFTVNDDKSMLATRAGRQRVCGVVVNQHLNVPRREYDLLKAVLHNSAIHGPQTQNREGVVNFEAHLLGRITWVESLNPTRGDKLRRQFAKIVWHDDP

SEQ ID NO: 5725 - protein, 449 aa, unidentified
  source 1..449: note = Related to JACCUP010000282.1; note = Thermoleophilaceae bacterium
MLSAPMYDHLTRASLSRCLADAFLAGAWNENRLAGRAGQALAPRRGWIGPLVREVLAVYHRPPADRPRELTRFIALQLEQMPPSDLDPPRVRRWFVAELAMGRRRWPVPDLASAGALAGWLEVAPGHLDWLADARGLERTTATERLRNYRYSWLPRAAGPPRLIERPKARLKAIQRRLLHEILDWIPAHESAHGFTRGRSVRSHAAAHTGRYVVVGLDLKDFFASVVAGRVFGIFRTAGYPEPVAHVLTALTTNAVPVEEWASVPRPRDPGLVGAHHRLGRRLATPHLPQGAPTSPALANLVAFALDRRLAALARATGVTYTRYADDLTFSGPASLLRGADRFRSSVADIAREEGFRVNERKSTLMTRAGRQRVCGVVVNQRLNVARTEYDELKAILHNAARSGPSSQNRHAVADFRAHLLGRIAWVESLHPGRGERLRARFEVIDWDR

SEQ ID NO: 5726 - protein, 450 aa, unidentified
  source 1..450: note = Related to JACCUX010000400.1; note = Solirubrobacterales bacterium
MDRRTRAYRSLSPCLADAFLAGPWDPAALATRAGLVLEPRPPWIGLLVRNVLAAYERRPADRPRELARYIALQLERVDADTAGPRPRVRRWLLAELAMVRRPWPVPELASVGAVANHLEVSDRHLAWLADVRGLERTGSDEKLRHYRYGWLPRHGGPPRVIERPKARLKSIQRRVLHEILDWIPAHDAAHGFTRGRSARSNAAAHTRRPVVMALDLEDFFASVRAPRVYGIFRTAGYPEPVAHTLTGLCTNAVPIEEWAAVPHPTASPLAQAHHRLGRRLATPHLPQGAPTSPALANLAAFTLDRRLTGLALALDATYTRYADDLTFSGSSRLLDRGGQIRATIATIAREEGFAVNTRKSVVTTRAARQQVCGIVVNDRLNVTRHEYDELKAIIHNAARRGPSGENRAGLSDFRAHLLGRIAWIESLHPARGARLRSQFTRIVWDRQGAA

SEQ ID NO: 5727 - protein, 476 aa, unidentified
  source 1..476: note = Related to NZ_KI912613.1; note = Patulibacter minatonensis
MRRGPAPLGTPPGDLAQAAAAALLAGAWTERAMLRRLQQAVRPLGPRLPARLVASVLALHRTPPADAPRALAQEIDDLVRGHAPRGGWPPNARVRRRYAPPTAMRGARWPVAPLPTVAALGRLVGERDPGALAWLADVRGLEREVPDERLRAYRYTHHPRTGGPPRVLERPKARLKEVQRTLLREVLAPIPPHDAACGFVAGRSVLDHAARHVGRTVVVQLDLEDFFAQVTAGRVFGILRAAGYPEPVAHAIVGLTTNVVPYGFWARIPRPDGPREIERHHRLGRRLATPHLPQGAPTSPALANLAAFRLDRRLDGLARSLGLTYSRYADDLALSGGRHLARRAYELERTIAAIAADEGFRVNPQKTRVRAREGRQTVCGIVVNERPAVARRDVDRLRALLHEAEVAGPRAADRGGMGPAFEAHVRGRVAWVAQVHPARGARLREQLRRVDWSALRDTGDAGVHRSSPPGDRPFTS

SEQ ID NO: 5728 - protein, 456 aa, unidentified
  source 1..456: note = Related to NZ_AUKG01000002.1; note = Conexibacter woesei
MPPPPDQPQPLRSDAAAALADAFLAGAWTRPGMIQRGHDALGVEAVPGLRWLRREVDRVLAAYAHPPRDRPRELAAFVAATIDARRAAPFPPKHRLVAPGAMAGRRPWPAIPELDTAGDLADWLALSHGELAWFADVQSRERRADDRRLRHYTYAWSARPGAPVRFLEQPKARLKAIQRRILHKLLVHVPAHDAAYGFVPGRDVLQHARRHAGAAAVLRFDVRDFFVSLPAGRVYGIFRLAGYPEAVAHALTGLTTNAVPPGAWADVPAPADPALHRQHVLLGRRLAAPHLPQGAPTSPLLANLCAFTLDRRMAALAVKLGATYTRYADDLVLSGDRALARHAQRTTQTVRAIVRGQGLRLNETKTTIMVAAQRQRVTGIVVNDHPNIARDEYDRLRAILHNAARAADPHAENRAHVPDFRAHLRGRIAWVEHVNPQRGAKLRARFEQIAWPASPR

SEQ ID NO: 5729 - protein, 444 aa, unidentified
  source 1..444: note = Related to JAEMSV010000041.1; note = Solirubrobacteraceae bacterium
MTSDLQTVAGALASAFLRGVWNERRLVARGERMIGQRPVWLTPLVRRVLEGYHRPPADRPRELQAFIRVSLRDITGRARLAKRVEMRHWSPTPTVMVDRRWRVPILHTVGDLGALLGLDPGALMWLADARGLERFAPEERLRNYRYTWVPRTTGAPRLLEAPKARLKVAQRDVLRRILCWVPPHDAAYGFIRGRSARDHAARHTGREVVLSFDLMDFFAGVPARRVYGIYRLAGYPEPVAHCLTALCTNQIPRTVSNDILGRPDPAYALLRRRLGTPHLPQGAPTSPALANLVAHALDRRLTGLAAALGGTYTRYADDLVISGDAQLARRIGVAQRAVAEIAADEGFVIRPAKTRRMSRADRQAVCGIVVNARTNIPRRDYDRLKAILHDAVRHGPDAANRDGIADFRAHLAGRVAWVTSLNPDRGAKLRTTFDAIVWDPRPQT

SEQ ID NO: 5730 - protein, 419 aa, unidentified
  source 1..419: note = Related to nan
MLTRREVSEVLAVAFLSGEWHFEELQRRARRALGRRAWLRPLAIEVVDAYRRPPLDRRRELVAYIEHAIPRRVRLPPRILRQPTFHPAMGFARWPVPRIDTVGDLAAFLGLEVGELEWFADVRGLERVVDDERLRHYRYTRLPRASGPPRVLEAPKPRLKALQRRLLREVLAFVPVHPAAHGFVGGRSARTHAATHVGRRVVVRVDLEDFFAGVTAARVFGIFRACGYPEGVAHVLTGLCTNAVPAGESVAGHWRLSRRLAAPHLPQGAPTSPALANLAAFALDRRLSGLAAAVGARYSRYADDLVFSSDTHLRTPVAAIGGIARDEGFQVNAGKTRVMGRGRRQTVTGVVVNAHPNVPRVEYERLKATLHRAAHDGPAGLDPTVLLGRIAWVESLNPARGAKLRTAFGHIAWTPLENG

SEQ ID NO: 5731 - protein, 403 aa, unidentified
  source 1..403: note = Related to NZ_RBIL01000001.1; note = Solirubrobacter pauli
MASSLSRRETARVLAGSFLGGEWELEAMAKRAGRALGRRVWHRRVAERTLRAYRHPPRDRPRELADFVFTLLDDVRLPPRLLREPVFHTEMAPGRWPVPRIDTLGDLADRLELEPGQLGWLADVRGLERTSTGKLRNYTYVRVPRRSGPPRVLERPKARLKEIQRWILRELLAWIPTHDAAHGFVKGRSAHTHAALHVGRKVVVRLDLEDFFAAVSAARVYGVFRTAGYPEAVAHTLTGLCTNVVPADESVPGHFRLARRLATPHLPQGAPTSPALANLAAHALDRRLTGLAREIGATYSRYADDLVLSADHHLRTPHAAVTELARDEGFTVNRGKTRTMGRGSRQVVTGIVVNAHPNVPRAEYDRLKAIIHRGDYDREHVLGRIAWIAAINPARAAKLRSSM

SEQ ID NO: 5732 - protein, 461 aa, unidentified
  source 1..461: note = Related to QHCD01000081.1; note = Pseudonocardiales bacterium
MNRDAAGHRATAADVRALIPVLRPSLRSVAGSLADALLDGEWEADAMVSRVTAALDRPGRWVRQLVRITRLSFPVAPHDSPESLRRVILAGPPLPQVAAADALAGRPLPTLARRPLPARVVALQAGLPRWDGVGDLAAYLGLTVGELAWFADTRGYEARVRAETLRHYRYRLLQKRIGGCRLIESPKWQLREIQRRILHEVLDQLPVHDAAHGFRPGRSVIGYVEPHAGRRVVIHLDLRDFFARVGAGRVWSVFRWAGYPDAVAHVLTGLCTNVSPTAVRSDVRRTGALRLAAACGTVHLPAGAPTSPALANLCAYALDRRLAGLARRVSMRYTRYADDLAFSGGRSLLWGTDALIDRIAAIAAAEGFPVNSQKTAVLTASRRQRLAGVVVNDHPNLDRREFDALRATLHNCVHSGPSSQNRGSHQDFRAHLTGRVSWACLLNPAKGARLERLLEQIDWAR

SEQ ID NO: 5733 - protein, 454 aa, unidentified
  source 1..454: note = Related to CADCTB010000222.1; note = Acidimicrobiales bacterium
MTRESAAVTVARGLAHAFLAGDWDPPAMASRGREAVETRRVWVRHLADAARHAYPDAPRDRPRELATFLSVCPPLTKAIAAARRRSEEPPTIRNWLVAETAMGPAPWPVANLHTLRDLQDLIGMSTATLNWFADTRGLERTVADERLRHYRYHWAPKRNGGARLIEAPKPVLKHLQRVLLREILEPVPVHPAAHGFRRDRSALSHANGHIQRNVVIRVDLEDFFASVRAGRVYGIFRGCGYPEPVAHVLTALTTNAVPRAVSAQTGAPSVVESTAAFRRLAGHLAHPHLPQGAPTSPALANLAAFGLDRRLAGLASAAGLTYTRYADDLAFSSIDPRSEGQNRRLVEWITGIAEDEGFRVNVAKTSVRHAGQRQRLAGVVVNERANVERRQYDLLKATLHNAARHGPAGQNRTGHPAFRDHLRGRISWVNQLNPARGERLLATFAQIDWDSADR

SEQ ID NO: 5734 - protein, 324 aa, unidentified
  source 1..324: note = Related to JAFMRN010000002.1; note = Solirubrobacterales bacterium
MPAWNVAAIDSLPELAERLELSLEQLQWLADVRGLERSVNSERLRNDRYRLLPRASGVPRVLEIPKGRLKEVQRWVLREILNQIPTHPAAHGFVRGSSVRTHAEVHSGQAMVLGLDLKDFFASVRRAQVKAIFRAAGFETEVARTLAGLCTNTTPRHVGASRLLATPHLPQGAPSSPALANLAAFALDRRLSGLAYAHDLLYSRYADDLTFSGPMPGRGRRRFLVALATEIARDEGFAINERKTAMHPAGGRQQVCGVVVNARPNVPRRDYDRLKATLHNLAAAGPVDRSEAAALAGRIAWVASLNPARGAKLREKYAKIEWSE

SEQ ID NO: 5735 - protein, 440 aa, unidentified
  source 1..440: note = Related to NZ_PPDK01000002.1; note = Euzebya tangerina
MRIIVAAFLDGSWEPTAMAARAHHDLGLLTVRREIDFGGTEPYVWLHRAADLVADTFVAPPRSELRAMRVLVAEHAAPAILPLLDHPIAGPHTGTALVSSAMSEPRWPVVHLDTVGDVAAALGLLPTQLSWFADVASLEQSVTDERLRHYRYRWVAKSGSGQRLVEAPKQTLRRVQRWVLRRVLHNIPVHPATHGFVPGRSVHTYVGPHVGRRVVVSLDLRNFFTSVAAGRVFGIFRVAGYADSVAHTLTGLMTNAVPADILRGHPDAPRALRFPHLPQGAPTSPALANLAAFSLDRRLSGLATAMDLRYTRYADDLAFSSAGGLSRRARRRLVVTVEEIARAEGFDVNRAKTRAATAGRQQRLAGRVVNAVDNAPRRDYDRLRAVLHDASINGPVAANREGHPAFEAHLRGRIHWVASDSPARQRRLWQLFDQIDWSEG

SEQ ID NO: 5736 - protein, 436 aa, unidentified
  source 1..436: note = Related to NZ_JACXYY010000008.1; note = Nocardioides hwasunensis
MRPELARALAAGFLAGEWTRAGLTASGAVVLGRRPRWLAPLVRQTLDLYPRPPGDRPRELATNLARLPAAEKAALAGPQVHPVAETHMIANRWRLPELDRLADLASYLRVTDGELDWFADPRHLARLTVQPPLQHYRVSHRVAASGGIRVLEAPKPRLRAIQRRLLDELASRIPPHDAARGFRPGGSVRAYAAPHAGRSVVLRMDLEAFFASVTVSRVYGIWRTAGYPEPVAHALAGLVTSVLPLASWRAIPTPVDEGLLDAHWRLGRRLARPHLPQGAPTSPAMANLAAYHLDVRLSALARSWGGRYTRYADDLAFSGATGWGTGTSRLLDAVERIVVDEGFRLNPRKTGVMPRAGRQSLGGLVVNERPRVSRADVDRLKAILHNCRVHGPSSQNRDDHPAFEEHLRGRVAWVAQHDRLRGARLLAMHAEIDWSR

SEQ ID NO: 5737 - protein, 436 aa, unidentified
  source 1..436: note = Related to NZ_FNRT01000002.1; note = Nocardioides exalbidus
MRPELARALAAGFVAGEWTRPGLEASGAVVLGRRPRWLAPLVRQVLELYPRAPVDRPRELATNIASRPAAAKALRARAVVLPIAETRMLANRWRLPVLDDLGDLAAFLGTSPAELDWFADPRRLARLTKQAPLQHYRVSHLVAASGGIRVLEAPKPRLKAIQRRLLHEVASLVPPHDAARGFRPGGSVRSYAAPHAGRSVVLHLDLEAFFASVTVSRVYGIWRSAGYPEPVAHALAGLVTAVLPLAAWRAIPAPADDGLLDAHWRLGRRLAAPHLPQGAPTSPAMANLAAFGLDVRLTALARSWGGRYTRYADDLAFSGERGWGTGTSRLIDAVERIVVDEGFRLNPRKTGVMPRAGRQALAGLVVNERPRVSRRDVDLLRAILHNCLVHGPSSQNRDDLPAFEEHLRGRIAWVAQHDTLRGARLLAVHREIDWSR

SEQ ID NO: 5738 - protein, 349 aa, unidentified
  source 1..349: note = Related to NZ_JACJGN010000045.1; note = Nocardioides lijunqiniae
MLTNRWRLPELHDPADLAELVGITTSELDWFADPRRLARSAGDVPLQHYRVGHRTAASGGIRVLEAPKPRLRRIQRQILDEVASLIPPHDAARGFRPGGSVRSYAAPHAGRPVVIRLDLEAFFASVTVARVYGIWRSAGYPEPVAHLLAGLVTSVLPRSAWRGVPRPADERLLDAHWRLGRRLAASHLPQGAPTSPAMANLAAFGLDVRLTALARSWGGRYTRYADDLAFSGAAGWGSGTSRLLDAVETIVRDEGFTLNARKTGVMPRGGRQTLGGLVVNERPRVSRHDVDLLRAILHNCHRHGPSSQNRHDVPAFEEHLRGRIAWVAQHDPVRGARLLAVHESVDWSR

SEQ ID NO: 5739 - protein, 436 aa, unidentified
  source 1..436: note = Related to NZ_CP053660.1; note = Nocardioides sp.
MRADLARALAAGFLAGEWTRPGLVESGSVVLGRRPRWLAPLARQTIDLYPRPPHDRPRELAASISARPAAAKAAGVRPLVQPVSPTRMMTNRWRLPVLDGLGDLADLLGLTSSELDWFADPRHLARTAADGRLQHYLVSHRVAASGGIRVLEAPKRRLKGIQRVLLDEVASLIPPHDAARGFRPGGSVRSYAAPHAGRPVVVRLDLEAFFASVTVSRIYGLWRSAGYPEPVAHCLAGLTTTVLPHAAWRAVPRPADDDLLDAHWRLGRRLAAPHLPQGAPTSPAMANLAAFGLDVRLTALAESWGGRYTRYADDLAFSGARSWGTGTSRLLEVIEEIVRDEGFRLNTRKTGVMPRAGRQALGGLVVNEQPRVARREVDLLRAILHNCRRHGPSTQNRDGVPAYEQHLRGRIAWVAQHDPVRGARLLTEHEAIDWTR

SEQ ID NO: 5740 - protein, 436 aa, unidentified
  source 1..436: note = Related to NZ_JAFBCA010000001.1; note = Nocardioides cavernae
MRSDLARALAAAFLAGEWTQPGLVASGTTVLGRRARWLPPLVRQTLALYPRAPVDRPRELAANLASRPAAAKALRAVPLVRPVVATQMLTNRWRLPVLDDLADVASFLHLSASDLDWFADPRHLARSASDVPLQHYRVSHRVASSGAIRVLEAPKPRLKAVQRRLLHELAALIPPHDAARGFRPGGSVRSYAAPHADRSVVLRLDLEAFFASVTVSRVYGIWRTAGYPEPVAHCLAGLVTSVLPLSAWRAVPTPADDGMLDAHWRLGRRLAAPHLPQGAPTSPAMANLAAFRLDVRLTALARSWGGRYTRYADDLAFSGERGWGTGTSRLIDAIGSIVADEGFRLNARKTGVMPRAGRQTLGGLVVNERPKVARHQVDLLRAILHNCHRHGPSTQNHDDVPAFEEHLRGRIAWVAQHDPVRGRRLQAVHDTIDWSR

SEQ ID NO: 5741 - protein, 436 aa, unidentified
  source 1..436: note = Related to NZ_CP022296.1; note = Nocardioides sp.
MRVDLARALAAGFLDGEWTQQGLLASGTAVLGRRPQWLAPLARQTLALYPRAPVDRPRELATNISSRPAAARARSAAPQVQPVVATRMLGNRWRLPVLDGLGDVADFLGVSASELDWFADPRHLARGTAGVPLQHYRVSHRVAASGAIRVLEAPKARLKVIQRRLLREIASMIPPHDAACGFRPGGSVRAYAAPHADRSVVLRLDLEAFFASVTVSRVYGIWRTAGYPEPVAHCLAGLVTSVLPRSTWRAVPQPRDDRLLDAHWRLGRRLAAPHLPQGAPTSPAMANLAAFRLDVRLTALARSWGGRYTRYADDLAFSGAAGWGSGTSRLIDAVETVVRDEGFRLNPRKTGVMPRAGRQSLGGLVVNDSPRVARHQVDLLRAILHNCHRFGPSTQNRDDVPAFEDHLRGRIAWVAQHDPVRGARLQAVHDAIDWSR

SEQ ID NO: 5742 - protein, 436 aa, unidentified
  source 1..436: note = Related to JABJQY010000002.1; note = Nocardioides sp.
MRDDLARALASGFLAGEWTQDALVASGTVVLGRRHPWLPPLVRRVLTAYPRPPADRPRELAAVIAALPAAARARNAAPVVHPVAETRMLTNRWRLPVLDGLDDVAAFLRLEPSELDWFADPRRLARSASDVPLQHYRVSHRVTPSGAIRVLEAPKPRLKALQRRVLTEVASLIPPHDAATGFRPGGSIRRYTAPHAGRSIVLRLDLEAFFATVSVSRVYGIWRTAGYPEPVAHCLAGLVTCVLPRSAWRAVPRPADERLLDAHWRLGRRLAAPHLPQGAPTSPAMANLAAFRLDVRLSALARSWGGGYTRYADDLAFSGDAGWGTGTSRLLDAVEAIVRDEGFRLNQRKTGVMPRAGRQVLGGLVVNEHPRVARHQVDLLRAILHNCRRFGPSSQNRDDVPAFEDHLRGRIAWVAQHDPVRGARLQAVHDAVDWSR

SEQ ID NO: 5743 - protein, 436 aa, unidentified
  source 1..436: note = Related to NZ_CP087710.1; note = Nocardioides sp.
MSPDLARALAAAFLGGEWTEPGLVASGAGLLGRRPAWLRPLARQTLALYPRPPLDRPRELATNVASRPAAARAGAAAPLAQPVAQTRMVANRWRLPELDTLADLAGFLGLTATELDWFSDPRRLARDASAVPLQHYRISHRPAPSGAIRVLEAPKPRLKALQRRLLRELAGRIPPHDAARGFRPGGSVRSYAAPHAGRSVVLRLDLEAFFASVTVSRVYGIWRSAGYPEPVAHALAGLVTTVLPRAAWRSVPRPADDSLLDAHWRLGRRLAAPHLPQGAPTSPAMANLAAFGLDVRLTALARSWGGRYTRYADDLAFSGERGWGTGTSRLLDAVEVVVRDEGFRLNPRKTGVMPRAGRQRLAGLVVNDAPRVAREEVDLLRAILHNCARFGPSTQNRAGVVAFEDHLRGRIVWVAQHDPVRGARLLEAHRAVDWSR

SEQ ID NO: 5744 - protein, 436 aa, unidentified
  source 1..436: note = Related to JAKJHZ010000001.1; note = Nocardioides sp.
MRPDLARALSSAFLAGEWTRAGMVESGAVVVGRRARWLGPLARQVLELYPRAPLDRPRELATNLARCPAATRALASGPMVHPVAVTRMMTNRWRLPVLHDLDDLATLLDLDQAALAWFADPRHLARGATEAPLQHYRVSHRPAPSGAIRVLEAPKPRLKRIQRRLLDELAGRIPPHEAARGFRPGGSVASYAAPHAGRPVVLRLDLEAFFASVTVSRVYGTWRSAGYPEPVAHALAGLVTTVLPASAWRAVPTPSADHLLDAHWRLGRRLALPHLPQGAPTSPAVANLAAFGLDVRLTALAASWGGRYTRYADDLAFSGDRGWGRGTSRLIDAIETVVRDEGFRLNARKTGVMPRAGRQRLAGLVVNDRPRVARSEVDLLRAILHNCRRHGPSSQNRDDLQAWEAHLRGRIAWVAQHDPARGARLQEVHDAIDWSR

SEQ ID NO: 5745 - protein, 436 aa, unidentified
  source 1..436: note = Related to FOKC01000001.1; note = Nocardioides alpinus
MRADLARALASGFLADEWTQPALVASGRTVLGRRPAWLTPLVRQVLELYPRAPADRPRELAANIAACPAATRAGQAGPVVHPVARTQMVANRWRLPVLDRLDDVATFLDVSHTDLDWFADPRRLARSASDAPLQHYRVSHRPAPSGAVRVLEAPKPRLKVIQRRLLDEVAGLIPPHEAARGFRSGGSVRSYAAPHAGRPLVLRLDLEAFFASVTVSRVYGIWRTAGYPEPVAHCLAGLVTCVLPRSAWRAVPAPTDDGLLDAHWRLGRRLAAPHLPQGAPTSPAMANLAAFRLDVRLTALAQSWGGRYTRYADDLAFSGDAGWGRGTSRLIDAIGLIVRDEGFGLNARKTGVMPRAGRQRLAGLVVNDEPRVARGEVDLLRAILHNCRTHGPSSQNRDDVPAWEEHLRGRIAWVAQHDPVRGARLRAVHDAVDWSR

SEQ ID NO: 5746 - protein, 436 aa, unidentified
  source 1..436: note = Related to NZ_JZDQ02000022.1; note = Nocardioides luteus
MRADLARALAAGFLAGEWTRNGLVASGAVVLGRRTAWLRTLATQALELYPRPPHDRPRELAVILRSLPAAEKAVAVGPVTQPVAPTRMVTNRWALPQLDDLASVAAFLDVTAAELDWFADPRRWARAAEEPRLQHYRVSHRTAPSGAIRVLEAPKPRLRAIQRLLLDQVVSRIPPHDAARGFRPGGSVRSYAVPHAGRPIVLRLDLEAFFASVSVSRVYGIWRTAGYPEPVAHCLAGLTTCVLPRSAWRAVPRPGEDELLDAHWRLGRRLAAPHLPQGAPTSPALANLTAYGLDVRLTALARSWGGRYTRYADDLAFSGEAGWGHGTSRLLDAIEEIVRDEGFRLNPRKTGVMPRGGRQRLAGLVVNERPRVPREEVDLLRAILHNCRRHGPSTQNRDQVPAFEEHLRGRVSWVAQHDPVRGARLLAELDAIDWSR

SEQ ID NO: 5747 - protein, 436 aa, unidentified
  source 1..436: note = Related to FMZM01000021.1; note = Nocardioides lianchengensis
MRDDLARALAAGFLAGDWTATGLRASGAGVLGRRPRWLAPLVQQTLDLYPRPPHDRPRELATNLAGLPAAAKALRTRPVAQPVAPTRMLANRWRLPVLDDLGDLADLLGVTATELDWFADPRHLARSAADVPLQHYRVSHRIAPSGAVRVLEAPKPRLKAVQRLLLDEVLSRVPPHDAARGFRPGGSVASYAAPHAGRPVVVRLDLEAFFASVTVSRVYGIWRTAGYPEPVAHRLAGLVTAVLPRSAWRAVPRPAGDGLLDAHWRLGRRLAAPHLPQGAPTSPAVANLAAFRLDVRLSALARSWGGRYTRYADDLAFSGATGWGTGTSRLLDAIEEIVRDEGFRLNARKTGVMPRAGRQTLGGLVVNDRPRVARAEVDRLRAILHNCRRSGASSQNRDGVPAWEQHLRGRIAWVAQHDPVRGARLLAEHDAVDWSR

SEQ ID NO: 5748 - protein, 434 aa, unidentified
  source 1..434: note = Related to JAFBBZ010000001.1; note = Nocardioides salarius
MRDDLAHALAAGLLAGSWTQRGLVASGAEVLGSRRRWLDRLARHTLELYPRPPLDRPRELARIVAAFVDADAAARPATRPVVGTRMLTNRWGLPTLHDLNDLAGWLGLTSSELEWYADPRRLARTTSQGRLQHYRVSHRVASSGAIRVLEAPKLELKGIQRRLLDEVLSSVPPHEAARGFRPGGSVRTYALPHAGRPVVLRLDLESFFASVTVARVYGIWRSAGYPEPVAHRLSGLVTSVLPLSLWRSVPRPADDALLDAHWRLGRRLAAPHLPQGAPTSPALANLAAFRLDVRLSALAASWGGRYTRYADDLAFSGGRSWGTGTSRLLDAIEGVVRDEGFRLNQRKTGVMPRGGRQVLGGLVVNERPRVSRAEVDRLRAILHNCLTHGPSTQNRERHPAFAQHLRGRITWVAQHDPVRGARLLAQHDAVDWSR

SEQ ID NO: 5749 - protein, 436 aa, unidentified
  source 1..436: note = Related to NZ_CP075371.1; note = Nocardioides aquaticus
MRADLARALAAAFLAGEWTQSAMVQGGAVVLGSRRRWLTPLARQVLDLYPRPPLDRPRELATLISTRPAVARTGNARPVVQPVVATRMVRNPWRLPALDDLGDLAHHLGVEGSELAWFADPRRWARGTSEGRLQHYRVSHRVAPSGAIRVLEAPKPRVRRIQRSLLDDLVSRVPLHDAARGFRTGGSVRSYAAPHAGRPVVLRLDLEAFFASVTVARVYGIWRSAGYPEPVAHCLAGLTTSVLPRSVWQAVPGPADDGLREAHWRLGRRLAAPHLPQGAPTSPALANLAAYRLDVRLAALARSWGGRYTRYADDLAFSGERDWGDGTARLIAAIDVVARDEGFRLNPRKTAVMRRGDRQRLGGLVVNRRPHVGRTEVDLLRAILHNCRRHGPSSQNREGHPAFEEHLRGRVAWVAHHDPARGARLRAALDAVDWTR

SEQ ID NO: 5750 - protein, 349 aa, unidentified
  source 1..349: note = Related to NZ_JADCLL010000001.1; note = Nocardioides kribbensis
MLTNRWRLPVLHDLADLAALLELDAGELDWFADPKHWARTAGEAPLQHYRVSHRVAASGGIRVLEAPKPRLRRLQRRLLDEALGLVPPHDAARGFRAGGSVGSHAAPHAGRPVVLRLDLESFFASVTVGRVHGIWRTAGYPEPVAHALAGLTTAVLPLAAWRGVPRPADPGLLDAHWRLGRRLAAPHLPQGAPTSPATANLAAFGLDVRLTALAAAWGGRYTRYADDLAFSGDAGWGRGTSRLLDAVEEIVRDEGFRLNPRKTAVMPRAGRQSLAGLVVNDRPRVARHEVDLLRAILHNCRRHGPSTQNRDQVPAFAEHLRGRIAWVAQHDPARGARLLAEHGAIDWTR

SEQ ID NO: 5751 - protein, 436 aa, unidentified
  source 1..436: note = Related to NZ_VDMR01000001.1; note = Nocardioides litoris
MREDLARALAAGFLAGAWDRDGLLASGRGVLGRRPAWLRPLVRDVLLHYPRPPHDRPRELATVIGAFLAADRSYADAPAHRPLAPTRMLANRWGVPALHDLADLADLLDLDTGELDWFADPKRWARRTSEPRLQHYRVSHRVVATGAVRVLEAPKHRLKVLQRRLLDEVLAVVPPHDAARGFRPGGSVRRHAAPHADRSVVVRLDLESFFASVTVGRVFGTWRTVGYPEPVAHALAGLTTTVLPHAAWRAVPRPAPEHLLDAHWRLGRRLAAPHLPQGAPTSPALANLAAYRLDVRLSALARAWGGRYTRYADDLAFSGDRGWGRGTSRLLDAIEEVVVDEGFRVHPRKTAVMPRAGRQVLGGLVVNDRPRVPRAEVDRLRAILHNCRLHGPASQDRDGHPAFAAHLRGRIAWVAQHDPARGERLLAAWESVDWTR

SEQ ID NO: 5752 - protein, 436 aa, unidentified
  source 1..436: note = Related to JAAGXA010000003.1; note = Nocardioides zeae
MRPEVAAALGAGFLGGEWTEDGLLASGARVIGRRPQWLRQLAAQVVAAYPDAPRDRPRELAAAVASLPAAAKARRTRALRWTPTPTAMGRNRWALPVLDGLDDLAALLDVTQAELDWFADPKRWAREAAVAPLQHYRVAHRVASSGAIRVLEAPKPRLKRIQRLLLDEVLDRIPPHDAARGFRPGGSVARYAAPHAGRATVLHLDLEAFFASVTVGRVYGVWRTAGYPEPVAHLLAGLTTTVLPRAAWRTLPRPADPGLHDAHWRLGRRLAAPHLPQGAPTSPALANLAAYRLDLRLTALAEAWGGRYTRYADDLALSSDRGWGAGTSRLVTAVTEVVRDEGFRLNPLKTAVMRRGERQHLAGLVVNEHPRVARAEVDRLRAILHNCRVHGPSTQNRAAVPAFAEHLRGRVAWVAQHDPARGERLLEAWRAVDWER

SEQ ID NO: 5753 - protein, 436 aa, unidentified
  source 1..436: note = Related to NZ_SZVU01000003.1; note = Nocardioides dongxiaopingii
MRPDLARALAAGLLAGEWTPAGLVESGSTVLGRRRRWLTPLARQALELYPRPPHDRPRELAAVLAGLPAAGRAAADRPVSRPLSGTRMLANPWRLPALDGLDDLARHLDLTPGELDWFADPRRLARRTSEPRLQHYRVSHRVAPSGAIRVLEAPKPRTKALQRLLLDDVVSRIAPHDAARGFRRGGSVGSYAAPHAGRPVVLRLDLESFFASVTVARVYGIWRSAGYPEPVAHALAGLTTTVLPHAAWRAIPRPASPRLLDAHWRLGRRLAAPHLPQGAPTSPALANLAAYRLDVRLTALARTWGGRYTRYADDLALSGDRGWGTGTSRLLDAVETVVRDEGFRLNPRKTAVMPRGGRQTLGGLVVNQQPRVSRAEVDTLRAVVHNCRRHGPSTQNREERPAFAEHLRGRIAWVAQHDPARGARLLADYDTIDWSR

SEQ ID NO: 5754 - protein, 436 aa, unidentified
  source 1..436: note = Related to NZ_PVUE01000003.1; note = Antricoccus suffuscus
MRKDLATALAGAFLSGEWTSSGLFDSAVPVVQGPTPWLPALIRQILAVYPAAPLDRSRELAVVIGSRPAAGGAKSARPIAWPAATTQMTSNPWHLPALHGLGDLAEMLDLGATELAWFTDPRHWARSTTDRRLRHYRVTTKVAASGAVRVLEAPKYRLKSHQRRFLTEILDRIPAHDAAHGFRAGRSVASYAAPHGGQPVVVRMDLEGFFASITAGRVYGILRSAGYPEPVAHALTGLATTVLPRAEWNAISPPANPDLREAHWRLGRRLAGPHLPQGAPTSPALANLAAHRLDVRLSALASSWGGRYTRYADDLALSGGIGWRGDVSRLVALVGDIVRDEGFRLNDRKTAVLPAHSRQVLGGLVVNERPHVSRAEVDLLRAVLHNCRRDGPSTQNRAGVPDFEGHLRGRIAWVAQHDPARGARLRALFDAIDWSF

SEQ ID NO: 5755 - protein, 436 aa, unidentified
  source 1..436: note = Related to NZ_VCQV01000003.1; note = Leekyejoonella antrihumi
MRADLARALAGGFLAAEWTRPGLVDGGAVVLGRRVRWMPALTRQVLALYPRPPLDRPRELAAIISTRPAAAQAGRARPMAHPLAPVRMVSNPWRLVVLHDLAEVGSLLGLSQPELAWFSDPRHWSRTAQQVPLQHYRISSRTAPSGAIRVLEAPKRHLKAIQRQLLQEIVGRIPPHEATHGFRVGRSVGSYAAPHAGRAVVIRSDLEGFFASVTVGRVYGVLRTAGYPEPVAHCLAGLMTTVLPLSAWRKIPRPTDPVLLDAHWRLGRRLAAPHLPQGAPTSPALANLAAYRMDIRLDALALSWGGQYTRYADDIAMSGDRGWGPAADRILGIVAEIARTEGFRLNARKTGVLPQAGRQVLGGLVVNDRPHVSRAEVDVLRATLHNCIRHGPSTQNRQNRTAFEQYLQGRIAWVAQHDRDRGARLRTQFDAIDWTR

SEQ ID NO: 5756 - protein, 438 aa, unidentified
  source 1..438: note = Related to NZ_KB905425.1; note = Sciscionella marina
MRSELASAFAGAFLSGEWTESGLWGSGARVLGRDAVWLPALVREVLGLYACAPHDRPRELAAVIAMQEAAQGRDAEHAVPCRWPVSPTRMLRNPWHLPVLHSLEDLAGLLGLTTAELAWFSDPKRLARTAADPRLRHYRVTTRRAPSGAIRVLEAPKYQLKALQRRLLADLLGAIPPHAAAHGFRAGRSVATFAGPHAGKALVLRCDLEGFFASVTVGRVYGLFRTAGYPEPVAHALAGLTTTVLPASVWRKVPRPADPGLLDAHWRLGRRLAQAHLPQGAPTSPMLANLVAHRLDARCAGLAEAWGWNYTRYADDLAFSCAGGRRAGAAALLRMVERIVGEEGFRLNARKTAVQGSSARQSLGGLVVNEHVRVPRVELDRLRAILHNCARYGPSTQNRSGHADFAAHLSGRIAWVANHDPVRGARLRAGFEALDWSR

SEQ ID NO: 5757 - protein, 450 aa, unidentified
  source 1..450: note = Related to NZ_FQVX01000001.1; note = Geodermatophilus nigrescens
MTTPRQAAATASGIATALLAGPWRRREAVRRVAVALGHARAPRWVGALVGEVLDAYRDAPADRPRELAAFLASTRGWAQGQAGDVAPRVVRREPVPTRVVRPRPDLTEVPDLAALARLLDVDQGELAWFADTRGLERTAPEEALRHYRWRVVERPGGVRLLAAPKPRLREIQRRLLRHLVAPVPPHPAAHGCVPGHSVRTAAAPHAGADTVLALDLESFFASVPAGRVWGVLQGVAGLTEPVAHAVTGLVTTVVPLAVWRRVPVPEDGAARDRHARLGRRLAVPHLPQGAPTSPALANLVCARLDRRLAGLAASAGAVYTRYVDDLFLSGPPALRRPAFAARVAAIAADEGFRVHPGKTRSAGRGRRQTVLGAVVNVRPTLPRAERDALRALLHNCAVSGWASQVRDRDPATFREHVLGRVAWASSMDPVLGARLRVLAERIDWDAPGTA

SEQ ID NO: 5758 - protein, 448 aa, unidentified
  source 1..448: note = Related to NZ_QGTX01000001.1; note = Geodermatophilus normandii
MTASRRTAATASGVATALLAGPWRRRDAVRRVAVALGYARAPRWVGTLVGEVLLTYREAPADRPRELAAFLTTTAGWERGWSAGEVRPRVHRREPVPTRVVRRRPGVREVSDLAALARLLDVDQGELAWFADVRGLERTAPDEALRHYRWRVLERPGGVRLVAAPKPRLREAQRRLLRHLLAPLPVHDAAHGCVPGRSVRTAAAPHAGAAVVLSMDLESFFAGVPAGRVWGVLQGVAGLTEPVAHAVTGLATTVVPAAVWRRVPVGTDPDRHARLGRRLAAPHLPVGAPTSPALANLVCARLDRRLAGLAASAGAVYTRYVDDLTFSGGPGLRRDRFAARVAAVAADEGLRVNPAKTRTMGTGHRQQVLGAVVNVRPTLPRPERDALRALLHNCAVHGWRSQVRDRDPATFRDHVLGRVAWAASVDPVLGARLRELAARIDWDVPGTA

SEQ ID NO: 5759 - protein, 449 aa, unidentified
  source 1..449: note = Related to NZ_FMZF01000002.1; note = Geodermatophilus telluris
MTRPRQAAATASGIATALLAGPWRRRDAVRRVAVALGQARAARWVGTLVAEVLAAYRDAPADRPRELAAFVRTTEGWARGQAADVRPRVVRRQPVPTRTVRVRAPVADLPDLAALARLLDVDQGELAWLTDVRSWERTADAPLRHYRWRTVPRPAGGVRLLAAPKPRLREAQRRVLRHVLAPLPVHPAAHGCVRGRSVRTAALPHAGADVVLGMDLEGFFAGIPAGRVWGLLQGVAGLTEPVAHALTGLATTVVPVAVWRRVPVPADPAGRDRHHRLGRRLAVPHLPQGAPTSPALANLVCARLDRRLAGLAAASGAVYTRYVDDLTFSGGAALRRDRFADRVTAVAADEGFRVHPGKTRTAGSGRRQQVLGAVVNVRPTLPRPERDALRALLHNCAVHGWASQVRDADPATFRDAVLGRVAWASSVDPVLGARLHALAERVDWSAAPS

SEQ ID NO: 5760 - protein, 444 aa, unidentified
  source 1..444: note = Related to NZ_JABGCI010000002.1; note = Blastococcus endophyticus
MTTHRQDAVTAAGVATALLAGRWRRREMVRRVAVALDRARAPRWVGTLVGEVLVAYREAPADRPRELAAFVPTTEGWSRGRTALPRPRVARWQPVAVSVLRRPFPVAELPDAAALARLLDLDLGELLWFADPRGLERTSGEPLRHYRWHAVPHGSGMRLLAAPKPRLREIQRRLLRHVLAPVPLHAAAHGCVPGRSVRTAAAPHAGADVVLGMDLEAFFPSVAAARVWGLLQGTVGLTEPVAHLVTGLVTTVLPAAVWRRVPVPPGAGSADRHRRLGRRLAVPHLPQGAPTSPALANLVCFRLDRRLAGLAAAAGGRYTRYVDDLTFGGGRALAADRFAARVAAIAADEGFRVNDAKTRAVGAARRQEVLGAVVNARPTLPRPERDALRALLHNCTTRGWRTQVRDRDPATFRDHVLGRVAWASSVDPALGARLQAMAARVDWS

SEQ ID NO: 5761 - protein, 433 aa, unidentified
  source 1..433: note = Related to NZ_SPQN01000061.1; note = Geodermatophilus sp.
MTASGIATALLAGPWSRRTMVRRVSVALGFARAPRWVGALVDEVLAAYVSAPADRPRELAAFVTTTQAWQRMGALRRVVHRRPVATSVVRHRFGVPPLPDAAALARLLDLDQGELAWFADVRGLERTAGEPLRHYRWHAVERRGGLRLLAEPKPRLKEIQRRLLRHVLVPVPVHDAAHGCVPGRSVRTAAAPHAGSAVVLGMDLEAFFASVTAPRIWGLLQGTVGLTEPVAHLVTGLVTTSVPTSVWRALPLPDGTDARERHRRLGQRLAAPHLPQGAPTSPALANLVCYRLDRRLAGLASAFGARYTRYVDDLTFSGDRRIETGRLAALVTGIAAEEGFRINPAKTRVAGAGSRQRVLGAVVNTRPTLPRPERDALRALLHNCARHGWASQTREHDPATFREHVLGRVAWAASLDPVFGARLHALARRVDWS

SEQ ID NO: 5762 - protein, 347 aa, unidentified
  source 1..347: note = Related to FRDM01000010.1; note = Geodermatophilus obscurus
MVAADDGPPGRGRPRLRTRPALARLLDLDQADLAWFADVRVLERTVDEPLRHYRWHAVERRGRLRLLAEPKPRLKEAQRRLLRHVLAPIPVHDAAHGCVLGRSVRTAAAPQAGRALVLGMDLEAFFASVSAPRVWGLLQGTAGLTEPVAHLVTALGTTTAPVSVWRALPLPGGVEARERHRRLAAPHLPQGAPTSPALANLVCFRLDRRLAGLAASCGARYTRYVDDLTFSGDRRIRGDRLAALVTEVAAEEGFRVDPAKTRVAGAGSRQRVLGAVVNARPTLPRPERDALRALLHNCARHGWATQTRGHDPATFREHVLGRVAWAAALDPVLGERLHALAARIDWS

SEQ ID NO: 5763 - protein, 390 aa, unidentified
  source 1..390: note = Related to NZ_FNOT01000011.1; note = Geodermatophilus africanus
MLAAYAAAPVDRPRELTLFVQRTQGWERMGSPPRVVHRQPRATAVARDRFGVAPLADAAALARLLDLDHGELAWFADVRGLERTVGEPLRHYRWHAVERRGGVRLLAEPKARLEEVQRPLLRHVLARVPVHDAAHGCVPGRSVRTAAAPHTSRAVVLGMDLEAFFASVTAPRVWGLLQGTVGLTEPVAHLLTGLVTTTAPAGVWRALPVPSGAGARERHRRLGERLTTLHLPQGAPTSPALANLVCFRLDRRLAGLAATVGARYTRYVDDLTFSGDRRLRADQCASLVTEVAAEEGFRVNPAKTRVAGADSRQQVLGAVVNTRPTLPRPERDALRALLHNCARHGWTGQTRGHDPATFSEHVLGRVAWAGSLDPVFGERLHALAARIDWS

SEQ ID NO: 5764 - protein, 473 aa, unidentified
  source 1..473: note = Related to NZ_VFQE01000001.1; note = Blastococcus colisei
MTAPSERRAAGTAAGIATALLAGRWRRPEMVRRTAVALGRDRAPRWVGTLVGEVLDAYRDPPVDRPRELAGFVRTTAGWARGWTVVPQPRITRWQPARTDVVHRPYGVAALPDLTALARLLDVDAGELAWFADTHRLERTVAEPLRHYRWTTDGDRLLAAPKSRLKEIQRRLLRYVIGPLRVHGAAHGCVPGRSVRTAVTPHTGAAQVLQMDLESFFASIAAERVHGLLRSVGGLPEPVALAVTGLVTTVVPRSTWRRVPVPDDVDRHHRLGRRLAGPHLPQGAPTSPALANLVCFRLDRRLGGLAASFGAAYTRYVDDLTFSGGRGIDQGPFERLAGEIVVEEGFRLNRSKTRSTSSAGRQSVLGTVVNVRPTLPRTERDALRALLHNCATRGWASQVRDRDPATFRDHVLGRVAWASSIDPAFGARLRARAALIDWSRPDEGACGRTPADRPSDGTLPPPDDDGGARCGER

SEQ ID NO: 5765 - protein, 451 aa, unidentified
  source 1..451: note = Related to FOND01000013.1; note = Blastococcus sp.
MTAPGGRRAAGTAAGIATALLAGRWQRREMVRRTAVALGLPRAPRWVGTLVGEVLAAYRDPPVDRPRELAGFVRATAGWARGWAAVPQPRIVRWQPVPTALVRRRHGVAGLPDLAALARLLDVDAGELAWFADTHRLERTVGERLRHYRWTTAGDRLLAVPKPRLKEVQRRLLRHVVGPLGVHDAAHGCVPGRSVRTAVSPHAGADQLLQLDLESFFAGIAAERVHGLLRSVGGLPEPVARTVTGLVTTVVPRSVWRQLPVPDDAGRHERLGRRLAVPHLPQGAPTSPALANLVCFRLDRRLDGLAASFGAVYTRYVDDLTFSGDRGIDRGRFEQLAGEIVREEGFRPNRAKTRSTTSAGRQSVLGTVVNVRPTLPRPERDALRALLHNCATHGWRTQVRDHDPATFRDHVLGRVAWASSIDPVLGARLRAQAERIDWSSGPDGTAAPAPA

SEQ ID NO: 5766 - protein, 456 aa, unidentified
  source 1..456: note = Related to NZ_VLKF01000001.1; note = Modestobacter roseus
MTAPSGRRAATTAAGIAVALLGSRWRRREMVRATAVALGYARAPRWVGTLVGEVLVAYRDAPVDRPRELAAFVRTTAGWQRGWTRVPQPRVARWQPTVTEVAFRRHGVTELPDLAALARLLDLDTGELAWFADAHRLERTVREPLRHYRWRTVGSRLVAAPKPRLKEAQRRLLRHVVGPLPVHGAAHGCVPGRSVRTAVAPHAGAAVVLQLDLEAFFPSIAAERVQALLQTVGGLPEPVAHAVTGLVTTVVPRSVWAAVPVPAGPDRDRDRHHRVGRRLAVPHLPQGAPTSPALANLVAFRLDRRLAGLAASFGAQYTRYVDDLTFSGDRALDRGRFASLVGAVVAEEGFRLNAAKTRSTTSAGRQSVLGAVVNVHPTLPRTDRDALRALLHNCAVHGWRSQVRDHDPATFRDHVLGRVAWAASIDPAFGVRARRLADRIDWTAHPVRSPEGPGHD

SEQ ID NO: 5767 - protein, 449 aa, unidentified
  source 1..449: note = Related to NZ_JPMX01000077.1; note = Modestobacter caceresii
MTAERQAAATAAAIATALLAGPWRRREMVRRVAVALGQARARTWVGTLVGEVQTVYPTAPVDRPRELARVVRTTQGWERGQSHRPLARAVRWEPVPTALAWRRWPVADLPDQAAVARLLDVDAGELAWFADARRLERTAGEALRHYRWRVVQRPAGVRLLAAPKPRLKEAQRRLLRHVLDRVPAHDAAHGCVPGRSVRTAVAPHAGSAVVLRMDLEAFFASVAAGRVHGLLLGVAGLPEPVAHVLTGLMTTVLPTEVWRRIPPPDGIEARERHRRLEQRLTVPHLPQGAPTSPALANLVCHRLDRRLAGLAAASGGTYTRYVDDLTFSGDRRIARDRFADLVTDVVTDEGFRVNAAKTSATSAARRQAVLGTVVNDHPTLPRPERDALRALLHNCAVHGWTTQTRGRDPGTFRDHVLGRVAWAASVDPAFGARLHRLADRIDWTAPAHS

SEQ ID NO: 5768 - protein, 444 aa, unidentified
  source 1..444: note = Related to NZ_SJEX01000063.1; note = Modestobacter excelsi
MAAVTASGLATALLAGPWRRRDMVRRVAVALGQARAATWVGTMVGEVQTGYPQAPVDRPRELARFLRTTRGWARGQDTTPPPPVLRWEPQPTRLAWSRAPVADLPDQAAVARLLDVDPGELAWFADARGLERTVGEPLRHYRWQVVPRPHGVRLLAAPKPRLKEAQRRLLRHVLARVPVHDAAHGCVPGRSVRTAVAPHAGSPVVLRMDLEAFFASIAAERVHGLLLGPAGLPEPVAHVLASLVTTVAPAQVWRQVSLPTGIEARERHRRLGRQLAVPHLPQGAPTSPALANLVCFRLDRRLAGLAASCGARYTRYVDDLTFSGGTALGRDRFADLVTRVVADEGFRVNAAKTAATSAARRQSVLGAVVNTRPTLPRRERDALRALLHNCATSGWPGQTRGREPATSRDHVLGRVAWAASLDPAFGARLHALAERIDWSAEPAG

SEQ ID NO: 5769 - protein, 400 aa, unidentified
  source 1..400: note = Related to JAAGWH010000033.1; note = Modestobacter muralis
MVGEVQTVHPRPPVDRPRELSRVVRATQGFARGHASLPLPRVVRRNPVPTALAWERYPVTDLPDQAAVARLLDLDAGELAWFADTRGLERTAGEALRHYRWHAVDRPHGVRLLAAPKPRLKEAQRRLLRHVLAPVPVHEAAHGCVPGRSVRTAVAPHTGSAVVLRMDLEAFFAGIPAGRVHGLLLGPAGLPEPVAHVVTGLVTTVVPAQVWRALPVPPDVDARDRHHRLGRRLAVAHLPQGAPTSPALANLVCFRLDRRLSALAASSGARYTRYVDDLTFSGGRSVGGDRFAALVAEVVADEGFRVNAAKTSAVGAGRRQSVLGAVVNVHPALPRRERDALRALLHNCATHGWAGQTRGRDPDTFRDHVLGRVAWAGSLDPVFGARLTALAERIDWAAAD

SEQ ID NO: 5770 - protein, 450 aa, unidentified
  source 1..450: note = Related to NZ_VNHW01000003.1; note = Blastococcus xanthinilyticus
MTAGRRAEVTANGIATALLAGAWRRPQMVRRVAVALGYARAPRWVGTLVTEVLAAYWHPPADRPRELALFVRTTASWARGTASGPPPGVVRWEPVPTSVVRPRLPGVELSDLGALARLLDLDQGELAWFADARRLERTAPEPLRHYRWRIVDRPTGVRLLAAPKPRLKEIQRRLLRHVLDPVPVHGAAHGCVRGRSVRTAATPHAGAAVVLRMDLEHFFASVPAPRVHGLLLGQAGLPEPVAHAVTGLVTTVLPAAVWRRIPLPDDVRARERHRRLGARLAVPHLPQGAPSSPAMANLVCFRLDRRLAALADAFGATYTRYVDDLTFSGGARVGRGRLAGLVGEIARDEGFRVNTAKTRAISSARRQDVLGVVVNDHPALPRRERDALRALLHNCATHGWATQLRGRAPASFRDHVLGRVAWAAAVDPGFGARLHALADRIDWSRPLGSA

SEQ ID NO: 5771 - protein, 442 aa, unidentified
  source 1..442: note = Related to QHCB01000177.1; note = Pseudonocardiales bacterium
MNPREQVANGLATAMLGGAWSREPMRARIARALGRPRAPRWAGALVGQVLGAYRDAPADRPRELAAYVQTTPAWQLAWEHRRPPRIVRWAPTPTVMVARPWPVIELDDLGALARLLAIDQGELAWFADVRSIERRSGQPLRHYRWRALPKRGGVRLVAAPKPRLKEIQRRLLRHVLTQIPVHPAAHGCVPGRSVRTAVDPHAGAAIVIRADVEGFFSSISAGRIWGLLRMAGLPEPVAHTITGLVTTVVPTQVWRAVPRPTGALLLDAHLRMGERLATPHLPQGAPTSPVLANLAAFSLDRRLTGLAGAFGGQYTRYVDDLTFSGGPSLRNARSRFVELVDDIVRSDRLRLNERKTVVLGAAGRQQLLGAVINDHPTVARHERDALRALLHNCATRGWQTQTRGLEADEFRATLLGRISWIGGLDPSFGARLRRSFDAVDWS

SEQ ID NO: 5772 - protein, 425 aa, unidentified
  source 1..425: note = Related to JAFKEJ010000505.1; note = Actinomycetia bacterium
MTTRSDQQRQVADGLATALLAGPWTVPLMTRRVRTALGLRGRQPWVVGLVAEVADAYRDPPVDRPRELAAYLRATGSWRLAPVPRVVAWTPVPTSMGPMPWPVTALPDLGALARLLDIDQGELAWFADVRGLERRCAPPLRHYRWREIPGRSGPRLVAAPKPRLKEIQRRLLRHVLEPIPVHDAAHGAVATRSVRTAVAPHAGATVVLRADLVAFFPSIPAERAWGLLRTAGLPEAVAHTVTGLLTTVAPIEVSTDPRLRHPHVPQGAPSSPRLANVVAFSLDRRLAGLAARFGARYTRYVDDLTFSGGASLRTARSRFVALVEEIVRDEGFEVNERKTVVLGESGRQQVLGAVVNAHPALPRPERDALRATLHNCVVHGWASQARGRPRDEFRAHLLGRVAWVGSLHPGHGRRLRELADRIDWN

SEQ ID NO: 5773 - protein, 425 aa, unidentified
  source 1..425: note = Related to NZ_FQVU01000005.1; note = Jatrophihabitans endophyticus
MTGAGPAGPLADGLATALLAGPWTRPAMRTRGRDALGAARTPVWLGRTVDAVLTAYPQPPADRPRELAAFLLATAEFAKLARRRPPPRVVSWSPVPTDVMVRPWPVELLPDHAALAGLLDVDQGELAWFADVRGLERSSPEPLRHYRWRTVAKPGGVRVLAAPKPRLKEIQRRLLRHVFDAVPVHPAAHGGVRRRSVLTASAPHAAQPVVVRVDLVSFFASVRAGRVWRLLRTAGVPEGVAHTVTGLVTTVAPLPFRALDPRLRTPHLPQGAPTSPALANLIAFSLDRRLTGLAARFDASYTRYADDLVFSGGRGLGAARFLDRVGEIVRDEGFRVHDGKTAVLGRSGRQQVLGVVLNHHPAVPRRERDALRALLHNCATTGWRAQARDRDDFPAHVLGRIAWVQSLDPVHGRRLRAAYDAVDWS

SEQ ID NO: 5774 - protein, 444 aa, unidentified
  source 1..444: note = Related to BOMC01000025.1; note = Actinoplanes abujensis
MTTTAHRRRAAALRAGRRRHDRDSSGHAAAGTVADALLTTDWQTGKMQIAVRRVTAGRKGWARQFVQFVRRAYPRAPYDRPRELRLFLQARGGIPRDVVARHRLVSATRVVRMRWNTPGLGDLADLAAFLDLDGDALDWFADRREINRHARDERLRHYRYVWLPHRLIEAPKPRLRDLQRLVLDRILARVPVHDGVHGFVPGRGVHTFARTHTGRDVLVSMDLRAFFTSVTAARIYGLFRGIGYPEPVAHTLTALTTTRTPVAVLRSAPDPHLAALLRRPHLPQGAPTSPALANLCAYRLDRRLSGLAGRFGVTYGRYADDLAFSGTLSAPHVTRLTALTGRIADEEGFRLHPHKTRVRTRSQRQALTGLVVNTRPAVPREDYDRLRAILHNAATHGLAEANRDGHADFAAHLAGRVAWMSHHHPARAAKLHHLLAQALRDQPR

SEQ ID NO: 5775 - protein, 409 aa, unidentified
  source 1..409: note = Related to JAHKKG010000005.1; note = Actinoplanes bogorensis
MVAGAVADALLTTTWHKDQMLAAVRTVTAARPPWARRLVAVVLHAYPQPPADRPRELRRFLLHLTRRAHVRRRLVTPARTVHMRWGAPAIDSLADFLGLDGDELDWFADRREINRHARDERLRHYRYAWLTHRLIEAPKPRLRDLQRRVLDDILSAVPVHEGVHGFVRGRGVHSFARAHAGCDVLISLDLRAFFSSITAARIYGLFRGIGYPEPVAHTLTALTTTRTPAHVLRAAPDPHLAALLRQPHLPQGAPTSPALANLCAYRLDRRLAALATRFGVTYGRYADDLAFSGRLGRTETDHLIALVDGIAAEEGFRVHPGKTEVRRRSQRQALTGLVVNERPAVPREDYDRLRAILHNAATHGMAEANRDGHADFAAHLTGRVAWMSHHHPSRAAKLKTLLDRALATP

SEQ ID NO: 5776 - protein, 443 aa, unidentified
  source 1..443: note = Related to NZ_JAHWFK010000003.1; note = Actinoplanes sp.
MSTAAHRRRDAALRAALRRHDRESSGHAAPPQVAGALADALLTTDWRPAQMQAVVRAVVAGRAPWARRLVVAVWRAYPRAPVDRPRELRQFLINRALARRAVIRRRIVAPTRVVRMRWGAPALGDLAELAAFLGLDGDALDWFADRRELNRHARDERLRHYRYVWRPHRLIEAPKPRMRDLQRRLLDRILSVVPVHDSAHGFVPGRGTHTFARAHTGADVLVRLDLRAFFPSITAARIYGLFRGLGYPEPVAHTLTALTTTRTPAHVLREAPDPHLAALLRQPHLPQGAPTSPALANLCAFRLDRRLSALAGRFGVTYGRYADDLAFSGTLTNARADRLVELTGRIAAEEGFRVHPGKTRIRRRSQRQELTGLVVNERPAVPRKEYDRLRAVLHNAARHGLAEANRDGHADFAAHLAGRVAWMSHRHPTRAAKLHELLARALT

SEQ ID NO: 5777 - protein, 470 aa, unidentified
  source 1..470: note = Related to NZ_OBDY01000014.1; note = Actinoplanes atraurantiacus
MTTAAHRRRASALRAARRRHDRESSGHAAARTPKGAHRQSPWQVAGALADALLTTSWRPEDMVATVGSVVAGRPAWARRLVGAVLLAYPRAPADRPRELRHFLAGLEGRPRVAVRRAVVRHRPVVPVRVVRMRWGAPGVDGLAGLAAFLDLDGDALDWFADRREINRHARDERLRHYRYTWLTHRLIEAPKPRMRALQRQLLDQILSRVPVHPSVHGFVPGRDAHTFARAHAGASVLVSMDLRAFFSSITAARIHGLFLGIGYPEPVAHALTALTTTRTPARILRAASDPYLAALLRQPHLPQGAPTSPALANLCAFRLDRRLSGLAGRFGLTYGRYADDLAFSGTLADGRVARLVALAGQIAREEGFRAHPGKTRVRRRSQRQELTGLVVNDRPAVPREDYDRLRAILHNAATQGLAAANRDGHPDFAAHLAGRVAWMSHHHPSRAAKLKDLLDRVRSSGPEVSVERRS

SEQ ID NO: 5778 - protein, 418 aa, unidentified
  source 1..418: note = Related to AP023356.1; note = Actinoplanes ianthinogenes
MLTVDWQPERMTAVVRTVVRGRARWARRLVDAVLRAYPRAPADRPRELCRFLTNRGGIPRTRVRRRLMTPTRVVRMRWGAPPINDLAELAAFLGVDGDALDWFADRREINRQARDEKLRHFRYAWLPHRLIEAPKPRLRTMQRRLLDRILSRVPVHDSVHGFVPGRGTHTFARAHAGQAVLISLDLRAFFSSITAARIYGLFRGIGYPEPVAHALTALTTTRTPARVLRAAPDPHLAALLRQPHLPQGAPTSPALANLCAFRLDRRLSGLAGRFGLTYGRYADDLAFSGTLDSTGIARLVTLAGQITGEEGFRIHPGKTRVRRQSQRQSLTGLVVNAHPAASRKDYDTLRAILHNAAVHGLAAANRDNHPDFAAHLAGRVAWMSHHHPSRAAKLHQLLARTAGDQPRGPSSVSNSRSS

SEQ ID NO: 5779 - protein, 461 aa, unidentified
  source 1..461: note = Related to NZ_JOJL01000057.1; note = Actinoplanes sp.
MTTAAHRRRASALRAARRRHDRDSSGHAATSTWYGPHRQRPFRVAGALADALLTTDWRPEQMTAAVRSVAAGRAVWAVRLVKAVLLAYPRLPADRPRELRQFLANLPPTPRTTVRQAVIRHRLAVPTRVVRMRWGAPGIGDLAELAAFLGLDDDALDWFADRREINRHARDEKLRHYRYAWRPHRLIEAPKPRLRALQRQLLDQILSAVPVHDHVHGFVPGRGPHTFARAHAGNAVLVSMDLRAFFSSITAARIYGLFRGIGYPEPVAHALTALTTTRTPAPVLRDAPDPYLAALLRQPHLPQGAPTSPALANLCAFRLDRRLSGLAGRFGLNYARYADDLAFSGTLNTSGVDKFSTLAGRIVHEEGFRIHPRKTRIRRRSQRQALTGLVVNTLPAAPREDYDRLRAILHDAATHGLAEANRDGHPEFAAHLAGRVAWMSHRHPSRAAKLHRLLDQALAKP

SEQ ID NO: 5780 - protein, 458 aa, unidentified
  source 1..458: note = Related to NZ_BOMY01000054.1; note = Actinoplanes tereljensis
MTTAPHRRRTSALRAARRRHDRESSGHAAPAAQVAGALADALLTTSWQPDDMVAVVRSVAGGRPIRARRLVEAVLQAYPRAPADRPRELRRFLAALPTKPRTTVRRAVIRHRLAVPTQVVHLRWNAPALSDLADLADFFGLDGDALDWFADRREINRKANDQKLRHYRYGWLPHRLIEAPKPRLRALQRRLLDRILSAVPVHDRVHGFVPGRGTHTFAQLHAGAPVLVSMDLRAFFSSITAARIYGLFRGIGYPEPAAHALTALTTTRTPARVLRAAPDPYLAALLRRPHLPQGAPTSPALANLCAFRLDRRLTGLADRFGLTYARYADDLAFSGTLSRTRIDRLVTLATQIVHEEGFRTHPGKTRVRTSSQRQSLTGLVVNANPAVPREDYDRLRAILHNAATHGLADANRDGHPDFAAHLAGRVAWMSQAHPSRAAKLNALLERALGPEVPRPGRR

SEQ ID NO: 5781 - protein, 464 aa, unidentified
  source 1..464: note = Related to NZ_RJAC01000023.1; note = Actinoplanes sp.
MSTAAHRRRASALRAVRRRHDRESSGHAAIRTWNRKRLAPARRWYSPRRQPSSSVASALADALLTTNWRRPHMLSAVRVVAPARARRLVDAVLQAYPRAPVDRPRELSRFLAGFGVPRAVIRRRLVAPARVVRMRWKAPRIDDLAGLAAFLELDGGALDWFADRRELNRQARDERLRHYRYAWLSHRLIEAPKPRLRALQRRVLDEILATIPVHDAVHGFVPGRGTHTFAERHAGQDVLLTMDLRAFFSSITAARIYGLFLGAGYPETVAHALTALTTTRTPARVLRSAPDPDLAAVLRRPHLPQGAPTSPALANLCAFRLDRRLTGLAERFGLTYARYADDLAFSGTGPVDRLTPLVAHIATEEGFRVRPDKTKVRHRSQRQSLTGLVVNERPAVARADYDRLRAILHDAATHGLDAANRDGHPDFLAHLTGRVAWASHDHPSRATKLRRLLNQVQSSHIVGR

SEQ ID NO: 5782 - protein, 410 aa, unidentified
  source 1..410: note = Related to JAENHP010000015.1; note = Actinoplanes ovalisporus
MVAGALADALLTTTWQPEEMEAAVRSVAAVPEAWARRLVRTVLSAYPRNPADRPRELRRFLTARRAYIRHRLVTPTHAVRMRWNAPPINDLAELAAFLELDGDALDWYADRREINRHARDERLRHYRYAWLPHRLIEAPKPLLRDLQRRLLDDVLATAPVHEHAHGFVPGRGTHTFARVHAGRDVLVSMDLRAFFSSITAARIYGLFRGIGYPEPVAHALTALTTTRTPAHVLRAAPDPHLAALLRRPHLPQGAPTSPALANLCAYRLDRRLTGLADRFGLTYARYADDLAFSGTLTHAQVERLVALTTSIAAEEGFRVHPHKTRFRTQAQRQSVTGLVVNDRPAVPREEYDRLRAILHNAATHGLAEANRDGHADFAAHLTGRVAWMSHHHPSRAAKLQDLLVRALSAP

SEQ ID NO: 5783 - protein, 426 aa, unidentified
  source 1..426: note = Related to NZ_QHHV01000069.1; note = Actinoplanes sp.
MATALADALLTTSWRRKAMIGAGRALLGRPTRWVPRVVDAVAAAYRDAPADRPRELARFVAEIIRTTPGARRQSRRTVIRHRLVAPTRTVRMRWKTPRIDDLAALADFLAVDGDLLDWFADRREINRHARDEPLRHYRYQWLPHRLIEAPKPRLRAIQRRLLDHVLAAIPVHERAHGFVAGRGVHTFAGSHAGRAVLVSMDLRAFFSSITAPRVYAMFRQAGYPEPVAHALTALTTTRTPARVLRGAPDTTRAAMLRQPHLPQGAPTSPALANLCAFRLDRRLTGLADRFGLHYSRYADDLAFSGTLGERRTLDLISYVRGIAAEEGFRAHPDKTRVRRRADRQLLAGLVVNSRPAVPREEYDGLRAILHNAGRHGLAAANRDGHPDFAAHLAGRVAWMAHQHPARAAKLHNLLRAALTAPTTAGS

SEQ ID NO: 5784 - protein, 393 aa, unidentified
  source 1..393: note = Related to BOQL01000058.1; note = Actinoplanes auranticolor
MVFGRRARWVRPAVDAVLRAYREAPGDRPRELAGFLAASGRLGAHRTVVRHRLVAPTRTTRMRWPAPAIDDLGALADFLSLDGDMMDWFADRREINRYARDERLRHYRYTWLPHRLIEAPKPMLRDLQRRLLAEVLAGMPVHERVHGFVPGRGVHTFAASHTGQEVLVSLDLRAFFSSITAARVYAVFRQAGYPEPVAHTLTALTTTRTPAHVLRDAPDATRAALLRRPHLPQGAPTSPALANLCAFRLDRRLTGLADRFGLHYSRYADDLAFSGTVGDRRVGDLISYVRAIVTEEGFRTHPGKTRVRRQGDRQLLAGLVVNARPAVAREDYDRLRAVLHNAGRHGLAAANREGHPDFAAHLAGRVAWMAHRHPTRAAKLHSLLRSAVAADRQ

SEQ ID NO: 5785 - protein, 442 aa, unidentified
  source 1..442: note = Related to NC_022657.1; note = Actinoplanes friuliensis
MTTAAHRRRLAALRARTRRHDRVSSGHAAAAAPRVATALADAFLSTRWRRKAMVKAGAAVLGRERRWVDRAVVKVLRAYRIAPADRPRELAGFLEGITRPAVIRRRRVTPVQVVRMRWHAPPINDLGELAAFLDVDGDLLDWFADRREINRHARDERLRHYRYRWLPHRLIEAPKPHLLALQRRLLDEVLARVPVHERAHGFVPGRGVHTFAASHAGQAVVVRLDLRAFFSTVTAARIYGIFRSAGYPEPVAHALTALTTTRTPARVLRDAPDPRLAALLRRPHLPQGAPTSPALANLCAFRLDRRLTGLAGRFGLHYSRYADDLAFSGPDHPHNLIPYVHSIAVDEGFEINPAKTRVRGQADRQLLAGLVVNSSPAVPREDYDRLRATLHNAATHGLAEANRDGHADFAAQLAGRVAWVSHRHPARARKLQELLSAALAKP

SEQ ID NO: 5786 - protein, 427 aa, unidentified
  source 1..427: note = Related to NZ_RJKL01000001.1; note = Couchioplanes caeruleus
MSAALADALLTSRWRPGPLQRTGTAVLGGRPPWLRIAVVAVLRAYRHAPADRPRELAAFLSCLERSGRPLVRRHPIRLRRATPVRIVRMRWDTPRIDDLAALADFLGVDGDHLDWYADRRHLNRHARDERLRHYRYAWLPHRLIEAPKPRLRALQRRLLDDLLGRLPVHPHAHGFVPGRGVHTFAAPHAGQKLVIGLDLTAFFSSITAARIHGLFRTAGYPEPVAHTLTALTTTATPAAVLRGRTDPHRAALLRRPHLPQGAPTSPALANLVAYRLDRRLTGLADRFGLHYTRYADDLAFSGTLGRGEPAHLIAAVHTIAADEGFRVHPRKTRVRGRGDRQRLAGLVVNERPAASREDYDRLRAVLHDAARRGPLVANREGHDDFPAYLRGRVAWVSHRHPARAAKLHRMLAVALAGPAAPPTVTTP

SEQ ID NO: 5787 - protein, 447 aa, unidentified
  source 1..447: note = Related to CP005929.1; note = Actinoplanes sp.
MFCPPGTGGSLDRSLTFAGHANLGAVRQAVNSALAEAFLACGWRDGPARPALDRLTRAGAEVLGGRPWWLRPLAAEVLRAHRNPPLDRPRELAAFLGRRVAGSRPIMVRRAVPVRTVRMRWPTPRIDDLAALADFLGLTGEELDWFADRREINRHARAEQLRHYRYRWLPHRLIEAPKPRLRALHRRLLDDLLGRLPVHDAAHGFVPGRSVHTFAAPHAGRALVIRADLATFFSSITAPRIFGLFRTAGYPEPVAHALTGLTTTRTPAAVLRGHGYDTARMLRQPHLPQGAPTSPALANLVAFRLDRRLAGLAARFDLTYTRYADDLAFSGPRTDPRRFLDALRTVVADEGFRLHPAKTRVRGRADRQSLAGLVVNEHPAVPRTDYDRLRAILHDAARHGLATANRDGHPDFAAYLTGRVAWIAHHHPTRAAKLHRMLAAALNPPPP

SEQ ID NO: 5788 - protein, 393 aa, unidentified
  source 1..393: note = Related to NZ_LOJP01000001.1; note = Actinoplanes sp.
MVVAGLVRAGAEVLGARPWWLRPVVARVLRAYPHPPLDRPRELAAFLDRRVQPHPVVVRRAAPARVVRMRWDTPQLNDLGALADFLEVSGDELDWFADRKEINRHARDERLRHYRYVWLPHRLIEAPKPRLRALQRRLLDELLGRIPVHPAAHGFVPGRSVHTYAAPHAGQRMVVRADLAAFFSSITAQRSYGLFRLAGYPEPVAHALTALTTTRTPIDVLRGRPGSTRTLLREGHLPQGAPCSPALANLVAFRLDRRLTGLAARFGLTYTRYADDLAFSGPRALNLDALAAVVKDEGFRLHPAKTRIRGRGDQQRLAGLVVNEHPAVPRGEYDHLRAILHDAARRGLEAANREGKADFRAYLMGRVAWVSHRHPGRAAKLDRLLKDALRRGD

SEQ ID NO: 5789 - protein, 393 aa, unidentified
  source 1..393: note = Related to NZ_BOMN01000001.1; note = Actinoplanes humidus
MLGRLVRAGGEVLGGRPWWLRPVVAGVLRAYRDAPADRPRELAGFLSGRVQSHPVVVRRAVPVRVVRMRWDTPRIDDLGVLAGFLGLAGDELDWFADRKEINRHARDQRLRHYRYRWLPHRLIEAPKPRLRAVQRRLLDGVLGRIPVHPAAHGFVPGRGVHTFAVPHSGQPMVVRVDLASFFSSVTAPRIYGLFRTAGYPEPVAHALTALTTTRTPADILGGKYLPLLRHAHLPQGAPSSPALANLVAYRLDRRLSGLAARFGMTYTRYADDLAFSGPRVSAPRLLAALEAVVKDEGFQLRHAKTRVRGQGDRQVLAGLVVNERPAVARVEYDRLRAVLHDAARRGLDEANRDGHADFSAYLKGWVAWVSHRHPGRAAKLDRLLAATLGEDRA

SEQ ID NO: 5790 - protein, 460 aa, unidentified
  source 1..460: note = Related to NZ_BOPH01000102.1; note = Virgisporangium ochraceum
MSTAAHRRRASALRAGRRRHDGASSGHAATRRQAPRRVASALADAFLTVAWRRAELLAVGRTVLAARPRWLGPVVTAVLRAYRDPPVDRPRELAAFVAGATGPAGQRVGAAVVRERRMVPTRTQRMRWGTPAIDDLAALADFLDLDGDHLDWFADRRELNRHARDERLRHYRYTWLPHRLIEAPKPRLRAVQRHLLDTVVGLLPVHGSVHGFVPGRGVHTFAAAHAGKPTVVRLDLRAFFTTVTAGRVYGVFRTAGYPEPVAHTLTALTTTRTPAAVLRTAPDRAAAGARAALLRQPHLPQGAPTSPALANLCAYRLDRRLAGLAVRFGVGYTRYADDLAFSGDLTARQAGHLVTHVTAVATAEGFGTNPAKTRVRGRADRQQLAGLVVNAAPAVPRAEYDLLRAILHDAARNGLAAANRDGHPDFAAHLAGRVAWVGHRHPARAAKLRRLLADVGAPRT

SEQ ID NO: 5791 - protein, 407 aa, unidentified
  source 1..407: note = Related to NZ_BOPG01000148.1; note = Virgisporangium aurantiacum
MLWQRSELLAVGHTVLGARPRWLGPVVTAVLRAYRQPPADRPRELAAFVAAVTGPAGTRVQAAVIRERRFVATRVGRMRWATPAVDDLGALADFLDVDGDRLDWFADRRELNRHARDQQLRHYRYLWRPHRLIEAPKPRLRALQRHLLDTIVGLLPVHESVHGFVAGRGVHTFAAAHAGKPTVLRLDLRAFFTSVTAARVYGLLRTAGYPEPVAHALTALTTTRTPVDILRDAPNRAHAALLRQPHLPQGAPTSPALANLCTFRLDRRLAGLAGRFGADYTRYADDLAFSGDLGGRQAQHLITQVTAIATAEGFGVNTAKTRVRGQADQQRLAGLVVNAAPAVPRAEYDRLRAILHDAAQHGIDAANRDGHPDFAAHLAGRIAWVAHRHPTRASKLQRLLSAAVPAP

SEQ ID NO: 5792 - protein, 328 aa, unidentified
  source 1..328: note = Related to NZ_JADMLH010000017.1; note = Pseudosporangium sp.
MRWDTPRIDDLAALAGFLGFDADELDWYADRKELNRHARDERLRHYRYTWLGRRLIEAPKPRLRAVQRRLLDDVLGRLPVHPAAHGFVPGRGPHTFAAAHAGQPVVVRLDLAAFFSTITAGRVYGLLRTAGYPEPVAHTLTALVTTRTPAAVLRNAPDWRTAALLRHPHLPQGAPTSPALANLLAYRLDRRLSGLAARFDATYTRYADDLAFSGPLTGGVAGRLVAAATTVVAAEGFRVHPGKTRIRGRADRQLLTGLVVNDRPAVPRAEYDHLRAVLHDAARNGLAAADRDGRADFAAYLRGRVAWVAHAHPSRAAKLHRLLAAALS

SEQ ID NO: 5793 - protein, 438 aa, unidentified
  source 1..438: note = Related to NZ_JNYJ01000032.1; note = Dactylosporangium aurantiacum
MSTAAHRRRASALRATLRRHDRDSSGHAARAVAGALADAFLTVDWARGPLLEVGREVLGRRPRWLGPVVTAVLRAYREAPADRPRELAELISAPGRQPIRVRRATATRTVRQRWDSPRVDDLAALAEFLAVTPDELDWFADRRGLNRRHPDPRVRHYAYTWIGDRLIEAPKSRLKALQRRVLDELLGPLPVHPFAHGFVPGRSVHTFAAPHAGQVTVVRIDLRGYFSSVTAGRVYGLWRTAGYPEPVAHALTALCTTATPHAVSRRVEHRTPHLPQGAPTSPALANLVTFRLDRRLAGLAARFGATYSRYADDLAFSGPLRQPARLVAAVTAVAAEEGFRVNPAKTRVRGRGDQQRLAGLVVNDRPAVPRADYDRLRAVLHHAARDGLDAANRDGHPDFAAHLTGLVAWAAHGHPTRAARLHGLLRAAGINRRTATPP

SEQ ID NO: 5794 - protein, 353 aa, unidentified
  source 1..353: note = Related to NZ_CP061913.1; note = Dactylosporangium vinaceum
MELAEFIAAHLPARLPVRIVVRRAVPTRTVRMRWDTPVLDDLAALAELLELDGDRLDWLADRREMNRKTLREPLRHYRYTWMGRRLIEAPKPLLRGLQRRLLDEVLGRIPVHPAAHGFVPGRSVHTFAAPHTGRDVVVRIDLAHFFASISVQRVYGLFRSVGYPEPVAHALAALCTTSTPSDIARGSIALRTPHLPQGAPTSPALANLCTFRLDRRLTGLALSFGATYTRYADDLAFSGSFNADHVIAAVRQIVAGEGFRVNPAKTRVRGRGDRQRLAGLVVNERPGVAREEYDRLRAILHAAARDGLDAANRDDHPDFRNHLLGRIAWVGHGSPARAAKLRELFGLVAATGL

SEQ ID NO: 5795 - protein, 434 aa, unidentified
  source 1..434: note = Related to NZ_BMPI01000004.1; note = Dactylosporangium sucinum
MSTAQHRRPDAALRAGQGRHDRVSSGHAALADAFLATPAWERAALLGAGYEVLGRRPRWLGPVVTAVLGAYREPPADRPRELAAFVAALGRVPFRARVAVRRAVPTRVVRMRWDTPRLDDLAALAEFLEVDGDHLDWYADRREINRLAADGALRHYRYTWLATRLIEAPKPRLRTLQRRLLDEVLGRIPVHPAAHGFVPGRDVRTFTAVHLGKSTVVRLDLSAFFASMTVSRVYGLFRGAGYPEPVAHTLAALCTTRTPPDVVRDAPSFLLAAQLRQPHLPQGAPSSPALANLIAFRLDRRLAGLADRFGADYSRYADDLAFSGAFDAPRLVAAATDVVVDEGFRVHPMKTRIRGRADRQQLAGLVVNEHAAVPRTEYDLLRAMLHTAARDGLAAANRAGHPDFRAYLAGRIAWVGRDHPSRAAKLARLFTALP

SEQ ID NO: 5796 - protein, 310 aa, unidentified
  source 1..310: note = Related to NZ_JAGGJO010000001.1; note = Micromonospora sp.
MVRRPTRHEPPRHRPPPAPLPLPVDRGRPADRGTEVPAARPATPAPHRGPRPHPGPPAAHGFVPGRSAHTFAGIHTAQPVVVRIDLLAFFTHIPATRVHGLFRTAGYPESVAHTLTGLCTNRTPHPVLRRAPTELPHRAARLAALRTGHLPQGAPTSPALANLCAYRLDRRLTGLADAFAITYSRYADDLAFSGDLTTRRIDDLIADVTDIARDEGFQVHPAKTRVRGRADRQLLAGLVVNQHPATPRDEYDQLRAILHNAARTGLAAQNRTGHPDFAQYLIGRVTWISHHHPARAAKLAALLAHALAAP

SEQ ID NO: 5797 - protein, 442 aa, unidentified
  source 1..442: note = Related to WBKT01000007.1; note = Micromonospora sp.
MLWPAVVRVTGVPQQARRDPRRHRPDTGTAYRPINSAVQSRGTPAGTPVVPRQRDPALHGSLHRATRTGDTDDGLRSLRCSHGGVSRADQAGLPCGVRSRSLRGNSGKDHSPRHHTTGAKSRLRALQRRLLAEVLGRIPVHLAAHGFVPGRSAHTFAAAHAAQPVVVRIDPLGFFTHIPATRVHGLFRTAGYPEPVAHTLTGLCTTRTPHPVLRRAPTGLPHRATRLAALGTGHLPQGAPTSPALANLCAYRLDRRLTGLADAFETTYTRYADDLAFSGNLTTRRIHTRSPPSPTSPAKRASESTQPRPASVGAPTGNSSPDSSSTTTPPHHATNTTSSAPSSTTPPAPASPPSTGPTTPTSLHTSSDEFSESAITTRHAQPNSPRCWPKLLRHRRLTRRGSFAGSRQGHVGRPKRGLSRTYTCSADLRQASTATRLCDPLT

SEQ ID NO: 5798 - protein, 537 aa, unidentified
  source 1..537: note = Related to VDFY01000230.1; note = Micromonospora orduensis
MPGAAPFIGRGLTPRIHRHATCIADTHGGPRSLRCSHGGVSRADQAAPPRGVRSRSLRGNPGDAILTSAPHHRCVGTLREPVHPYDRASSGHAATPTGLPVNTIHALATALADAFLAGAGWRRGDLVDQGGLVLGVRRRWLWPVADAALVAYLHPPTDRPRELATFLSTLDPLRAAVTAARQHRRPIVIRARPVTPTRTVRRPWHTPVIDTVGDLAAMLDLSIEHLDWYADRRAMNRRAPAHRLHHYHNRWTDRGRLIEAPKSRLRALQRRLLAEVLGPIPVHPTAHGFVPGRSAHTFAATHAAQPVVVRIDLLAFFTHIPATRVYGLFRTAGYPEPVAHTLTGLCTTRTPHPVLRRAPTDLAHRAARLAALRTGHLPQGAPTSPALANRCAYRLDRRLTGLADAFEITYTRYADDLAFSGDLTTRRIDDLIAAVTDIARGEGFQVHPAKTRVRGQADRQLLAGLVVNHHPATPRDEYDQLRAILHNAARTGLAAQNRTGHPDFAQYLIGRVTWVGHHHPARAAKLATLLAQALAAP

SEQ ID NO: 5799 - protein, 459 aa, unidentified
  source 1..459: note = Related to NZ_RAQQ01000031.1; note = Micromonospora globbae
MTTVRALTTALADAFLADGDWHRPDLVNRGGLVLGVRRRWLWPIADAVLVAYPHPPRDRPRDLAAFLATLEPLRGAVTAARQHGRPIVIRARPVAPIRTVRHPWHTPVIDDIGALAAMLDLSIEHLDWYADRRAMNRRATDQRLHHYGYRWTNRGRLIEAPKPRLRALQRQLLAEVLGPIPVHPAAHGFVPGRSAHTFAAAHAGQPVVVRIDLLAFFTHIPASRVYGLLRIAGYPEPVAHTLTGLCTTRTPHTVLRQAPADLPHRSARLAALRAGHLPQGAPTSPALANLCAYRLDRRLTGLADAFALTYTRYADDLAFSGDLTNQRTSDLTAAVTTIARDEGFRIHPDKIRVRGQADQQLLAGLVVNHRPAAPRDEYDRLRAILHNAARTGLDAQNHTGHPAFAEHLTGRVAWIAHHHPTRAANLARLLDQALNPPDGRSTTATRQAPAQLDVGEAAT

SEQ ID NO: 5800 - protein, 533 aa, unidentified
  source 1..533: note = Related to POTY01000051.1; note = Micromonospora craterilacus
MAAEDIPVAANGSASRPATAERAATGVRLGWLGCTDGSVSRADQAAPPGGARSRSLRGNPGDATLTQAPHHRCVGTLREPVHPHGRASSGRAAPIRWAAVTTVHALATALADAFLAEDSWRRPDLVHRGGLVLGVRRRWLWPVADAVLVAYPRPPRDRPRELAAFLTTLDPLRDAISAARWQGRPIVIRTRPVAATRTVRRPWHTPLIDDVGALAALLRLSVEHLDWYADRRAMNRRASDQRLHHYRCRWTDRGRLIEAPKPRLGALQRRLLAEVLGPIPVHPAAHGFVPGRSAHTFAAAHAGQPVVVRVDLLAFFSSVPATRVYGLFRTAGHPEAVAHALTGLCTTRTPSSVLRQAPSDLPHRSARLAALRAGHLPQGAPTSPALANLCAYRLDRRLAGLADAYGATYTRYADDLAFSGDLSASSLITAVSEIVRDEGFRIHPDKTRVRGQGDRQLLAGLVVNGRPATPRDDYDRLRALLHNAARTGLDAQNRTGHPAFADHLAGRVAWIGHQHPARAAKLAALLAEALAAR

SEQ ID NO: 5801 - protein, 444 aa, unidentified
  source 1..444: note = Related to NZ_QUMQ01000001.1; note = Asanoa ferruginea
MTSARSLAVALADAFLADGEWRRPALADRGGLVLGVRRRWLVPVADAVLTAYPRRPSDRPRELAAFVAGLEPLREAVRRPILISSRQVVATRTITHRWHTPVLDHLGDLAAQLGLSIEHLDWYADRRAMNRRAADPRLHHYRYRWAGTRLIEAPKPRLRDLQRRLLTDVFGRIPVHDAAHGFVPSRSASTFATAHSGQPIVVRVDLLAFFATVTAARVYGLLRTAGYPEPVAHALTGICTIRTPANVLRMAPPHLIERPARIAALRAGHLPQGAPTSPVLANLCAFRLDRRLTGLAGAFGVSYRRYADDLAFSGGISGQRLDDLLVAVADVVRDEGFRVHPTKTRIRGRGDRQLLAGLVVNERPAVPRDEYDRLRAILHNAARTGLAAQNRGGHPAFAEHLAGRVAWVGRASPHRAAKLASLLDAALATAANPAHPHQRDIVDM

SEQ ID NO: 5802 - protein, 435 aa, unidentified
  source 1..435: note = Related to NZ_BONC01000044.1; note = Asanoa iriomotensis
MTDARGLAVALADAFLADGEWRRPALADRGGQVLGVRRRWLVPVADAVVTAYPRRPSDRPRELAAFVSGLGPLREAVRRAATPIVVRSRPVVATRTVSHRWSTPVVDDLGGLAAVLGLTIEQLDWYADRRLLNRRAADDRLRHYRSRWVGGRLIEAPKPRLRALQRRLLTEVLGPVPVHGAAHGFVPARSAATFAAAHAGRPVVVRVDLLAFFATIGAGRVYGLLRTAGYPEPVAHALTGLCTIRTPASVLRLAPHDLVDRPVRLAALRAGHLPQGAPTSPALANLCAFRLDRRLSGLAGAFGLTYGRYADDLAFSGELPGRRLDDLLVAVAEVVRAEGFRVHPAKTRVRRRGDRQVLAGLVVNERPLVPREEYDRLRAILHNAALTGLAAQNRTGHPAFAEHLAGRIAWVGQGSPHRAAKLAALLDAALSTDPR

SEQ ID NO: 5803 - protein, 439 aa, unidentified
  source 1..439: note = Related to NZ_LT607412.1; note = Micromonospora coriariae
MTTVGSLAVALADAFLAADRWLRGDLVASGGRVLGVRRRWLWPVADAALAAYPRAPRDRPRELAAFLANLALLAEVVGAARQRGHTVAVRARPVTPTRTVRRPWSTPVLDDLADLARLLDVTPDQLDWYADRRAMNRRADDQRLHHYRYRWTVAGRLIEAPKPRLCALHRRLLAEVLGPLPVHPAAHGFVPGRSAHTFAAAHAGRAVVVRIDLAAFFGSVPARRVYGLFRTAGYPEPVAHTLTAICTTRTPAAVLRAAPVDLPDRVWRLAALRGGHLPQGAPTSPALANLCAFRLDRRLTGLAAAFDVDYQRYADDLAFSGELPPRRVADLLAAVTEVVRDEGFRVHTRKTRVRGRADRQLLAGLVVNERPAVPRVEYDRLRAILHNAARTGLAAQNHAGHPAFAEHLAGRVAWVGHTHPGRAAKLAALLAAALASPQT

SEQ ID NO: 5804 - protein, 458 aa, unidentified
  source 1..458: note = Related to NZ_AP023359.1; note = Polymorphospora rubra
MLSGVGGEEPPGRPGERVAAALADAFLAGDWGRDGLLGRGALVVGVRARWLRRVAAEVLGAYPRVPADRPRELAGFVAASPVYRAAWHSARRRGRRLRVRARPVTATRTVRRPWPTPVVDDLAALAALLGLTPEELDWYADRRSINRHARDERLRHYRYTWLGGRLIEAPKPRLRALQRRLLAEVLGPVPVHPAVHGFVSGRSAHTFAAAHAGRPTVVRVDLVSFFATVSAPRIFGLLRLAGYPEPVAHTLTALCVTRTPAGVLRAAPAGLPDRPYRLALLRGPHLPQGAPTSPALANLCGFRLDRRLAGLAAAFGATYTRYADDLAFSGDLPPRRAAALVDRVTAVVAGEGFRVRPDKTRIRGRADRQLLAGLVVNTAPGVPRDEYDRLRALLHNAARTGLAAQNRAGHPDFEAHLAGRIGWVGRDRPARAAKLRALFEAARLRPDDGSPGAHAAAP

SEQ ID NO: 5805 - protein, 410 aa, unidentified
  source 1..410: note = Related to JADGGF010000365.1; note = Micromonosporaceae bacterium
MLGYAPQWTDGVVDEVLTYPRPPADRPRELARFIARLRAFRSHVAGAPGASPEAAPVRVVHRVVTPTVTVRQPFHTPRLDSVADVADWLGLSIVELEWFADVREINRQATDRRLRHYTYRWLNGRLIEAPKPRLRSLQRKVLDELLGPIPVHPAVHGFVSGRSPHTFAAPHAGQRMVIRLDVMSFFASVTAARVYGLLRAAGFPEPVAHVLTGLCTTRTPPDVLRRAPARVPNRDLRLALLRAPHLPQGAPTSPALANLCGFRLDRRLAGLAQSNGLRYTRYADDLAFSGFTSQPQRFIDIVRSIVADEGFRLNEAKTRLRGAADRQLLAGLVVNAAPAAPRDEYDALRALLHNAIYTGLDEQNRDGHPDFVAHLAGRIAWVGHRHPTRAAKLHALFQRALSGPPPEATA

SEQ ID NO: 5806 - protein, 446 aa, unidentified
  source 1..446: note = Related to JAHBSN010000079.1; note = Actinomycetia bacterium
MTRGRTLAVDAADALAGAFLAGEWDPPAMARRAQRALGDRRGWTLELARVVRAGFPERPADRPRELAGFIGRCEVFHRAVQDPDRPMRVRVWMAPPTEMGPARWPVAPLPDVAALATWLGVTVDHLAWFADRRSLERHVDDERLRHYRRRWLAKPDGTARLLEAPKEELKDLQRQVLHQILDRIPAHDAAHGFRPNRSVRTSAAVHRGQEVVVRLDLEAFFTSVDVGRVYGIFRLAGYPEPVAHTLAALCVTVTPGAVLRSAPPVPDSLVDARRRLLHRLRSPHLAQGSPTSPALANLVAFRLDRRLAGLAAALDARYTRYADDLVLSGGRNLVRSAGPILHLVERIARSEGFTVHDRKTRVLTSAQRQRITGLVVNGGVNVARPDYDRLRAVLHDAALHGPEAANREGHPDFQAHLQGRVAWVGAGNPGRAHKLARAFAAIDWDA

SEQ ID NO: 5807 - protein, 453 aa, unidentified
  source 1..453: note = Related to JAFAZI010000149.1; note = Frankiaceae bacterium
MSTSRASVANALAAALLDGEWKSVTTLAGRGARALGVSQRRLGAVAGDVLAAYREPPLDRRRELSSYLLELPSFHVLWEGPGRPPIVQRHRLPLADMGRARWPVPTIATSLELASWAEEDLSVLDWYADVRSLERSAAPKLRHYDREWRYNRRGGVRLLERPRSRIKGLQRRVLREMLDVVPAHGAAHGFVAGRSVVSFVTPHVGRDVVVRLDLTACFASITAPRVFGVFRMLGYPEAVAHTLTGLSTTVVPRDVLRSAPQALRNEDLDARRWLLTRLAEPHLPQGSPTSPALANLVLFHLDARLSGLAAAAGASYSRYADDLAFSLDGTDAVRRAKRLVASARSVVADERLRLNDAKTSITRRSQRQVLCGVVVNDKPAVERRRRESLRAALHNIRQHGPESQNRAGHEDFRAHLLGEIAWVSAVNPDHGERLRSEFAQITWSELGPGASQP

SEQ ID NO: 5808 - protein, 336 aa, unidentified
  source 1..336: note = Related to JACGZW010000002.1; note = Amycolatopsis dendrobii
MPVWRWQVARWTTFDECAAALDLTPGELSWFADERGWHRRSGPVLRHYSYRWIPTATGGARLIERPKPRLAEVQRRIRRQVLDALPVHEAAHGFRRGRSIHTCARPHAGQDVVVRLDLAGFFPTVSASRVRSLLDLAGYPKAVAAAIAGILTTRTPVDVLRSAPARSAMLSHLAGTHLPQGAPSSPSVANAVTHHLDRRLSGLAAVLGANYTRYADDLAFSGDASLPLHRLLPGVRRIVTDEGFRLRDDKTSVKPAYRQQRVAGLVVNAAPAVARAEYDELRAVLHNCARTGPAQQNRAGHPDFRAHLMGRIAWISATNAARGTKLRGLFDRIDWS

SEQ ID NO: 5809 - protein, 350 aa, unidentified
  source 1..350: note = Related to NZ_PDJK01000002.1; note = Amycolatopsis sulphurea
MNGERVTSASLLGPMPVWRWPVARWTTFDECAAALDLPPGELSWFADTRGWNRRAPARLRHHCHHWIPTASGGARLIERPKPRLAELQRRVRRHVLDALPVHEAAHGFRGGRSIHTCAQPHAGQEMVVRMGLEGFFPAVSATRVRALLELAGYPPAVRAALAGILTTRTPVDVLRAAPVRARSLGRLAGTHLPQGAPSSPSVANAVTHHLDRRLSGLAASLGVNYTRYADDLAFSGDAGLPLHRLLPGVRRIVTDEGFRLRDDKTSVTPAYRQQRVAGLVVNATPAAARAQYDELRAVLHNCAKTGPAPQNRAGHPDFRAHLRGRIAWISATNPARGAKLTDLFHRIEWD

SEQ ID NO: 5810 - protein, 369 aa, unidentified
  source 1..369: note = Related to NZ_CP080519.1; note = Amycolatopsis sp.
MNGERVTPASPTNPANPAEHTKPFGPQEPSLLDPLPPIWRWQVPHWPTFESCAAALDLTPGELSWFSDPRHWNDRANHTLRHYHHRWIPTSTGGLRLIERPKPRLAELQRRIRRHVLTALPVHDAAHGFHPGRSILTCAQPHAGQDKVIRMDLEHFFPTVSARRIRSLLELAGYPPAVAQALAGILTTTTPPVVLKNAPRKVRDQLKKPHLPQGAPSSPAVANAVTNRLDRRLSGLAQKLGANYTRYADDLAFSGEATLPLHRLFPGVRRIVEDEGFRLRDDKTSVAAKHQRQRVAGLVVNTKPAAQRTYYDDLRATLHNCATTGPQAQNHAGHPDFQAHLRGRIAWISATSAPRGVKLKELFDRIDWS

SEQ ID NO: 5811 - protein, 362 aa, unidentified
  source 1..362: note = Related to NZ_FOEF01000001.1; note = Amycolatopsis saalfeldensis
MNGESVTSASLLQPWPVWRWPVSRWASFDECAGALDLMPGELGWFADARSWNRRANPVLRHYSYRWIPTASGGIRLIERPKPRLAELQRRVRRHVLDALPVHEAAHGFRTGRSILTCAQPHAGQQLVVRMDLEAFFPTVSARRIRALLELAGYPAAVSAALAGILTTATPADVLREAPAGRRGPVRARLLNSLAATHLPQGAPSSPSVANAVTHHLDRRLAGLARTLGARYTRYADDLAFSGDAGLPLHRLLPGVRLIVTGEGFRLREDKTSVAAAHQQQRVAGLVVNSAPAATRASYDELRAVLHNCARTGPAAQNRAGHPDFRAHLLGRIGWIAATSRARGEKLKALFDRIDWHAETAGD

SEQ ID NO: 5812 - protein, 355 aa, unidentified
  source 1..355: note = Related to NC_021252.1; note = Amycolatopsis keratiniphila
MTGERVTPASLLGPMPVWRFQVARWTTFDECAAALDLTPGELSWFADAKGWNRRAAEPVRHYTYRWIPTASGGVRLIERPKPRLAELQRRIVRHVVDALPVHEAAHGFRRGRSPLSCAAPHAGRETVVRMDLEGFFPTVSARRISALLALAGYPPAVAEALAGVLTTAVPPAVLATVPGGRRDPARTRLLSNLAATHLPQGAPSSPSVANAVTHHLDRRLGGLARALGATYTRYADDLAFSGDSLPLHRLLPGVRRIVTDEGFRLRDDKTSIAGAHQRQRVAGLVVNSAPAATRADYDALRALLHNCARTGPETQNRSGHPDFRAHLLGRIGWIAASSERRAAKLRDLFGGITWP

SEQ ID NO: 5813 - protein, 357 aa, unidentified
  source 1..357: note = Related to NZ_ARVW01000001.1; note = Amycolatopsis nigrescens
MNGEKVTSASPLGPLPVWRWPVARWTTFDECAAALDLTPDELSWFADAKSWNRRAAGPLRHYRYRWIPTASGGIRLIEQPKPRLAELQRRLRRHVLDALPVHEAAHGFRPGRSAMTCAAPHAGRDLVVRMDLEGFFPTVSARRLRSLLLLAGYPEAVAGALAGMLTTAAPVDVLTAAPDGRRDSARTRLLNNLAATHLPQGAPSSPAVANAVTHHLDRRLAGLANVLGARYTRYADDLVFSGDTGLPLHRLLPGVRAIARDEGFRIRDSKTSVTAAHQRQRVAGLVVNSSPAIARAEYDELRALLHNCARTGPGVQNRHGHPDFRAHLLGRIGWAGASSPARAAKLREMFDRISWTG

SEQ ID NO: 5814 - protein, 349 aa, unidentified
  source 1..349: note = Related to NZ_FNON01000006.1; note = Amycolatopsis xylanica
MLDPVWRWPVARWETFTDCARALDLTEGELSWFADARTWNRRADAPLRHYTYRWIPTASGGIRLLERPKPRLAELQRRVVRHVVNALPVHDAAHGFRAGRSALTCAAPHAGQALVVRMDLEGFFPSVSARRVRSLLLLAGYPEAVALALAGVLTTAAPVDVITGAPDGTRDASRVRLLNNLARTHLPQGAPSSPSVANAVTHHLDRRLAGLARVLGATYTRYADDLAFSGPAELPLHRLLPGVREIVRAEGFRLRDNKTSVAAAQHRQRVAGLVVNSAPAAARADYDDLRALLHNCARTCPAAQNRYGHPDFRAYLLGRIGWIGTGHPARAARLRALFDRVEWPDTLPG

SEQ ID NO: 5815 - protein, 357 aa, unidentified
  source 1..357: note = Related to CP090063.1; note = Amycolatopsis acidiphila
MNGEKVTSVSPLGPRPVWRSPVPRWTTFDDCAAALDLTPGELAWFADARSWNRRAGTALRHYRYRWLATAGAGIRLLEQPKPRLAELQRRVCRHVVGALPVHEAAHGFRRGRSAITCAAPHAGRALVVRMDLEGFFPAVSARRVRSLLELAGYPAAVAAALAGILTTAAPVDVLAAAPDGRRDPARTRLLNNLASTHLPQGSPSAPAVANAVTHHLDRRLAGLARTLGVRYTRYADDLAFSGDATLPLHRLLPGVRLIVRDEGFRLRESKTSVTGTHQRQRIAGLVVNSSPAAARPDYDALKALLHNRVRTGPQPQNRLCHPDFRAYLLGRIGWIAASHPRRGEKLRALFDRISWQG

SEQ ID NO: 5816 - protein, 620 aa, unidentified
  source 1..620: note = Related to NZ_NKYE01000001.1; note = Amycolatopsis antarctica
MNGSGPDGARDDVPRDFVSRDCAPRDEVSGGEVSGGEASGGAASGTLPAATDAAPDAATAAADAAAADADADADADAATDAAAATAAAATDAAAAATAAAATDADAATAAAADADVAADDEPGHDMDELAPGPAHAEHPGGAPEPAEPVEPAELIERGDWPALIQRSRDRARTRWRSNAGRSVAAALAGPWQRDALADRLTEEAGHSADAAAELANRLVELNPSPPFGGERHLARLIADLPPLPAPAPVAPFRITGGTAEPQAGLSVAAREWRWDVPRWNTVGECAEALDLTVGELDWFADRGTWNRRAACPLRHYRYRWIPTSSGGVRLLEQPKPRLAELQRRITRHVLSRLPVHEAAHGFRPGRSAFTCAAPHAGSARLVRFDLEGFFAAVAPGRIRSLLGRAGYPRAVAGALAGVLTTAAPVDVLSAAPRASDDAVRHRLLRGLAAAHLPQGAPSSPAVANAVTAGLDVRLEALARALDARYTRYADDLAFSGDSTLPLHRLLPGVRRIVMDEGFLLRKGKTSVTFAHQRQRVAGLVVNSAPAVPREEYDALRALLHNCLRTGPAAQNVHGHHDFRAHVLGRISWVGATHPGRAGRLRTVFDRISWHETDVTGSRHG

SEQ ID NO: 5817 - protein, 434 aa, unidentified
  source 1..434: note = Related to NZ_JAENJH010000016.1; note = Prauserella cavernicola
MSAVERRVAARRRQAEELAAIALAGLWEQTELASRLEGHSRLDGDDARLLAQRLLETFPGGSPSVAGFVDALRRYPPLPVRTLPGSAVVPVEPWPVWRWDVPRWRTVRECAQALDLTEGELYWFADARGWNRRARASLRHYRYRWVPTRSGGVRLLEQPKPRLAELQRRVVRHVLAALPVHDAAHGFRKGRSAATCAGPHARRDLVVRLDLEGFFAAVPATRLQGLLALAGYPAGVAQLLAGLLATETPADVLSAAPRAGDALVRRRLLEHLARPHLPQGAPSSPSAANAVACHLDVRLAGLARVLGATYTRYADDLAFSGDARLALHRLLPGVRRIASDEGFRLRDTKTSVAGAHQRQRVAGLVVNTAPAAPREDYDALRATLHNCVRTGPAAQNRHGHPDFRTHLLGRIAWVGSTHPGRAAKLRALYDRITW

SEQ ID NO: 5818 - protein, 355 aa, unidentified
  source 1..355: note = Related to NZ_MASU01000002.1; note = Prauserella flavalba
MRTLPDSRAVPVEPEPVWRWDVARWRTVEECAHALDLTEGELYWFADARGWNRRAGTALRHYRYRWVPTRSGGVRLLEQPKPRLAELQRRAVRHVLGALPVHDAAHGFRRGRSAATCAAPHASKDLVVRLDLEGFFAAVSAARLRGLLRLAGYPDGVATLLAGLLTTSTPVDVLAAAPRSRDDAVRRRLLHRLAAPHLPQGAPSSPSAANAVAYHLDVRLAGLAGVLGAAYTRYADDLAFSGDARLPLHRLLPGVRLIAREEGFRLRDSKTSIAAAHQRQRVAGLVVNAAPAAPRAEYDALRAILHNCARTGPQAQNRHGHPDFRAQLLGRIAWIGSTHPGRAARLRALFERITW

SEQ ID NO: 5819 - protein, 457 aa, unidentified
  source 1..457: note = Related to VIVS01000002.1; note = Prauserella muralis
MPRVSEPGDDEAADVGDWRQRGRARRRRRTVERRRQAHQLALLALEGPWDRADLTARLVRGSRLDDDDARHLTARLHERFPDAPPDDPGRVAAAILALPPLPVRTLPGSVEAPVEPMPVWRWPVPHWRTLGDCAEALDVDVGELQWFADTRGWNRRAGAALRHYRYRWVPTRSGGVRLLEQPKPRLAELQRRVTRHVLAALPVHDAAHGFRPGRSAATCAEPHAGRSFVVRLDLEGFFAAVSAARVRALLRLAGYPPAVAAAVAGLLTTTAPADVLSAAPNTRDRESRRRLLRRLAAPHLPQGAPSSPAVANTVAQRLDLRLAGLAAALGARYTRYADDLVFSGDADLPLHRLLPGVRLITGDEGFPLRDSKTSVAAAHQRQRVAGLVVNASPAVPREDYDALRAILHNCVRTGPAAQNRDGHPDFRAHLLGRIAWVGATHPRRAARLRALFARISW

SEQ ID NO: 5820 - protein, 415 aa, unidentified
  source 1..415: note = Related to NZ_CP059997.1; note = Amycolatopsis sp.
MALHRATVALDGPWEPAAVADRLATTSIDFEAAQELAARLFALCPSRPFGPRQLANLLRSLPEPAPAEPSAPDLPSEAAPREWRWGVPRWETPAEVARALDLTVGELEWFADLGGWNRRAPLPVRHYRCRWLPGGRRLVEAPKPRLAELQRRIRRHVLDRIPVHDAAHGFRPGRSPLTCARPHAGRALVVRMDLEGFFAAVSGYRVRRMLCHSGYPDQVAAVVAGLLTTRAPVDVLGEPDRGDPARWRLARNLAAEHLPQGAPSSPAVANALAYGLDRRLAGLAGTLGATYTRYADDLAFSGDADLPLHRLLPGVRRIAREEGFRVREDKTGVAAAHQRQRIAGLVVNSAPAVARAEYDELRALLHNCARTGPAAQNRDGRPDFAAYLLGRIGWASTGNPARAAKLKEMFGRIPW

SEQ ID NO: 5821 - protein, 358 aa, unidentified
  source 1..358: note = Related to NZ_VTHK01000003.1; note = Amycolatopsis anabasis
MPEHARLRPAPPPEPPAPRPWRWGVPRWATPAECARALDLTPGELDWFADLGGWNRRAGRPLRHYRYRWVPTRTGGARLLESPKPRLAELQRRVVRHVVARFPLHEAVHGFRTGRSPVTCAAQHSGRDVVVRMDLEGFFTTVSGRRVRALLAAAGYPPRVAAVLAGLLTTATPADVLADAPAGRDPALRWRQVRGLAGPHLPQGAPSSPAVANAAAHRLDVRLAGLARVLGVAYTRYADDLAFSGDAAVPVHRLVPGVRRIAREEGFRIREAKTSVTGAHQRQRVAGLVVNSAPAVSRREYDALRALLHNCVRTGPRAQNRDGHPDFRAHLLGRIGWAGTGNPRRAARLRALFDRIAW

SEQ ID NO: 5822 - protein, 409 aa, unidentified
  source 1..409: note = Related to NZ_JACHMH010000001.1; note = Crossiella cryophila
MTSADLLHLARTALDGAWTRPALATRLAGISLHAAPNPDPEDLAARLLDLSPSPFFGPPEALARLLADLPRQVEPAAAPRPRWRADVPRWETPADLAAALRLTPGELDWFADARTWNRRAATPLRHYRHHWLGHRPLEIPKPRLAEIQRRLNRLLLARLPLHEAAHGFRPGRSAATFAAPHAGQPLVARFDLAGFFTSITAARLRAYFRHLGYPGNLAVALTGLLTTATPPEVLRAAPPGAQRHRLATPHLPQGAPSSPAIANALAARLDRRLAGLAERIGANYTRYADDLAFSGDLPVDRLRAGVRRIAADEGFRLHPGKTRIAAAHQRQKLAGLVVNVRPAVSRADHDRLRAVLHNCARTGPDAQNHVGHPDFRAHLLGRIGWVGATHPARAARLRAIFDTIHWGQA

SEQ ID NO: 5823 - protein, 402 aa, unidentified
  source 1..402: note = Related to NZ_RBXR01000001.1; note = Saccharothrix variisporea
MLTEAQAAAVLDGPWDRGGLAERLADVIGPVPAEDLAVRLLGLSPTAPPGGAPSLVRLVGDLALETPPEEPRWRGEVPRWETTGDLARALGLDVGELAWFADARAWNRRAGEPLRHYRTWWVPSRSHGRRLIESPKPRLAELQRRLVRHLLDRFDVHDAAHGFRKGRSTTTFAAPHAGKPLVVRLDLEGFFTSVTGARLRGLLTAHGYPITVATALTGLLTTRTPPEALHPADWPQRRRLAAPHLPQGAPSSPATANVIARALDRRLAGLARTLGATYTRYADDLAFSGDDDLPLHRLLPGVRGVVEDEGFRLNPRKTRIAAAHQRQRLAGLVVNDTPAASRAEYDDLKAVLHNCARHGLESQNRHHHPDFRAHLRGRVEWVSAGRPARRARLTALLDAISG

SEQ ID NO: 5824 - protein, 411 aa, unidentified
  source 1..411: note = Related to JAAATY010000004.1; note = Kibdelosporangium persicum
MYVRARGHRENESLRVAASALDGPWTQAEIATRLMPLYVDPAAAEVMADRLVSHSPRAPFGGIADLARLIAAFPPITQAPAPPPKPKRSLDIAGLLDVTPSELDWLADARGWNKRAGKPLWHYRSWWTGTSTGGLRLIEAPKPRLAEAQRRLVRHLGLPVHEAAHGFRKGRSGLTYAAPHSGKPVVVRMDLEGFFASVTGARVRALLHEYAQATTLAGLLTTRAPLAVLRDAPKTSGDPDVRRRLLAHLAHQHLPQGAPSSPAVANAVAYRLDLRLSGLARALGAHYTRYADDLAFSGPQTLPLYRLLPGVAKIAREEGFRVRPDKTSVTGQHQRQKLAGLVVNASPAAPRAAYDELKALLHNCRRTGPQAQNRAGHPDFQAHVRGRIDWVAAGHPARGAKLRALFGQIDW

SEQ ID NO: 5825 - protein, 401 aa, unidentified
  source 1..401: note = Related to JADBEI010000001.1; note = Kibdelosporangium phytohabitans
MESLRVAASALDGPWTRSAIATRLISFYADPAAAETMAGQLLDHCPRPPLGDAADLARMIAAFPPMPGYAPPPPKPKRSLDIAALLDVTPSELDWLADARGWNRRAGQPLWHYRSRWAGTSTGGLRLIEAPKPRLAEAQRRIVRHLDLPVHGAAHGFRKGRSAVTYAAPHAGKPLVVRMDLEGFFACVTGARVRALVHEYQQASALAGLLTTRTPLEVLRSAPPSSGDPDVRRRLLARLAYQHLPQGAPSSPAVANAVAYRLDLRLAGLARALGADYTRYADDLAFSGPQTLPLHRLLPGVRAIARDEGFRVRPDKTSVTGRHQRQKLAGLVVNAAPAVPRAEYDALKALLHNCRTTGPDAQNHVGRNDFAAHVRGRIEWVAAGHPARGAKLRKLYSQITW

SEQ ID NO: 5826 - protein, 412 aa, unidentified
  source 1..412: note = Related to NZ_FWXV01000002.1; note = Kibdelosporangium aridum
MYAWARGYRENRSLRVAASALDGPWTQTDIATRLSALYADPAAAEVMADLLVSHSPRQPFGSLDELARQIAAFPPLPKPPAPEPPKPKKSLDLQALLDVTASELDWLADARGWNKRAGQPLWHYRSRWVGTSTGGLRLIEAPKPRLAEAQRRIVRHVDLPVHEAAHGFRKGRSALTYAAPHAGKPLVVRMDLEGFFASVTGARVRALLHEYEQAATLAGLLTTRTPLKVLRAAPTTSGDPDIRRRLLAHLAHQHLPQGAPSSPAVANAVAYRLDCRLAGLAKALGAEYTRYADDLAFSGPQTLPVHRLLPGVVMIARDEGFRVRPDKTSVARQHQRQKLAGLVVNTAPAVPRVEYDALKALLHNCVKTGPQAQNRAGHSDFQAHVRGRIEWVAAGHPARGAKLRELFCQVTW

SEQ ID NO: 5827 - protein, 417 aa, unidentified
  source 1..417: note = Related to LN877229.1; note = Kibdelosporangium sp.
MSVRHLDLPVHEAAHGFRKGRSALTYAAPHAGKPVVVRMDLEGFFAAVTGARVRALLFEYEQAVVLAGLLTTRTPQEVLRAAPGTRGDPDVRRRLLSRLAHQHLPQGAPSSPTIANAVAYRLDCRLTGLARALGADYTRYADDLAFSGPHTLPLHRLLPGVRTIARDEGFRVRPDKTSAAGQHQRQKLGGLVVNVAPAAPRAEYDAVKALLHNCLATGPGAEPRWPQRLRRARAWPGRVGGGRTRGQGSEVARALQPDRLVVPYDPGVADGAADFEIGKDGLTVIIVGVDGSPPSLHAAAWAGGLARRERAQLVLVYVEPIASPAYWTAMGMAGATEAATAFVDEIRVEAAAYLDHAGIPWELVHYRGDPAHGLEAIAEERRADCIVVGRSRHGGGLVGSVPKMLVKGAKRPVVVVP

SEQ ID NO: 5828 - protein, 378 aa, unidentified
  source 1..378: note = Related to JAGINW010000001.1; note = Kibdelosporangium banguiense
MADRLLAHCPRPPLGNARDLSRLILEFPPEPVLVMPPVPRIWRWGVPQWEYTADVAALLDVTLSELDWLADAGGWNRRAGEPLRHYRPKWVATSTGGIRLIEAPKPRLAEAQRRIARHLSLPVHEAAHGFRPGRSPLTYAQPHAGKALVVRMDLEGFFAAITGARVRALLRTAGYPHQVAIKLAGLLTTRTPLDVLRDTPPTQGDPDVRRRLLARLPGQHLPQGAPSSPQLANAIAYRLDCRLAGLANVLGAEYTRYADDLAFSGPQTLPLHRLLPGVRAIAHDEGFRVRPDKSRVSAAHQRQKLAGLVVNSAPAVPRAEYDALRALLHNCVRTGPEAQNRAGHQDFQSHVRGRIEWVAAGHPGRSAKLRALYRNIAW

SEQ ID NO: 5829 - protein, 432 aa, unidentified
  source 1..432: note = Related to AM420293.1; note = Saccharopolyspora erythraea
MIWQDVALRALAETAVNADAWEQSELAAALLRHFRRDGGASDAFAWTLLAHVPEPPESAEELLALLVAVPELTAALPKAPRPALEVELSPGWRWPVARWHTAEQLAHGLDLDVGELMWFADRGGWLRHAHPPLRHYRCRWMRTRSGGIRLIEQPKARLAELQRRITRRVVDAMPVHEAAHGFRRGRSAATCAAEHAGRHFLVRVDVEGFFASLTFTRISRAMRAAGYPGAVAGAIGGLLTTATPRDVLAAAPRVRESEVDARRRLLGRLAAAHVPQGAPSSPALANALMHRLDRRIDAYAGTLGATYTRYADDLAFSGDRRLPVAALLRGVTAIVRAEGLRLRQSKTRVLAPHQRQRIAGLVVNDGRAVAPRAEYDALRALLHNCARTGPQAQNHEAHPDFRSHLLGRIAWVGINHPGRARKLGELFDRINW

SEQ ID NO: 5830 - protein, 316 aa, unidentified
  source 1..316: note = Related to NZ_CP007155.1; note = Kutzneria albida
MDDWLRLLRIDSGEFAWFADDRGWNRRAAEPLRHYRYRWMRTRSGGLRLIEAPKPRLAEVQRTLLRHLELPVHEAAHGFRRGRSVHTFAAPHAGRDLVLRMDLEGFFASVTATRVRALVGDLAGLVTTAAPVAVLRAAPPAPDVEVRRRLLDRLARPHLPQGAPSSPALANAVAHRLDRRITALADVLGATYTRYADDLAFSGDAGLPLHNLLRGVRRIAADEGFQVRPDKTRITPAHHRQRLTGLVVNDSPAASRAEYDELRAVLHNCVHSGPSTQNRGGHADFRAHLLGRIGWVGENRPARAAKLRALFDRITW

SEQ ID NO: 5831 - protein, 425 aa, unidentified
  source 1..425: note = Related to NZ_JAJGSX010000003.1; note = Pseudonocardia sp.
MAPDPHTVAAAALAGPWQLEPLTERLAEHGKWRSPEEIGDVVAILLGRWRARPRRPFERVVTEVEGLLAARPGTRPPDLEPDVPIWRWPVQQWTDLDALALGLDLRDGELEWFADPGGWLRRTPAGPLHHYRRRWVTARSGTPRLLESPGPRLQELQRRVGRHVLARIPVHDAAHGYVRGRSPATLAALHAGRAMVVKVDLEGFFGHVTGERLAGLMRIAGYPPAVAAALAGLLVTATPEPVLRSAPAAEGAWEARRRLLDRLAAPHLPQGAPTSPAAANLLAFRLDRRLAGLAAALGATYGRYADDLVFSAATLPASGLITRIGRIAEEEGFRLHATKTRVLPSHHRQRVTGLVVNAEPGAARREYDALRALLHNCARTGPDEQNTAEHPAFREHLLGRIAWVSTGRPRRADRLRALFDAIRWP

SEQ ID NO: 5832 - protein, 450 aa, unidentified
  source 1..450: note = Related to NZ_JAHKRK010000047.1; note = Pseudonocardia nigra
MDGPWRRDDLAERLAPLRGWLGPDEVGRTVAVLLARWPRPPTAAPAQVAAELARLLAALPRRGPIVPDPPPRPQWRWPVAPWTDLAALSHALNLRDDELNWFADPGGWLRRAPEGPLHHYRRRWTASRSGVPRLLETPGPRLQELQRRVARHVLARIPVHDAAHGYVRGRSPHTLAAEHAGRAMVLRLDLEGFFGHVTGARVAGLLRTAGYPPAVAAALAGLLVTATPAHVLRHAPAGEPHAWEPRRRLLDRLAGPHLPQGAPTSPAVANLLAHRLDRRLAGLSTAVGARYGRYADDLVFSGELPVHGLAARVTAIAREEGFRARTDKTRVMPSHHRQRVTGLVVNARPAAPRAEYDALRALLHNCARTGPQAQNRDGHPAFRDHLLGRISWVAAGSPNREARLRALFSEIDWSCRSGSRALMVGVDVLLVRQPRDGVHDLVGCGPADHP

SEQ ID NO: 5833 - protein, 353 aa, unidentified
  source 1..353: note = Related to NZ_JAAXKY010000083.1; note = Pseudonocardia xinjiangensis
MRPEEPAVPVWRWPVTPWSSLDALTGGLDLRAGELDWFADRGGWLHRRPEGPLHHYRTRWTASRSGVPRLLETPAPRLQELQRRIGRRVLARIPVHVAAHGYVRGRSPLTLAAAHAGRAMVVRLDLEGFFSHVTGDRIAGLMRAAGYPPAVASALAGLLVTSTPVHVLRGAPPAPPDVLDSRRRLLDRLATPHLPQGAPTSPATANLLAHRLDRRLAGLAAAVGAEYGRYADDLVFSGGARLPAHGIAARVTEIAAEEGFRVRADKTRVLPAHHRQQITGLVVNARPATPRREYDALRALLHNCARTGPDAQNRSDHPAFREHLLGRISWVEAAHPARGARLRARFAEIRWPD

SEQ ID NO: 5834 - protein, 424 aa, unidentified
  source 1..424: note = Related to NZ_JADQDF010000001.1; note = Pseudonocardia oceani
MAPEPHVLAALLPGPWTVDALTTRIAGCRGWGGPDEVGDVVAALLARWSRAPTGRPDRVGAQVAALLAARSRRRHVVPESPPADLAWRWPVEPWTGLDALARGLDLRPGELDWFADRGGWLHRTPDGPLHHYRRRWTTSRSGTPRLLETPAPRLSELQRRVGRRVLARIPVHDAAHGFVRGRSPHTLAAEHTGAATVVRLDLEGFFAHVSGARVAGLLRAAGYPDAVASALAGLLVTSTPAPVRRAAPAGGDVGARRRLLDRLAHPHLPQGAPTSPAVANLLAHVLDRRLHGLAGALGARYGRYADDLVFSGDRLPAHGLVARVTAIAAEEGFRVRPDKTRIAPAHHRQRVTGLVVNAHPAVARVDYDALRALLHNCARTGPDAQNRDGHPAFRDHLLGRIAWAGSGHPARAARLRALFDAISW

SEQ ID NO: 5835 - protein, 425 aa, unidentified
  source 1..425: note = Related to NZ_CP013854.1; note = Pseudonocardia sp.
MAPGAQVVAALARQGRWDTVSLTDRLAVASGWSGPEEIAGVVGHLVGRWRREPTVPDDLFAAQVAELLALPRRHLRVGAPPEPVWRWPVARWTDVAMVARGLHLDEGELAWFADTGGWLRHVPDGPLGHYRRRWTASRPGTPRLIEAPAPRLAELQRRLLRRVLDRIPVHPAAHGYVPGRGPRTLALLHAARPMVLRLDLEGFFSHVTGARIAGLLRTAGYPEAVATTLAGLLVTATPPAVLRACPPAADPQPRRRLLDRLAAPHLPQGAPTSPAVANLLTHRLDRRLSGLAAAVGARYGRYADDLVLSGAANLPVHGLAARVAAIAREEGFRVRPGKTRIAPAHHRQRVTGLVVNSGSPAASRRDYDDLRALLHNAARTGPAAQNRAGHPAFREHLAGRIAWVGGGRPRRAEVLRSLFDAICWD

SEQ ID NO: 5836 - protein, 423 aa, unidentified
  source 1..423: note = Related to MCIS01000001.1; note = Pseudonocardia sp.
MAPHPAAVAAAACAGPWGTDPLTERLAGLGGWSGPEELAGVVGALVARRRRAPRDSSAGVEAEVVALLAGPRRHRRVEQPDPVWRLPVPRWADLSALATALHLDDGELAWFADPGGWLRHAPEGPLTHYRRHWTPSRSGTPRLIEAPAPRLAELQRRIRRRVLDRIPVHPAAHGHVRGRSPHTLAAEHRARPMVLRLDLEGFYSHVTGGRVAGLLRVAGYPPAVAATIAGLLVTATPPGVLRACPHRGDPAARRRMLDRLAAPHLPQGAPSSPTVANLLTYGLDRRLSGLATAVGAAYGRYADDLVFSGDAALPVHGLTRRVAAIAAEEGFRVRPDKTRIMPAHHRQRVVGLVVNGDAPAASRRDHDELRAILHNAARTGPDAQNRAGHPVFREHLLGRIAWVGHGRPARAARLRELFDRISW

SEQ ID NO: 5837 - protein, 405 aa, unidentified
  source 1..405: note = Related to BEGX01000057.1; note = Pseudonocardia sp.
MTDPEAVLVAILRVPWRERAVAAAVREIVGAQRAPELAARLLERWPDAPRVTHAEILAGITTALGRRIVLDPLPPPRWRWPVQRWEDVDALAAGLDLRDGELDWFADTRGWLADGRLGHYRRRWHDRRLIEAPKPRLAELQRRVGRRVLAHIPVHDAAHGYVRGRSPLTLARVHAGQALVLRLDVEGFFTRIGPARIAGLLATAGYPAAVARTLAGLLVTATPPGVLRAAPAHVDAATRDRLRAPHLPQGAPTSPAVANVLAHGLDRRLTALAAAAGARYGRYADDLVFSGDTTLPVQGLLRRARDVAADEGFAVRPAKTRVMPAHHRQRVVGLVVNETPAVSRREFDALRALLHNCARTGPAAQNRDGHPDFRAHLLGRIGWVATGSPARAERLRALFGGISWD

SEQ ID NO: 5838 - protein, 396 aa, unidentified
  source 1..396: note = Related to NZ_BJVJ01000106.1; note = Pseudonocardia sulfidoxydans
MRPDPEVVLAAVLRVPWREEALAAAVTPEVARRLVELWPQPPRDTHAAILAGITRCLGRRIVLDPLPPPRWRWPVERWEDVDALAAGLDLRDGELDWFADVRGRLGDDARAHYRRRWHERRLIESPKPRLAELQRRVGRKVLAHIPVHDAAHGFVAGRSPLTLARVHAGREMVLRLDVEGFFTRIGPARIAGLLATAGYPAAVARLLAGLLVTSTPPGVLRAAPAGTAVERLRAPHLPQGAPTSPAVANVLAHGLDRRLSALAAAVGARYGRYADDLVFSGDGALPVQGLLRRARGVAADEGFAVRASKTRVMPAHHRQRVVGLVVNASPAVPRREYDALRALLHNCARTGPAAQNRDGHPDFRAHLLGRIGWVATGHPTRAARLTALFDAISWNG

SEQ ID NO: 5839 - protein, 412 aa, unidentified
  source 1..412: note = Related to CP002593.1; note = Pseudonocardia dioxanivorans
MRRRRPDPEAVLVAVLRVPWRADALTAAVAGEVGADAAPELVARLLERWPVAPRDTHAAIVAGIGASLGQRIVLDPLPPPRRRWPVQPWEDVDALAAGLDLRAGELDWFADPGGWLDRSASPRLAHYRRRWHGQRLIETPAPRLAELQRRVGRRVLAHIPVHDAAHGFVAGRSPLTLAREHSGRQWVLRLDVEGFFSRIGPARIAGLLGAAGYPAAVAGALAGLLVTSTPAAVLRRAPERPADAVRDRLRAPHLPQGAPTSPAVANVLAHGLDRRLSALAAAAGARYGRYADDLVLSGDGPLPVQGLLRRAREIAADEGFDVRPAKTRVMPAHHRQRVVGLVVNSAPRVPRHEYDALRALLHNCARTGPARQNRDGHPDFRAHLLGRIGWVATGSPARAQRLRALFDAIDWA

SEQ ID NO: 5840 - protein, 421 aa, unidentified
  source 1..421: note = Related to NZ_SHKL01000001.1; note = Pseudonocardia sediminis
MTEEAEGVLRDVLGVRWEVAPLAAALADRIGERAAGAAERLVERWPQAPRGTHADLVEEIAVLLAVRRRLVPAEPQPSWRWGVAEWESVDALSRGLDLRDGETEWFADPGGWLRRAPEGPLHHYRGTWRVSPSGAPRLLETPAPRIAELQRRIGRRVLMRIPVHPAAHGYVRGRSPATFAAVHAGAAMVLRVDVEGFFSRIGPARIAGLLRTAGYPAAVAAVLAGMLVTSTPRAVLRRAPGAPGEARRRLIDRLALPHLPQGAPTSPAVANVLAHGLDRRLDGLAGAVGARYARYADDLVFSGEADLPVHGLLRRAGEIAADEGFDVRPDKTRVMPAHHRQRVTGLVVNAGPAVSRRDYDDLRALLHNCARTGPDAQNTAGHPAFREYLLGRIAWAGTGRPARRDRLAALFARIDFGQDRS

SEQ ID NO: 5841 - protein, 400 aa, unidentified
  source 1..400: note = Related to NZ_FNBE01000010.1; note = Pseudonocardia oroxyli
MTDPEAVLRALLGVPWRLGALTHTLGEVLGERAPEVAARLVDQWPEAPRAAHAELLAGIRGALGRRIVVEEPAPVWRWPVARWASVDELAAGLDLRAGEPEWFADPGGWLRRAPEGPLHHYRAVWRGDRLIETPGPRLAELQRRIGRRVLGRIPVHPAAHGYVRGRSPFTLAAEHAGRAMVVRLDVEGFFTRIGPARIAGLLRAAGYPAAVARVLAGMLVASTPRAVLRRGPSSQRQRLALPHLPQGAPSSPAVANLLAHGLDRRLGGLAAAVGARYGRYADDLVFSGDELPVHGLVRRVSAIAAAEGFTLRPDKTRIMPAHHRQRVTGLVVNATPAASRRDYDDLRALLHNCVQHGPDGQNREAHPAFREHLLGRIAWVGAGRPARRARLRELFDRIAF

SEQ ID NO: 5842 - protein, 434 aa, unidentified
  source 1..434: note = Related to NZ_JIAI01000002.1; note = Pseudonocardia acaciae
MNWLSLAQRALDGPWLQGPLAERLGDELDPAAAERLASAVLAHRPRMPWTEQARFARELAEIPDVVAALAPGNGRGPRVLVSPEWRPVWRWPVPEWTTTEHLAHALDLTPGELAWFADSRGWLRRHRGGPLPHYRHRWLRTRGGVPRLLEAPKPLLAERQRRLLRHLLRAIPTHPAAHGFARGRSVLTFARPHAGKDLVLRFDLEGFFSCIGAARVAGLMRWAGYPGPVATALTGLMVTATPPPVLREAPPPAGPGQVDARRRLLTRLAGTHLAQGAPSSPALANLVAYSLDRRLSALARERGLAYTRYADDIALSGDHATSVPALRRAVSRIARDEGFRIRADKTRVMPSHRRQRLTGLVVNAEPAVARDEYDTLRALLHNCARTGPTEQNRTGHPDFAAHVRGRIAWVAATHPGRGEKLLAQYRAIRWPTPS

SEQ ID NO: 5843 - protein, 480 aa, unidentified
  source 1..480: note = Related to READ01000015.1; note = Betaproteobacteria bacterium
MSVRLFAERKHMLSASDTPPPPKDAAPLAGLSRSIADFLLYSLEQGFALNAKALRERARAHFFDASEILEAVYVELESDEWPWRGQTADVLAQRILVSEALLDLQAPIDEDELWYLDDETLASYKTQHESYLFSLSTMPVWKPPSVRGHAWLHSARSSVPSLESVSDIATWLNVSRDEWDGATNASKYRLRVHRKPSGKLRLLEIPPEPKRVLQRRLLHRLLDHVAPHEAAHGFVAGRSVHTHASLHIQQQVVIRLDLADFFANTLAARVFLLFRALGFVAHVANALTALCTTSQSRVSLRGALGAEYLNGNRYDIYSVNHLPQGAPSSPALANLCAHSLDVRLTAIAGQFGAIYTRYADDIVISGSGEIAARPRKFITLAREIIADEGWRLNPDKTRIMRNTGRQSFTGLVVNERVNVARDEFDRIKAAVHRATRDDVPHVLGLLSWLKQSSPERAAKLRQKLLARNDLTDVRSASKTR

SEQ ID NO: 5844 - protein, 471 aa, unidentified
  source 1..471: note = Related to REAM01000105.1; note = Betaproteobacteria bacterium
MSANEDTSPDDSRTPLLAFERFARSIAEFLLYSHREGFQLSVSALRARATRHFGGHDYLVCAIIREVIDDVAGWCDLPPTTLAQRILDSSALEELVAPFVEDDYWFLDDDALLDLRSAQARRVADAASLAAWLPPPQNGAEWLREARLISPSFATVVDLARWLDVSPEEFDAAMANRRYRLRVHAKPSGGTRLIEIPPESLRVLQRRVLHRLLDRISPHAAAHAYVRTRSAHTHAAQHVGREMVVRLDLRDFFPSIKGARVFLLFRSLGFAANIANVLTALCVASQSRASLRRALGAAHVAFFERFSANHLPQGAPTSPALANLCAHSLDVRLNALAESFNATYTRYADDLVFSGDEGIASEPREFVCLARAIVSDEGFQLNTEKTRIMRKSARQAFAGLVVNEKINLPRCDYDQLKAAVHRATLRSTSEEVSKLLGRIAWLRQNSPHRADKLRSKLISSLPNQSASPTAP

SEQ ID NO: 5845 - protein, 489 aa, unidentified
  source 1..489: note = Related to JAGNQL010000184.1; note = Burkholderiales bacterium
MVIDAAPPSPEWLAAQLAALFSHAVAHGYSLKPATLARRSSRHFAGASGIVRHVARDLQKRGQTGNDWTKWPTEVLADFILKSNAFVPLVDGYAVVTGEVESPKYETEPDAEIMALLAENPEALAAWLERDEADDVPLYAPFVATRPLPEVMPNFAATLPALNGVSDIARLLDVSREEWDDALARSRYRLRCVRKSSGGVRLIEIPSEALRVLQRRTLHRLLGRVSVHDAAHGFVRGRSVHTHAAAHVGRDIVIRLDLKDFFPSISGARVFLFFRSLGYNVRAANALTALCVAWQTRRSLRDGLKTLATTTDINALLPRYSVAHVPQGAPTSPALANLCARSLDLRLDAWAKSFGATYTRYADDLVFSGDAALAKSWRAFIATARVIIGEEGWELNVQKTRVMRRSVRQVFTGLVVNSRVNVARDEFDALKASVHRFCKPDATANADELRVLLGRVAWLGQSHPARAEKLRNKLYASTDSRADTNGDAA

SEQ ID NO: 5846 - protein, 486 aa, unidentified
  source 1..486: note = Related to NZ_CP041352.1; note = Casimicrobium huifangae
MPATVPSETTPPPEVDAIADALAAFMLAEHTAGRSLTARALTARASARFVGCSALLGAARRDLALHAELAWPHWSAAQLAARIRKLPAFERLVTQSVLLTAAIEDITATLAHAADEKERGEHADWVAGLQARRARLQADLPRIWPVAATAGSDPPRVESGLQPLADLARRIEISEDELDAALRTSRTPHAFRLLVMRKQSGGLRVIEQPQDALRVLQRRVLREVLATADLHPAAHGFVRGRSALTHAALHSGRRLVLRLDIADFFTSITAGRVHSAFLRLGMPPRVATALTALCTSVQRAGALRAALRRHDAFASQTRIVGHVRDWQQTLCVPHLPQGAPTSPALANWIAYRLDRRLSGLAAAWDMRYSRYADDLTFSTDASDCNSLRFVDQVRTIVATEGWLLNERKTLVMPQSNRQRVTGIVVNQTMNLCRQDYDALKAAVHRHVNAPPDDAQRSQLLGRIAWLAQFRPERADRLLHKLRSAPR

SEQ ID NO: 5847 - protein, 453 aa, unidentified
  source 1..453: note = Related to JAFLCL010000155.1; note = Deltaproteobacteria bacterium
MAAVHALAHAIASAFLDGPWVPREMAQRATYAVRGVRTETRVGLHLVIPHEAVRTRTWLPALARATVMRFPEPPHATLDALAVWIGDQDSLARHAHITVVRAIALPAPAMSTMRGALADLGVPSITTLPELAAQIGTSVAALDFLSRARPREIVRPQHRTTLLRKQSGGLRVLEIPSPPLARAQRAILDAIVAHVPIHDAAHGFVRGRSPRSAAVRHMHREVVVRLDLADFFLSITAARVRGVFSRMGYPDVIAARLTRLTTTATRPDVIASLRTHVDHASTHALAQRLRTPHLPQGAPSSPALANLVAYHLDARLAGLARRFGATYTRYADDLTFSGDASLSHHVRGLVRSVVAICRDESFGVRHDKTRVLRRHRRQDVLGVVVNDRPNLARDRYDLLRAVLHRVAREGWERAEIDGQPIGPSALAGHVAHACTLVNDARARKLRAMLARLP

SEQ ID NO: 5848 - protein, 408 aa, unidentified
  source 1..408: note = Related to JACKEY010000014.1; note = Alphaproteobacteria bacterium
MLLRSPWELYALWAALDEAFGRRMPFTRQLAMEALRVGRVGEERLARGLREGRAFRGLLRDEEPLRLVLWDLPVTQMQPPRVPLHWEPPELPTDDALAAWLGLELGPLRAFADLQDRARHHPPAWRNYQHRWIGRRLIEAPKARLKHVQRRVLHGILDALVVHPAAHGFVRGRDRRSHAAPHVGHEVVARVDLARFFPSIHRRRVTGLFEAMGYPRRVARLLAGLCAARTPPDVVEAGPADAPVRYDAPHLPQGAPTSPAVANALCWRLDQRLSARATASGHVYSRYADDLTISGPRRGMRALVAAVQVIAADEDFVVAADKTRVMHQSEQQRVTGIVVNAQPGVPRRERERLEAILVNCGRTDPAAQNRDGHPDFAAHLRGRVAAVGAVNARHGEKLLALWQAVDWG

SEQ ID NO: 5849 - protein, 437 aa, unidentified
  source 1..437: note = Related to JAHQVJ010000021.1; note = Myxococcales bacterium
MHAATFCALLAEAFLAGDWQPADMARRGSAMIDAAGSQRRWMRRLAGRVAESLPRGEHLTPARVASFVERDLGFRRVWSTWLSSCRIRQRFWVHPTMGPSQLPLEAALPQVATAGQLADWLGVGVSELAGFADLQGRHLRASARSRRHYRRRWREPRSVAGSPRLLEAPKDRLRRLQRRILRGILSQVQVHDAAHGFVPGRSVHSCAARHACRPVLVRMDLSAFFTGIDGRRVAGLFEAMGIPRTVARVLAGLCTTATPADELAALAHTWWLRVLYARPHLPQGAPTSPALANLCAFRLDARLDAFARSKGWRYTRYADDLYLSGPDRPHRLVRMVHRIARQESFTVNARKTSIMRPGRAHRCLGLSVDRQPAVPRQLRERLEAILTNCVRHGPNGQNREGHPDFRRHLEGRVAWVTAACPRHGERFARLLEEIQWP

SEQ ID NO: 5850 - protein, 450 aa, unidentified
  source 1..450: note = Related to JAGQJO010000674.1; note = Myxococcales bacterium
MISHLPRGIPGVPTSMHDHRQAADPAVRRAGSQGTESEVSLHHPLIDALADALLAVPWDREALQRGFREVLGGYDPLAAGLAARLWTDARPDRGEAVRLLVEDVELRRLLQGPVVARRRAWHFPEEDPAPLRFEGLPELPDVAALARWLGWSVPVLLGHADLRHDHRRRAEYRDYVYRWHGARLIEAPKDRLAGGQRRILRELLVHVPLHDAAHGFVRGRSPRTHARLHVGCAVVVRVDLERFFASITAPRVRGMFRALGYPRRVASLLAGLTTSWPPPDVVPGGSPWSAPHLPQGAPTSPALANIVSHGLDRRLQGLARHHGAAYSRYADDLTFSGRALPSSLVPTIEQIAVSEGFRVRRCKTRRMGEGAAQRVTGLIVNRHVAVSRRERDHLRALLHLALTRGPASVRVEGVDDVRSWLRGRIAWVAHARPAHAERMLEVFHQIAWTA

SEQ ID NO: 5851 - protein, 454 aa, unidentified
  source 1..454: note = Related to JACKEN010000003.1; note = Deltaproteobacteria bacterium
MLDVLRQGRPGPSPFWVGLVARVRDAFGPTSPPPTLDALTRMLAEDPIFDEDYRAEMALLTEADGWKTPPYVDRLIFRPVGSRFRPGAAAAEWPVPRLESVPELAAHLEVPEATLEGWADVGGWLGRYPSDRRQHYVRRWIPGVPGRRSRPTPLRRAAPGCAPCLRSSGGSGPRLIEAPKTQLAKMQRRILRSILDLVPVHPAAHGFVRGRSIRTHAARHVHMQVVLRFDLRRFFPSVQAPRVQGLFRYLGYPEEVARLLAGLCTTITPHDVFPPRTAADVRQLYRQRHLPQGAPTSPALANLLCLGLDRRMMGLARAFDAGYSRYADDLVFSGGAALAARSRRFGGFVARVVEEEGFLLNHDKTRRMPRSGRQEVTGLVVNQGPAYPRDEFDRLKAILHQCALDGPERHNREGHPDFRAHLLGRVSFVESVDPRRGAKLRVRFERIRWGSSQR

SEQ ID NO: 5852 - protein, 413 aa, unidentified
  source 1..413: note = Related to JAEPMI010000002.1; note = Deltaproteobacteria bacterium
MSHAVAAAIALALLEPERWRSGVRASLESFEGLDAESRTAIGRLVKSLYVRPEVDELAALIARDPKVTLRGVIPRRWALPPLRMTRPPYGAPPLPTPADLAAFLDVEVGELSFLADPKGWNTDARRQHYRTRWVPKRRGGRRLIEAPKARLKRVQRKVLRGILDPVPLGAAATGFAPGASPSKHAARHSGKRWVLKMDLADFFAHVGSGRVRAIFETLGYPLAVRRLLVGLCTTRAPAELLLDADPVERALHGRRRLPQGAPTSPTLANLAAAPLDHRLWNLAARLGLTYSRYADDLAFSGDRMPESLIPRIAAIGIEEGFPLQLRKTRRMGRAVRQELTGLVVNADPAPRRESYDRLRAILHQAALDGPAAANREAREDFRAYLRGRIEWVAGGRPQRRAKLDALFARIDWS

SEQ ID NO: 5853 - protein, 351 aa, unidentified
  source 1..351: note = Related to JABTUV010000001.1; note = unidentified bacterium
MGLIIYAILSRGKIDAVAIRRSRKDYRSPFLFRRAGRPDAGKLASRGLPVLGNVNEVAALLGVSPKQLRWLSVADFGHYHSFLLEKKSGAARLIDAPKPQLKAAQRKIYELLLKKQPLHPAAHGFCPGKNVRDHAARHCGKQTVLGMDVANFCPSVSARRVCGLFKSWGYGEDVALLLTTLTTYNGHLPQGAPTSPALANLVFTHADARLAGLARRFGAEYSRYADDMTFSGGQAFQRKLSAFSKAVQGIVKEEGFALNHNKTRQMRHGRRQVVTGLVVNETPHVSRRMRRRMRAILHNAQRKGLEAQNRFKHPRFAEHLRGRIAWITSLHPRLGGRLLEGWKAARARFAG

SEQ ID NO: 5854 - protein, 462 aa, unidentified
  source 1..462: note = Related to NZ_CP036267.1; note = Thalassoglobus polymorphus
MGLFDFIKGLFGGSAQVQSGPTHADVNPAHDQAGRDQTETSYAESIHADAGEAVPHEHSSPQNSSSNKVFRERKASKNIVLRKFSYRPSTVATPQEQEIVRHRPYKFAVPGPHTGEFLDLSQDADERWLEYYGLPTLATPDDLADWFGISIGKLAWLTHRMRDGNRPKDVKDAHYHFQWKKKRSGSWRLIEAPKEELKGVQTKILREILDLVPAHPAAHGFVPGRSILSNAVPHVGSKFLLKLDLENFYPTVRYSRVVAIFRSLGFSREVSIWLARLTVSAPPWSLDAPKKNWEFWQLMPPHLPQGAPTSPALANLSAFALDVRLSGMAKAYNLKYTRYADDLTFSGPGLSIPALNEFIPLTSKIIAAERFFVNKKKRKIIRNSQRQCVTGVVVNEKINVSRQDYDQLKAILHNCVKTGPQQQNRNQHPDFASHLRGRIAHMMQLNPSRGAKLLEIYQKIRW

SEQ ID NO: 5855 - protein, 358 aa, unidentified
  source 1..358: note = Related to JABJMI010000419.1; note = Planctomicrobium sp.
MGLFDFIRGLFGSSPNHQVEQSGEQRDTTPGRSDPGVSETASPTPQVEPRQSVSKRTQTHLPCSKRSPVKLQQLEYRPGIVRTPSEQEVSKQKPYRFASIGPRTGEYLNLSRDMDERWLEYFGLPQLATPDDLAQWLNLSIGKLAWLTHHTREGYRPKNESDSHYHFQWKRKRSGGLRLIEAPKQELKNAQHQILHQILDSVPTHQAAHGFVRGRSILSNASRHVGSKFILKLDLENFYPSVKYSRIVAIFRSMGFSREVSLWLARLTTSAPYWGLKAPEKNWEYWQLMQRHLPQGAPTSPALANLSAFSLDVRLSGLAKAYNLKYSRYADDLTFSGPGMSIPALNEFIPLTNKIISD

SEQ ID NO: 5856 - protein, 459 aa, unidentified
  source 1..459: note = Related to NZ_SIHI01000002.1; note = Thalassoglobus neptunius
MGWFDFLRKIFGFGRAESSQGSQTVADAPLAEAPVTESSAAESPSSDVSDSEVSEPAEKRKAEPRPNSTVPRPDVHLRPLDYVPSTVPIPPDREIVSEKPYRFAVPAPRTGEFLDLSRDSDERWLEYYGLPRLKTPDDLADWLGVTTGTLAWLTHRFREGHRPSDERDSHYHYRWIAKRSEGWRLIEAPKSKLKDVQTKILRGILDSVPAHSAAHGFVPGRSIVSNATPHSGSKFILKMDLEDFYPTVRYSRVVAIYRSLGFSREVSLWLARLSVSALPWSLKSPVSAHEYVVYTAHHLPQGAPTSPALANLSAYGLDIRLAGMANAYRIRYTRYADDLTFSGPGLSIPALNEFIPLAKKIIREERFTMNRRKLKVIRNSQRQIVTGVVVNEKTNVSRKEFDQLKAILYNCIKHGPQSQNRAEIANFAEHLRGRIAHISQLNPRRGAKLMRMYSQIGWT

SEQ ID NO: 5857 - protein, 366 aa, unidentified
  source 1..366: note = Related to JAGQQQ010000703.1; note = Planctomycetaceae bacterium
DRPYHFAWPGPRTGEYLDLSTDADERWLQYYGLPTLRTPEDLADWLHIPIGKLAWLTLRTNDGHRPVSTEASHYRYQWIPKRSGGWRLIEAPKEQLRLVQTQILREILDRIPPHSSSHGFIAGRSIITNAEPHLGQKFILKLDLQDFYASVRYARIVAIYRSFGFSREVSIWLARLSTTAVPWSLQFPTRDARSWTFHAYYAFHLPQGAPTSPALANLSAYGLDVRLAGMAAAYGLNYTRYADDLTFSGPGRAFPSLREVIPFANRIIRSERFRPNQKKAKVIRRSQRQTVTGVVVNEHLNVSRQEYDRLKAILHNCVKMGPSSQNRGELADFPAHLRGKIAHVMLLNEDRGLKLLEIYHRIDWSR

SEQ ID NO: 5858 - protein, 452 aa, unidentified
  source 1..452: note = Related to NZ_FOQD01000010.1; note = Planctomicrobium piriforme
MGLFDILKRLLGFGPRPDTGPAAPPGQPAPPPESLPGPASATIAEPSPQKRASAREAHEQPARRVRVVLKPLRYQSNLIPTSSSQEIVSGKPYRFAGIGPQQGQFRDLSRDIDQRWLDYFGLPVLATPDDLAAWLNIPIGQLAWLTHRTSRGHRAESVKQSHYVYSWIAKRSGGHRLIESPKSDLKHAQEQILRGLLDHVPPHTAAHGFVPGRSILTNASPHVGQRFVLKFDLRDFYVTVRYSRVVAIFRSLGYSREVAIWLARLTTSSVPWGIKAPVKEWELAKYASRHLPQGAPTSPALANLSAFGLDVRLDGLAGAYGLEYTRYADDLTFSGPGTAIPALHELIPLIQKIIRAERFSSNWQKRRVLRNGQRQTVAGVVVNEKLNVSRRDYDSLKATLHNCRKLGPSTQNHKSHPEFASHLRGRIAHVRQLNPARGEKLLAIYQQIDWSK

SEQ ID NO: 5859 - protein, 455 aa, unidentified
  source 1..455: note = Related to JACKHO010000006.1; note = Planctomycetaceae bacterium
MGLFDFLSRLIFGSPASHDSAADVPPTAPEPSRADAAPKHNSPPPKRPSRIKNRTSSTRPVRLVPLRYVGSLVRTPQQQELTAEKPYPFASRNLNPRTGEDLGWLDLSTDGDERWLQYYSLPILKTPTDLAQFLGIPLGRLAWLTQRRHSNYRPATIRESHYHYRWITKRSGGHRLIEAPKQQLKQVQQKILSGILDRVPAHPSAHGFVAGRSILTNAQAHVGKRFLLKLDLEDFYTTVRYRRVVAIFRSLGYSREVALWLSRLTTSAVPREFVGPDSRPGWHHSLSRYALLHLPQGAPTSPALANLSAYALDVRLAGIAGAYDMDYSRYADDLTFSGEGRSIPALQEFVPLVQQIIRAERFRPNRSKRRVVRDSQRQIVAGVVVNERTNVARKDYDLLKAILHNCMREGPSSQNRYNLENFAEHLRGRIAHVTQLNPERGARLLEMYLRIDWNC

SEQ ID NO: 5860 - protein, 446 aa, unidentified
  source 1..446: note = Related to JAGQPW010000040.1; note = Planctomycetaceae bacterium
MGLFEFFKRLFFGSPAPDVTSSAGSASAPHSSPTPAAPAKSTPRRRRKRVPGQSSRPPVQLRSLRYRSTLVQTPRQQEQVPTKPYAFAVRDFDAYLDLSQDADPRWLEYYGLPALRTPQDLANWLGIPVGRLAWLTQQHLPDRRPASPKEAHYHYQWKQKRSGGYRLIEAPKELLKTVQTQILREILDRVPPHPAAHGFVEGRSIVTNARPHLGQRFILKFDLENFYPSVRYSRVVGIFRSLGFSREVAIWLARLTTTAVPQEFRSPDSRPGWHWSMSTYRSHHLPQGAPTSPALANLSAYALDVRLSGLAKAYHVTYTRYADDLTFSGAPRTVPALGEVIQLTEKIVRSERFRLHPRKRKVLRNNQRQVVTGVVVNDRLNISRKEFDQLKATLHNCIKLGPASQNRAEHPEFAAHLRGRIAHVRQLNALRGDKLMALFQRINWNR

SEQ ID NO: 5861 - protein, 466 aa, unidentified
  source 1..466: note = Related to JAGQQB010000156.1; note = Planctomycetaceae bacterium
MGLFEFIKRLLFGSPAPTTATQSGDDSPLERPAESGSASAATSAMTPAEQHRQRMRYQSRQRNAGRRERVRVSLRPLRYESSLVPTSASREQVAEKPYLFATCSVDPRQGPRHGYLDLSQDADPRWLEYYGLPVLRTPQDLADWLQIPVGRLAWLTQRQHRERRPPTVREAHYHYQWIRKRTDGHRLIEAPKEKLRAVQTQILEGILNHVPPHPAAHGFVEGRSIVTNARPHVGQRFVLKFDLENFYTTVRYSRVVGIFRSLGFSREVSLWLARLTTTALPEQVKNPEGLPGWHWSLAPYRAAHLPQGAPTSPALANLSAYGLDVRLQGLAKTYHVNYTRYADDLTFSGEARVLPALSEFIPLCQRIVRSERFVLNLRKRRLVRSNQRQVVTGVVVNQRTNVSRREYDRLKATLHNCLRQGPQSQNREDVENFAAHLRGRIAHVTQLNPARGAKLLEMFQRIHWTG

SEQ ID NO: 5862 - protein, 438 aa, unidentified
  source 1..438: note = Related to NZ_CP036275.1; note = Maioricimonas rarisocia
MGLITLLKRILFGSAPSIPHAGGQPEPAAESTGDHTARVGAVSQRPSGPVRLAPLRYQSSLVRTPPDREHADGAGKPYRCAHIDPRRGGYLDLSTDGDARWLEYYGLPHIATPEQLAVWLQLPLGKVGWLTDRFCQNHRPQNTREAHYHYHWLAKRSGGHRLIEAPKSQLKQVQQQILREILCRVPPHTAAHGFTAGRSIRTNARPHVGQRVLIKFDLEDFYPSCRYARVVAIYRSLGYCREVALWLARLTTSAAPANLRFPDGNLRSLMPYLPRHLPQGAPTSPALANLSAYSLDVRLAGLAARYHLKYTRYADDLTFSGDGHSIPALREILPLITRIVRDERFRVNRKKRKVIRNNQRQTVTGVVVNQHLNIRRDEFDRLKAILHNCRKHGPASQNRDDHPDFAAHLRGRIAHVMQLNRHRGEKLLAMYDQIDWAR

SEQ ID NO: 5863 - protein, 428 aa, unidentified
  source 1..428: note = Related to JAGQQF010000427.1; note = Planctomycetaceae bacterium
MGLLRLLQRLFFGSSATAEEPRQDVRPSSQSKPSASAERQRERLAPLRYQSSLVATPRSREVVEGSSPPYRFAHRDAVGGAYLDLSQDVDPRWLDYYGLPHLSTPEDLAGWLRLPIGKVAWLTYRFCENRRPQSAKEAHYHFRWIRKRSGGHRLIEAPKKTLRLVQIQILREILDRIPPHPAAHGFVRGRSLTTNAAPHVGKRVVVKFDLDNFYGSVRQSRIVAIFRSLGYSREVALWLARLTTSAAPGSLKLPLGESTSIWKYMPRHLPQGASTSPALANLSAFGLDIRLAGLARAWHVDYTRYADDLTFSGDPKFVAAVGDFIPLVQQIIRDEGFQSKRSKRRVLRTNQRQTVTGVVVNQHINVSRAKYDRLKATLHNCVKHGPASQNHDLHADFAAHLRGRIAHMHRLNPHRGQKLLALFAKIKW

SEQ ID NO: 5864 - protein, 419 aa, unidentified
  source 1..419: note = Related to JABISG010000096.1; note = Planctomycetaceae bacterium
MGLFDFLRQLFLPSSRDVASPSHRRRERAPRRRVKLTPLRRRHGQRPWSEPIEEETPPYRFAQYGIRDGRFLDLSRDGDESLLDSFDLPVIHTPEQLAEWLQMPLGQVAWLTQRFSDGYRPENEQQAHYHFRWVKKRSGGWRLIEAPKQKLKQVQTQILREILDRVPPHNCAHGFVRRRSIVTNARRHVGQRAILKLDLEDFYANVGFSRVVGIFRGLGYSREAALWLGRLTTSKVPSNLRYPERFSSAFFPFLKRHLPQGAPSSPALANLSAYGLDVRLSGLARSYSVEYTRYADDLTFSGPQSFIRALPVFIPLTSQIIRDERFRVNRNKRKVVRNNQQQVVAGVVVNAHTNMPRREFDRLKAILTNCVRHGPASQNREHHADFSAHLRGRVAHAVQLNPHRGNKLRELYHAIDWKR

SEQ ID NO: 5865 - protein, 431 aa, unidentified
  source 1..431: note = Related to JAGQPX010000026.1; note = Planctomycetaceae bacterium
MGLLDFLRRLLGGQPASPNDQPSAPDTSTLVRDPRTGGVTPAAPKLLAPLRYRSSLNRTATAAERVAELPYRFANLSVDGDGYLDLSTDADERWLEHFDLPHLRTPEDLANFLQLPLGKLAWLTHRFEEGGRPAGEKESHYHHHWVKKKLGGHRLIEAPKQTLKMVQRRILRDILDHVPPHPAAHGFVTGRSIRTNAEPHVGKSVLLKFDLQNFYPSVRYSRVVAIFRSVGFSREVAIWLGRLTTSAIPASLKYPQDDPSALWMYYPRHLPQGACTSPALANLSAFALDVRLTGLARKYDVHYTRYADDLTFSGTGRFGGALSEFIPLVTHIAKSERFYIHRQKRRVLRGSQRQTVAGVVVNEKPNVSRRDFDRLKSILHNCAKHGPSTQNHDDHPDFAAHLAGRIGHVLHLNPHRGAKLRELYNQIDWSR

SEQ ID NO: 5866 - protein, 300 aa, unidentified
  source 1..300: note = Related to JAGQQG010000136.1; note = Planctomycetaceae bacterium
RPAGVREAHYHYHWVKKKTAGHRLIEAPKQTLRAVQQRILRDILDKVPPHPAAHGFVSGRSIRTNAEPHVGQRILLKFDLQNFYPSVRYSRVVSIFRSVGYSREVAIWLARLTTSAIPASLSFPKGDPSALWTYYPRHLPQGAATSPALANLSAFALDVRLAGLARKYDVRYTRYADDLTFSGSHRFGGALSEFIPLVVHIAKSERFVLHRQKRKVLRSSQRQSVAGVVVNQKANIARHEFDRLKAVLYNCVKHGPSTQNHDAHPDFAAHLAGRIGHVLHLNPARGAKLRELYNRIDWSR

SEQ ID NO: 5867 - protein, 445 aa, unidentified
  source 1..445: note = Related to JAEUIG010000100.1; note = Planctomycetaceae bacterium
MGLFDWLKGMLGGAPPSPTPAAPSPPAAGVRINPFTQEVVQLGIDRRTSAPSLHAFRYRSSLVRTPPSREFAAKRPYPSAQRQVYKGWLDLTTDSDPRWLEHFGLPPLKSPDDLAKWLNVPLGRLNWLSGRYRDGGHPGTAKEAHYHFQVIPKRSGGARLLEAPKPQLKAIQQRILRDILDRIPVHSQAHGFSKGRSIVTNAEPHVGKRIILKYDLENFYPSVRYNRVVAIFRSIGFSREVGIWLARLTTSALPWNTSDIPRLGELSGLETRGRYWELYGSRHLPQGAATSPALANLSAYSLDVRLSGLARKFDADYTRYADDITFSGTKRFAGALSDFIPLVERVVRAEKFVVHKGKRRVLRNNQRQSITGVVVNSKPNIRREEFDRLKAILHNCLKYGPSTQNRDRHPRFADHLRGRVAFVSQLNADRGEKLREMYDRIDWRK

SEQ ID NO: 5868 - protein, 434 aa, unidentified
  source 1..434: note = Related to QQVO01000002.1; note = Planctomycetes bacterium
MGLFNWLRTVLFGAPPQPTGDFTPDQPPPAGRDVHPVTGERVSHSRARLDRLEYRSSLIRTPSRRESAGSDPPYQFAHRNPRTGRWLDLTTDADPRWLDYYGLPHLKTPADLADWLEMPIGRLGWLTHRFCDDRRPPSAQTAHYHFQWLNKKTGGHRLIESPKTSLKGAQRKILSGIIERIPPHRNAHGFVAGRSILSNARPHVGAYAVLKLDLENFYPSVRYSRVVAIFRSVGFSRDVAIWLARLTTSAVPHDIPRPAGGHAAVWPYFSRHLPQGAPTSPALANLSAYSLDVRLTGMARAYDVTYTRYADDLTFSGSYRFAAAIRDFAPLVTRIVRDERFKANRSKQRIIRRNKRQTVTGVVVNEKPNISRDAYDTLKAILTNCAKRGPSTQNRGAHENFAAHLRGRIAHVAHLNPRRGAKLLQLYATIDWSR

SEQ ID NO: 5869 - protein, 438 aa, unidentified
  source 1..438: note = Related to NZ_CP036271.1; note = Caulifigura coniformis
MGLFDLLRRLLFGAPASPTDTAGSSPAPRASQMPVAPKSLPVATPAGKRGPARKLPPFRYQSKPRRTSPKAERVARRPYTFAAPTALGEYLDLSTDADLGLLDHLGLPRLQTPADIAEWLEIPLGRLAWLSGRFFENHKPQSERSAHYNFRWLKKRSGGHRLIESPKKQLKAVQEKILREILDKADAHPRAFGFIAGRSAILNAREHVAPYVLLKFDLENFYPSVRYSRVVAIYRTLGFSRAAAIWLARLTTSAVPSSMSFPGGDPYGLNPYLSRHLPQGAPTSPALANMSAYGLDVRLTGLARSFGVTYTRYADDLTFSGDQKFAGALRDFIPLTETIIRKERFFLNVSKRRIIRRSGRQTVTGVVVNQHPNLARAEFDRLKAILFNCVRLGPSTQNRTNHPQFAAHLQGRIAHAASINPSRAARLRALYDRIDWSK

SEQ ID NO: 5870 - protein, 429 aa, unidentified
  source 1..429: note = Related to JAHBXW010000001.1; note = Planctomyces sp.
MGLFAFLRRILFGAPEDAADDGGSTAPRQSPPPQSPATARRRRTPLPPLRYGSKHPRTPAALEQVAERPYQFANLGPAGRFLDLSTDADLSRLEQLELPRLLTPADVAHWLNMPPGRLAWLSGRFEPQQRAASEKAAHYHYRWIRKRSGGMRLIEAPKVRLRQVQTRILREILDHVAAHDHAHGFVRDRSALTNAKPHVGSYVVLKLDLENFYASVRYSRVVAIFRALGFSRAAALWLARLTTSAAPASLSFPDRSPLGLLPYLPRHLPQGAPTSPALANLSAWSLDVRLTGLAKKYHATYTRYADDLTFSGSHRFAAALSEFIPLAEKIIRSERFKVNRAKRKVLRRSGRQTVTGVVTNARPNIAREDYDRLKAILHNCVRRGPSTQNHDSRKDFQAHLRGRVAHVRSVHPARGAKLLALYQRIDWKR

SEQ ID NO: 5871 - protein, 348 aa, unidentified
  source 1..348: note = Related to VGXY01000890.1; note = Planctomycetes bacterium
MGFFTWLFRWLGWGADSRDFPSDTERTSDLGVRTSSGSLNRSSFDDSDAPRRNSDLTETAIHSNSERSVTTRPVTSRPKLTLSRREEERIRNPPERSPCVEVVGETPYRYARFGSTTGRHLDLSQDGDDSQLNARCLPIFHTPEELAGWLQIPLNQLVWLVHRFSAGRPPASDAAHYVFQWLKKKSGGWRLIESPKPILKRAQVKILREILDRIPAHRSAHGFVAGRSIVTNAEPHVGQDVVVAFDLSNFYTTVGFSRVVAIFRSLGYSREAAIWLGLLTTSAIPGNMAFPERNPYAFDPYLKRHLPQGAPTSPALANLSAFGLDVRLTGLARSFGATYTRYADDISL

SEQ ID NO: 5872 - protein, 314 aa, unidentified
  source 1..314: note = Related to JACMJF010000970.1; note = Candidatus Saccharimonas sp.
MAFFAWLFRWLGWSTDPRDSWDAPAPPQAADRSAVRTATLEAPPRAPSRPPSEPLPRPRLTPTRRDTTRHDARKSHATFVEVTGAVPYKYARFGSGTGRHLDLSQDGDEARLQQRGLPVFRTPEQLADWLGVPLKKVAWLVHRFSAGRPASVEQAHYHFRWLKKKSGGWRLIESPKQTLKQAQVKILREILDRVPTHSAAHGFVTGRSILTNAKPHVGHAMLVKLDLSNFYATVGFSRVVALFRALGYSREAAIWLGLLTTSAIPGNMAFPARDPYAFEPYLRRHLPQGAPTSPALANLSAYRLDLRLAGLSKS

SEQ ID NO: 5873 - protein, 451 aa, unidentified
  source 1..451: note = Related to JAFEBS010000049.1; note = Planctomycetes bacterium
MFSWLGGGEPSSPSQPTTDRGQQPDPQHSPTPPADHGPDRTSRSTTPPRQRPRIRRFPPKRNPRLNVRSHDQQHRRNRKKASFLEVTGASPYRFARFGSQTGRYLDFSRDGDDARLRDRGLPVFHTPEELAEWLGLTLNKLAWLVHRFSNGRPDSVDHAHYHFTWRKKRSGGVRLIESPKQTLKEAQVKILREILDRVPTHPAAHGFVAGRSVLTNAKSHVGQGIVVKFDLTNFYTTVSYSRVVAIFRTLGYAREAAIWLGLLTTNAVPGNMPFDRQKLYSILPYWRRHLPQGAPTSPALANLSAYHLDARLTGMARAFGADYTRYADDLTISGPETLSYALRTLIPLVEQIIRRERFQSNRSKRQVLRAHQRQVIAGVVVNVKPNVSRANLDRLKATLTNCVRMGPSTQNRDQVEDFQAHLRGRIAHVLQLNPARGEQLLAIFHRIDWRR

SEQ ID NO: 5874 - protein, 501 aa, unidentified
  source 1..501: note = Related to QWPM01000121.1; note = Planctomycetes bacterium
MGLIRWLLHRLGWRPAPLTRSLPTAGPVSPAPATPAPLDTPPLDTPPLAQASLTPAWPVVASPVVAPPAQASPIVASPNPDSVPPSILFDPPAVAPANSRKRPRIWSRTSRIRLVPTRRKQQRQAARRPAMLVEETQGAAPYRYARYGSRTGHYLDLSRDGDVVRLQRFGLPEFHTPEQLSHWIGLPLNRVAWLVHRFSGGRPEMEELAHYHFRWIKKRLGGWRLIESPKTTLKLVQTKILRELLDKVPVHAASHGFVKGRSILTNARAHVGQSVVLKFDLTNFYTTVSFARVVAIFRSLGYSREVAIWLGLLTTSAVPGNLRFQDQGPYALVPYLRRHLPQGAPTSPALANLSAFGLDLRLTGLARSFGAHYTRYADDLTLSGPEELGKALRTLIPLTQQIIRQERFVLNPEKRRVLRSHQRQTVTGVVVNQKTNVSRGDFDRLKAILTNCVKQGPSTQNQKMVEDFYHHLQGRIAHVSMLNPLRGQKLTLLFQAIDWTR

SEQ ID NO: 5875 - protein, 443 aa, unidentified
  source 1..443: note = Related to NZ_JH636437.1; note = Schlesneria paludicola
MGLIRWLMQRLGWGSSRGPVPTESNSRPASEQASAKSENLTPTSLRTTRRSYPPGRARLVASTRVESDITRPSMAYVETEGEPYNYARYGSQTGRYLDLSRDANEARLAQFGLPVLRTPDDLANWIGLPLNKVAWLVHRFSAGRPATVKDAHYHFHWLKKRQGGWRLIEAPKAMLKLVQTKILRELLDPIPVHRSAHGFTVGRSIVTNALPHVGQHVVLKLDLSNFYTTVSFARVVAIFRGLGYSREVAIWLGLLTTSAVPGNLGFQEQGPYALVAYLRRHLPQGAPTSPGLANLSAFGLDARITGLAKSFGATYTRYADDLTISGSKELTRGLRAIIPLVQQIVRQERFFVNHKKRRILRSHQRQSVTGVVVNEKPNISRGDYDRLKAMLTNCQRHGPSSQNRDGVVDFYNHLRGCIAHVSMLNPVRGQKLTELFQVIDWAR

SEQ ID NO: 5876 - protein, 445 aa, unidentified
  source 1..445: note = Related to QWPB01000058.1; note = Planctomycetes bacterium
MGLLAFLQRLFWGAPPRESSMVGRGTAGAPFGDPLSRDNSLSGPATSGQVLYKSRRGVFQNPASNRYAPHGDRTGRGQVVEQSPYRFARRDLPSGGFIDLTGDHRPDVLNQYGLPLLRTPDDLARWLSIPLPRLAWLIGRFDDNHRPQSESESHYHFHWIKKKSGGFRLIEAPKSQLKQIQLQILRGILDRLVPHPAVHGFVPGRSIRSNAAPHVGQAWVLKLDLTNFYPSVSFNRVVAIFRSLGYCREVAIWLGRLTTSAIPSSLNSPDRRMATVWPYLRRHLPQGAPTSPALANLSAFGLDVRLQGLAGAYGLRYTRYADDLTLSGPQRAVAALREIIPFAGWIVRQERFHLNKAKRRVLRRYQQQSVTGLVVNDQLGVPRAEFDRLKAILTNCLRHGPASQNREAHPAFAAHLLGRIGHLASVNPGRGVKLRSLYQQIDWNR

SEQ ID NO: 5877 - protein, 436 aa, unidentified
  source 1..436: note = Related to QWOR01000226.1; note = Planctomycetes bacterium
MGLIAFLKRLFWGTPTPSSVPSAESADSSRLAADSTSSSAKIIVRRKFRGPDLLRFSATVRRQGRTVQVVRGQPYRFARPFVISSVDYGDLSTDTNPAALGRFDLPVLRTPEDLAHWLGIPLGRVAWLTGRFFENERPQSDDVAHYHFHWVKKKSGGYRLIEAPKALLKFAQTQILRGILDRVPAHPAAHGFVKQRSIRSNAAPHVKSAWVMKLDLSNFYPSVTFSRVVAIFRSLGYSREVSIWLGRLTTSTIPSNLSAPDRRENTVWPYRLRHLPQGAPTSPAIANLSAFSLDVRLNGLAAKYHARYTRYADDLTLSGKGKSIPALREIIPMAEWIVRNERFHLNRSKRRVLKQHQRQSVTGIVVNQKLGVGRAEFDQLKAILTNCIRQGPVSQNRNQHNDFASHLRGRIGHFKSVNAERGTKLLKLYYQIDWTR

SEQ ID NO: 5878 - protein, 436 aa, unidentified
  source 1..436: note = Related to NZ_CP011270.1; note = Planctomyces sp.
MGLLSFLKRLLFGAPASNDAPARPKPSNDPASRPATPPASPPSTDGTATKKRVRLTPMRRQGPRERGQPARETARPPYPYAFPTYGGKFLDLSDGTDFERLRQFGLPELVYPGQLAEWLQLPLGHVAWLTYRFCDGNRPQTAGQAHYHFHWVRKKSGGHRLIEAPKSRLRRVQDQILREILDRVPSHPAAHGFVRGRSIVTNAEPHVGHKFVFKLDLENFYPSVRYSRVVATFRSLGYSREIAIWLARLTTSLIPTDLPTPGQRPGMLYAYFGRHLPQGASTSPAIANLSALGLDIRLSGLANAYGCTYTRYADDLTLSGPGKAAGALRELIPLSEQIVRSERFHLHPVKRRILRRGQRMRVTGVVVNDKVNIARGDFDRLKAILTNCIRTGPEAQNREGLPAFSDHLRGRIAHITQLNPNRGAKLQALFARIRWP

SEQ ID NO: 5879 - protein, 463 aa, unidentified
  source 1..463: note = Related to JADZEF010000283.1; note = Planctomycetaceae bacterium
MGLLDFLRRLFFPQPSPPPNKTAFDGVPSPRPPVRAPSDNGRHPSDNSHSAATSTAEPEVESRDRRPKRPRRTGPRPRAKLTPLRHAPPEFIADRSTEVTPIPYRFARFGVRSGGFLDLASDGDDARLRERQLPVLHTPEDLAAWLGIPLGKLAWLIHRFTANSRPLSEREAHYHFRWERKRSGGWRLIEAPKATLKDVQCRILEEILSRVPAHPAAHGFVPGRSIVTNAAEHVGKPIVVRLDLTNFYPTVTLARVAAIFRSVGYSREASVWMARLCTSSLPQTAGFPEGNASAIRPYLPAHLPQGACTSPALANLSAFSLDVRLSGLARAFGGVYTRYADDLTFSGPDGFRRALPNFLPLVEQVIREERFRINKAKRRIIRSNARQMVTGVVVNDRTNVRRVDFDRLKALLTNCLRHGARSQNHEGRDNFAAWVRGRIAHVQSLNAARGSKLLALYQQIDWR

SEQ ID NO: 5880 - protein, 385 aa, unidentified
  source 1..385: note = Related to JAGQPV010000469.1; note = Planctomycetaceae bacterium
MPLRYDGHRSGKRQKNAEEVDRLPYRFAQQGVRYGGYLDLSDDADVGRLEQLGLPILHTPEQIAVWLDRPLGQVAWLIHRFSSGYRPENEGEAHYHYRWQRKKSGGWRLIEAPKPILKTVQQQILTDILSQVPVHPAAHGFTAGRSIVTNAAPHAGQQVLVQFDLANFYATVSLSRVVAVFRSLGYCREAAIWLARLTTSAIPQTATFPDQDTHALTPFLPRHLPQGAPTSPALANLSAYSLDVRLTGFAASWGGTYTRYADDITISGSKSLIRALPKFIPLAERIIGQERFVFHRQKRRVVRDCSRQVVTGVVVNSHPNLSRPQYDRLKAILTNCIRHGPSTQNRENHADFAAWLRGHVAHARNLNPQRGLKLQALYDQVDWQR

SEQ ID NO: 5881 - protein, 433 aa, unidentified
  source 1..433: note = Related to JACCRE010000317.1; note = Planctomycetaceae bacterium
MGLLRWLLGLFGANSGTAVAKAWTDQALRSTAGRPWRRPRLSSIRRNAVSPPLRRTPAPTTPQPAYRFARQGVAGMLESLRGRSSYLNLATDLDRTRLDRWNLPPLATPDELADWLEIPVGKLAWLSGRLVSGNRPPSTREAHYVFRWKAKRSGGARLIESPKPLLRQVQTKILREILDKVPPHAAAHGFVAGRSILTNAKPHCDRVVVVKWDLTDFYASVRYSRVVAIFRSLGFSREVALWLASLTTSAIAADLPFPESGPQALRPYLGRHLPQGAATSPALANLSAFSLDVRLSGLARAFGGAYTRYADDLTISGDDAFARQLKNVIPLVEKVIRQERFHVHAKKRKVIRRGQRQVVAGVVVNQHPNIRRDDFDRLKAILYNSAKHGPASQNPNGHPDFAAHLRGRIAHAAMLNSVRGEKLMRLYEAIDFG

SEQ ID NO: 5882 - protein, 449 aa, unidentified
  source 1..449: note = Related to NC_015174.1; note = Rubinisphaera brasiliensis
MWRLFSSLWRLFTGHSGRQAKNPYATFGTTDESTANETFDDAMVSPPEPPRHQRKPKADQRYPRLTKFRYQPGRVSDREHAPQIVTGTPYRYANPFVVSPGMFLDMSNDLRSERLDRWELPQLKTPQDLADWLQLPLGKIAWLTDRFTEANRPVDASKSHYHYCWKQKKSGGYRLIEAPLPLLRQVQEQILDEILASVPVHAAAHGFCSGRSVVTNARPHVGQQLVIKMDLDNFYTRVRYARVVALFRSLGYSREVALWLARLTTSAVPSNLPFPGGEPKQLRLFLARHLPQGAPTSPAIANLVAYNLDVRLAGLARSFQVQYTRYADDLTFSGGEDLQYCSRVFLPLVSQIVRDERFQMHATKRKFLLPSCRQQVTGVVVNEKTNISRKEFDRLKATLYNCVKTGPAAQNHNAHADFQAHLRGRIAYVQQLNPARGAKLLDLYQQIRW

SEQ ID NO: 5883 - protein, 444 aa, unidentified
  source 1..444: note = Related to JAGQQR010000004.1; note = Planctomycetaceae bacterium
MWRLFSFLWQLLGGRSPDSRVSEPISPGGTVSERTASSSAALSPAPGRKKSKADQKRPVLVPLTYRRPRLSDREHAPEIVSESPYRYALPYVVSQGKYLDLSQDIRPELLQRWDLPLLKTPQDLADWLHLPVGQVAWLSGRFGEGGRPADASKAHYRYSWKKKRSGGYRLIESPLPLLRQVQEQILDEILSRVPVHQAAHGFCAGRSVVTNAAPHVGQHVVIRLDLDNFYSRVRHSRVVAVFRGMGFSREVSLWLAKLVTSAIPSNLEFPGDQPGLLRLFLPRHLPQGAPTSPAVANLVAYSLDVRLAGLARAFSANYTRYGDDLTFSGSAELSQGSRLFLPLAQAIIREERFRVNSRKRRFMRQSTRQEVTGLVVNEKVNYSRQEYDRLKATLHNCVKTGWESQNRAGHPDFLAHLRGRIAYVQQISPLRGAKLLALFTRIVR

SEQ ID NO: 5884 - protein, 371 aa, unidentified
  source 1..371: note = Related to JAESQE010000528.1; note = Planctomycetaceae bacterium
NRSSSIVSQQPYRMALPSVRSPGTFLDLTTDYSPDKLNQRDLPLLKTPEDLANWLQKPLGTVAWLTDYYNEARRPIDIRKAHYRYSWKQKRSGGYRLIEAPLPMLKEVQEQILDEILDRIPVHSCAHGFCTGRSILTNARPHVGQDVVVKLDLDNFYTRVRYSRVVAIFRSIGYSREVALWLAKLTTSAIPSNLEFPGNEPKLMRLFLPRHLPQGAPTSPAIANLVAYSLDIRLSGLTQSFGGNYTRYGDDMTFSGDWQFIKAMRLFLPLTQQIIRQERFVVNGRKRKVLRRSKQQSVTGVVVNDKTNISRKSYDNLKATLHNCIKSGPDSQNREEHPNFHAHLRGRVAFVQQLNRAKGDKLLRMFEQISW

SEQ ID NO: 5885 - protein, 444 aa, unidentified
  source 1..444: note = Related to JAGQQT010000159.1; note = Planctomycetaceae bacterium
MGLIQFLRSLFFGSGPQSAGTASRQYSDQWNAGSSSANQNSSTPTATAPETVRTRPKLVPLRRHKKGRNRQLISGERGLKTAPYQLAVPDVTSPGTFLDLSRDGDSARRADWELPELTTPQDLADWLEIPLGHLGWLTGRYLDGKRPLDASKAHYHYTWKQKRKGGFRLIEAPYPLLRQVQEQILDEILCCVPTHVSAHGFKTGCSVLTNAQPHLGKDVVVKLDLDNFYTRVRYSRVVALFRGIGYNREIAIWLARLTTSAIPGNLRFPGGQPKLMSLFLPRHLPQGAPTSPALANLVAYSLDIRLNGIAESFGAQYTRYGDDLTFSGDHKFRASLRLFLPLVRQIIRHERFVLNPKKMQVVRPCSRQLVTGVVVNQKPNISRKEFDRLKATLHNCVRLGPESQNRTNHENFRAHLRGRIAFVQQLNPARAEKLLMIYNRIKWS

SEQ ID NO: 5886 - protein, 445 aa, unidentified
  source 1..445: note = Related to NZ_SJPG01000001.1; note = Rubinisphaera italica
MRFLEFLKRLFFGGSAQSTADKYSRTPDDTRFQSTLAPTEPETHPESQISDHVKREQHWPVLVPLRRKRIRQTTHNGEETAGPKKYALALPYIMSPDSYLDLTQDVQPELLNNWDLPHIVTPADLADWLQISLGQLGWLTDRFSEGKRPIDARKAHYRYSWKEKRSGGYRLIESPLPMLRQAQEQILDEILEQIPPHAAAHGFRTGRSIVTNAEPHVGQAVLVKLDLDNFYTRVRFSRVVAIFRSLGYSREISLWLARLTTSAIPGNLQFPGGQPKLFSLFLPRHLPQGASTSPALANLVAFSLDVRLSGLAKSFNANYTRYGDDLTISGDERFRHSLRLFIPLARQIIRQERFVLNAKKKKIIRPMSQQRVTGVVVNEKTNIPRKEYDRLKATLHNCVRFGPESQNHDQHEHYQAHLRGRIAFVQQLNPHRGEKLLAIYRKINW

SEQ ID NO: 5887 - protein, 445 aa, unidentified
  source 1..445: note = Related to JAKFGB010000009.1; note = Rubinisphaera sp.
MLLLELLKRLLFGSSAVSSKKRVVETASSRSDGRFSPPAEASVAVADKPRKKPREEQTWPILRPLRRKKVRPERDAAANAGSKQYPFAYPYVVSDGSYLDLTKDTDRERLDRWDLPYFETPTQLAEWFNLPLGQLAWLTDRFSDGKRPVDKSKAHYRYQWRTKRSGGYRLIEAPLPLMRQVQEQILDEILDRVPTHDAAHGFCAGRSVVTNAEPHVGQAVVVKFDLDNFYTRVRYSRVVAVFRSFGYSREVAIWLARLSTSAIPANLDFPGRQPKRLRLFLPRHLPQGAPTSPCMANLVAFSLDVRLSGLAKSFGATYTRYGDDLTFSGDESYLRSLRVFIPLAHQIIRQERFVLNGKKKQIRRRVSQQKVTGVVVNDKTNIPRKEFDRLKATLHNCVQHGPDSQNHDQHPNFRAHLRGRIAYVQQLNEHRGNKLLSLYQAINWS

SEQ ID NO: 5888 - protein, 370 aa, unidentified
  source 1..370: note = Related to BJHP01000039.1; note = Planctomycetia bacterium
MDLSLDGDDSLLASYHLPVFHTPQRLADWLGIRVGELAWLVHRSTSDRRPADEQRSHYVYRWVKKRSASLEAGSPNSRPVQTQWRLIEAPKQTLKAAQRKILSEILEKIPAHHAAHGFVRGRSIVSNARPHVGQAVVIKLDLQNFYANVTYSRVVAIFRSMGYCREAAIWLGRLTTSAVPWSLAVPDGDEAMKSLYVRRHLPQGAPTSPALANLSAFGLDVRLSGLLKKFGGNYTRYADDLTLSGSDDFRFSLRCVIPLTEQIVRSERFRLNHRKRKVVRRGHRQLVTGVVVNAKPNIRRDEFDRLKAILYNCVKLGPSSQNRDAHADFSAHLRGRIAFVRQLNPARAEKLWRLFENIRWDGFPPTQGSR

SEQ ID NO: 5889 - protein, 439 aa, unidentified
  source 1..439: note = Related to VGZH01000005.1; note = Planctomycetes bacterium
MKLLLDFLRWLLGDRGGTSRTGSQQPTGTQSRRLKRRPVKLTKRRRLSGNALLMQRPKPIKSLAPPYQFSAYASDHRQFLDLSQDGDDSLLASYHLPVFHTPQHLAQWLGVRVGELAWLVHRSTSDRRPADEQRSHYVYRWVEKRLASVESGMPNTRPVSTQWRLIEAPKQTLKCAQRKILTEILEKIPTHQAAHGFVRGRSIVSNARPHVGQAVVIKLDLQNFYANVTYSRVVAIFRSMGYCREAAIWLARLTTSAAPWSLAVPNGDEATKSLYVRRHLPQGAPTSPALANLSAFGLDVRLSGLLKKFGGNYTRYADDLTLSGDDDFRYALRCVIPLTEQIVRSERFRLNHRKRKVVRQGHRQLVTGVVVNTKPNIRRDEFDRLKAILHNCVKLGPALQNRDGHGDFAAHLRGRIAFVGQLNPARAEKCQRLFEQIRW

SEQ ID NO: 5890 - protein, 446 aa, unidentified
  source 1..446: note = Related to JAFEBR010000742.1; note = Planctomycetes bacterium
MGLFDWVRGLLGFGNPAPNPVESPVETKNAPLPTPASGVASPPSGPASSRRDRGVTRSREFRRSRSAIQLRTLRFQLRPRSDLRTTVQDRAHYRFARPSVEGGFLDLTQSGDTGNLEQLSLPVFRTPEEIAGWLQIPLGQLAWLVHRFDEDQKAGDEKTSHYWYRLIPKRSGGQRLIEAPKAKLKRAQWQILDGILSKVPAHRAAHGFVASRSILTNATPHVGQRVIVKLDLENFYPSVTFNRVVAIFRSLGYCREAAIWLGRLTTTTLPRRISPELSRCADLNDYRGRRLPQGAPTSPALANLSAFALDLRLSGLARSFHANYSRYADDITFSGDDRFLRSLAVFIPLVKTILKSERFRANRRKWRVIRNNQRQTVTGVVVNARPNVTRRNYDRLKAILTNCIRRGASTQNHSQHKQFAAHLLGRIAQVSHLNAERGQKLYALYS

SEQ ID NO: 5891 - protein, 436 aa, unidentified
  source 1..436: note = Related to JACQFH010000599.1; note = Planctomycetia bacterium
MGLFQWLRGLFGFGDAAPESSAQPHSPSSSRASDSNRATPAARPPRKRRRPARLKPLRFKPPRKVGGRTTLPKDRGYRFARPSVTGGWLDLSQGGDASRLERYSLPVFKIPEQLAKWLEIPLGQLGWLVHRFDDEHRAADEKSAHYFYRWIDKRAGGKRLIEAPKVKLKGVQWKILDGILRKVPAHPAAHGFVTGRSISTNAVPHVGQRVVLQLDLENFYPSVSLNRVVAIFRSLGYCREAAIWLGRLTTTTLPASMTATFGRGPEIHPYRGRRLPQGAPTSPALANLSAFVLDLRLSGLARTFGANYTRYADDLTFSGDAVFLKSLAVFIPLVKQIVRDERFLINRRKWRVLRNNQRQTVAGVVVNTRTNVARKDYDRLKATLTNCVRRGASTQNHDRHERYASHLLGRIAHVAHLNPARGEKLRVLYDQIDWNK

SEQ ID NO: 5892 - protein, 449 aa, unidentified
  source 1..449: note = Related to RPPR01000054.1; note = Planctomycetaceae bacterium
MGFFDWVFGWLGLGLRSPAKTAGSAPPGSPGDSLGQPGETETQFRTRNRNYAKVALTPRTFRATRAGGEHPEERRATGDWPYKFARRAPDPARWLDLSRDADRVRLAQFGLPVLETPEDLARWLQVELGELAWLSGHFHFGGRPDSVARSHYHYSWIEKRSGGRRLIEAPKARLKHLQTQILRCILDRVPPHRAAHGFVAGRSILSNAAPHVGQRVLVQFDLSDFYPSVSYSRVVAIFRSLGFSREVGCWLARLTTSAVPHELLTGPSSTRFGSRFDSDHELYLRRHLPQGAPTSPALANLSAFVLDLRLAGLARAFQAHYTRYADDLTFSGGTRFQRSLAVFIPLARQIIRGERFSIHPLKFRVRRRGQRQTVTGVVVNDHLNVSRADFDRLKAILHNCARHGPASQNRSQLPDFAGHLRGRIAHVQMINPRRAAKLVALFGQIDWTR

SEQ ID NO: 5893 - protein, 430 aa, unidentified
  source 1..430: note = Related to DNUF01000128.1; note = Planctomycetaceae bacterium
MGWLDWLWRLFTGSGADRSPQELTSARGTAADPASKARRRPGRRRRLVPLRYRRNPSRSPPALAAQLPYRFARRSADLRHWNDLRQDGQPRRLEQLGLPVLAGPDDIACWLSLSAGEVAWLTGRFWEGRSAPRVAASHYHYRWIAKRRGGRRLIEAPKSRLKRVQQQILAEILGRIPPHVAAHGFVTGRSIQTNAQPHVGQRVLLKLDLENFYPSVTYPRVTAIFRSLGYSREAAIWLARLVTTAVPPNLWEAGRPSDVAETRYLRRHLPQGAPTSPALANLSAFVLDLRLAGLARSFNAQYTRYADDLTFSGGEVFQRSLAVFLPLVRQIVAQEQFRLNSRKTAVQRASQRQRVTGVVVNSKLNIRREDYDRLKATLKNCIQYGPTSQNRERHPEFASHLRGRIAFVTSLNSQRGAKLLALFEQIDWNR

SEQ ID NO: 5894 - protein, 429 aa, unidentified
  source 1..429: note = Related to NZ_SJPP01000003.1; note = Symmachiella macrocystis
MSFFDSILRWLGLKNTPPTGRDHAQQRRGKLRRRRGRLGHIYMVPLRRRQGQRSADPTEDAGEESAESPYRFARFGGYGEYRDLSKDSTPERLYQFGLPQLCTPSHIAEWLEVPCGRLAWLIHRFDDGGRAAHVAQAHYHYSWLKKRGGGYRLVEAPKPILKAIQQKILREILDRIPLHGAAHGFVAGRSICTNAQPHVGQRVVLKFDLENFYANVSFSRVVAIFRSVGFSREAAIWLGRLTTALPPEGLPAPGGDRNVVRPYLSRHLPQGAPTSPALANLSCYALDLRLAGMARAFGATYTRYADDLTFSGDQHLIDSLNVFIPLVTKIVRSERFTVHAGKRKVVRNNQQQRVTGVVVNERLNICRKDYDRLKAILTNCVRHGAATQNREQRADFAAHLRGRIGHVQSIHPGRSRKLQAIFDRIDWRS

SEQ ID NO: 5895 - protein, 432 aa, unidentified
  source 1..432: note = Related to JAGQQA010000064.1; note = Planctomycetaceae bacterium
MGLLNFFWRLIFGDPPSRPESSSSASRDSSVSRNPSTPRTRTRKLRARLIPDRVKRSRQDFPQNIVSSLPYRFARLNVTGGYLDLSQDLDEPQLQQLGLPLLATPEQLANWLGIPLGKLAWLTHRCDEGQRPRDVRHSHYHYRWVKKKQGGYRLIEAPKHQLRRLQDKILLEILCKIPVHPAAHGFVAGRSIRSNAEPHVGQRVVVKMDLANFYPTVRFSRVVSIFRAIGFSREVAIWLARITTSAVPLAFEGPPGELNRWALTPYYSRHLPQGAPTSPALANLSAYLLDRRLAGLARRFRANYTRYADDLTFSGDAKFLSGLRNFVPLVHTVIRRERFQLHYKKTKVHRSNQHQRVTGVVVNEKPNMSRADFDRLKAILTNCIRRGVSTQNHSQIPDFEAHLRGKISHAKFLNPARGAKLLALLRKIDWQS

SEQ ID NO: 5896 - protein, 429 aa, unidentified
  source 1..429: note = Related to JACRIH010000511.1; note = Planctomycetales bacterium
MGLWSWLRRLLFGQPKRSAASRSDDREQKRRRPRARLTPLRHRQRRTDRWRQRDAAGSINKITVKSQPYRFAWSSVFGGFLDLNRDGDPARLKQAGLPVFQTPQELADWLQMPIGRLAWLVHRFHDHQRPATVKLSHYHYQWIAKRSGDRRLLEIPKPQLKAAQEKILREILDLVPTHSAAHGFVTGRSIKTNAEPHVGQRVVMKFDLENFYPSVKYSRVVAIYRSLGYSREAAIWLGRLTTSITPPLGTLKDLATEAEWIPYATRHLPQGAPTSPALANLSAFALDLRLAGLARTFHANYTRYADDLTFSGPDQFLRSLRVFIPLVMQLIRQERFRVKLSKRKVIRNSQQQRICGVVVNEQIGIPRREFDRLKAILTNCVRRGPATQNHERHPDFAAHLRGRIAHVSHLHSERGARLLDLFEQIDWNS

SEQ ID NO: 5897 - protein, 432 aa, unidentified
  source 1..432: note = Related to SIAF01000026.1; note = Planctomycetaceae bacterium
MGLFNWLRCWFLGKRPPATNDVVSDQGAAPQRRKRRRKHSRARLVPLRAAAARDARRRFPGLTTAERTGAAPYRFARPCVLGGWLDFSLDGQTEQLGSAGLPVFETPQGLADWLELPLGRLAWLIHRFEIEQQPPDQAKAHYHFCWLPKRRGGKRLIESPKPILKRIQHRILREILDKVPLHPAAHGFAAKRSIRTNAAPHVGQRVILKMDLENFYPSVRFSRVVAIFRSLGYSREAALWLSRLTTSSLPANAAQWSLWSPELEAYLCRHLPQGAPTSPALANLSAFSLDLRLAGLARTFGARYTRYADDLTFSGDEHFSRSLAVFIPLAEQIIRAERFRTNKSKRHVVRDHQRQQVTGVVVNRHPNVARPDYDRLKAVLTNCIRRGPSTQNHSREDDYAAHLRGCIAHVAFLNPSRGEKLLDLFSQIDWNR

SEQ ID NO: 5898 - protein, 430 aa, unidentified
  source 1..430: note = Related to NZ_CP037422.1; note = Gimesia aquarii
MGIFQFIRRLLFGSSPSRPIAPADTHSALKQIKPSRPRRKPRLQPLRFNKKKNRDSPDMVDVSPLPYKLARPYELLRYRSQSDHYLDMTQDVDHQKLRQYHLPAFSTPEEIANWLEYPLGKLAWLTHRFNQADRPDDVNESHYTYHWLPKRNGYRLIESPKPFMKMAQQQILQDILNKIPAHPTAHGFVTGHSQVTNAVPHTGKRVVVKFDLENFYASVKFSRVISIYRSVGYCREAAIWLARLTTTAIPMSMPFPDGSLRPLYPYLSRHLPQGAPTSPALANLSAFSLDVRLSGLARSFDAEYTRYADDLTFSGSDQFLRSLRVFIPLVEQIIRSERFQVNQSKRRILRNNQQQKVTGVVVNEHTNVPRKEFDLLKAILTNCIRKGPASQNREGHPDFASHLRGRVAYVQQLNPNRGQRLLQLYQQIRW

SEQ ID NO: 5899 - protein, 422 aa, unidentified
  source 1..422: note = Related to NZ_CP037920.1; note = Gimesia aquarii
MGLFQFIRRLLFGSSSGRPVTPTDSYSKQNKTQRAYRKPRLKPFRYRQNRRTDTTELEEVSSPPYELARYASRTGHYFDMAQDTDFEKLDQYNLPRFCTPLELSQWLEFPLGKLAWLTHRFNQFDRPDDVKESHYVYHWLPKRNGFRLIEAPRPFIKIAQEQILKDLLNRIPVHPAAHGFVAGHSSVTNALPHTGKRVVVKFDLENFYTSVKFSRVVSIYRSIGYCREVSLWLARLTTSAIPMSMPFPDGSLRPLYPYLSRHLPQGAPTSPALANLSAFSLDVRLSGLARSFDAEYTRYADDLTFSGSDQFLRALRVFIPLVEQIIRSERFQVNQSKRRVLRNNQQQKVTGVVVNEHTNVPRKEFDLLKAILTNCIRKGPASQNRKGHPDFASHLRGRVAYVQQLNPNRGQRLLQLYQQIRW

SEQ ID NO: 5900 - protein, 430 aa, unidentified
  source 1..430: note = Related to NZ_CP037452.1; note = Gimesia fumaroli
MGFFDFIRQLFFGPAPDRSVARPETSANVKPSKAPRIFRKPRLSPLRYNKKKRFTPPENADVGSLPYKLARPYELLRYRSETDHYLDMTQDGDAAKLSRFDLPVFSTPEDIAHWLNLPLGKLAWLTHRFNQSDRPDDVKESHYTYHWLPKRNGFRLIEAPRPFIKMAQQQILQEILNQIPVHDAAHGFVTGHSPVTNAIPHTGKRVVVKFDLENFYASVNFARVVSIFRSVGYCREAALWLARLSTTAIPMNMPFPDGSLRPLLPYLSRHLPQGASTSPALANLSAFSLDVRLSGLARSFDADYTRYADDLTFSGSDQFLRSLRVFIPLVNQIIRSERFQVNQSKRRVLRNNQQQKVTGVVVNEHTNVPRKEFDLLKAILTNCIRQGPVGQNREQHPDFASHLRGRIAYVQQLNPNRGQRLLQLYEQIRW

SEQ ID NO: 5901 - protein, 424 aa, unidentified
  source 1..424: note = Related to NZ_CP036353.1; note = Gimesia maris
MGLFDFLRRIFFGSPPSQTVSPVESAPVPEETSSRKPRRKTTLEPLRYSSSHSSRVENIEEVAAPPYELARYGARTGHYYDMTRDGDTEKLARYELPLFSTPVELAEWLNIPLGKLAWLTHRFTQFDRPDDAQDSHYIYHWKPKRSGFRLIESPRPFLKMAQQQILHEILNQIPVHTAAHGFVRGRSSVTNATPHTGKRVVVKFDLENFYTSVKFSRVVAIFRNLGYCREASLYLARLTTSVIPMSLPFPDGSLRPLVPYLSRHLPQGASTSPALANLSAYSLDVRLSGLARAFDADYTRYADDLTFSGSEQFLRSLQVFLPLVNQIIRSERFQVNHMKRRILRENQQQKVTGVVVNEHPNVPRKEFDLLKAILTNCIRQGPRTQNRENHPDFASHLRGRVAYVQQLNPKRGQRLLHLYEQIRW

SEQ ID NO: 5902 - protein, 425 aa, unidentified
  source 1..425: note = Related to NZ_VTSR01000009.1; note = Gimesia chilikensis
MGLFDFIRQLFGSPPDRSGQAAAPDPVPEPAPHEPPQKRRPVRLHPLRYPKRRPRTEYNIEEVPAPPYELARYGAMTGHYFDMTQDTDAAQLSRHELPQFATPLELAQWLEIPLGKLAWLTHRYNHSDGPEDVKESHYTYHWLPKRNGFRLIEAPRPFIKMAQQQIQQEILSRIPMHHSAHGFVSGHSPVTNARPHAGKRVVLKFDLENFYANVKFSRVVSIFRSLGYCREAALWLARLTTSAIPANLPFPDGTLRPLLPYLSRHLPQGAPTSPALANLSAYSLDVRLSGLARSFGADYTRYADDLTFSGSEAFLRSLKVFIPLVQQVIRSERFQVNLSKRRVIRNNQRQTVTGVVVNDHTNVSRKEFDRLKAILTNCIRQGPETQNREQHPDFANHLRGKIAHVQQLNPNRGQRLLHLYEQIRW

SEQ ID NO: 5903 - protein, 425 aa, unidentified
  source 1..425: note = Related to JAADHY010000128.1; note = Planctomycetes bacterium
MFIPITGPLPSSIKIRRPISIVTPLLKPSSSHRTELEGKPRLTPLRYRPVESRAEAALPVDHLPYRFARLATRPGQYWDLSRDGDPDQLRTLGLPEFHTPEQLADWLQMPVGRLAWLTRRCAETQRPETERDGHYYCRWMEKRSGGWRLIEAPKPILKSVQQRIAREILQNIPPHEAAHGFVRGRSIVTNAQPHVGRRVVLKLDLENFYASVRFARVVAIFRRVGYSREAAIWLARLTTSAAPWSLSAPDGSDDTLRPYTAWHLPQGAPTSPALANLSAFSLDVRLTGMARCFGAAYTRYADDLTFSGSQRLIRALPTFLPLITQIIQSERFRVKKEKRKVLRNNQRQTIAGVVVNAHPNVTRSDFDRLKAILTNCIRHGPSDQNREQVPDFAAHLRGRIAHVMQLNPHRGAKLLALYEQIDWNH

SEQ ID NO: 5904 - protein, 331 aa, unidentified
  source 1..331: note = Related to nan
MGLWQWLKQLLFGSTSVEVEIPTEEERQERRPTPKLTPLRYHVSSWENHLPWKREFVSQRPYRFACNTDVWGMYNDGYVDLSLDANFGQLERWGLPKFSNPEELAEWLGLPVGRVAWLADRVRRGDWRGDRATDHYYRKFVSKRRGGWRLLEAPKPATKAVQYRILSEILERVPPHPAAHGFVRGRSIVTNARPHAGQAVLVKLDLENFYTSVSYARVVAIFRRLGYSREAAIWLARLTTTQAPENLQPPHGKARLDWRYTLRHLPQGAPTSPALANLAAFSLDVRLSGMARSFGAQYTRYADDLTFSGPKRFLQSLDTFLPLVIQIIQSE

SEQ ID NO: 5905 - protein, 426 aa, unidentified
  source 1..426: note = Related to CP036268.1; note = Planctomycetes bacterium Pan189
MFRWLLRLLFGEDESVTQRSQPEKIAPVETDEAPKVRVRPRLARFEFRRRRGHHSTSAATRTTEKPYRFALPNGVSGETIDRSQDQNFERLTRWELPALTTPEDLADWMEVSIGELAWLTHRTESAYRPPSLEAAHYHFRWVHKKSGGSRLIESPKRRLKHVQQLLLRGLLDRVPAHPAAHGFVRGRSIVSNAQPHVGKAVVLSYDLENFYPAVRYNRVVAVFRGLGYSREAAIWLTRLTTSALPPRMPLPEGRGANLIRAYAARHLPQGAPTSPALANLSAFSLDVRLNGLANSFEANYTRYADDLTFSGDDRFRRSLATFIPLVNQIVRSEQFVVHREKRKVVKHGQRQLVTGVVVNDRPNVSRAAYDRLKATLHNCVRQGPASQNRDEHLNFEAHLQGKISHVRQLNPARAEKLQRLFDRIEW

SEQ ID NO: 5906 - protein, 424 aa, unidentified
  source 1..424: note = Related to NZ_CP036316.1; note = Calycomorphotria hydatis
MLRWLFSLLFGSRDDGGRPAPAQRRKRPKYWRIGKIKLSRFQYGRRNRKLQRDELVREKPYAFAFRYPLHSKYIDRSGSGDSEKLARFELPDLRTPDDIAQWLGMPLGRVAWLTHITERQFRPQSLSEAHYTFHWMPKKFGGARLIEAPKPLMRKVQHQILRGILDHVPAHDAAHGFVKHRSVLTNAAPHVGQRVVLRMDLENFYANIRFSRVAAIFRELGYSREAALWLARLCTSGLPPRMPLPEGRGANLVRNYTARHLPQGAPTSPALANFSAYSLDVRLTGLANSFHANYTRYADDLTFSGGDRFLRSLRVFIPLVNQIITQERFIAQPAKRRVIRDNQRQKVTGVVVNQKPNCDRREFDELKAILHNSVRFGPASQNRHDHEDFYAHLNGRIAHIAQLNPQRGEKLRSMFRQINWANSP

SEQ ID NO: 5907 - protein, 440 aa, unidentified
  source 1..440: note = Related to JAGQQC010000202.1; note = Planctomycetaceae bacterium
MGLIDFLFRMLGLKRESRGELPTSVPTKPRPAAKTQTKTSYPRLHPLRFKRERWSKVKKSSQKLSASTRPFSVPDAKTERPYPLANQDVRYGGYLDLSQDSDPVQLRELELPQFTNPPELAEWLGIPVGQLGWLTYQFDEGHRPLTQRAGHYHLRWQPKRNYSVRLIESPKPLLKQVQRKILREILDHVPAHSAAHGFVSGESILTNAKPHCRQRVIVKFDLENFYPRIRFRKVTAIFRAMGYSREAAIWLARLCTSNIPVDTKLPSMDPEVIFLYTPQHLPQGAPTSPALANLAAYGLDVRLEGLARSFGANYTRYADDLTFSGDDKFLRSLKIFIPLVEQIIRETGFSVNKEKRKVIRDNQRQAVTGVVVNQHPNMNRKDYDRLKAILNNCVRHGAESQNRDQHPDYQAHLRGRVAHLLQLNPKKGTKLQRLFERIQW

SEQ ID NO: 5908 - protein, 438 aa, unidentified
  source 1..438: note = Related to NZ_CP036281.1; note = Polystyrenella longa
MGFFDFLLRLLGLKSKPQATMAPAAGTQFKKTTSPKRTDRKLDPLRFQRERWSKVAKSPQQQTTTSRPFSVPAVKVEQPYPFAHFSPMGDGYLDLSQDGDSVQLQELELPEFSNPQQMADWLQMPVGQLAWLTCQFEEGYAHATEKAAHYHFRWLPKRNFGCRLIESPKPLLKQAQRKVLREILDNVPTHQAAHGFVQGSSILTNAQPHCGKRVVLKFDLENFYPHVRFSKVVAIFRSMGYSREASIWLSRLCMSRLPLDCKPPTANPEALWIYQPTHLPQGAPTSPTLANLAAYVLDVRLDGLARSFGADYSRYADDLTFSGDAQFLRSLKSFIPFVEKIIRETGFKVNKNKRKVIRNNQRQSVTGVTVNEHPNINRKEFDRLKAILHNCVRYGSESQNRDQLPDFQAHLRGRVAYFQQLNPTRAAKLKQVFEQIRW

SEQ ID NO: 5909 - protein, 420 aa, unidentified
  source 1..420: note = Related to JABURQ010000038.1; note = Planctomycetaceae bacterium
MSLWQLLKNLLFGGTAASSNPAVRNTEHERRRGRPRLQPLNYSQHSRNRQPSRQVSEKPYLYARKDTYRQDGWYDLREGGDAEFLQQEGLPLIESPAELADWLDLKPGQLAWLTHFFSPGSRAESVEQSHYHYHWVSKRSGGERLIESPKPMLKQVQSKILQGILNQVPVHRSCHGFTRGRSILSNAEPHCGQRLLLKFDLQNFYPSVSLNRVIAIFRSLGYNREVAIWLGRLTTTAIPSSIPFPEEGPKGLRDYLADHLPQGAPTSPALANLSAFSLDLRLHGLANSFGANYTRYADDITFSGPETLLKSLKTLIPLVEAVIRDERFTVNKAKRKVIRNNQRQTVCGVVVNEHPNYSRKEFDRLKAMLFNCIRFGPDSQNREGHPNFREHLWGRISFVKQLNPARGAKLEALWNQISWS

SEQ ID NO: 5910 - protein, 431 aa, unidentified
  source 1..431: note = Related to WGME01000003.1; note = unidentified bacterium
MDQRWLGILIVVAAWIVVRTLFGKRRTQPRSSRSIHKERYEQQRVRPAIREKRPLIVGRNKSPLLAVASPPHSFAHRGLKPGTWYDLSQDGRNDELVRRGLPVFQTPDELAAWLNVPVNRLAWLAYRCTRGNLPGVSQSHYVYTWKPKRTYGYRLIESPKASLKTVQRQILTEILDHLLVSEAAHGFRKEHSILTNAQLHVNAAVVVKFDLSDFYLTVRSGRITNLLRRVGYSREVAIWLTRLTTSTIPGNLPPPPTNPIVMWNYRQRHLPQGAPSSPALANLVAYRLDQRLLGLAKSFGANYTRYADDLTFSGDESFAAALRAFIPLVEAIIRRERFQSNNAKRQILRRHQRQIVAGVVVNEKPNFCRKDFDRLKAILHRCVTQGPAAQNRDQIEDFAAHLRGRIAHVRQLNPQRALKLESLFQRIDWRR

SEQ ID NO: 5911 - protein, 421 aa, unidentified
  source 1..421: note = Related to nan
MMWYLILIAVVTGIGVMVARSRVRGASRSRPPGDSRWRRLRRPFQHPPTPRTSGEVVRQPPYAFSYGAGGKGRFCDLSQDLNLDRLTTWKLPVLRTPDDIAQWLGLPVNRLAWLAHRCRRGRPEGVQQSHYHYRWLPKASGGMRLIESPKRELKAIQRRILKEILQAVPVPAAAHGFVRGRSIKTHAVLHERMHVLVRIDLRDFYASVGFNRVVAIFRTIGYPREAALWLARLTTAALPTNLAGPPEDPGAVWRYRRRHLPQGAPTSPALANLSAYWLDKRLTGLARAFGANYSRYADDLTFSGDDALDPKLRVLIQLIEQVVRDERFHSHRKKRRVLRRHQRQVVTGVVVNDKPNVSRRDFDQLKAVLHNCVQFGPASQNREGHAHFAAHLRGRIAHVQQLNPSRGAKLLAVYGQIDWGR

SEQ ID NO: 5912 - protein, 483 aa, unidentified
  source 1..483: note = Related to LYDR01000158.1; note = Planctopirus hydrillae
MIAPILNWNPVYGGSTVDRIRNRHWLCDPAVDTLGNSMQTMHCQGKDVFMGLWSWFWSWWRPTGSNHALPSSPPANRASGQKRQWIGSTTTPKLPRLRYRSPEMVRQWRIEGRGTQVDQLPYVYARYARTRRRKQFLNLLTDTRVDLLQQHRLPVLTTLDELSQFLGLPIGRLAGLIHLADHGRPPTEKKSHYWLKWIRKKRSGHRLIEAPKPALKKVQEIILRQILDLVPAHPAAHGFVPNCDILSNAQLHAGRAVVVKFDLKDFYPSVTFSKVVAIFRSLGYSREMALWLARLTTSALPIGMAFPDKNPYSIMQFTRRHLPQGAPTSPALANLAAYSLDVRLTGLARRFGAIYTRYADDLTFSGDHRFLKQLKRFVPLTDQVIVQCRFHSQPAKRRILRQSNRQTVTGVVVNQSPNCSRRDYDQLKAILHNCVRHGHQTQNRDQQVDFRAHLQGRVAHIRHLNPDRGVRLQKIFEKINWNS

SEQ ID NO: 5913 - protein, 430 aa, unidentified
  source 1..430: note = Related to JAHBXV010000030.1; note = Planctomycetaceae bacterium
MGLLNWFFSLLFGSPRRAASPPTAMSQTSGARSSAQTHGRVRLKKDRPRQWSNRFRSTRVVVPKKPYPFARKSITGRGYLDMSTDGDDQALIAAGLPVFHHPQELADWLRLPLKELAWLTNHFRHGRPIDPQRAHYHFRWIEKRRGGWRLIESPKRLLKALQSRILDEILSRIATHSAVHGFVLGRSILTNAEPHVGQCVVVKLDLESFYPSIRLARIARLFRGLGYSREAAIWLGRLVTSRLPLNQPFPTGKSGTSSLTLWPYFPAHLPQGAPTSPALSNLVLSRLDARLAGLARKFGATYTRYADDLTFSGPERFAASLAVFIPLAKQIIRREGLRVNRGKTRVLRQAGRQIVTGVVVNERPNIDRRAYDTLKAILTNCHRHGPTSQNRDNHPQFALHLRGRIGHVSLLNPARGAKLLAIFEQIDWER

SEQ ID NO: 5914 - protein, 426 aa, unidentified
  source 1..426: note = Related to nan
MGFFDRIRRALSGEPPPTSKAGETGERPQEYRSFPRVKPVRTVARHLPVCQPDALVRVEKPYAFARRSPLTGEYLDRRVGGKVERLRKFRLPEFGTPEELATWMGLPVKTIAWLADFHNRNAGEKTAKKQHYRYTWRRKRGGRGWRLIESPKPVLKLVQQRILHEILDRVPAHGAAHGFVKGRSILTNAASHAGKYVVVRCDLANFYPSISFKRVRAVFAGLGYNSEIAWWLARLCTNCTPDTLEGPSGGALGRFAAGRHLPQGAPTSPALANLSAWALDVRLSGLARRFNVAYTRYADDLTFSGDEKCLNGLTMAHLLAYIRGIIRDERFVFHPTKRKLVRRGGRQIVTGLTVNRKPNVPRPYFDKLKATLHNCARHGPSLHNRENLPDFRAHLEGQIAFVRSVNPQKAARLQRIFDRIVWEGSG

SEQ ID NO: 5915 - protein, 428 aa, unidentified
  source 1..428: note = Related to JABTUM010000004.1; note = Planctomycetes bacterium
MGLGFLRRLFGGGSDKPPSGRKTNPKRRALKPTVVPGAHAPAPTAHPLPVFEKPYAFPLFAPDTQKESRARFLDGRVGGKPDRQKGWNLPRLETPEDLAKLCGVPLKTLAWLCDYHRRNADEKVKKKQHYHYVWKQKKAGGWRLIEAPKPLLKHCQQRVLREILDRVPPHGAAHAFRAGRSIKTNAAAHAGKYAIVKADLSYFFPSIRFKRVVSVFRGLGYNLELARWLARLCTNRLPPDLSIPGTNNTWALYSVLGHLATSLGRHVPQGAPTSPALANLCAWAMDVRLNGLARKFGAVYTRYSDDLTFSGSAELMGKRRINYFVRYVRGIVRNERFKWHPKKVRVVRRGSRQIVTGLTVNEKPNVGRADFETLKAILHNCVKQGPASQNRSGHADFRAYLSGKLAFVKSVNPQKAARLERDFAKIKW

SEQ ID NO: 5916 - protein, 418 aa, unidentified
  source 1..418: note = Related to JACQFI010000030.1; note = Planctomycetes bacterium
MGLSFLKKLFGGSESERPSGKKGKPSQRLPKTTLARYKPKPYVPSLRVKGAKPYPFAQPACPGFLDGRVGEDAARLQRYGLQRLQTPEELAAWLKIPLKTLAWMADYHRTNYLEDVKKKQHYHYKWVKKRSSAGYRLIEAPKPMLKMIQRRIHEEILSKVPPHPAAHGFVAGRSIISNASQHAGKYVILKIDLQDFYPSIKRRRVLAVFRGLGYGVEASHWLMRLCVNCIPSNCDAPDDSSKAFHWIIRGMYVPRHLPQGAPTSPALANFAAWALDVRLAGLAKKFGVTYTRYADDLTFSSDSKLMKGKSMTMLIRYVRGIVKDEGFRWNASKKAVVRRGSRQVVTGLTVNAKPNVARKEFDALKAILHNCAKKGPASQNRSGVADFRAHLQGRIGFVRSVNPPKAARLQKVYEKIAW

SEQ ID NO: 5917 - protein, 432 aa, unidentified
  source 1..432: note = Related to JAGQRG010000294.1; note = Planctomycetes bacterium
MGIFDWLFGKKKKAAYGADWDTTQSAPSYQGPANQPAPEQREPFINAPARRTKRTRTWGLKWRQQRSKHPLESVPNEEEPFSLWSNPFKHHALYGGTEAKPSKGGSAARIEALGLPNLENLDELAALLGETRNNLLHYIIRDRPGDRHYVARDLPKKSGGTRMLLVPKPRLKAIQRKLNAKLIRRLPLNPAAHGFRRSHDVLSGASVHVARSVVISVDIEAFFPSLTFRRVSGFLRSIGYSRGIATALANLMTIRPCNVAGIGRTADTRYPQLPQGAPTSPGIANAICWRMDKRLSALARKFGGDYTRYADDLTFSGFDEMAKGAGRLLQLVRKIVKTEGLALNEKKTRIMRKGRQQRVTGVVVNQQTNVSRREFDKLKAILHNCIKHGPGGQNRESVPDFKEHLRGRIAHISHIGPERGRKLKAMFDQIRW

SEQ ID NO: 5918 - protein, 403 aa, unidentified
  source 1..403: note = Related to JACKID010000003.1; note = Planctomycetes bacterium
MGILDWLFGRKRRLPAEPEVFVPRPVEVPDSPNAREPFLNHPMPRSKRRWYYERTANLFWRNGRSKEPKYSTSIEPSPSRIEALGLPDLRELRDLAALLGVALKDLKQYSARPNHANGHYLPLYITKKNGTKRLLLAPKPRLKAIQRALHQKLVRKLPLNEAVHGFRRGRDSLSSASAHVGRDVVICMDIEEFFPSFDFRRVSGFFRAVGYSREVAVMLANLTTVAPDDVPNAESRYCRDIPQLPQGAPTSPGLANAICWRMDKRLAALAHRFGAEYTRYADDLTFSGHDDLADGANKFVRMVREILLSEGLYVNEDKTRIMRKSRQQRVTGVVVNERTNVSRREFDRLKAILHNCAKHGPGGQNHERHEDFAGHLRGRIAYFCHIGPERGRKLMRMFELINW

SEQ ID NO: 5919 - protein, 400 aa, unidentified
  source 1..400: note = Related to JAKITN010000241.1; note = Planctomycetes bacterium
MCVANKPNPKEPFLSSPEHTLDRRHRKRWAGLAYRRKRSKWRISPVADQSIEGCDWRDKLGNVSADRVPQGVAGRVATLGLPAINSVEDLAALIGITPNQLAGFALRGDGQRSHYVGRPIPKKSGGERRLLVPLPRLKAAQQALHRKLISLLPLQPCVHGFRLKHDVLTGSSVHVGRQIVIGMDIAEFFPSFTFRRVSGYFRALGYSRGIAIALASLTITSCMDVPDYTPEAYSNHSYTELPQGAPTSPGIANAICWRMDKRLSALARKFGGDYTRYADDLTFSGFQDMADNTGRLLRIVRQIIETEGFVVNENKTRIMRRGSQQRVTGVVVNEKTNLPRREFDKIKAIIHNCIKHGPATQNHAQHENFKEHLRGRVAHAQHIGPERGQKLKAMFDSIVW

SEQ ID NO: 5920 - protein, 459 aa, unidentified
  source 1..459: note = Related to QEVF01000001.1; note = Planctomycetes bacterium
MGFLDWLFGRKRFLPPHTPPSPVGPRNPNIPTISESGTAPVRPPAGGQSQSGQHSLGSRYNPRILRPRRRRSSRPREIDAGKSEHLDRWPHDELDRPDPASLTLPAPRADWVPLGDQSALAALLGIQPTDLKYWLVGHHLDENYILREIPKKSGGTRLLMAPMPRLKALQRQLQQALVSRLPLSPSVHGFRRRHDVLTNAAVHVGKRVVVCMDIADFFPSFDLRRVCGYFRWLGYSRSVALSLASLTTADSFNARLAKGRGRTGLSSDWTERNEVENRCQSVNKIHRTSPLRYRGYRLPQGAPTSPGIANAIVWRMDKRLSALARRFGGDYTRYADDLTFSGFEKLAKHTRMFIKLVEKIVHTEGLAINRKKTRIMRSGRRQRVTGVVVNRQTNLARRDFDLLKAILHNCITKGPSTQNRSNHPNFREHLRGRVAHALHIGPERGAKLQQLFNQIDWSR

SEQ ID NO: 5921 - protein, 387 aa, unidentified
  source 1..387: note = Related to JAGPBM010000060.1; note = Planctomycetes bacterium
MRMLKPRYRRSKDPKSIEGKQNEPIGYWHEQMGGTVKDPVKGGNPSRTAQLGLPSIPHADALASLLGISTRALEGWIGGLLNEQNYVVRGIAKKSGGTRYLMAPMPKLKALQRTLRTSLVDKLPLNACVHGFRRDHDILSNGTVHVNKRVVICMDVLQFFPSFDLRRVCGYFRWLGYSRGIALSLAKFTTADSFNGQLVSASGREGFAQSTPAYVALKNQYRQPQLPQGAPTSPGIANAIVWRMDKRLTALARKFGGDYTRYADDLTFSGFEKMAKHAKLIVALVEKIVHTEGLAINKKKTRIMRKGRQQRVTGVVVNKQTNASREQFDLLKAILHNCAKKGPSTQNRSNHPNFKEHLRGRVAHIAHIGPERGAKLKKLFDAIDWSR

SEQ ID NO: 5922 - protein, 466 aa, unidentified
  source 1..466: note = Related to CAJPFM010000266.1; note = Planctomycetaceae bacterium
MGLFDWLFGRKKKDPPTYRNPYPPKVHSFSEFSADSTLPAPRQQARRNKPTRRKLQPFAPQSYKGHRTLGLSWRRERSKEPVDRVPNSYLSVAHFQHFGGTPSSIPEGGDAAKLLNVGLPVLRHFNELAALLEIDSTSLYKLVVRTSAQHYLFHEIAKKSGGIRLLMAPLPRMKAAQRRLLQALVSKVPLHLAAHGFREGQDVLTNAGPHVGKPIVICMDISDFFPSFTFRRVSGFFRHLGYPRGIAVALANLTTWSPRGQFQLPQTTGRNLRSVDYKERKVQLARAEWLDSGGNEIPSRMWPQLPQGAPTSPGLANAIVWRMDKRLSALARKFGGDYTRYADDLTFSGFEKMAEHSRTLISLVEKIVKTEGLTINVNKTRVMRKGRRQKVTGVVVNKQTNASREQFDLLKAILHNCAKKGPSTQNRSNHPNFKEHLRGRVAHIAHIGPERGAKLKKLFDQIDWSR

SEQ ID NO: 5923 - protein, 395 aa, unidentified
  source 1..395: note = Related to JAGQRI010000064.1; note = Planctomycetes bacterium
MSFRLRRSKEHIGPVKDLTLSGSRNPMTGEASSVGAIGNIGGSARHPDIGFDSATIRSLGLPEIEHLDQLAQVLQIDRNQLVWLAARPAFSENTDAHYTLKAIPKKAGGRRLLMVPLPLLKRAQQRLLAELVRKLPVHEAAHGFRVQRNTLTGASIHVGKDVVIGLDIADFFPSFTFRRVSGYFRSRGYGRGISVALANLTTNRLLDTITKDGKRWKYPKRNAFPELFEHPPHPILPQGAPTSPGIANAICWRMDKRLAALALKFGGDYTRYADDLTFSGFGDMARGAERLIKLVRKIVETEGLALNEKKTRVMRQGRQQRVTGVVVNDQTNVSRRDFDRLKAILHNCIKHGPHGQNRENVPDFEQHLRGRIAHVSHIGPERGRKLMRMFEQIRW

SEQ ID NO: 5924 - protein, 456 aa, unidentified
  source 1..456: note = Related to JAHBYA010000006.1; note = Planctomycetes bacterium
MGFFDWLFGKKKDPYGGKLQKGYSSPRAQPQPAKTYQHQPQGYGGPVPPPTPQQQRAVGVRFRFLKWRRARSKDPLPPLPDQTISGGIDPMTGAYTEPGAIAGLGGTAQHPDPHFKPDRVRAAGLPEIPHLDALAALVGVGRNTLVWLAGKPLASEGCDSHYTVKAIDKPSGGQRLLMVPLPKLKAVQRALVDRLINKLPVHDAAHGFRKGRDVLSGASVHVGKDVVISLDIRDFFPSFTFRRVSGYFRSLGYGRGTAVALANLTTARLNDAQVKQGKRWVYAAQVHKLRTYSHPELPQGAPTSPGISNAICRRMDKRLAGLARKFGADYTRYADDMTFSGSDDLAFHAPKFIGLVTKIVQSEGLALNDKKTRVMRQGRQQRVTGVVVNHKTNVSRRDYDRLKAILNNCIKRGPHGENRENHPDFRGWLQGKIAHVSHIGPERGRKLQALFSQIRW

SEQ ID NO: 5925 - protein, 445 aa, unidentified
  source 1..445: note = Related to JADZFR010000004.1; note = Planctomycetes bacterium
MGFFDWLFGKKKDPYSGNVQKDYTSPRQRPQTAQTYPQQPHGYGSPVPPPTVQQQQSLGIRDRYLSWRRNRSRAHVPPVADQTLGGNEHLGHLGGTSRHPDRHQNAAALQAAGLPLLPHLDALAAMVGVELKTLVWLASKPVASDECESHYTIKAIDKPSGGKRLLMVPLPKLKAVQRALVEKLVNKLPVHEAAHGFRKGRDVLTGASVHVGKDVVICADIRDFFPSFTFRRVAGYFRSLGYGRGTAVALANLTTARINDALVRQGDTWTYAAEVYKVHLWGHPELPQGAPTSPGIANAICRRMDKRLTGLARKFGADYTRYADDLTFSGGDDLAFHASKFLGLVRQIVQTEGLTLNDKKTRIMRQGRQQRVTGVVVNDKTNVSRRDYDRLKAILHNCVKRGPHGENRDNHPDFRGWLQGKIAHISHIGPERGRKLMALFQQIRW

SEQ ID NO: 5926 - protein, 444 aa, unidentified
  source 1..444: note = Related to JADJRK010000001.1; note = Planctomycetes bacterium
MGFFDWLFGKKKDPYGPRRDPYQQQPKAYGGPVPPPTAQQASAIGLRNIFLSWRRRRSKGPVPAQPDQTIRGGLNPQTGAWVDPGAISSIGGTRQHPDPYYDSAKVRAAGLPDLPHIDAMAEVLRVDRRTLVWLAAKPVPGDSLDSHYTLKEMPKSSGGTRLLMVPLPKLKAVQRALVEKLVNKLPIHEAAHGFRKGRDVLSGASEHVGKDVVICADIRDFFPSFTFRRVSGYFRSLGYGRGTAVALANLTTGRLMDARVQMNGRWQYAAKLKHPETHARYHPELPQGAPTSPGIANAICRRMDKRLTGLARKFGADYTRYADDLTFSGGDDLAFHASKFLGLVRQIVQTEGLTLNDKKTRIMRQGRQQRVTGVVVNDKTNVSRRDYDRLKAILHNCVKRGPHGENRDNHPDFRGWLQGKIAHVSHIGPERGRKLMALFKQIRW

SEQ ID NO: 5927 - protein, 444 aa, unidentified
  source 1..444: note = Related to JACKID010000003.1; note = Planctomycetes bacterium
MGIFDWLFGKKKKDPYGGGGLSKDYGAPKPYSDMPRQYQRPSDPAPPRTFEPDNREINLSFRLGRSKQPVTPLRDQTVGRNAKPGTTNLDHLGGTRDNPDPYTDVMKLRSNGLPEIDSLDALAELVGSTRESLLFLAARSGWDRPAHYSLRQIPKKSGGTRLLMAPMPKLKAVQRALHGKLVQLLPVHEAAHGFRKGRDALSAATPHVGKDVVISVDIENFFPSFTFRRVAGYLRTLGYGRGVAVAIANLTTARLADGKYKEGSRWVPGHNLRHPDMAGRYHPELPQGAPTSPGLANAICLRMDKRLDALARKFGATYTRYADDLTFSGYDDLAKSAGNLLQLIRQIVRTEGLRLNEQKTRIMRGGRQQRVTGVVVNQKTNVPRREYGTLKAILHNCIKHGPAGQNRDNHADFKEHLRGRIAHVSHIGPERGRKLMRMFEQIRW

SEQ ID NO: 5928 - protein, 451 aa, unidentified
  source 1..451: note = Related to JAIOJA010000048.1; note = Planctomycetes bacterium
MGLFDWLFGKKKDPYGTKPGQDYGDKDHAPKPYNDQPKQYQSAQKPYQAPPKSYGAPPPKPGERTEKLSFRQARSNKPVDPLADQTIKTPRRGPNLAHLGGTRESPDPHTDVIKLRNNGMPEIAHLDDLADLVGATRNEIIFLASRPGWGEPSHYTLKELRKKSGATRMLMVPMPRMKAVQRALNAKLISRLPVHEAAHGFRKGRDVLTSASPHVGKDVVISVDIEDFFPSFTFRRVSGYFRNLGYGRGVSVALANLMTARLRDGATKQGNKWKPVAYGSHPDIGKRYHPEIPQGAPTSPGLANAISRRMDKRLHALAQKFAADYTRYADDLTFSGNDELAKSVGNLLQIVRQIVRTEGLRLNEKKTRIMRKGKQQRVTGVVVNKQTNVSRREYDKLKAILHNCIKHGPTGQNRENVPDFREHLRGRIAHVSHIGPERGRKLMRMFEQIRW

SEQ ID NO: 5929 - protein, 452 aa, unidentified
  source 1..452: note = Related to JAGQRE010000003.1; note = Planctomycetes bacterium
MGLFDWLFGKKKKDPYGGSFRQDYDSGRSYNDQPVERYQSKATRRPPAVESPRQKHRTGKLSFRRLRSNQALDPLPDQTLDGRNPNTGQLTGSPLSHLGGTRQAPDPHTDAQRLRNHGLPVVEHLDDLAELLGTARDELVYLSARPTVEEPTHYTLKELPKKSGGTRLLMVPMPRLKSLQRTLNAKLISLLPVHDCVHGFRTGRDVLSSASAHVSKDVLVSMDIEDFFPSFTFRRVAGYFRSLGYGRGTCVALANLTTFRLADASVKRSNRNAWKLASVHHHPDAMRRWHPELPQGAPTSPGIANAIARRMDKRLHALALKFGADYTRYADDLTFSGGEELAKGVGRLLMLARKIVKTEGLALNENKTRIMRKGRQQRVTGVVVNQQTNVSRRDFDKLKAILHNCIKHGPGGQNRESVPDFKEHLRGRIAHISHIGPERGRKLKAMFEQIRW

SEQ ID NO: 5930 - protein, 335 aa, unidentified
  source 1..335: note = Related to JADKGX010000001.1; note = Planctomycetes bacterium
MPALPHLDAMAELLGTPRSELQWLAHRPVQEIAKSHVHYRLFEVRKKSGGTRLLAAPLPRLKAVQHQLLDKLISRLPVHGAAHGFRRGRGILSGANVHVGKDVLVCFDIKDFFPTFSFRRVSGYFRWLGYGRGIANAIALLTTAALHEATTGGKGQWTPAYNTRHPDLVRRHHPELPQGAPTSPGLANAICWRMDKRLSALASKFGGDYTRYADDLTFSGGQDLARHADNLIKLVRKIVRTEGLELNEQKTRVMRKGRQQRVTGVVVNEKTNLSRRDFDKLKAILHNCAKHGPAGQNRADHPDFKGHLQGRVAHAMHIGPERGAKLKAMFDKIVW

SEQ ID NO: 5931 - protein, 449 aa, unidentified
  source 1..449: note = Related to JAHBXZ010000001.1; note = Planctomycetes bacterium
MGLFDWLFGKKRDEYGAGLNRSYPPSQPQQVRPVPSQGGPVPSAGTPQNGKRTSYLSWRRRRSRESVVSVRDQTLGGSVDPQTGRHSEAGAIGNLGGSPRHPDPYFDAGRVASHELPALPHLDSLAALVETPLPELKWLSVMPPFGDKMWGHYCLFEVKKKSGGTRLLAAPLPRLKAVQRRILDKLVSRLPVHGAAHGFRRGRGILSGATVHVGKDVLVCFDIKDFFPSFTFRRVSGFFRWLGYGRGIANAIAALTTVRLTDTNRRREGKWEHPGLAKHPDMLKRRQPELPQGAPTSPGLANAICWRMDKRLSALARKFGGDYTRYADDLTFSGGEDFARHAANLIKLVRKIVRTEGLALNEKKTRVMRKARQQRVTGVVVNEKTNLCRRDFDKLKAILHNCAKHGPAGQNLENHPDFKGHLQGRVAHALHIGPERGARLKALFDKIVW

SEQ ID NO: 5932 - protein, 380 aa, unidentified
  source 1..380: note = Related to JABTUE010000002.1; note = Planctomycetes bacterium
MRDQTLGGARNPQTGAPSVAGAISGVGGTPGHPDPYFDAGRVASHELPALTHLDALAELIETPRNELLWLAVKPPFSNKLWGHYHLFEVRKKSGGTRLLAAPMPRLKAVQRKLLDKLVSRLPVHGAAHGFRRGRGILSGANVHVGKDVLVCLDIKDFFPSFTFRRVSGYFRWLGYGRGIANAIAALTTARLTETNQRQGTTWAAAHTGMHPDMNHRRHPELPQGAPTSPGLANAICWRMDKRLSALARKFGGDYTRYADDLTFSGGQDMARHTDNLIKLVRKIVRSEGLQLNDPKTRVMQKGRQQRVTGVVVNEKTNLSRREFDRLKAILHNCVKHGPAGQNRENHTDFKGHLQGRVAHAMHIGPERGAKLKAIFDKIVW

SEQ ID NO: 5933 - protein, 461 aa, unidentified
  source 1..461: note = Related to JADLBZ010000167.1; note = Planctomycetes bacterium
MGFFDWLFRRKKDDYSKGLQRGYQRPSSHPQPLPPQPATPPQRAGTPPEPAGWGSPPPPPPWKNRTHRSWINRRSRTPPEPQRSEPIPKGRPGELRHLGGTAKHPDPHFKPGRVQELGLPAIPHLDALATLLGTTISKVAGFAVRPPSTAMNWVHYFLHPVPKKSGGTRLLMVPCPELKRLQRRLHEVLVRKLPLHEAAHGFRARRDSLSNATAHAGKAVVICMDIADFFPSFDFRRVCGYLRWAGYGRGVAIALANLTTNSRNECKMRRKPDVQKGAGTLLSAWKCVPKHPDLLAGSLPELPQGSPTSPGLANAICRRMDKRLAALARKFGGAYTRYADDLTFSGGEEMSRRAGRLMQLARKVITSEGLAVNEKKTRVMRRGRHQRVTGVVVNEKPNLPRAEFDRLKAILTNCIRHGPASQNREQHADFRAHLHGCVAYAAHIAPARGGKLVKLFNEIRW

SEQ ID NO: 5934 - protein, 363 aa, unidentified
  source 1..363: note = Related to JADLAK010000089.1; note = Planctomycetes bacterium
MGLGNFFRKLFGGGDDYQRRPGGGDYRKPSVGATHASPAAHGGPPPPPPAASRVHAGDPAYRSPQSGQAINDREITDALKHPYRRKRRSKHPLQGHIHETGSSNWFSPDRTTNPVRLNALGLPVLSTPVELVPLLGEELKRLYDFAYANDRDSEDSHYAYRLVPKKRGGWRFIEAPKPRLKAVQKRIKEIFVDKLPVSNHAHGFLRKRDMVSNATPHVGKACVICADISDFFPTIGFNRVAGFLRSCGYGRMVAAALAMLTTNAHWASADVLIGDEVVKNKDARKRAPEVFKYTGAYRRTPQGAPTSPGLANAICWRMDKRLAGLAKKFNAVYTRYADDLTFSGGVELAGRAGAFLRYVARIV

SEQ ID NO: 5935 - protein, 381 aa, unidentified
  source 1..381: note = Related to JABUFB010000006.1; note = Armatimonadetes bacterium
MGFFSWLRGMLFPPATPLPPGMTRAEARRRRQPDFLPRPRRRRPRRHRYGRPEATFRPAELARFDLPALATVEDLAAALGVTTGKLRWLTWPCRDRTCDHYVRRRVPKKSGGERLLCAPKAETRRAQDWIFHEILARVPVSSAAHGFIRGRSIVSNASAHVGKRVVVSMDLEDFFPSVSMATVVGLFEWLGYSKEVAWHLSMLCTCAYGRRRALPQGSPTSPAISNLICWKMDRRLAGLARKFGATYTRYGDDLTFSGHFQRPDRPGRLIGIARAIISEEGFEVARHKTRIMRHNRRQSVTGLVVNERTGIGRDEVRRLRAILHNCKVHGVESQNREGDELFKERLRGKIALVKMANPDQGAKLLAAFHEVDWGATASPKG

SEQ ID NO: 5936 - protein, 383 aa, unidentified
  source 1..383: note = Related to JADLBO010000333.1; note = Phycisphaerales bacterium
MSWMYFLLAGAAVLLLLALSIPRAEQPAVAEPKSRRGPRRPLPGSRWRTQHPGDSDRLRSLGLPELRDTRDLLRWLRLSLRELVPLADHANRATRDRNNYIEWTVPKRRGGKRVIAAPKKRLKAIQTRILREILDRVPPSAAAHGFVRGRNIVSNAAPHVGRAIVVNFDLVDFFEHVHFPRVMGVFRRLGYSKEVARWLAYLCTHRPLLVAGDGHGPLAAARHAVQGAPTSPAVSNLAVHRLDARLAGLARRFGCTYTRYADDLTFSGDEPFKRSLKRFVPLVRRIVSSERFRLHEGKMRFLRAGRRQEVTGVVVNRKINARREEYDRLKAIIHNARRSGSLESQNREGRPHFRAYLLGRASHIAMLSPERGQRLMREIRRLT

SEQ ID NO: 5937 - protein, 376 aa, unidentified
  source 1..376: note = Related to JACRLV010000179.1; note = Planctomycetes bacterium
MTVLVSIGLAAIVIAFTALIMALSALDRSGAPRSRPLPGARVFPQAGGNIAKLRDLNLPELDSTHDLLRWLRLELVQLLPLANHANRTERSNYVEWAVPKKSGGLRVIAAPKKRLKAIQLRILREILDNVPPSSAAHGFVRGRDVLSNATPHVGKTLVVNFDLVDFFGHIAYPRVVGVFRRIGYGKEVSRWLACLCTHQPKPPRGRGHDREGRRRHAVQGAPSSPAIANLAAWRLDARLCGLARRFQCTYTRYADDLTFSGDEPFKRSLRRFLPLVRRIVAAERFALHRRKMRFARASRRQEVTGVVVNRKTNIRRADFDRLKAILHNARRAGSLESQNREQRPHFRAYLLGLAAHVAHLNPQRGERLRREILALE

SEQ ID NO: 5938 - protein, 416 aa, unidentified
  source 1..416: note = Related to JADJRI010000009.1; note = Planctomycetes bacterium
MLALAPTTWACYGIPLGVFLSVAIFLRYAYRRAGSESEKWDSLGGRRWRCERKGDGVGELRERVTRERVWLPGSKRLPQKPSNAQKLGDLGIPVLKDTADILRWLGVDLKSLLPLANPERRVRPGKSNYVEWTVKKRRAGLRVICSPKPRLKAIQRKIKAEILDRAPVHMAAHGFVRTRSIATNAAGHVGRKLVVNLDLRNFFEHIRIQQVYGVFRHLGYGSEVSRWLARLCTHAPQLGEASRGLDGQWEMQRIRRHAVQGAPTSPALANLACLRLDRRLTGLAKKFDAEYTRYADDLTFSGDERFKRGMKRFLDHLHMIIRLEGFSENYVKRRFMRSGQRQQVTGVVVNQRVNVARDEYDRLKAIIHNARKTGLDAQNRDHRPDFRAYLLGRAAHVAQLNPERGRKLVEAIRAVS

SEQ ID NO: 5939 - protein, 415 aa, unidentified
  source 1..415: note = Related to JAFGQA010000434.1; note = Phycisphaerae bacterium
MSYWAWGILVVVAIVVIFIARVTQRKLPSGFWRPGYSCGFAPGAWKRCDKREGADAGFPRAKDAERLKPLPGFKKHRQAPADRGRLVASGLPVLESTDDVLAWLGLDLRSFLALADPGDRIRPGKTNYVEWTVPKKRHGVRIICSPKPRLKAVQHRIKDEILDHIVPHEAAHGFVIGRSIVTNAEQHVGRALIVNLDLRNFFDYVRYHRVIGVFRWLGYSLQASRSLALLCTHRPNLSALHEDPPEAYVRHVFRHAVQGAPTSPALANLTVYRLDRRVAGLARTFDARYTRYADDLTFSGDEPFKRGMIRFLSLAKQIIAEEGFRLNMRKMRFMRPSQRQQVTGVIVNKKVNVRREDYDQLKAIVHNARKIGSLESQNRENHPDFRAHLLGRAAHIRQLNAARGQSLIDRIHAIA

SEQ ID NO: 5940 - protein, 440 aa, unidentified
  source 1..440: note = Related to JAHLLQ010000003.1; note = unidentified bacterium
MMPALQIGAVAIIGLLVAVFAIVVVLIIVVNIVNQARRGGPGGARLELGTDGLRVSVGGRSRGKILGSRAPIVLGNSPTSSYRERDDKMRQLHPQSIDRQRSLRLPVLEKPDDIVAFLQLRDFRELVHLCDTGRMQGLRNGPGKLRNYTMRTIPKRGGGQRFLFIPKPRLKAAQRRILHEILDKVPVHEAAKGFVRGRDATDHARPHIGKPIIVAHDIADFFPSIRYRRVCSFFMWLGYPHSVARILSLLCTTASLASLARVLPQGAPTSPALANALCYRLDCRLAGLAKKFGATYTRYADDLAFSGGEDFKRGLNRFVPLVETILKSERFHPKKAKRRFMRRGRQQNLVGLNVNDRLSVGRAEIDRLCAILHNASKAGSLESQNRDRIQNFADHLGGRIAWVERFHPGKGAKLRSQWRQLIGAPPAPPPPDLPAAPPPE

SEQ ID NO: 5941 - protein, 436 aa, unidentified
  source 1..436: note = Related to JACRIS010000205.1; note = Candidatus Poribacteria bacterium
MLLLVGILVLAVVAAILIAAAAVKSGGSPQTPHPAQAGGRAPGAVPEASGNRFAAPPGANFTGPFDKKKWLINPDWREADPKAASRYPRAEDRRRQWSLPILDNPEDVVRFLDLGGFGVLVNLCDPNLWSSAAGHSVPNPAANYRFRSIPKRGGGVRFIAAPKPRLKAAQRRILREILDKVPVHDAATAFRPRRSVADHARPHVGRQLILAYDLQDFFPRIRHGRVAGLFRWLGYPASVARCLALLCTCSDSMAVSTQARHLPQGAPTSPAIANLLCFRLDCRLTGLAKKFGASYTRYADDLAFSGDNEFKRGITRFIPLAEKIIRNEGFVLNKQKRRFMRHGRCQRLTGLKVNDSLSVGREESDLVKAILHNAKKAGSLESQNRQQRGDFEAHLRGRISWISQFHPARGAKLLAELDKVTGFQRRAGPPAITPPD

SEQ ID NO: 5942 - protein, 509 aa, unidentified
  source 1..509: note = Related to OCMT01000001.1; note = Pedobacter xixiisoli
MSEKLSRQQIYDRIRATSKDSYVLEEMQRLGFWESSDTPSLSEVLIKREVAANQELNNLLAQDRKYQNQEAMLKEMRKARMKLAKEKREQTKQKNKQKKDDKAEAWKDTQQQQIVYLGEGVSGGLNEIESAIESLQRFNLPVFENLSDFASALGTDLSALRYLLYQRKVSRINHYHAFQIPKKSGGKRTITAPKQKLKRLQLWVLENVLNRIQINHHVHGFIKERSIVSNARPHLQKDIVINVDLKDFFPSISYKRVKGFFHKLGYSEQLSTIFALICTYAETEKVEMDGVNYYVQKGNRFLPQGSPASPAISNLIAYKLDKKIQGLAAKFNFTYTRYADDLTFSTSKENEKNIASLLFFLKKIIEVEGFAIHPAKTHIMRKGNLQKVTGIVVNQKLNVQRVQLRKFRALLHQIEKEGWKDQKWGNAKYLINAIEGYINFVKMVNESKAMVFKAQLTSILAKHGHPPVEQAVVEEESKIIAEEKATEVKIETPLKTDTEAKQYDWWNVL

SEQ ID NO: 5943 - protein, 509 aa, unidentified
  source 1..509: note = Related to NZ_CP042171.1; note = Pedobacter sp.
MSEKLSRQQIYDRIRATSKESYILEEMQRLGFWESSDTPGLPEVLIHRELVANQELNNLLAQDRKYQNQEAMLKEMRKARMKLAKEKREKTRQKNKQKKEDQAANWANIQQQQIIYLGDGVSGGLNQTESDVETLQKFNLPVFNQIVDFASAIGVDLSTLRYLLYQRKVSRINHYHTFEIPKKTGGKRLISAPKSRLKALQLWVLENILNHIEINDHVHGFIKERSIISNAQPHLEKDIVINVDLKDFFPSISYKRVKGLFNKLGYSEQLATVFGLICTYAETEHVEMDGVSYYVQKGNRVLPQGSPASPAISNLIAFKLDKKIKGLASKFNFIYTRYADDLSFSTSKENEKNIASLLFFLKKIIEAEGFTMHPEKTHIMRKGNLQKVTGIVVNEKLNVQRDRLRKFRALLHNIESNGWKDQKWGNAKNLINAVEGYINFVKMVNKSKAAAFKAQLENIVAKHGYPVIVEEVVEVKTETIVAEIVPEVKLENPIKPSSDAKQYDWWNIL

SEQ ID NO: 5944 - protein, 508 aa, unidentified
  source 1..508: note = Related to NZ_SJCY01000003.1; note = Pedobacter changchengzhani
MEEKLSRQQIYDRIRSTSKESYILEEMQRLGFWESSETPSLSELLIKQETTATQELTKLLEQDKKYNDREAMVKEMRKARMKLAKEKRSETKNRNKEKSIDKAQKWKETQERQIIYLGEGVSAGLNHTESDKLNLQKLNLPAFDQVTDLASAIGLSLAELRYLLYQRKVSKINHYHTFEIPKKSGGKRVISAPKSRLKALQLWVLEHVLNNISINDVAHGFIKNRSIVTNATPHLATDIVINVDLKDFFPTINYKRVKGLFHKFGYSEQLATLFALICTYAETEVVEMDGVSYYVQKGNRFLPQGSPASPAISNLIAYRLDKKIQGLASKFNFTYTRYADDLSFSTSNENEKNIASLLFFVKKLIEAEGFTLHPEKTHIMRKGALQKVTGIVVNEKLNIQRSQLQKFRALLHNIETNGWKNQKWGKAKNLINAIEGYINFISMVNAEKGAKFKLQLKDIVAKFGYPIVEQETAEVKIETAKQEIVEPPKSKLETPETASKQFDWWNIL

SEQ ID NO: 5945 - protein, 520 aa, unidentified
  source 1..520: note = Related to QVMJ01000008.1; note = Bacteroides sp.
MSEKSTRQQIYDRIRMTSKDSYILEEMKRLGFWDSSDVPSLSETLIKRESEVNKELTSLLEKDRKYRNQEALLREMRKERMKKAKEKREETKLRNKKKRLDKAAKWKSMQEHQVIYLGKDVSAGLNNTETNEALLNKNNLPVFKSLTDLGQSMQLELSNLRYLLFQRKVSRQTHYYNFEIPKKSGGKRKISAPKRRMKALQLWVLNNILDRIAIGEQAHGFIKQRSIVTNAGPHTGKDIVINIDLKDFFPSIDYKRVKGLFHKLGYSEQMATIFALICTQAETETVAMDGVTYYVQKGKRILPQGSPASPAISNLIAYKLDKKVKGLADKLGFRYTRYADDLSFSTDKGNEKNIASLLHFVGKIIKSEGLTINPEKTHIMRSGAQQKVTGIVVNEKLNVERKQLHNFRALLHNIETNGWNGQKWGRADNVMHSIEGYIHFIKMVNPEKSIRFGEQLTRIVEKHGLPLVEEKTCTKQDIAPKQVVQVEEPLKPEPTIQPGQKQEDSNKKTSSTDDWWNIFS

SEQ ID NO: 5946 - protein, 512 aa, unidentified
  source 1..512: note = Related to JAJQFD010000060.1; note = Bacteroides sp.
MSERSTRQQIYDRIRAAFTKDSYILEEMKRLGFWDSNVDAPTLPERLIQREAEINQELNKLLAQDRKFRNQEAMLAEMRKARMKQAREKRVLTLEKNKQKRLDRAARWRSLQQEQIIYLGKGVSAGLNNTDTNVQSLQKYNLPVFSSLTELANSMNLDLAKLRYLIFQRQVSRHTHYHTFEIPKKSGGKRKISAPKRQMKALQRWILDTILSPISMDEHAHGFIKNRSILTNAQPHTGKEIVINVDLKDFFPSIDFKRVKGLFHKLGYSEQMAIIFALICTQAETETVEMDGVRYYVQRGKRILPQGSPASPAISNLVAYKLDKKVNGLAEKLGFTYTRYADDLSFSTFRRNEKNVARLLHFLGKIIESEGLVMHPDKTQVMRNGGLQKVTGIVVNEKLNVQREQLRKFRALLHNIEVNGWKDQRWGHAHNLIHSIEGYIQFVKMVNPRKGDKFRKQLDQIIKKHGCPPIDETTFYKKTVETSQPSQPITSQTIEPEKHATPKGNDWWNIFS

SEQ ID NO: 5947 - protein, 506 aa, unidentified
  source 1..506: note = Related to NZ_CP034930.1; note = Apibacter raozihei
MSEKLTKQQIYDRIRATSKDSYILEEMQRLGFWEKADSPQIPEIFIENETRLLQELNQLLDKNKQYSDQLSMLKSMRKVRMKNAKEKREVTRQNNKLKALEKAERWLKLQQEQVLFLGKEVSKGLNNTEPNVNSLKKFNLPVFHSVVEFAGYMETDLPSLRYLLYQRKVSTINHYHTFELPKKSGGKRKISAPKSRIKALQLQVLDKILKNIPVNDYVHGFIQGKSIVSNAQPHVNKDIVINMDLKDFFPSIEYKRVKGLFYKLGYSEQISTMLALVCTQSDTYEVNMDGVTYHVQKGARFLPQGSPASPAISNLIAYKLDKRIKGLAERLNFTYTRYADDLSFSTTNENQKNIRQLLFFVNQIVVEEGFKVHPEKTHIMRKGNLQMVTGIVVNRKLNIERKKLRNFRALLHNLNLNGWKDQKWGNAVHLIHAVEGYIRFVKMVNPEKGKEFAEKLATIIKKQGYPEISCQKYNSNDTTEKTTASITKPETNQKEENDSQDWWDIF

SEQ ID NO: 5948 - protein, 504 aa, Flavobacterium sp.
  source 1..504: note = Related to PRDM01000004.1
MSEKLSKQQIYDRIKATSKDSYILEEMQRLGFWQSGGQPTLSEILIKQEAAIEKELNELLAQDRKFSNREAMVLEMRKARMKAAKEKRVETKLKREQKRLDKAENWKLLQEKQILYLGEEVSKGLHYKEAAVNLLEKYNLPVFEDALALAKSMNIDLKALQYLAYNRKVSKINHYHTFELEKKSGGKRKISAPKPKLKEIQTWILENILHQIPYTIEAHGFVKERSIVTNAQPHVNKDIVVNVDLKDFFPTITYKRVKGLFCKLGYSEEVATILSLLCTYSEINETTLDGVTYYVQSGERKLPQGSPASPAISNLIVYKLDKKINGLAQKLNCSYTRYADDMSFSTTQENSSNISKLLYFTKKIIASEGFIVHPEKIHVMRKGMQQKVTGIVVNNKLNIDRNQLRKFRALLHNIEKNGWKDQKWGKAVHVINAIEGYINYVNMVNPEKGTLFKENLKNIIKLHGLPHIEKIIIPEKVTPIAVSLPEEKEETTVKQQSENWWNIF

SEQ ID NO: 5949 - protein, 504 aa, Flavobacterium sp.
  source 1..504: note = Related to NZ_QJHK01000001.1; note = Flavobacterium cheongpyeongense
MSEQLSKQQIYDRIRATSKDSYILEEMQRLGFWQSGAEPTLSEILIKQEAKIEKELNDLLAQDRKYSNRESMILEMRKARMKAAKEKRAETKLNNEKKRREKAENWQLLQQQQILYLGEEVSKGLYYKESNLTLLEKYKLPFYKDALALAKSMQIDLKALQYLAYNRKVSKINHYHTFELEKKSGGKRKISAPKPKLKEIQNWILENILQKIPYTTEAHGFIKERSIVTNAQPHINKDIVVNIDLKDFFPTVTYKRVKGLFHKMGYSEEVAVILGLLCTHSEINETILDGVTYYVQSGERKLPQGSPASPAISNLIVYKMDKKINGLAKKLNFNYTRYADDMSFSTTQENSKNVSRLLYFTKKIIETEGFVIHPDKIHVMRKGIQQKVTGIVVNKKPNIDRNQLRKFRALLHNIEKNGWKDQKWGKAIHVINAIEGYINYVRMVNPEKGIVFRQNLKDIIKQHGLPYVEKISIPEKITPIVIPVPDETKEIPIEKKPENWWDIF

SEQ ID NO: 5950 - protein, 505 aa, Flavobacterium sp.
  source 1..505: note = Related to NZ_JASY01000021.1; note = Flavobacterium chungangense
MSEQLSKQQIYDRIRATSKDSYILEEMQRLGFWQSATEPTLSEILINQEAKIEQELNELLARDRKFSNREAMVLEMRKARMKAAKEKRGETKLNQEKKRLEKAENWKQLQEKQILYLGETVSKGLNSKETDSKILEKYNLPVFEDLLALAKSMQLDLKALQYLAYNRKVSKISHYHTFEVEKKSGGKRKISAPKSKLKEIQTWILENILHKIPHTIEAHGFIKERSIVTNAQPHINKDIVVNIDLKDFFPTVTYKRVKGLFHKIGYSEQIATVLSLLCTYSEMNETSLDGITYYVQSGERKLPQGSPASPAISNMIVYKLDKKINGLAKKLNFSYTRYADDMTFSANEKNSKNVSRLLYYTKKIIESEGFVIHPNKIHIMRKGMQQKVTGVVVNKKLNIDRNELRKFRALLHNIEKNGWQDQKWGKAIRVINAIEGYINYVYMVNPEKGTTLKQNLKNIITKHGQPTITKLSIPEQTVPIPASVPEKKKETIVPDEKPGNWWNIF

SEQ ID NO: 5951 - protein, 504 aa, Flavobacterium sp.
  source 1..504: note = Related to NZ_CP091285.1; note = Flavobacterium jumunjinense
MSEKLSKQQIYDRIKATSKDSYILEEMQRLGFWQSGAEPSLSEILIQQETTIQKELNALLAQDKKFQNKEAMLVEMRKARMKAAKERRVETLQKREQLKIEKAQKWKLTQEKEIIYLGDQVSKGLNIQETNAALLDNYNLPVFEDVLALAQSMQIDLKALQYLAYHRSVSKIHHYHTFEVSKKSGGKRKISTPKPKLKELQNWILENILHKIPHTDEAHGFIKKRSIVTNAKPHLEKDIVINIDLKDFFPTITHKRVKGLFHKMGYSEQIATILSLLCTYSEVDEIDLDGVTYYVQSGERKLPQGAPTSPAISNMIVYKMDKKISGLAKKLNFTYTRYADDMTFSTSNENALNVSRLLYFIKKIITSEGFIIHPDKIHIMRNGMQKKVTGVVVNKKLNVDRLQLRKFRAVLHNINQNGWKDQQWGKAIHLINAVEGYINYVAMVNPEKGAQFKKSLVAIISKHGKPEIEKPTPIEKEKLIVPPVLEEPKTIVEDQKPGNWWNIF

SEQ ID NO: 5952 - protein, 337 aa, unidentified
  source 1..337: note = Related to DQAM01000521.1; note = Dysgonomonas sp.
MSGNLTRQQIYDRIRAASKDSYILEEMQRLGFWDNSDVPTLSETLIRREVEVNKELNELLAKDRKFRNQEAMLSEMRRERMKKAKEKREQTKQKNKQIRLDKAARWKKAQLEQILYLGKGVSEGLNNTDYDAELLQKYNLPVFDSVKALAENMGVELASLRYLLYQRRVSKNTHYYTFEIPKKSGGKRKISAPKHRMKELQMWVLQNVLDNIPHCDTSHGFIREKSILTNAEPHVGKDIVINVDLKDFFPTISYKRVKGLFRNFGYSEQTAIIFALICTQAETETVEMDGVTYYVQKGERFLPQGSPASPAISNIIAYKLDKKVQGLAKKFGFTYTR

SEQ ID NO: 5953 - protein, 463 aa, unidentified
  source 1..463: note = Related to JAFKHH010000015.1; note = Filimonas sp.
MIKKEASLSQELNTLVAKDRKFSNQEAMLKEMRKARMKLAKEKREQTKQKNKQKKLDKATSWQQTQLENIIYLGPGVSAGLNNTVSDSTILQQFGLPVFPNIPSLANAMQVDLATLRYLLYQRKVSRTNHYHVFEVPKKSGGKRRISAPKKQLKKLQLWVLNNVLCHLPNETVAHGFIRQRSIVTNAAPHVGKDIIVNVDLKDFFPTITYARVKGVFKKLGYSEQQAIIFALICTQAETEEVEMDGVKYYVQNGKRCLPQGSPASPAISNIIAYKLDKKIQGLAAKLNFAYTRYADDLTFSTTNDNAKQITKLLYLIKKIVTAEGFEVHPGKTHIMRKGGQQKVTGIVVNKQLNVERSQLRKFRALLHNLQMNGWKDQQWGNAKHLVNAVEGYINFVNMVNPVKAKLYKTQLEKIVATHGYPLVDNTMPKPTVTTVVAEVKETLIPTVAKEKSADKTDWWSVF

SEQ ID NO: 5954 - protein, 510 aa, unidentified
  source 1..510: note = Related to NZ_OEPV01000013.1; note = Dysgonomonas sp.
MTLKLTRQQIYLRIKSSSKDSYVLEEMKRLGFWDKEQPTLPENLIKRETEINKELTELQKLDKKFKNQEALLAEMRKDRMKKAKEKRLQTKEANKKKRLEKAANWKLLQENQIIYLGKDVSYGLDNTKSDVESLTKYKLPIYKNILHLAQSMEISLSEIRYLLYHRKVSKKTHYHTFSIPKKSGGTRIISAPKSKLKRLQYWVLHNILEVIPPGEHAHGFIAGKSIQTNALPHVGKDVVINIDLQNFFPTITFKRIKGLFSKLGYSEQLATIFALICTETPCDKVQMDGVDYYVQNSERVLPQGSPASPAISNLIAWRLDKKIQGLASKYDFTYTRYADDLTFSAAAKAEKNIAGLLYFLEKIIRSEGLTINPEKTSIMRKGRQQRVTGIVVNEKLNIPRDNYRRFRALLHNIEANGWKDQHWSHSKNLPLSVKGYISFVKMINPDKGLKFEEQLTRIISKHGFPEMEVKKTISSIQEQNQSIELEKPIQEVKSSKEDKQTEDNNWWNIL

SEQ ID NO: 5955 - protein, 504 aa, unidentified
  source 1..504: note = Related to JAKVIP010000001.1; note = Chryseobacterium sp.
MSQNLSRQQIYDRIKESSKDSYILEEMKRLGFWQETSTPSLPEQLIKREAVLQQELQELLAKDRKYGNQEAMLREMRKQRMQEAKAKREITKQKSEKKQQEKADYWKNLQQQQIIYLGENVSKGLHKSDSDTAKLLQFSLPVFENVLDFSQKSGFSLSVIKYLAFHRNVSKKSHYHVFEIPKKSGGKRKISAPKPQLRYLQHWILENILNKIPVGEMVHGFAIEKSIVTNAEPHLKKDIVINIDLQDFFPSISYKRVKGLFSKLGYSEQLSTIFALVCTQAHTEEVLLDNVKYFVHKGERFLPQGSPASPAISNIITYKLDKRLQGLSKKYGFTYTRYADDLTFSAAQDNEHNINTLLYFVKQVINHEDFTIHPDKLHIMKRKHQQKVTGIVVNEKLNVERKKLRKFRALLHNIEVNGWQNQTWGKAFHLINAIEGYINFVNMVNPPKALAFKEKLNTIIAKHGKPVVEIRKTAPEIAETIKVSEDQEEIITPAEEKTDWWNIF

SEQ ID NO: 5956 - protein, 504 aa, unidentified
  source 1..504: note = Related to NZ_FQUT01000024.1; note = Chryseobacterium arachidis
MSQNLSRQQIYDRIKASSKDSYILEEMKRLGFWQETSTPSLPEQLIQKEVVLQKELQELLAKDRKYGNQEAMLREMRKKRMQEAKAKREVTKQKNEQKRKDKADHWKKLQQEQIIYVGEDVSKGLHCTDSDVEKLLEFSLPAFESISDFSQKSGFGLPLIKYLAFHRKVSNKTHYHIFEIPKKSGGKRRISAPKPQLRYFQQWILENILNKISVGEVVHGFTAKKSIVTNAELHLGKDIIINIDLQDFFPSISYRRVKGLFSKFGYSEQLSTIFALVCTQAHTEEILLDDVKYFVHKGERFLPQGSPASPAISNIIAYKLDKRLKGLAQKLGFTYTRYADDLTFSANQDKEQNINKLLYFVKQIINDENFTIHPDKLHIMRGRHQQKVTGIVVNEKLNVERKKLRKFRALLHNIEVNGWQNQTWGKAFHLINAVEGYINFVNMVNPVKALVFREKLNTIIAKHGKPIVEVKEVVQEIVETVAVTEIQEEMLAPKEEKTDWWNIF

SEQ ID NO: 5957 - protein, 504 aa, unidentified
  source 1..504: note = Related to NZ_FTOV01000003.1; note = Chryseobacterium gambrini
MSQNLSRQQIYDRIKASSKDSYILEEMKRLGFWQETSTPSLPEQLIQKEVVLQKELQELLAKDRKYGNQEAMLREMRKKRMQEAKAKREVTRQKNEKKRQEKADHWKELQQEQIIYLGENVSKGLHQMQSDTEKLDQFSLPVFENILDFSQKSGFSLSQIRYLAFNRNVSEKSHYHTFEVSKKSGGKRKISAPKPKLKLFQQWILENILNRISVGEVVHGFTPNKSIVTNAAPHLGKDIVINIDLQDFFPSISYKRVKGLFSKFGYSEQLSTIFALICTQANTEEVLLDGVKYFVHKGERFLPQGSPASPAISNSIAYKLDKRLQGLAKKFGFAYTRYADDLTFSAGQNSEQNINRLLYFVKKIIKDENFTIHPDKLHIMRRKHQQKVTGIVVNEKLNVERTKLRKFRALLHNIEVNGWQNQTWGKAYHLINAIEGYINFVNMVNPSKASVFKEKLKTIVAKHGVPFVEVQKVIPDVVELPEVLEPEQDAVTPKEEKTDWWNIF

SEQ ID NO: 5958 - protein, 504 aa, unidentified
  source 1..504: note = Related to NZ_JPRO01000015.1; note = Chryseobacterium luteum
MSQNLSRQQIYDRIKASSKDSYILDEMKRLGFWQETSTPSVPEQLIQREAVLQQELQELLAKDRKYGNQEAMLREMRKKRMNDAKAKREITKQKSEQKRQDKADYWKNLQQQQIIYLGENVSKGLHKSDSDTEKLLQFSLPVFENVLDFSQKSGFGLSVIKYLAFHRSVSKKSHYHVFEIPKKSGGKRKISAPKPQLRHFQHWILENILNKIPVGEVVHGFTIKKSIVTNAESHLKKDIIINIDLQDFFPSISYKRVKGLFSKLGYSEQLSTIFALVCTQAHTEEVLLDDVKYFVHKGERFLPQGSPASPAISNIIAYKLDKRLQGLAAKYGFTYTRYADDLTFSAGQDNEQNINKLLYFVKQVINAEDFTIHPDKLHIMRRKHQQKVTGIVVNEKLNVERKKLRKFRALLHNIEVNGWQNQTWGKAFHLINAVEGYINFVNMVNPSKALVFKEKLSAIIAKHGKPIVEVRTTIPEIAETIKVSEDKEEIIAPKEEKTDWWNIF

SEQ ID NO: 5959 - protein, 504 aa, Flavobacterium sp.
  source 1..504: note = Related to NZ_PJQW01000010.1
MSEQLTRQQLYDRIKSSSKDSYILEEMKRLGFWKSKGQPTLEETLIEKEASLQQELSTLVAKERKFQNQELLLKEIHKQRMQKAKAKREETKEKRAKEKQEKAARWEALRTTEIIYLGEGVSKGLQPTASNGTLLAQYNLPYFDTVAQLADAMGISTKMLTYWAYHRPVSLTSHYYTFEIAKKSGGKRKIAAPKKGLKKLQNWILTSILSKIALQDEVHGFTSKRSIVSNAQPHIGKAVVVNIDLKDFFPSVHYKRVKGLFSTLGYSEQIASILALLCTQAETKQVTLDNVLYYVQQGNRVLPQGSPASPAISNLIAYKLDKRMKGLAKRYGFTYTRYADDLTFSSHTATDKDIAALLHFAKKISTSEDFTVHPDKVHVMKQSRQQKVTGVVVNEKPNIDRNRLRQFRALLHQIKNKGWQDKQWGKSNNVYAAIEGYILFVHMVAPEKALVFRKQLEDIVAIHGTPPPTEVQPVPQPVTEEKTIVPENNSKANEEDTTNWWTTF

SEQ ID NO: 5960 - protein, 501 aa, Flavobacterium sp.
  source 1..501: note = Related to NZ_CP090145.1; note = Flavobacterium sediminilitoris
MSEQLTRQQLYDRIKESSKDGYILEEMKRLGFWKSQGEPTLEETLIQREANLNKELTALVAKERKFQNQEMLLKEIHKQRMQKAKAKREETKQKREQKKQDQAARWQEIQEKEIIYLGDDVSKGLQQTESNKDLLLQNNLPFFENVLHLAESIGTSTKKLTYWCYHRKVSTNSHYYTFEIPKKSGGKRKISAPKTGLKNLQKWLLDTLLSKITMAEEVHGFTANRSIVSNAKSHIGKEVVINIDLKDFFPSIHFKRVKGLFKALGYSEQIASIFALISTQAETKEVLLDGVKYYVQSGNRILPQGSPASPAISNLIAYKLDKRLKGLAQRYGFTYTRYADDLTFSSEENNAKNSAALLYFAKKIITSEDFTVHPDKIHLMKKSRQQKVTGIVVNEKPNIDRNRLRQFRALLHNISCNGWKDQKWGKAKNIYNAIDGYILFIHMVQPEKAIVFRKKLEEIVVKHGKPITKCSTPLPVETQKKEETLSEKENSSSPSNWWSNF

SEQ ID NO: 5961 - protein, 503 aa, unidentified
  source 1..503: note = Related to JAIBAX010000003.1; note = Chitinophagales bacterium
MSKVLSRQEIYDRIRNSSKDYYILEEMKRLGFWKESSVPTVAESLIQREALLNKELQELIAKDKKYQNQELMLREMRKKRMKEAKEKREETKQKNERARIERSEKWKKIHAAQIIYLGDDYSAGLNNSAPINSINALLPTFSDVQDLAAKMGIDLSTLRFLSFHRKVSKNCHYHSYEIKKKSGGTRNISVPKGKLKKAQHWVLQNILNKIEINDSAHGFIKGKSIVTNAQQHVNKAVIINLDLKDFFPTIHYKRVKGLFIKLGYPEQLAIIFSLLCTHAHTEEVFLDGIRYYVQNGERFLPQGSPASPAISNLICYKLDKRLDGLAKKYGAVYSRYADDITFSLDDNENISKLLFYAHKIIEGEDLQINKAKTHIMRKNAQQKVTGIVVNQQPTVERRILRKFRALLHNILKNGWQEQKWGNGSNLLHSIEGYINYIHMVHPTKAQSYRVSLKTILEKHGTPEIKVNIPINIVPPPQIASTEEDPKDSAPEQKKEETDWWNLF

SEQ ID NO: 5962 - protein, 503 aa, Flavobacterium sp.
  source 1..503: note = Related to NC_016001.1; note = Flavobacterium branchiophilum
MALTRQQIYDRIKSSSKDSYILEEMKRIGFWENSEIPSVPEQLIAEETALQKTLNQLLAQDKKYSDQEAMLRAMRKQRMQESKQKRDINKQKRAQKIIEKSEKWQQVNQKQMIYLGESVSKGLQNEQQNPILLSKFNLDFFENSYDFSVQSGFDLPTLKYLAYNRKVSKSTHYHVFEIPKKSGGTRKITAPKTKLKAFQLWILEHILNKIVVAPMVHGFVQNRSIVSNANQHVQKNVVLNLDLKDFFPSISYKRVKGLFRIFGYSESMATLLALACTTCDIEKIQIDGETYYVQKGPRYLPQGSPASPAISNLIAYKLDKRLHGLASKYGFTYTRYADDLTFSGNEEAAQYMGKFLCFVKKTIKSEDFEVNNDKTSIMRPSNQQKVTGIVVNKKLNIDRKRLRQFRALLHNIDQNGWQNQTWGKAIHLINAVEGYIQFVKMVDAAKGAKFHQTLLNIIAKHGRPIIESKIMQVSKAAIPEAPIVEKTISKATTDKQTDWWNLF

SEQ ID NO: 5963 - protein, 487 aa, unidentified
  source 1..487: note = Related to JAJQES010000108.1; note = Tannerellaceae bacterium
MGERATRENTPGRSVPVEKQPLEEMKRLGFWEQPLPAFPEELNQREDDLARELNELLAKTGKENKEKGEMLLRQRARQKKLEKAARRKLARPETIPYLGEEVSTGLRETETNTALLQKYNLPVCTSFRELGEQMNCDLPTLQYLLYNRKVTSSTHYYTFKFPKKSGEMRTISAPKQKLKRLQYWVTENILNRLPVCDQVHGFAKERSILTNASPHLGKDIVVNLDLKDFFPSISYKRVKGLFRKFGYSEQLSILLALICTEAQTRQVELNGQTWYVQTNRRSLPQGSPASPAISNLIAYTLDKRLEGVAKKYNFTYTRYADDLTFSAYKEQERNITKLLYFIRKVIREERFTVHPEKTQIMRKNRQQRVTGIVVNQRPNIDRQQLRRFRALLHHIEVNGWQQQQWGHPSGYLPHSIEGYINFIRMVHPHKAKKFEEQLMKIVFKHGYPAGPASSPETRIDKSGEKKEPDSPSTSSFEVDWWGLPLTT

SEQ ID NO: 5964 - protein, 499 aa, unidentified
  source 1..499: note = Related to LJIE01000001.1; note = bacterium 336/3
MAEQLTRQQLYDRIRETSKDAYILEEMKRLGFWENSSQPTLSEALIQREATLQKELNELLDKQRKYNSREQLLRDMRKQKLKLSKEKQAETKKRQEEKRQLKAQKWVESKQKEIVYLGESVSGGLNEKTSNQALLAKYQLSDFASVLGLAEAMKVSLAQLRFLAFHRAVSKTSHYHFYSVPKKSGGKRLISAPKPLLKKCQHWILESILYKITPSEHVHGFVPKKSIVTNAKPHLQKDIVVNLDLKDFFPSISYKRVKGLFVNLGYSEQLATVLALISTHYEMDKVNVDGDVYYVQKGERVLPQGSPASPAITTLIAYTMDRRLQGLAKKLGFTYTRYADDLTFSTDASNEGNIATLLYFTKQVVEDEGFTVHPDKTHVMRKGSQQKVTGVVVNDKLGVDRTILRKFRAFLHQVSQFGWGKNKWGNGDNPRQSALAFASFVMMVDKEKGTKLMNQIKAIADSSVVTEKKKTVSQEPQKQVPEEKTNTSTPASQDWWDIF

SEQ ID NO: 5965 - protein, 532 aa, unidentified
  source 1..532: note = Related to NC_018018.1; note = Bernardetia litoralis
MSMTRQELYDRIRTTSKEAYILEEMKRLGFWGDSEKPTLAEELINKQARLQKELSELNQKQRQYNSREAMLKEVRLERMKASKEKQKETKARNEEKVRLKAEKWAETQKTNIIYLGQEVSEGLNNTTSDKEKLEKLKLPYFENIVEFSEKINKPISELRFLAFQRSVSKVNQYHNYYVPKKSGGKRLISAPKPKLKHTQNWIKTNVLDKIEINENVHGFVKERSILTNAEPHQNKNLVISLDLKDFFPSISYKRVKGLFLKFGYSEQLSTLFGLLTTHNETDKLNVDGEIYYAQKVDKETGKTNRFLPQGSPASPAITTLIAYKMDKRLEGLAKKMGFTYTRYADDLTFSSDLDLKKDTKATNKIIGSLLYFVKKVVTSEGFEIHPDKTHIMRKGNQQKVTGIIVNQNTENKLGIDRQTLRKFRAFLHQTAKTGWKVDKNAKDKKWGIHPDPKQAALGFASFIKMVDAEKGEKFIQKIKSIPTAEDYLQTDDTTLVSQKTEEKTLKQVETKSKESEQEIEKQSDESDWWDIF

SEQ ID NO: 5966 - protein, 511 aa, unidentified
  source 1..511: note = Related to NZ_AUMD01000019.1; note = Eisenibacter elegans
MSQHPTRQQLYDRIRASSKDSVILAEMKRLGFWEDSPQPTLPETLIAREATLQKELNDLLTTERRFQNSEQVLVDMRKDRMRKSKEKQAENKARRLEERRQKAEQWQQTKTQDIIYLGEGVSAGLQAAPSDLERLQSLGLPIFENVLDLAQQMGIPLPKLRFLAFERKIAKVCHYSYFQLPKKSGGLRRIAAPKPLLKQAQQWIMTHILYQIPNKDCVHGFVPERSILSNAQPHLGQEVVINLDLKDFFPSISYARVKGLFVKLGYSEQLATILALLCTHAETKAVTVDGEQFFVQEGERRLVQGSPASPALSNLIAHKLDKRLEGLAAKYGFTYTRYADDLTFSAPKADEPAISALLAYVKRVVREEGFALHPDKTHLMRKGAQHKVTGVVVNEKPSVDRKQLHKFRALLHQIDQTGWEGKQWGNTPNIVHSVQGYANFVAMVNPEKGQKFVAMVKALIAKHPAPPLVLRYTPAPEQPPADETHSTQPAAPTSPASPQKPESDWWDVLDL

SEQ ID NO: 5967 - protein, 504 aa, unidentified
  source 1..504: note = Related to RDZE01000015.1; note = Cytophagales bacterium
MSTQLTRQQLYDRIRTTSKDQFVLEEMQRLGFWEKKEQPTLSETLIKREADLQKELNELLTKQNKYNKREAMLLEMRKAKMKASKEKQAATKLRNEQKRKDKAKKWQESQQNDIVYLGEGVSAALIQKENNLENLQKYELPLFENMLQLAEAMQIPLSKLRFLAYHRKVSKITHYNHFTIPKKSGGLRTISAPMPDLKKVQQWILEHILYKIKPKAQVHGFVPERSILSNATPHIGKDIVINLDLKDFFPSISYKRVKGLFVKLGYSEQIALTLALLCTYHETEKLNVDNEIYYLHKGERYLPQGSPASPAITTLIAHKMDSRLQGLATKYGFTYTRYADDLTFSANKDAEENINKMLLFVKKVIESEDFELHPDKTKIMRKGSQQKVTGIVVNQKPNVDRQQFRKFRALLHQIEQTGWENKKWGNKDAHIVYAVKGFAEFVHMINPTKGEQLKKKIAEILTKYPATVPAKPQKEVASQTKEETPNIQTNTNIQPTEWWDIFEN

SEQ ID NO: 5968 - protein, 459 aa, unidentified
  source 1..459: note = Related to JAAAKT010000013.1; note = Emticicia sp.
MANQPSREDIRKRVAESTKDAVILEEMKRFGFWKEEFSPELEDILQKQKETETELNTLVRKQTRYRNPETLRKEMLKERMKASKQKRQEAKERKEQKRLARAETWKKRKETEVLYLGEDVSSRLSETEPNLEFLAKWNLPNIENPLALANALSLELSQLRFLTYNRKVSLVNHYKRFYIPKKMGGKRLISAPMPLIKSAQLWILNNILYLIPHTDQAHGFIPQRSIVSNAAQHVGKELVLNLDLKDFFPSISFSRVKGLFQSFGYSGQISTLLALLCTEAEVEQVAIDGKKYFVSIGERTLPQGSPCSPAISNLIAYKLDRRLQGIANKWGFVYTRYADDLSFSCGSDNLDNFQQLLWSVQEVVKSEGFTVHPEKIHIMRKGSRQEVTGLIVNRQIGIERKELHRFRALLQQIEKNGPAGKTWNGNPNLENSMRGYASFVMMVKPELGIRFMKKIDSIF

SEQ ID NO: 5969 - protein, 506 aa, unidentified
  source 1..506: note = Related to JAFMYU010000001.1; note = Fibrella aquatilis
MTRQEIYNRIQELGSKQSYIAAEMTRLGFWNQGGEPTIPAELTQQATALQTELNQLMERQRRYQSRQAMLQEMRQARMAAAKQRRLETKVRREAARLARAETWKNKLATTVPYLGDEVSAGLKNTTSDPARLAYFGLPHFDSPLALAQAMSLPLSELRFLAYNRAVSTVSHYKRFYLAKKSGGKRLISAPMPRLKKAQLWVLEHILHKVQPTEFAHGFVTDRSILTNATPHVGQDVVINVDLKNFFPTIGYPRVKGLLTKLGYSEAIATILALLCTEPDTEAVQMDGKTYHVGNGERTLPQGAPTSPAITNLLAYRLDRRLQGMAARFGYAYTRYADDLTFSATGAAAGKANQVLWAVEQIVQSEGFTVHPDKVTVMRKGDQQRVTGIVVNQKPSIDRATLRQFRALLHQIGQSGWESKTWGNPNPTADIQNVVIGYANFVMMVKPDLGRQLRATIAGLISKPPTSSSASSMPTIADDLSPVSAPITTPLVPPTAPPASKDWWDVL

SEQ ID NO: 5970 - protein, 499 aa, unidentified
  source 1..499: note = Related to NC_020054.1; note = Fibrella aestuarina
MTRQEIQKRIEELGSKQQFIIAEMTRLGFWTQHGEPIPAELVAQDAALQKELSQLLDRQRRFQSRDAMLKEMRQARMAAAKQRRIETKQRREAARKARADAWQATLATDVPYLGEGTPAALANHTADPDRLRQVGLPQFESPLALARAMGLSLSELRFLAYNRAVSTVSHYKRFHLIKKSGGKRLISAPMPRLKKAQLWVLENILSKVQPTEQAHGFRAERSILTNAQPHVGKDVVINIDLKNFFPTVSYGRVKGLLAKLGYSEALATVLALLCTEPDTQALQVDGKTYYVGNGSRYLPQGAPTSPALTNLLAYRLDRRLNGLAQAFGYVYTRYADDLTFSASGSGAGKANQLIWAVEQIVQGEGFVVHPDKISVRRKGQQQRVTGIVVNQKASIDRATLRRFRALLHQIGQTGWEGKTWGNPAPEADIQQVVLGYAHFVQMVKPELGRSLVASIRALIQSRPDAALAQPVEPVPATVSSTATNSAPVARPVKEWWDVL

SEQ ID NO: 5971 - protein, 349 aa, unidentified
  source 1..349: note = Related to SEBH01000648.1; note = Cytophagaceae bacterium
HRPVSTVNHYKSFYLPKKSGGKRLISAPMPRLKKAQLWILEHLLQKITPTEQAHGFTTGRSIVSNAQPHVGQEVVINVDLKDFFPTISFPRVKGLFMALGFSEQLATLLALLCTELPTYAVSLDGRTYYVATDERRLPQGAPTSPAISNLIAYRLDRRLQGMATRFGYAYTRYADDLTFSASDTAVKQVEQVLWSVNQIVESEGFTVHPDKISVMRKGSQQRVTGVVVNDKPGVDRATLRRFRALLHQISLTGWAGKSWGGTATNHQADLRNVVMGYANFVAMVKPEQGQALREQINKLIGGTNLSVNPLLSEQPAPDNAPVVTGESTLGTLSQKPPILSQNKDWWDVL

SEQ ID NO: 5972 - protein, 495 aa, unidentified
  source 1..495: note = Related to NZ_PVTE01000003.1; note = Spirosoma oryzae
MTRQEIYDRIRGLGSKDSFVLAEMKRLGFWEPTTDMPGLPEQLIERQGQLQRELNELLEKQRRYENRKAMLAEMRKTRMAESKRKQQETKQRNEQKRQERAAQWKRQQEQTIVYLGENVSGGLQSGTANNDQLRRFGLPDFDSPLALAQAVGVTLSRLRFLAYDRPVSTVSHYKRFYLLKKSGGKRLISAPMPYLKTVQYWILEHILRKIQPTEHAHGFTIDRSIVTNAQPHTGKDVVVNLDLKNFFPSISYRRVKGLFVMIGYAETIATILALLCTEPDSDMIELDGKTYYVAKGSRVLPQGAPTSPALTNMIAYRLDHRLRGVANKFGYIYTRYADDLTFSASDEAAGRVGQLLWSIRQVIDGEGFVLHPDKLQVMRKGSQQRVTGLVVNDQLGIDRTTLRKFRALLHQIEQSGWQGKTWGKGQIQNTVLGYANFVAMVKPEQGKRLVETVKRLMLPAVESAGELPRQEPSTNGQINQPPKDTNLSTDWWDVL

SEQ ID NO: 5973 - protein, 521 aa, unidentified
  source 1..521: note = Related to JAGHZS010000007.1; note = Chitinophaga sp.
MSLTRQQLYDQIRASSKEEYILEEMTRLGFWPNNVGQPAPAVTLIRKEGELNRQLNELLAEKQKYRNKRKMLEDMRKDRMAKAKLKRAETKKRREEERVKRAAEWAATKNLQIVYLGEDVSAGLNKVTPDTAQLTRFGLPVLSDAVALANAMNITIGKLRYLSFSRKIGHHTHYQRFQVPKKSGGTRVISAPMPQLKAAQHWILENILYKIKNNDAAHGFVPGKSIVTNATPHIGQDIVINLDLKDFFPSVAYKRVKGLFCKLGYAEQVATILGLICTEPEVDEVLLDGRKYYVAKTERHLPQGAPTSPAITNLICYKLDQRFAGLANKYGYAYTRYADDMTFSAKGDAADKAGQLLRAIKMFVKEEGFTLHPEKLKVMRRGDKQEVTGIVVNEKLSLDRTTLRKFRALLHQIGHTGLSGKSWGKGKNIISSMEGYANFVYMVKPDLGAKLKSSLTALLQREDIKAEARSIWAGEQAPTTPSVAGVHINTTPQATPAAEVPPVNPSTDKPAAPDKPWWDVL

SEQ ID NO: 5974 - protein, 530 aa, unidentified
  source 1..530: note = Related to NZ_JAGTXB010000010.1; note = Chitinophaga hostae
MSLTRQQLYDQIRASSKEEYILEEMTRLGFWPKSVGQPTPAVTLIRKEGELRRSLNELIAEKQRYRNKRAMLEDMRKARMAKAKQKRAETKKRREEERVKRAAEWAAEKNLHIVYLGEGVSAGLNKVNPDTAQLEKFGLPVWADAIALANAMGITIGKLRYLSFNRKVGHHTHYQRFQIPKKSGGTRVISAPMPQLKAAQHWILENILYKIKNNEAAHGFVPGKSIVTNAAPHIGQDIVINIDLRDFFPSIEYKRVKGLFCKLGYAEQVATILALICTEPEVDELLLDGRKYYVTKTARHLPQGAPTSPAITNLICYKLDRRFAGLATKYGYAYTRYADDMTFSAKGPAAGKAGQLLRAVKMFVKEEGFTIHPDKLKIMRRGDRREVTGIVVNEKLSLDRTTLRKFRALLHQVGQTGLANKTWGKGKNIISSMEGYANFVYMVKPELGAKLKATLAALLQRADIKAEARSIWTGEALPQKESNTAISGNTETITTPVSTATNGNGAASAARGNTGTDKPAAADKPWWDVL

SEQ ID NO: 5975 - protein, 509 aa, unidentified
  source 1..509: note = Related to NZ_FOJG01000002.1; note = Chitinophaga arvensicola
MSLTRQLLYDRIRASSKEELILQEMTRLGFWAENLAQPSPAASLIQQETEVRRQLNDLINERQKYRNKRMMLEDMRKARMAKAKLKREETKQRRETARKERAAAWAITKDQQIVYLGEEVSAGLNKVVPDLVQLQKFGLPVFADANALATAMGITLGKLRYLSFNRKVGHHTHYQRFQIPKKSGGSRTISAPMPQLKAAQHWILENILYKIKNDVAAHGFVPGKSIVTNAAPHTGQDIVINIDLRDFFPSIAYKRVKGLFCKLGYAEQVATILALICTEPEVDEILLDGRKYYVAKTARHLPQGAPTSPAITNLICFKLDRRFTGLAEKYGYAYTRYADDMTFSAKGPAADKAGQLLRAVKMFVKEEGFTIHPDKLKVMRKGDKHEVTGIVVNEKLSLDRTTLRKFRALLHQVEKTGLANKSWGKGKNIISSMEGYANFVYMVKPELGAKLKATLAALLQRPDIKSEARGLWTGEVKEKKVSDTPVAPTAPVNPPPSSASSEKPWWDVL

SEQ ID NO: 5976 - protein, 535 aa, unidentified
  source 1..535: note = Related to NZ_VIWO01000002.1; note = Chitinophaga polysaccharea
MAESLTRQQLYDRIRASSKEEFILEEMIRLGFWARNTAQPSPSETLIRREGELRRELNDLLAEKQRYQNKVKMLADMRKDRMAKSKLKIAETKKRREEERKARAEAWAVAKDQQILYLGEEVSAGLNKVNPDTAQLAKFNLPVFADATALANAMGITLGKLRYLAFNRKVGHHTHYQRFQVPKKSGGTRVISAPMPQLKAAQHWILEHILYKVSHSNAAHGFVPGKSIVTNAAPHVGQDIVINIDLRDFFPSIAYKRVKGLFCKLGYAEQVATILALICTEPEVDEVLLDGRKYYVAKTARHLPQGAPTSPALTNLICFKLDRRFAGLAEKYGYAYTRYADDMTFSAKGAAADKAGQLLRAVKMFVKEEGFTIHPDKLQVMRKGDRHTVTGIVVNEKLSIDRTTLRKFRALLHNIEKTGLSGKRWGKGKNIISSIEGYANFVYMVKPEWGARLKEKLAALLQRPDIKAEAHAIWTGNSSQPVTTEAISASSHPAGYTSSDTTTPAATTDSSTTIPGRITPPEPPAATDKPWWDVV

SEQ ID NO: 5977 - protein, 507 aa, unidentified
  source 1..507: note = Related to NZ_FRBL01000014.1; note = Chitinophaga jiangningensis
MPEGLTRQQLYDRIRETSKEEYILEEMVRLGFWSRDTDKPSIPEALIKQEGELNRQLNQLLSERSKYRDKKRLLVEMRKQRMAQAKAKRAETKKRNEQKRIERAAAWAEKKQQDIIYLGENVSAGLNKNQSDTAQLQKYNLPVWHSATDLAAAMQLPLGKLRFLAFNRSVAHQTHYQRFAIPKKSGGTRIISAPMPQLKAAQHWILENVLYKVSNSGSANGFVPGKSIVTNAIPHVGKDLVINIDLKDFFPSVAYNRVKGLFCKLGYSEQVATILGLICTEPEVDEVLLDGRKYFVAKTARVLPQGAPTSPAITNLICYKMDRRFEGLSAKYGYAYTRYADDMTFSAKGEAAAKAGQLLWAVKKVVAEEGFVLHPDKLKVMRKGDRHEVTGIVVNQKLSIDRTTLRKFRALLHQVELTGLAGKSWGKGNIIASMEGYANFVMMVKPEQGRALKTKLAAILSRADIKAEAQAMWKNEPPAEQPAMPPANPVAPPAPEKKTDDPWWKVV

SEQ ID NO: 5978 - protein, 512 aa, unidentified
  source 1..512: note = Related to NZ_QLMA01000005.1; note = Chitinophaga dinghuensis
MPEGLTRQQLYDRIRQSSKEEFILEEMTRLGFWARDVNKPSVPETLIQQEGGLQRQLNELLQEKAKYRNKQRLLTDMRKERMAKAKAKRAETKQRNEQKRIERAAAWAEKKQQDIIYLGEAVSAGLNKNTSNEAQLQHFGLPVYHNAQQLADAMQLALGKLRFLAFNRSVATTTHYQRFQLPKKSGGVRTISAPMPQLKAAQHWILENILYKVSNSDAANGFVRGRSIVTNAQPHIGKDVVVNIDLKDFFPGIAYKRVKGLFCKLGYSEQVATILGLICTEPEVDEIILDGRKYFVAKTDRVLPQGAPTSPAITNLICFKMDRRFEGLSKKYGYAYTRYADDMTFSAKGDAAAKVGQLLWAVKKVVAEEGFVLHPDKLKVMRKGDRHEVTGIVVNEKLSIDRTTLRKFRALLHNVELTGLSGKKWGKGSIIASMEGYANFVAMVKPEQGKKLKAQLAALFSRADIKAEAQAIWKNEEQPQQDSSVSPQTPNTQDTPTPPKPSGPEKPWWKVV

SEQ ID NO: 5979 - protein, 514 aa, unidentified
  source 1..514: note = Related to VWWO01000002.1; note = Chitinophaga sp.
MPEGLTRQQLYDKIRESSKEEYILEEMVRLGFWQRDTEKPSVPEVLIKQEGALNKELNQLLQEKYRYRNKQLMLTEMRKARMARAKAKRAETKKRNEEKRIARAAAWAEQKQQDIVYLGENVSAGLNKKVSDEAQLRKFNLPVWHTAQDLANAMQLSLGKLRFLAFNRTVGHQTHYQRFQIPKKSGGTRVISAPMPQLKAAQHWILENVLYKITNSTSANGFVPGKSIVTNAIPHIGKDVVVNIDLKDFFPSIAYKRVKGMFCKLGYSEQVATILGLICTEPDVDEVMLDNRKFFVAKTERRLPQGAPTSPAITNIICFKLDRRFEGLSAKYGYAYTRYADDMTFSAKGEPAAKIGQLLWAAKKIVAEEGFVLHPDKLKVMRKGDRHEVTGIVVNEKLSLDRTTLRKFRALLHQIELTGLANKTWGKGNIISSMEGYANFVAMVKPEQGTKLKNQLNALLQRNDIKAEAQAMWKGEEVASAKPAEHLPEKENKKDNTSNNNKTPDNDKPWWNIL

SEQ ID NO: 5980 - protein, 515 aa, unidentified
  source 1..515: note = Related to NZ_PYAW01000007.1; note = Chitinophaga niastensis
MAEGLTRQQLYDRIRASSKEELILEEMTRLGFWANNTSQPSPSESLIRQEGVLRRELDELIKEKQKYRNKEKMLQDMRKERMAKAKLKRAETKKRREEERKARAIAWAAEKNQSIVYLGEDVSAGLNKVVSNTEQLAKFGLPVWHDAVALANAMGVTLGKLRYLSFNRKVGHHTHYQRFQIPKKSGGTRVISAPMPQLKAAQHWILENILYKIKNSEAAHGFVPGKSIVTNAAPHVGQDIVINIDLRDFFPSIAYKRVKGLFCKLGYSEQVATILGLICTEPEVEEITLDNRKYYVAATARHLPQGAPTSPAITNLICYKLDKRFEGLSAKYGYAYTRYADDMTFSAKGAAADKAGQLLWAIKLVVKEEGFTIHPDKLKVMRKGDKREVTGIVVNDKLSLDRVTLRKFRALLHQISTTGLSNKSWGKGKNIISSIEGYANYVYMVKPEQGAKLKATLAALLQREDIKAASRSIWTGETLAAAPVVTTVTAETPASKPIIKETPPASKDKPWWDVL

SEQ ID NO: 5981 - protein, 526 aa, unidentified
  source 1..526: note = Related to NZ_CP051205.1; note = Chitinophaga oryzae
MAEGLTRQQLYDRIRASSKEEFILEEMTRLGFWAKNTSQPSLPETLIRREGELRRELNELLAEKQKYRNKERMLADMRKERMAKAKLKRAETKKRNEEKRKARAAAWAEKKNLDITYLGEEVSAGLNKVTPDEAQLAKFGLPVFKDATALAAAMGVTLGKLRFLAFNRQVANTSHYQRFEIPKKSGGTRVISAPMPQLKAAQHWILENILYKINNSAAAHGFVPGKSIVTNAVPHVGQDIVINIDLRDFFPSVPYKRVKGLFCKLGYAEQVATILGLLCTEPEVDEILLDNRKYYVAKTERHLPQGAPTSPALTNLICFKLDRRFEGLAAKYGYAYTRYADDMTFSAKGDAADKAGQVLWAVKQVVKEEGFTIHPDKLKVMRRGDKREVTGIVVNEKISLDRETLRKFRALLHQISKTGLAGKRWGKGRNIISSMEGFANYVYMVKPEQGAKLKETLAALLQREDIKAEAHNLWTTGTTEGTAAETTTETPSAPQSSAPQHPEGVHIAKDTPTATNKPDKPWWDVL

SEQ ID NO: 5982 - protein, 525 aa, unidentified
  source 1..525: note = Related to NZ_QFFJ01000003.1; note = Chitinophaga flava
MAEGLTRQQLYDRIRASSKEEYILEEMTRLGFWAQNSSQPSLPETLIRKEGELRRELNELLAERQKYRNKEKMLADMRKERMAKAKQKRAETKKRNEEERIARAAAWAEKKQQDILYLGEEVSAGLNKVTPDEAQLTKFGLPVFKDATALANAMGITLGKLRFLAFNRKVSNSSHYQRFQIPKKSGGTRVISAPMPQLKAAQHWILENILYKIKNSDAAHGFVPGKSIVTNAAPHIGQDIVINIDLRDFFPSIPYKRVKGLFCKLGYAEQVASILGLICTEPEVDEILLDNRRYFVAKTERHLPQGAPTSPAITNLICFKLDRRFEGLAAKYGYAYTRYADDMTFSAKAAVADKAGQVLWAIKQVVKEEGFTIHPDKLKVMRKGDKREVTGIVVNEKLSLDRETLRRFRALLHQISKTGLAGKSWGKGKNIISSIEGYANYVYMVKPEQGAKLKATLTALLQREDIKAQARSLWTGEQAPAQQQAGPASQADTTKTTDTTATTQAPPASNPSSSAKTEKPWWDIL

SEQ ID NO: 5983 - protein, 517 aa, unidentified
  source 1..517: note = Related to NZ_RIAR02000001.1; note = Chitinophaga solisilvae
MAEGLTRQQLYDRIRASSKEEYILEEMTRLGFWARNTTQPSPSETLIRKEGELRRELNELLAEKQKYRNRERMLADMRKERMQKAKDKRAETKKRNEEKRREKAAAWVVQKNLNIVYLGEEVSAGLNKNVSDEAQLKKFCLPVFNDAVALANAMGITIGKLRFLAFNRKVATGTHYQRFAIPKKSGGTRVISAPMPQLKAAQHWILEHILYKIENGKAAHGFVPGKSIVTNAAPHVGQDLVINMDLRDFFPSIPYKRVKGLFCKLGYSEQVATILALICTEPEVDEVMLDNRKYYVAKTDRHLPQGAPTSPAITNLICFKLDRRFEGLAAKYGYVYTRYADDMTFSVKGDAADKAGQVIWAVKQVVKEEGFTLHPDKLKVMRKGDKREVTGIVVNEKLSIDRDTLHKFRALLHQISKTGLAGKHWGKGNIISSMEGFANYVYMVKPEQGAKLKATLATLLQREDIKAEARSIWTGEATAVAAAPADTIADTTASVTPVTPKPEGKATGAEKPWWDIL

SEQ ID NO: 5984 - protein, 478 aa, unidentified
  source 1..478: note = Related to JACMJX010000348.1; note = Chitinophagaceae bacterium
MAQGLTRQQLYDKIRLSSKDEVILQEMTRLGFWSKDSASASPSALLIEREDTLRKELTDLLKEKQKYANQEKLLAEMRAVRMEKALKKRQETKLRKEEQRKERAEEWAEQKNNSILYLGENVSAGLHKIVSDVTQLQKYGLPVWHDVNAMAAEMGLGLGEIRFLAFNRKVAHCSHYQHFYLPKKSGGKRLISAPMPRLKAVQNWILHNILYRIKNSDAAHGFVPGRSIVTNATPHVGKELVINIDLRDFFPSVAYKRVKGLFVKLGYSEQLATILGLLCTEPDVDEIVLDNRKYYVAKTERHLPQGAQSSPAITNLICYKLDKRFEGLAARHGYSYTRYADDMTFSANGEGIEKAGQLMAFVKKVIKEEGFTIHPEKLRVMRKGDKREVTGVVVNDKLSIDRETLRKFRALLHQISKTGLSQKQWGNGNIVSSLQGYANYVAMVKPGAGAKLKASINELFNRPEIKREAVSILGDKKE

SEQ ID NO: 5985 - protein, 510 aa, unidentified
  source 1..510: note = Related to NZ_CP077769.1; note = Chitinophaga sp.
MAEGLTRQQLYDRIRSSSKEEYILNEMVRLGFWAHQTATPTLPESILNRERELRKELGDLLAEKQKYRDKERLLAEMRKQRMEAAKQKRAATKQRREEERQSRAAAWTLQKAHSVVYLGEDVSAGLNKAVSDTVQLAKYGLPLFHNGEALATAMGVSLGTLRFLAFNRNVGYISHYKRFKLPKKSGGHRTISAPMPQLKAAQHWILEHILYKVPHSPAAHGFVPERSIVTNAAPHVGQDIVINIDLKDFFPSIAYKRVKGLFCKLGYSEQVATILGLLCTEPEVDEVSLDNRTYYVAKTARHLPQGAPTSPAITNLICFKLDRRFEGLAARLGYTYTRYADDMTFSTKGAAAEKPGQLIWSVKQVVKEEGFTIHPDKLKVMRKGDQRAVTGIVVNEQLSLDRATLRKFRALLHQISQTGLANKSWGKGNIISSMEGYANYVAMVKPALGAQFKQTLANLLARDDIKQAARAMWTGTPVSPVPIPAPTPTASPAKEETPPPAGDKPWWDVL

SEQ ID NO: 5986 - protein, 501 aa, unidentified
  source 1..501: note = Related to NZ_JAICCF010000004.1; note = Chitinophaga rhizophila
MAEGLTRQQLYDRIRASSKEEFILEEMTRLGFWTKNTAMPSPSEMLIRREGELRRELNKLMEEKHRYRHREQMLNEIRKQRMEAAKAKRAATKLRNEEKRKEKAAKWAIEKEKNIVYLGEEVSAGLNKVLSDEAKLRAAGLPIYHDGAALAEAMGITLGKLRFLSFDRKVATVTHYKRFYIPKKSGGRRLISAPMPQLKAAQYWILENILYKVKHSDAAHGFVPGKSIVTNAANHVGQDIVINIDLRDFFPTVAYNRVKGMFCNLGYSEQVSTILGLLCTEPEMEPVNLDGKDYHVATSARHLPQGAPCSPAITNIICYKLDRRFEGLARRFNYTYTRYADDMTFSAKEAAANDAGKLIWGVKQVVKEEGFVVHPDKLKVMRKGDKREVTGVVVNEKLSIDRETLRKFRALLHQISVSGIEGKQWGKGNIVSSIEGYINYVQMVKPEAGQQLKTKWQVLLGRTDIKSQTRASSTGQIVIPPVVPPAQDSGETGEKPWWDVM

SEQ ID NO: 5987 - protein, 501 aa, unidentified
  source 1..501: note = Related to NZ_CP048113.1; note = Chitinophaga sp.
MAEGLTRQQLYDRIRSSTKEEVILEEMTRLGFWTRNQAMPAPSEVLIRRESELRRELNKLVEEQQRYRNKEKILSDLRQQRMAAAKARRAETKLRKEEKRKERAAQWAIEKEKNIVYLGEDVSAGLNKVVSDEEKLKAAGLPVYHDGLALAAAMGITIGKLRFLSFNRKVANVSHYKRFYIPKKSGGKRLISAPMPQLKAAQYWILENILYKVKLSESAHGFVPGRSIVTNATHHVGQDIVINIDLKDFFPTIAYKRVKGLFSKFGYSEQVATILALLCTEPEVEQVALDGREYHVATTERHLPQGAPCSPAITNIICYKLDRRFEGLARRFGYAYTRYADDMTFSAKEAAGDNAGKLIWGVKQIVKEEGFVIHPDKLKVMRKGDKREVTGVVVNEKLSIDRETLRKFRALLHQISVSGLEGKQWGKGSLVNSIEGYINYVQMVKPEAGQQLKAKWQLLLGREDVKTQVRAAATAAPILIPPVAPAQEEPKDGEKPWWDVM

SEQ ID NO: 5988 - protein, 502 aa, unidentified
  source 1..502: note = Related to NZ_PYGK01000009.1; note = Chitinophaga ginsengisoli
MAEGLTRQQLYDRIRASTRDEVILEEMTRLGFWKKNTLMPSPSEVLIHREADLTRELNKLMEEKRRYQNREKMLIEMRKQRMAAAKAKRAETKLRNEEKRKEKAAQWAEQKEKQIVYLGEDVSQGLNKTVSDTERLTATGLPVFHDGVALAAAMGISIGKLRFLAFNRKVGHITHYKRFYIPKKSGGKRLISAPMPQLKATQHWILENILYKVPNSDAAHGFVPGRSIVTNAVHHVAQDIVINIDLRDFFPTIEYKRVKGMFCKLGYSEQVATILALLCTEPEVDQVALDGKDYYVANTNRHLPQGAPCSPAITNIICFRLDRRFEGLARRFNYTYTRYADDMTFSAKEPAADDAGKLIWGVKQVVKEEGFVIHPDKLKVMRKGDKREVTGIVVNDKLSLDRETLRKFRALLHQISVSGLTGKQWGKGNIVSSVEGYINYVLMVKPEAGKQLKDKWRLLLNRDDIKTQVRAAATQSDAPPAPSSSNENNTTNDGEKPWWDIL

SEQ ID NO: 5989 - protein, 495 aa, unidentified
  source 1..495: note = Related to WRXN01000012.1; note = Chitinophaga tropicalis
MMTGLTRQELYDRIRSSTRDEVILEEMKRLGFWARSTGAPSLSETLIRKESELRRELNKLMEEKARYRNKEKILNDLRKKRMMDAKAKRAETKQRNEEKRREKAAAWAAEKERSVVYLGEDVSAGLNKTFSDITRLSAAGLPILHDGVGLAAAMGITLGKLRFLSYNRKVEEVSHYKRFYLPKKSGGRRLISAPMPQLKAAQYWVLQNILYKIPGSQSAHGFIPGRSIVTNAQQHVGKDVVINIDLRDFFPTIVYKRVKGMFCKLGYSEQIATILALLCTEPERDQVMLDGKEYHVANTNRHLPQGAPCSPAITNIICYRLDKRFEGLAKKFNYTYTRYADDMTFSTSGETAGKAGQLLWAVKKVVKEEGFTIHPDKLKVMRKGDKKEVTGIVVNEKMSLDRTTLRKFRALLHQVSVSGFAGKKWGNGNIVSSMEGYINYVQMVKPETGKQLKDKFRLLLNRKDIKADLPEAPKEVLPDTSLPDQNNDKPWWDVV

SEQ ID NO: 5990 - protein, 509 aa, unidentified
  source 1..509: note = Related to NZ_QTJV01000007.1; note = Chitinophaga silvisoli
MSAGLTRQELYDKIRASSKEEVILEEMVRLGFWAKNESVPSVPETFIRKEGELRRELNELLSEQARYRNKQQVLTDMRKARMAAAKAKRAETKKRNEEKRLQRAAAWKEEKEKTIVYLGEDVSAGLNKTTSDAEQLQKFGLPLLNDGAQLAAAMGISLGKLRFLAFNRKVGTVSHYKRFYLPKKSGGRRLISAPMPQLKAAQYWVLENILYKVPNSESAHGFVPGKSIVTNASNHVGQEVVINIDLKDFFPTIEYKRVKGLFIKLGYSEQIATILGLLCTEPEVDQVALDGKEYFVANTPRHLPQGAPGSPAITNLICYGLDKRFEGLAKRFGYTYSRYADDMTFSTKGEAADKIGQLLWSVKQVVKEEGFHLHPDKLKVMRKGDKREVTGIVVNDKLSLDRETLRKFRALLHQIDKTGLANKQWGNGNIISSVEGFANYVAMVKPEAGRQLKDKIKVLFNREDIKAQARAMMSGAAVNGAGSTGSIGGAAAKDEHIPKKEDGNWWDVV

SEQ ID NO: 5991 - protein, 468 aa, unidentified
  source 1..468: note = Related to MTKN01000036.1; note = Flexibacter sp.
MLFNYRYSGSTQVYSNATSAGISFSPDTRREPTFFNEYRNKQQVLTDMRKARMAAAKAKRAETKKRNEEKRQQRAAVWAEEKSKSIVYLGEDVSAGLNKTSSNTELLQRFGLPLLHDAVQLSAAMGITLGKLRFLAFDRKVGTISHYKRFYLPKKSGGRRLISAPMPQLKAAQYWVLENILYKVPNSEAAHGFVPGKSIVTNATNHVGQDVVINIDLKDFFPTIEYKRVKGLFIKLGYSEQLATILCLLCTEPEVDQVALDGQEYFVANTPRHLPQGAPSSPAITNLICYGLDKRFEGLAKKFGYTYSRYADDMTFSTKGEPADKIGQLLWSVKQVVKEEGFHLHPDKLKVMRKGGKREVTGIVVNEKLSLDRDTLRKFRALLHQISVSGLANKKWGNGNIISSIEGFANYVAMVKPETGRLLKDKIRLLLNRDDIKSQARTLMTGAPAPASEKNPPQKGDDNWWNVV

SEQ ID NO: 5992 - protein, 500 aa, unidentified
  source 1..500: note = Related to NZ_SEWF01000012.1; note = Emticicia agri
MTERLTRQEIYDRIRATSRDEFILSEMKKLGFWPSDEEKPSVSEQLIKHEGELSRELQELSQKQRKFDNQQAMLAEMRKARMAAAKKKRVETKEKNEQKRKDKAEQWKQQKQNEIVYLGEDVSHELNNTEADTAKLAQFGLPHFADALALATAMNISLGKLRFLAYNRKVSTTTHYKRFYLAKKTGGKRLISAPMPKLKEAQYWILDNILYKLKNTDSAHGFVPQRSILTNASNHIGQDVVINIDLKDFFPSIDYKRIKGLFAALGYSKQIASILALVCAEPDVDMIDIDKKTYYVAHTERKLPQGAPTSPAITNLICYKLDHRFEGIARKFNFNYSRYADDITFSAKGDGKKLVGQVLWAIRQIIESEGFQIHPDKLAVMRKGRQQEVTGIVVNDKPGIDRKELRRFRALLHQIELNGTEGKSWRNGVDLENSMRGYASFVGMVKPEQGIQFKAQLDQIFGVRAKVKPVPAPEIKIVPPTIQDTPPKPDNDEKPWWEII

SEQ ID NO: 5993 - protein, 500 aa, unidentified
  source 1..500: note = Related to QVMT01000016.1; note = Emticicia sp.
MSERLTRQEIYDRIRATSRDEFILSEMIKLGFWQSDEDQPKVTEQLIRREGELHRELNELTQKQRRYDNQQAMLADMRKARMEAAKKRRIETKEKNEQKRKDKAEQWKKTQQSTIVYLGEAVSGNLNDTLADTAKLTQFGLPHFEDALGLANAMNMSLGKLRFLAYNRKVSTTTHYKRFYLAKKSGGKRLISAPMPKLKEAQYWILENILYKLKSTDSAHGFVPQRSILTNARNHIGQDVVINVDLKDFFPSIDYKRIKGLFAKLGYSQQIASVLALICSEPDVDIVDIDRKTYYVASTERKLPQGAPTSPAITNLICYKLDHRFEGIAQKFNFRYSRYADDITFSAKGEGAKLAGQVLWAVRQVIEDEGFQIHPDKLAVMRKGSQHAVTGIVVNEKPGIDRKELHRFRALLHQIELTGTEGKSWRNGVNLENSMRGYANFVTMVKPEQGNKFKAQLDRIFGIRTKSQSLPVVETSIIPPAIQATPPKPENNEKPWWEII

SEQ ID NO: 5994 - protein, 503 aa, unidentified
  source 1..503: note = Related to NZ_QGGO01000002.1; note = Arcicella aurantiaca
MSERLSRQQLYDRIRETSKDEYILSEMKKLGFWKSNETEPQISEQLIQREGDLHRELNDLSQQQRRYDNQQAMIADMRKSRMEASKKKQLETKQRNQQKRIEKAEKWKTQQQNSIVYLGEEVSGGLNSTQTDIAKLNSFGLPHFTDVLALAQAMKLTLGRLRFLAYNRKVSTVSHYKRFYLPKKSGGKRLISAPMPMLKDAQYWILEHILYKVSPTDLAHGFVPNRSIMTNAQKHIGQDVVINLDLKDFFPTIDYKRVKGLFNKFGYSEQIATILALICSEPDVELLEIDGKQYYTAKSERKLPQGAPTSPAITNLICYRLDCRFEGIAKKFGFQYSRYADDLTFSAKGEGKKLVGQLLWSVKQVITNEGFTLHPDKIAVMRKGSQQKVTGIVVNDKAGIDHKELHKFRALIHQIGKTGIAGKTWRQGVNLENSMRGYAEFVSMVKPEQGQKFKIALDKVFGVKVKSDKQDIPQNPIIENKLPEEKPKNINKNEDGKSWWEVI

SEQ ID NO: 5995 - protein, 497 aa, unidentified
  source 1..497: note = Related to NZ_AUIF01000010.1; note = Runella zeae
MSERLTRQQIYDRIRQTSRDEFILSEMKRLGFWQTDANQPKLSEALIDKERELYQELNELSQKQRRYANKQAMLAEMRKSRLEASKKRRQETKAKNEQRRQQKAEAWKVHQQYSIGYLGEGVSGGLNQTQSNPQQLALLGLPDFRSPFQLAQAMGVSLGHLRFLAFNRTVSKISHYKRFYLPKKSGGKRLISAPMPLLKKAQYWILENILYKIPSSEAAHGFVPKKSILSNAQNHTGQDIVVNIDLKDFFPTITYHRVKGLYHKLGYSEQIATILALICTEPEVDIVKIDSQIYYTAKSIRKLPQGAPTSPAITNLICHRLDLRFQGLAQKLGFNYSRYADDLSFSGASEGSKLVGQLLWSIHKIVKDEGFVVHPEKIAVMRKGTQQRVTGIIVNEKVGIDRQMLRKFRALIHHIEQSGVQGKTWNNSKNLEASMRGYVNFVSMIKPEQGAKFKMKLDAIFGQKEKTSTSRPIKDIPPPSPPFQDSNDDDKAWWEVV

SEQ ID NO: 5996 - protein, 505 aa, unidentified
  source 1..505: note = Related to JAGIBF010000018.1; note = Niastella sp.
MADKQPTRQQLYDRIRESTKDAVVLEEMKRLGFWPKGEQSPSVPELLINQEAELNKEFNQLFNQQRRYQNKEAVLQEMRMKRMADAKAKREANKKKRELQRLEKAEAWKKRKTTEIIYLGEDVSVGLNNIEANVAALQKYQLPAFANETELAQAMGITLPDLRFLAFSRKVSNISHYRKFYLPKKSGGKRLISAPMPRLKKTQYWVLENILNKVAVHTAVHGFTLNRSILSNALPHVGKKVVLNIDVKDFFPSIHYKRVKGLLQQLGYSEKIATILSLLCTEAVTEEVEIDGKNYFVQKGNRVLPQGAPTSPAITNILCYKLDLRLQGLAAKHQCQYTRYADDVTFSWNSSDINAQQMVWRIKKILSDEGFTVHPDKIRVMHQGARQEVTGIVVNEKPGIDRNKLRKFRALLHQLQTKDAAVLLPGAESPANVVIGYANFVRQVKPALGAFFAKQIDQLFQTGRLQYVVKETPPAGTNNDTPPAKPGNDKEPPKGDDDKPWWNVV

SEQ ID NO: 5997 - protein, 502 aa, unidentified
  source 1..502: note = Related to NZ_JAARML010000006.1; note = Paraflavitalea devenefica
MFDSKPTRQQLYDRIRESSKDAVVLEEMKRLGFWSKNDQSPTIPELLIKQEVELNKEFQQLFNRHRQYQNKEAVLKEMRLKRMAEAKAKREANKKKREQQRFEKAEAWRKQKETEIIYLGEEVSIGLNHTESNVAALQKHQLPVFVNENELALAMGVTLKELRFLAFSRKVSTVSHYRKFYLPKKSGGKRLISAPMPRLKKTQYWILENILNKVAVHQAVHGFTLNRSILSNAQLHVGKKVVLNIDVKDFFPSIHFKRVKGLLQQLGYAEKIATILALLCTEAVTEAVEIDGKDYFVQKGNRVLPQGAPTSPAITNILCYKLDKRLQGLATKHQCHYTRYADDVTFSWNSNDVNAQQMVWRIKNILQDEGFTVHPDKVRIMHTGTRQEVTGIVVNEKLGIDRNKLRRFRALLHQLQTKDAAELMPGVESPANVVIGYANFVKMVKPAQGAAFSKQIDQLFQSGRLQYLVKETPPSPGNNGVPPTPPSQQAGKDDDKPWWNVV

SEQ ID NO: 5998 - protein, 505 aa, unidentified
  source 1..505: note = Related to NZ_CP032157.1; note = Paraflavitalea soli
MADNKLTRQQLYDRIRESSKDAVVLEEMKRLGFWPKGDESPTIPELLINKEAALNKEFRELFEKHRQYQNKEAVLKEMRLKRMAAAKAKREETKKKREQQRFEKAAAWKKRKETEILYLGEDVSIGLNNMAGNADALHKHHLPAFANENELAAAMGIELKALRFLAFSRKVSTVSHYRKFYLPKKSGGKRLISAPMPRLKKVQYWILENILNKVAVHQAVHGFTLNRSIISNAQLHVGKKVVLNLDVKDFFPSIHFKRVKGLLQQLGYSEKIATILSLLCTEAVTEEVALDGGNYFVQKGNRVLPQGAPTSPAITNILCFKLDKRLQGLATRHQCHYTRYADDVTFSWNSTDINPQQMVWRIKKILADEGFAVHPDKIRIMHQGARQEVTGIIVNEKLGIDRNKLRQFRALLHQLQTKDASELMPGQVSPANAVIGYANFVKMVKPAQGAAFAKAIDKLFQTGRLQYLVKDAPPVLNGNPAPSPSPTSNPPANKGDDKPWWNVTG

SEQ ID NO: 5999 - protein, 502 aa, unidentified
  source 1..502: note = Related to NZ_LVYD01000013.1; note = Niastella vici
MADNRNIRQELYDRIRESSKDEVVLEEMKRMGFWAKDENGPTIPELLIKKEVELNRELNKLYEEKRKYQNREAVLKEMRLKRMAESRLKREENKKKKELAHLERAEAWKKKKDTAIIYLGEGVSVGLNNTDNNLAALQKHNLPVFNNENELANAIGIPLKELRFLSFNRKVSTVSHYRKFYIPKKSGGKRLISAPMPRLKQVQYWLLENIFNKIAVHPAVHGFALHRSIISNAQPHVGKSVVVNIDVKDFFPSIHYKRVKGLLQQLGFAEKIAVIMALLCTEAVTEEVEIDGRNYFVQKGNRVLPQGAPTSPAITNILCYKLDKRLQGLATQTQCSFTRYADDITFSFNNETTNAQQLVWRIKKVLADEGFTVHPDKVRIMRKGACQEVTGVVVNEKLGISRKKLRQFRAVLHQLKTKDAAELKWGHGNLASAVTGYANFVKMIKPVQGAALQNTIVTLLQTNRLQYPLAVTSSKKNIQTPPAQNNDPSAKKDDDKPWWNVV

SEQ ID NO: 6000 - protein, 501 aa, unidentified
  source 1..501: note = Related to NZ_LWBP01000254.1; note = Niastella populi
MAHKNIRQELYDRIRESSKDEVVLEEMKRMGFWSKNEGGPAVPELLIKKESELNKELNKLYEEKRRYQNREAVLKEMRQKRMAEARLKREENKKKKEQERFNKAEAWKEQKKKEIIYLGEGVSVGLNNIDNNLAALQKHNLPVFNNENDLANAIGIPLKELRFLSYNRSVSTVSHYRKFYIPKKSGGKRLISAPMPRLKQVQYWILENILNKVAVHAAVHGFALQRSIISNAQPHVGKEVVLNVDVKDFFPSIHYKRVKGLLQHLGYSEKIAVILALLCTEAVTEEVAIDGRNYFVQKGNRVLPQGAPTSPAITNILCYQLDKRLQGLANKGQCSFTRYADDITFSFNDPGTNAQQLVWRIKKVLADEGFTVHPEKIRIMRKGTHQEVTGVVVNEKLGLNRKQLRRFRAVLHQLKTKDAAELKWGNDNLASAVTGYANFVKMVKPAQGAALQNRIAALLQTNRLQYASTVTGAPKKKDPTPPANNSADPKKEDDKPWWNVV

SEQ ID NO: 6001 - protein, 489 aa, unidentified
  source 1..489: note = Related to JAKLTR010000008.1; note = Terrimonas sp.
MFDNQQTRQQLYDRIRESSRDEVILEEMKRMGFWGKKDAEPSLPEQLIKQETALSKELNALVAQQRKFQDKEKMLKEMRIKRMAEAKQKRAENKKKREQQRFEKAEAWRKRRGGEILFLGEMVSTGLNNTTNNTESLSKFGLPVFHNENDLAIAMGISLSALRFLAFSRKVSTVSHYRKFYLAKKSGGKRLISAPMPKLKGVQYWILQNILQRVNVHPSVHGFIANHSILTNAQPHIGKEVVLNIDVKDFFPSIHFKRVKGMLQQLGYAEKIATILALLCTEAVTEEVAIDGKTYFVQKGNRVLPQGAPTSPAITTILCYKLDKRLQGLADRHQCNYTRYADDVTFSTSRTELNMQQMVWRIKKILADEGFTVHPDKISIMRKGAQQQVTGIVVNQKLSVNREKRRKLRALLHNLETKPGFVPVWGQNSSAAAILGYAHFVKMVDAEKGEKFKDKVRSLIAQGKLSLTQSNNDRSGGNAGSDKPWWNVT

SEQ ID NO: 6002 - protein, 487 aa, Citrobacter sp.
  source 1..487: note = Related to QFQQ01000068.1; note = Citrobacter freundii
MSDNQKTRQELYDRIRESSRAEVTLEEMKRLGFWSKNDKEPTLPEQLIKQEAALVKELNALNAQKQRFQNKEAMLKEMRIKRMAEAKKKREENKKKREQQRFERAEAWRKRKTSEIIYLGELVSTGLNDVTNDTAKLSTYNLPVFNNENDLAAAMGITLSQLKFLAFSRKVSTVSHYRKFYLSKKSGGKRLISAPMPRLKTAQYWILQNILQRVPAHPAVHGFIQQHSILTNAAPHVGKEVVLNIDVKDFFPSIHFKRVKGLLQQLGYAEKFAAILALLCTEAVTEEIFMDGKNYFVQKGNRVLPQGAPTSPAITTLLCYKLDKRLQGLADKHQCAYTRYADDITFSTSNAQFNAQQMVWRIKKVLADEGFEVHPDKIAIMRKSTRQHVTGIVVNKKIAVSRDKRRKFRALLHNLETKPGFVPTWSNNSSGFAILGYANFMKMVDPVKASNALQKLQSLIASGKLPLIAAVKPAREQGDDKPWWNVT

SEQ ID NO: 6003 - protein, 547 aa, unidentified
  source 1..547: note = Related to JAFLBL010000017.1; note = Chitinophagales bacterium
MAYTYQCTFPGAGTWCHNGTLVRVCLALINLVRGRHEGAATLCQNMNFFSPIMADTHLTRQQIYDRIRESSKDEYILEEMKRLGFWKSKESSSIVPELMIKKETGLQQELNRLFEQKRKYQNKEAVLKEMRQKRMEEAKRKREETKKKREQQRADKAAAWQKKKETSILYAGENVSAGMNSTETKPDILQRYGLPLFTDELSLAAGLGITINELRFLSFSRIVSTVSHYRKFYLPKKSGGKRLIAAPMQRLKEAQYHVLEQVLNKVVLHDAANGFVKKRSIVTNAQQHVGKTLLLNLDIKDFFPTVDYKRVKGVFRKLGYAEKISTLLALICTEAPTDEVSIDGKNYFVQKGNRVLPQGAPTSPALTNILFYKCDKRLQGLAAKTGCTYTRYADDISFSTNSNTLNPQQLIWRIKRILTDEGFTVHPEKIRVMRQSSKQEVTGVVVNKKLNIDRKKMRQFRALIHTLKTKGPDAIHWGQSHPAYAIPGYLQFITMVNPEKGALLKNALTPLLDKIPKPVRITQSPQPGKPDTSGEAPKEGGDWWNVV

SEQ ID NO: 6004 - protein, 507 aa, unidentified
  source 1..507: note = Related to AP017422.1; note = Filimonas lacunae
MADNRLTRQQIYDRIRSSSKESYILSEMKRLGFWSVKDGASAVSEALINKEASLEKELNQLLAQNRKFNNREAVLKEMRLKRMAEARQKREENKKKREQKRYEKAEAWRARKQQEILYLGEGVSAGLHYTDTNEALLCEKELPVITTEKQLAEYMGIALQELHFLAFSRRVSTVNHYRKFYLPKKSGGKRLIAAPMPRLKNSQYWILNNILARIPVHAAANGFVADKSIVTNARPHLDKEVVINIDVKDFFPSIHFARVKGVFVKLGYSEKIATVLSLLCTEPVTQEISIDGRNYFVQKGQRVLPQGAPGSPVITNILCHHLDQRMQGVAAKHQYTYTRYADDITFSGSENTLHAQALLWRIKKIVQEEGFTVHPDKVHVMRKGARQEVTGVVVNKQLGIQREKLRQFRALLHNIKVKGWENAQWGNGNIISSILGYINYIKMIDPAKAAVFQQQVNVLFQQPGFSAIQQQVQPQASAAATTHDPTTNPQPAPGKGTEGDENWWKVV

SEQ ID NO: 6005 - protein, 504 aa, unidentified
  source 1..504: note = Related to NZ_BMIB01000004.1; note = Filimonas zeae
MADNRLTRQQIYDRIRSSSKEEYVRSEMLRLGFWTAKSGNTQITEVLLQQEATLTKELNQLMQERTRYRNKEAVLKEMRMKRMAEARRKREETKQKRELQRLEKAEAWRKRKQDEIVYLGETVSAGLQPGQSNEALLLQRGLPVFHTEKELAAAAGVDLRELRFLCYHRKVSAVNHYRKFLLPKKSGGHRLISAPMPRIKKVQYWVLHQILNKVPLHAAANGFATGRSIVTNAQPHVGRQVVINADVKDFFPSIHFKRVKGVFEKLGYNERIATILALLCTEAVTQEVVIDGKTYFVQKGCRVLPQGAPGSPAITNILCYQLDKRLQGVAGKHQYQYTRYADDISFSGSETTLAAEAMVWRIRKILQEEGFTVHPDKVRIMRKGARQEVTGIVVNKQPGIPREKLRRFRALLHRIKTKGWEGVQWGEGNIVSAMLGYVNFIKMVDPVKAARFEKEIALLGQLPGFTEAQKQVPLTPAPEALQKPSDTNPPSAPNTGEGDWWKVV

SEQ ID NO: 6006 - protein, 507 aa, unidentified
  source 1..507: note = Related to NZ_VVIP01000043.1; note = Proposed Foetidibacter luteolus
MADNRLTRQQIYDRIRETSRDDFILEEMKRLGFWGRGQDDPSVSELLIKKEVELGKELDKLLAEQRKYDNKQAVLKEMRMKRMAEAKQKRADNKKKREEQRFNKAEAWRQKKETEIFYLGQGVSGGLNHTENNVVLLQQKGLPVFYDEQELASAAGIELKELKFLSFSRSVSTVNHYRKFYLPKKSGGKRLISAPMPRLKKLQYWILHNVLQKVTLHTAVHGFTGKRSIVTNAQQHIAKDVVINADVKDFFPSIHIKRVKGIFKALGYSEKTATILALVCTEPVTEEVMIDGKNYFIQKGERVLPQGAPTSPALTNIICYHLDKRLQGVASKHQYTYTRYADDITFSATGQQLKEEALLWRVKKILKEEGFNIHPDKIRIMHKGTRQEVTGVVVNKKLSLSRQKLRNFRAMLHNLKTKGYADIKTGNKDIAAVILGYLNYIKMIDPVKALQFQQQVNQLFQQPSFHQLLKEQAAARAAVKPVEKSAMPSPESTTPQQGNGNWWNVTE

SEQ ID NO: 6007 - protein, 508 aa, unidentified
  source 1..508: note = Related to JAHBTJ010000009.1; note = Chitinophagaceae bacterium
MADNRLTRQQIYDRIRESSKEEYILEDMKRLGFWQRNEEGPSVPELLIKRESTLNKELNSLLAEKRKYQNKEAVLKEMRMKRMAEAKQKREENKKKREQQRYEKAQAWRAKRETEIFFLGEGVSAGLHYTESNLEELQKKALPVFENEMQLANAMGIALKELSFLSYSRRVSAVSHYQKFYLPKKSSGKRLISAPMPRLKKAQHWILQHILYKVPVHAQANGFVPGKSIVSNATPHIGKNVVVNADVKDFFPSITFKRVKALFGKLGYADKIATILSLLCTESVTEEVMLDGKKYFVQKGERVLPQGAPTSPAVTNILCFRLDKRLSGVAKKFGCGYTRYADDITFSGTLNNSDASKIVWHIKKILSEEGLTIHPDKIRVMQKSERQEVTGVVVNRQLSVSREKLRNFRALLHQLKKNGHENAKWSEGSLSNAIAGYASFIRMVNPAKAEKFIKEISDIRQSQTWQHLLLSEAAAIAKKLNQQTLPSTPAPPPANNNRKEDGEWYNVV

SEQ ID NO: 6008 - protein, 402 aa, unidentified
  source 1..402: note = Related to LUKG01000006.1; note = Flavihumibacter sp.
MADNHLTRQQIYDRIRESSRDEYILEEMKRLGFWNKNESSPTLPELLIKKESNLHKELNALLAEKQKFQNREALLKEMRLKRMEATKLKREDNKKKKEKERFEKTTAWRKKQETEIFYLGEEVSAGLHYAENNHPLLNQKALPVFENEQQLALAMNCTVKELAFLAFSRRVSELTHYQKFYLPKKSGGKRLISAPMPRLKKAQHWILQTILYKIPLHTSANGFVPTKSIVSNAWPHTGKQVVINMDIKDFFPSISFRRVRALFKNLGYSDKIATILALLCTEAPTEQVELDGKKYFVQKGERVLPQGAPSSPAITNILCYRLDKRLVGVANKFNGTYTRYADDITISGSFAHNTATRIVWQIKKILSEEGFILHPEKIRIMQQSQRQEVTGIVVNQEMSVNR

SEQ ID NO: 6009 - protein, 480 aa, Flavobacterium sp.
  source 1..480: note = Related to SEBO01000011.1
MQRLGFWPKNDNAPTLPEQLIKKEGELQRELSTLLQEKRKFEDKEAMLAQMRKKRMEEAKKKREQTKQKREAKRIEKAEKWKASKEKEIIYLGEKVSGGLNAKESDVPALDSKGLPTFTEETELAQAMGITISQLRFFCYHRSVATTTHYKRFGIKKKSGGMRIISAPMPRLKAAQYWVFHNVLNKLRHHEAAHGFVRERSILSNAKEHLNKEVVVNIDLKDFFPSIHFKRVKGLFHKLGYSEKIATIFSLLCTEPDVEEVELDAKTYFVAKGKRALPQGAPTSPAITNLLCYKLDCRLHGVAKAMGLSYTRYADDMTFSGDGEAAAKVQQLLWRLHRIIKDEGFTIHPKKIHVMRKGARQEVTGIVVNKQPGINRQTLHRFRALLNKIEKKGIEGKRWRGGNVIAEIAGYAEFVSMVKPAQGVKFKDQVRRILQQPDVIEHLQKAPLQAVHASHASKPIKDTHSNSDRNESSKPWWDVL

SEQ ID NO: 6010 - protein, 521 aa, unidentified
  source 1..521: note = Related to NZ_JACYFG010000060.1; note = Pelagicoccus enzymogenes
MNQSQPATRQELYERIRESSKNEVIRSEMERLGFWNPNAPEPKVADDWLKEYDRLTKELRELRGKQERMNNRDTLLADIRKKRMAESRERQKETKLRRERERIEKAERWKKLKEEDILYLGEDVSTQLNKKEPRPDLLAERQLPNFVNAKALAASMEVPIGELKFLAYNRKVSKVSHYKRFFMKKKSGGQRLISAPMPRLKRLQYWILHSILYKIPVHECVHGFVPDRSIKTNAAPHVGQDVVVNIDLKDFFPTVSQSRVQGLFNALGYSNQISTIFSLLCTEPEVQQAKLDGESWFIHQGERHLPQGAPTSPAITNLICYRLDCRIKGATDKLGFNYTRYADDITLSASGEAVSDICRLIWQVRKIIEEEGFNFHPDKFRVMRKGRRQEVTGLVVNETLSINRNTLRRFRALLHQIEKSGIEGKSWQGNSVNLLNSIQGYADFVAMVRPEKGQLLQARVKAIRMVQKHKRRAKPEAKPKIPAPLVPINKANELSHAGSDQTPKSSSGPKPFWKKLLFWLD

SEQ ID NO: 6011 - protein, 515 aa, unidentified
  source 1..515: note = Related to JAGROY010000010.1; note = Verrucomicrobiae bacterium
MADPDPSQPFRPLSRQEIYDAIKATSKQEFILDDMIRLGFWMPEQGNPAVPDAIIRRRGELNRELNELLHKQRRFENREAALAAHRKKRMAESKVRQKETKERNARLRQEKAERWRERKQREILYLGEGVSGGLSELQSVPERLSRHQLPDFANAETLASAMGITLGELSFLAFHREVSKTTHYRRFAIPKKSGGERIISAPMPRLKAAQTWILENLLQKVSVHDAAHGFVPDRSIITNASNHIGRDIVINVDLQNFFPSVTQARTKGLFKSLGYSEHIATILSLLCTEPEMDTLELDGQIWHVAMGGRFLPQGSPASPAITNILCRKFDARLSGMARKLGFTYTRYADDVTFSAGGETVEKYKTLLWRAKAIIHEEGFIVHPDKLRIMRLGSRQEVTGLIVNKAIGIPREDLRRFRAVLRQVEQDGPAGKRWHGSGHNILAVLGGYVNFIHMVTPEKAAPLRERVLALQSKHGWQREIRHRPRALAPEAGNPAARSADGGGFFKSILRKLGFGK

SEQ ID NO: 6012 - protein, 500 aa, unidentified
  source 1..500: note = Related to NZ_CP025791.1; note = Flavivirga eckloniae
MRNSTERRQEIYDKIKASSKQEYILSEMRRLGFWNEEDLDFEAVNLFFKQESELSAKLQKLLREKRVIEDPEAFLAKKHQERKIASKASQKETKERREKTRLEKAEKWRVSKAKDIVYLGENYSHQLNDKTSDASRLKAQSLPVMHHAEDLALAMKISIGELRFLSYSRKNSKISHYKRFQVAKKTGGYRLISAPMPKLKKTQHWILENILNNVPVHENAHGCVIGKSIKTNAIPHVGKDVVINQDFKNFFPSVTYNRIKGVFKSLGYSNQVATILSLLCSEPKILDISLLGEDYYAQQGERFLPQGSPCSPAITNILCKKLDHRLSGLAKKYGFEYTRYVDDITFSSNNNNFKKITPLLKYSRYIVNSENFKLHPEKLRVMKRNAKQEVTGVVVNEKANISKKSLKRFRTLLFQIEKDGIEGKFWNKSGNVLAQIDGYANFIYQIDQDKGVVYKKRVNAILETYKYKENHRSKYISNTNKGSASSFGRFVKKIASLFRK

SEQ ID NO: 6013 - protein, 506 aa, unidentified
  source 1..506: note = Related to SORL01000014.1; note = Algibacter lectus
MRNNSTERRQEIYDKIKASSKQEYILSEMKRLGFWNEGELDFKAVNTFFNEERELSQKLQKLLKEKKVIEDPEAFLAKKHQERKLASKQSQKATKERREKERLEKTERWRVSKEKDIIYLGENYSHQLNEQISNTERLKSKNLPVLHTAEDLAKAMNISIGELRFLSFSRKNSKISHYKRFQMAKKSGGYRLISAPMPKLKKAQHWVLESVLNIVSVHSNAHGCVIGRSIKTNAEPHVGKAVVINQDFKNFFPSVTYARIKGVFLALGYSNQVATIFSLLCSEPKILDVSLLGEDYYAQRGERFLPQGAPTSPAITNILCEKLDFRLTGLANKYGFTYTRYVDDITFSGTHDSFDKITPLLKYSRYVVNSENFNLHPEKLRIMKRNAKQEVTGVVVNEKTNIPKGDLKRFRALLFQIEKDGIEGKYWTKGGNVLAQIDGYANYIFQIEPEKGVLYKKRVNVILEKYNYKEKHKATYVPKVLDKREKANKPDSVGGIFNKIMSFFRK

SEQ ID NO: 6014 - protein, 500 aa, unidentified
  source 1..500: note = Related to NZ_LIQG01000027.1; note = Lacinutrix mariniflava
MKNSTERRQEIYDKIKASSKQEYILSEMKRLGFWNQEELDFESVNAFFKEETELSKKLQGLLKEKRVIEDPEAFLAKKHQERKLASKQSQKETKERREKERLEKAARWKTSKEKDIVYLGSGYSNNLNKKESDVTRLKTQQLPVLNTAEDLASALGITVGELRFLSFTRKNSKISHYKRFQMPKKSGGYRLISAPMPKLKKAQHWILEHILNNVKVHDNAHGCVIGKSIKTNAVPHIGKAVVVNQDFKNFFPSVTYNRIKGVFMSLGYSNQVATILALLCSEPKILDVSLLGEDYYAQRGERFLPQGSPCSPAITNVLCRKLDFRLSGLAKKYDFDYTRYVDDITFSGDKKSLPKITALLKYSGKIVRDENFMLHPEKLRVMKRNAKQEVTGVVVNEKANIAKTSLKRFRALLHLIEKEGIEGKYWNKGGNVLAQIDGYANFIFQIDEVKGAIYKERVNAILVKYNYKEEHIKQYAPNAKKGTSGLLSGFIKKVSSFFKK

SEQ ID NO: 6015 - protein, 500 aa, unidentified
  source 1..500: note = Related to NZ_VSDQ01000163.1; note = Seonamhaeicola marinus
MRNSTERRQEIYDKIKGSSKQEYILSEMKRLGFWNEGDVDFEAANAYFKEEAELSKKLQELLKEKRIVGDPDAFIARKHKERKLASKQSQKETKERREKERLEKAKRWKAIKEKDIIYLGTSYSNNLNKKISNVEKLRSQNLPVLQTALDLASAMNITIGELRFLAFSRKNSKTNHYKRFKVPKKTGGYRLISAPMPKLKRAQHWILEHILNHVVIHKNAHGGVLKKSIKSNAIPHVEKAVVINQDFKNFFPTVTFNRIKGVFVSFGYSSQVSTILALLCSEPKILDVELLGEKYFAQRGERFLPQGSPCSPAITNILCKKLDYRLTGLAKKYGFDYTRYVDDITFSGDKHSLSKITPLLKYSRFIVNEENFKLHPEKLRVMKRNSKQEVTGVVVNEKPNISKKSLKRFKALLFQIEKDGIEGKFWNKGGNVLAQIDGYANFIYQIDSEKGMLYKKRVKAILDSYNYKENHRKAYVLNSQKTGISVGRLFKKITSFFKKS

SEQ ID NO: 6016 - protein, 502 aa, unidentified
  source 1..502: note = Related to WTCE01000070.1; note = Crocinitomix sp.
MTDSKERRQAIYDKIKESSKNEFILSEMKRLGFWSDENVDFGAVTKFFKDEGELSKKIQEKLRDKNILDNPEVFIAQKHKERKLASKQRQKETKEKREKVRQEKAAKWQESKKSDIIYLGDQYSHQLNQKLSLVERLKSQGLPVIQTAAELAKNMGVSVGELRFLTYSRKNSKISHYKRFKVPKKSGGYRLISAPMPRLKQAQTWILEEVLNKVKVHESAHGCVTGKSIKTNAEPHVAKAVVINQDVKNFFPSITYNRIKGVFLSLGYSHQVAVIFALLCSEPKIVDIDLLGEDYFAQKGERFLPQGSPCSPAITNILCRRLDFRLTGLAKKYNLSYTRYVDDLTFSSTEYPDHSVVTKVLKYSRLIVKDENFRLHPDKLRVMKKGARQEVTGVVVNEKPNVSKKTLKRFRALLFQIEKDGIEGKQWNRPGNVLAQIDGFANFIYQINPEKGARYKAQVAVILVTHNYKELHKKAFPPKSNPTNETPQNRLWSRVKSFFKKN

SEQ ID NO: 6017 - protein, 503 aa, unidentified
  source 1..503: note = Related to NVRM01000058.1; note = Flavobacteriaceae bacterium
MKNSQERRQEIYDKIKESSKQEYILSEMKRLGFWDDQQVDFKEAEAFFKLESGLSKELQVLIKEKNLIDDPAAFLAKKHQKRKLKSKQKQRETKEKRELLRLEKAEKWQLSKKEDIRYLGDGFSHQLNDQTSQVDRLKSLDLPLLNNAKELAQAMDIPIGELRFLSFSRKNARLSHYKRFKMKKKSGGFRLISAPMPRLKNAQYWILEEILNKIAVHPLAHGCVIGKSIKTNAEPHLQKAVVINQDFKNFFPSITHNRIKGIFKSFGYSEQLATIFSLLCSEPKIVEVSMLGEDYFAQRGTRFLPQGAPTSPAITNIICKQLDLRLHGLAKHYGFDYTRYVDDITFSGNQEQLPKIAAILKYSKKIVEDENFTLHPEKLRIMKRSDRQEVTGVVVNEKTNIPKKNLKRFRALLFQIEKDGIQGKVWNKKGNILAQIDGYANFIYQIDTEKGIAYKKRVGLILKAHGYKEAHQSKFGRRSKDSSTSWFTSLVSKVKDIFGSGGK

SEQ ID NO: 6018 - protein, 483 aa, unidentified
  source 1..483: note = Related to NZ_OENB01000038.1; note = Tenacibaculum dicentrarchi
MDNSATRKQEIYDKIKESSKHEFILSEMKRLGFWGDDNVNFDKVNDFLKEENALSGDLSKLLKKERLIKDTDAFIANKHKERKKLSKEKQKETKLKREQIRKEKAEKWQQTKKEDITYLGAGYSHQLNDTQIDEVRLKEAGLPIYHSVKDLAEAMKITVNELRFLAFSRKNSQIEHYKRFKVAKKSGGYRLISAPMPRLKRAQHFILENILNKVIVHNKAHGCVKERSIISNAMPHLNKAVVINQDLKNFFPSVTYKRIKGVFKSLGYSEQLAVIFSLLCSESKILDISLLGENYFSKRGERFLPQGSPCSPAITNILCRKMDYRLDGLAKKYGFDYSRYVDDTTFSGNHEQFKHITAILKYSKKIISEENFNLHPDKLKIMKRNQRQEVTGIVVNEKLNIDKKSLKRFRALLYQIEKEGIAGKTWNGGLNVLAEIDGYANYIYQVDKEKGAKYKSQVADILKAHSYKESKGIFNKINSLFKR

SEQ ID NO: 6019 - protein, 501 aa, unidentified
  source 1..501: note = Related to NZ_AUMF01000009.1; note = Tenacibaculum ovolyticum
MDNSATRRQEIYDKIKESSKDEFILSEMKRLGFWGDNEVDFEKANAFLKEERELSNNLTALVKKERAIEDTEAFIANKHKERKKLSKEKQKETALKRALIRKEKAAKWQQTKKEEIVYIGDGYSHQLNDTETNVARLKENDLPIYESAKELAEAMKITVNELRFLAFSRKNSKIHHYKRFKVAKKSGGYRLISAPMPRLKRAQHFILENILNKVTVHKKAHGCVKERSIVSNAEIHVNKAVVINQDLQNFFPSVTYKRIKGVFKSLGYSEQLAVIFSLLCSESKILDLSLLGENYFTQRGDRFLPQGSPCSPAITNILCRKMDYRLDGLATKYGFTYSRYVDDTTFSGNQEQFKYITAILKYSKKIIKEENFKLHPDKLRIMKRNERQEVTGIVVNEKLNINKKSLKRFRALLFQIEKEGIQGKTWNGGLNVLAEIDGYANYIYQVDKIKGVKYKSQVSAILKAHSYKENHVAKYASNSTEAANEHKVPSFFKKIISFFKK

SEQ ID NO: 6020 - protein, 526 aa, unidentified
  source 1..526: note = Related to NZ_CP053348.1; note = Winogradskyella forsetii
MVPISLELFNSVFRVVRRELKYILLLPFFVFMSNSTERRQEIYDKIRQSSKHEYILSEMKRLGFWGEDNVDFEQVNKFFNDESELSKQLNDLLRKEKSIEDTEAFIAAKHLERKRISKEKQKETKEKREQQRLEKAKQWQLSKLEDIVYLGEGYSHQLNDKTTADDLLKRQGLPILHSAKDVAKAMNITVAELRFLAYSRKNSKTCHYKRFKVAKKSGGFRLISAPMPRLKKAQHFILEHILNKVTMHPKAHGCVLEKSILTNALPHVNKDVVINQDLKNFFPSITYKRIKGVFKSMGYSEQVSVIFALLCSEPKILDVTLLGENYFAQQGDRFLPQGSPCSPALSNIICKKLDYRLDGLASKYGFIYSRYVDDITFSGPKAQFSKIPALLKYSNKVVKAENFILHPEKLRLMKRHQRQEVTGVVVNEKPNINKKSLKRFRALIYQIEKDGIEGKTWNGGLNVLAEIDGYANFIYQINKEKGKPYKERVASILVAHNYKEAHKQKYVKAPPKKEGFIKKLFSWFKL

SEQ ID NO: 6021 - protein, 504 aa, unidentified
  source 1..504: note = Related to NZ_CP009976.1; note = Cellulophaga baltica
MSNSTERRQEIYDKIRQSSKQEYIISEMKRLGFWGEDNVDFDKVDRFFKKESELSKQLHDLLKKEKSVEDTEAFIAAKHIERKRISKEKQKETKEKRALERIEKAKRWQLLKNEDIIYLGEGYSHQLNDKNTATDLLKAQGLPVLESANDIAKAMKISLGELRFLAYSRKNSKTSHYKRFKVAKKSGGHRLISAPMPRLKKAQHYILEHILNKITMHPKAHGCVLEKSILSNALPHVNKDVVINQDLKNFFPSITYTRIKGVFKAMGYSEQVSIIFALLCSEPKILDISLLGEHYFAQQGHRFLPQGSPCSPAITNIICKKMDYRLDGLGSKYGFTYSRYVDDITFSGDKNQFSKITALLKYSKKIVTSENFTLHPDKLRIMKRHQRQEVTGVVVNEKPNINKVSLKRFRALIYQIEKDGIKGKTWNGGANVLAEIEGYANFIFQIDQEKGRGFKERVAKILAQHNYIEKHIVTYAKEKVVVATSSDAKPKDTFLKKLFSIFKK

SEQ ID NO: 6022 - protein, 513 aa, unidentified
  source 1..513: note = Related to BMWS01000013.1; note = Aquimarina muelleri
MYEGNKIHLIATFFIPYTMADSATRRQEIYDKIKESSKDQYILEEMKRLGFWNEGQVDFETVNQYFKEESELSQQLQKLLREKRLVENPEAFLAQKHKERKLASKQSQKETKEKREKLRQEKADRWKESKEKDILFLGAGYSHTLHDKSTKQDRLQQEKLPVLQNAEDVAKAMDISIGQLRFLSFSRKNSKINHYKRFQIPKKTGGFRYISAPQPKLKKAQHWILENILNKVTMHPQAHGCVIGKSIKTNAIPHVAKDVVINQDLKNFFPSIVYPRIKGVFQSLGYSDQVATIFALLCSEPKIVEISVLGEDYYAQRGERFLPQGSPCSPAITNIICRKLDYRLDGLARKYGFSYTRYVDDLTFSGEKDQYAHITNMLKYSRRVVKEENFTLHPDKLRVMKKGVRQEVTGVVVNEKPNIDKKSLKRFRALLYQIEKDGLKDKVWTGKADLLSQIHGYANFINQIDQEKGKKYKEKVNIILERYNYKDNHRKQYVKTFVKPKGLMSKLRSFFRK

SEQ ID NO: 6023 - protein, 498 aa, unidentified
  source 1..498: note = Related to NZ_QMFY01000006.1; note = Chryseolinea flava
MADIRQQLYDRIKASTKESVILEEMKRLGFWKQETGVPSLPEQLILQEADLTKELQSLLEQQRKYQNKEQALKEMRKARLEKSKLKREENKKLRKQKREEKAARWKATQETDIIYLGEDVSKGLNNKETDVAKINTHQLPGITTVEELAKAMNISVGTVRYLSYNRIISKTTHYKRFYIPKKTGGKRLISTPMPKLKRAQYWILENILEKIAIQDSAHGFVKKKSIVSNALPHVKAEVVVNIDMKDFFPTITYPRVKGVFQSFGYSEQIATILALMCTEAECDQIDLDGITYYAAGLERFLPQGAPTSPALTNIICRKLDARLKGIATKFNFNYTRYADDLTFSASGEATAHLKTLMGFIKRIIKEENLHIHPDKVRVLRKGARKEVTGIVVNDRPAVNAKELDRFRALLFQIEKDGLDGKHWKGSNNLLASIKGYANFVLMVDPIKGKPLMERVSKILSTHEFKHVIRHKPKSLLANEPEKPKNTEEQSKKPWWRFW

SEQ ID NO: 6024 - protein, 495 aa, unidentified
  source 1..495: note = Related to JAIOAO010000004.1; note = Fulvivirgaceae bacterium QH1ED-6-2
MADIRQQLYDRIKASTKDSVILEEMKRLGFWKRDVGMPSLSEQIILKEADLTKELNALLEQQRRYQNKEQALKEMRKSRLEQSRAKREENKKRRKQKREEKAARWKASKETDIIYLGDNVSQGLNNKETDPAKLTQHQQPLVTTVEDLAKAMNVSVGTLRYLAYNRIISKTTHYKRFYIPKKTGGKRLISTPMPKLKQAQYWLLENMLNKVATHDAAHGFVRQRSIVSNALPHVGAEVVINIDMKDFFPTITYPRVKGVFRSFGYSEQIATILALICTEPDVDQIELDGQTYYAAGSERLLPQGAPTSPALTNIICRKLDARLKGIATKLGFNYTRYADDLTFSASGEAVTHVKTLMGFVKKVVKEEKLVIHPDKIRILRKGARKEVTGIVVNDKPAVNAKELDRFRALLFQIEKDGPQGKHWNNSPNLLASIKGFANFVAQVDPVKGKPLVERVNAILVTHQFKHTIKHKSKAQQAKQEAEQKQKSKKPWWKFW

SEQ ID NO: 6025 - protein, 500 aa, unidentified
  source 1..500: note = Related to JAERRB010000002.1; note = Chryseolinea sp.
MADIRQQLYDRIKASTKESVILEEMKRLGFWKKEEGIPSLSEQLIVKEADLTKELKELLEQQRKYENREAALKEMRKARMAQSRAKREENKQLRKQKREAKAARWKDSKEKDILYLGEDVSKGLNNKESDLTKLATYGLPVIHHAEALAQAMQTTIGNLRHLAYHRIISKTTHYKRFYIPKKTGGKRLISTPMPKLKQAQYWILENILNKVTLHDAAHGFVKTRSIVSNAQPHVKADVVINIDLKDFFPSITYVRAKGVFKSFGYSEQVATIFALLCTEPECDQIAIDGVTYYAASMERFLPQGAPTSPAITNIICRKLDARLRGIATKLNFTYTRYADDLTFSASGDAAAGTRTLLGFVKKIIKEEKLNIHPDKFRVLRKGARKEVTGIVVNEKPAVNAKELDRFRALLFQIEKDGIAGKHWNNSTNLLASMKGYASFVAMVDAAKGKPLVERVNAILAANQFKHVIRHKSKAMRDKETAQAPKGSGSSDAKKPWWKFW

SEQ ID NO: 6026 - protein, 503 aa, unidentified
  source 1..503: note = Related to QFQN01000037.1; note = Azospira oryzae
MVGSQNTRQQLYDRIKASTKEAVILEEMKRLGFWKSEEGMPSLPELIIEKEAVLIKEVRELVEQQRKYKNKEEALKEVRKLRLEKSKLKREENKKTRKQKREEKAAHWKERKEKDILYLGEKVSKGLNNKESDLAKLTSLQLPVLQNAEDIALAMGIPVGQVRFLSFHRIVSKTTHYRHFYIPKKTGGKRLISTPMPRLKSAQYWVLTNVLDKILIHDAAHGFVRKRSIVSNALPHIKAEVVINIDLKDFFPSISYIRVKGLFQSFGYSEQVATILGLICTEPESDEIELDGETYFAANGERFLPQGAPTSPAITNIICRKLDVRLKGIASKLNFNYTRYADDLTFSASGESAASTKTLLGFVKKIIKEENLNIHPDKLRVLRKGARKEVTGIVVNDKPSVNAKELDRFRALLFQIEKDGIGGKHWKNSNNLLASMKGYASFVAMVNPEKGNPIKERVNKILAANQFTHVIKHKSKAMIAKDAAKNTNTASTSEVKKPWWKFW

SEQ ID NO: 6027 - protein, 523 aa, unidentified
  source 1..523: note = Related to NZ_KE384560.1; note = Sporocytophaga myxococcoides
MTKNILYTTIFYTPMANTENSQPTRQQLYERIKSSGRNAVILEEMQRLGFWKSDEGASVIPEMLIHKEADLIKELNKLLQQQRIYQNREEALKKVRQARLEQSRKKREENKILRKQKREAKAARWKELRDKNIIYLGEKVSKGLNNQISENSKLLKYQLPVLQTAEELSAAMKITIGELRFLSYNRTISKINHYKRFYIPKKTGGKRLISTPMPRLKKAQHWILENILNKIDPTESAHGFVKKKSIVSNALPHVKADVVVNIDLKDFFPSINYRRVKGLFIALGYSEQISTIFALICTEPDCDQVELDGETYYAAGSDRFLPQGAPTSPAITNLICRKLDLRLKGIASKLNFNYTRYADDLTFSASGVATSNTSTLLGFVKKIIKDEKLYINPDKLRVQRKGARKEVTGIVVNDKPSVCRKELDKFRALLHQIEKEGTIKGKHWNNSNNLLASIKGYANFVKMVNPEKGKPLEERVKKILEAHRFKHVIKHKPKKQSATTNVVDSKPANQPEAENKKPWWKFW

SEQ ID NO: 6028 - protein, 498 aa, unidentified
  source 1..498: note = Related to JAJTHV010000105.1; note = Flammeovirgaceae bacterium
MADSQSTRQQLYDRIKNSSKDAVVLEEMKRLGFWAKNESAPSLPEILIQKEAALVQELRQLTEQQQKLKDKQQLLKEVRKARLEKSRAKREENKKLRKEAREAKAARWKEKKEKDIVYLGANVSGGLSHTASDATLLGKHQLPIWNSVEELARDMKVKVGELRFLGFNRAVSKVNHYKRFYIPKKTGGKRLISAPMPRLKTAQTWILETILNKVAPSEQAHGFVLKRSIVSNALPHVKADVVINIDLKDFFPSIHYPRVKGVFQSLGYSEQLATLFGLICTEPDCDTVELDGTTYYVSNSERFLPQGAPTSPAITNILCRKLDARLKGISTKLNFTYTRYADDLTFSTSGEHVNKTKTLLGFIKKIIREEGLVIHPDKLRVQRKGARKEVTGLVVNDKPSIAAKELDKFRALIYQIEKDKTLQGKHWKNSPHLLASMKGYANFVAMVDPAKGKPLVLRVNKILDEHGYKHVIKHKPKPKVVAASEQPVPAKKPWWKFW

SEQ ID NO: 6029 - protein, 504 aa, unidentified
  source 1..504: note = Related to NZ_FUZU01000002.1; note = Ohtaekwangia koreensis
MADNSQVTRQQLYDRIKASTRDSVILEEMKRLGFWKKDDGIPSLPEILITKESILTQELHVLLDQQRKYKNKEEALKEIRKARLEQSRLKREENKKLRKQKREAKAAQWKERKEKDIIYLGEDVSKGLNNKASDLTKLATYQLPEMHMADELANAMGITVGELRFLAYNRTVSKINHYKRFYIPKKTGGKRLISTPMPRLKKAQHWILENILNKVSIDDHAHGFVMKRSIVTNALPHVKAEVVINIDLKDFFPTISYQRVKGLYRSLGYSEQLSTIFGLISTESECDQIELDGEIYYAAGIDRFLPQGAPTSPAITNIICRKLDARLKGIASKLNFAYTRYADDLTFSASGENVNNTKTLLGFIKRIIKEENLTIHPDKFRVLRKGARKEVTGVIVNDKPAVNAKELDRFRALLFQIEKDGTLEGKHWKNSPNLLASIKGYASFVAMVDPIKGKPFVERTNKILETHGFKHIIKHKPKPPQTAAAVQTEEQAAQKKKPWWKFWA

SEQ ID NO: 6030 - protein, 501 aa, unidentified
  source 1..501: note = Related to NZ_JAFEWE010000006.1; note = Pedobacter sp.
MSNQPNRQQLYDRIKASTRDAVILEEMKRFGFWKKDEAQSIVPETLIEKEAALTRELRDLLEKQQRFQNREQALIEVRRARLEASKKKRAENKLLRKQQKEQKAARWKEKKEKEIIYLGEDVSPGLNNVSANPDNLNKQKLPVIANAEELAKAMKTTVAELRFLAYHRTVSKTTHYQRFYIPKKTGGKRLISTPMPRLKSAQHWVLENILELPEIKDTAHGFVKKRSIVSNAVPHLKAEVVINVDLKDFFPSIDYKRVKGLFISLGYSEQIAIILGLLCTEPESDQIELDGQKYYVAGTERFLPQGAPTSPAITNLICRKLDARLIGISKKLGFTYTRYADDLTFSASGEAVKSVKTLMGFIRKIVKDENLNIHPDKLRILRKGSRKEVTGIVVNDKPAINSKELDRFRALLFQIEKDGIAGKHWKNSPHLLPSIKGYVNFISMVDQEKGKALKVRVDAILQKHGYKHEIRHKSKQQIAKEQERIEAEAVHQKKKPWWKFW

SEQ ID NO: 6031 - protein, 503 aa, unidentified
  source 1..503: note = Related to JAJNDK010000004.1; note = Bacteroidetes bacterium
MTRQEIYDRIKNSTKDAVILEEMKKLGFWKEDGAAASVPEQLILREASLRKDLNELLQKQRNYQNRDLALKDMRAARMEASRKKQAENKLLRKEKAEKKAAAWKEKKQKDITYLGEAVSTGLNNAEANTEKLQKSGLPLIESAEKLAALMQISISELRFVAYNRVVSEITHYKKFQLPKKTGGFRTISAPLPRLKSAQHWILQEILNKLPVHAAAHGFVTKRSIVSNAKEHLQNNLLINIDLKDFFPSIHYPRVKGFFKAIGYSEQVATIFALICTESEVDEIELDKKTYYVKSGDRSLPQGAPTSPAITNLLCRRLDARFAGLAKKYGFVYTRYADDLSFSAPEEKKEEFKKFIGFVKKTIKAENFTLHPDKFKVLRKGARREVTGIVVNQKLSVSSDKVKKFRALLFQIEKDGIAGKHWNGSTTLLASIKGYASFIYQVDPVKGKPMLERVNKILVANAFKHIIVHKSKAQKEKEAPKKQAGIGASTKTTSDTKKPWWKIW

SEQ ID NO: 6032 - protein, 478 aa, unidentified
  source 1..478: note = Related to JAFDXR010000011.1; note = Bacteroidetes bacterium
MKKFGFWNETEGQSSLPEQLIMQEARLSKELYDLLEKQRKYQDREKALKEMRTARLQKSREKIAENKRLRKEKKEQRAQDWKNSKQKDIIYLGPTVSKGLQQTADGESDKLKQKQLPLIHTAEELASQMGIGIGELRFLSYNRPVSTVSHYRQFQMPKKTGGFRKISAPMPKLKEAQHWILHYILNKLPVHENAHGFTLRKSIVTNAQPHLQKVLLINIDLKDFFPSIHYPRVKGMFRGMGYNEKIATLLALICTESETDEVELDGKKYFVKSGNRALPQGAPTSPAITNYLCRRLDARLSGLARKYHFTYTRYADDMTFSFSADQQDSIKTCIGFIKKTIRTENFNIHPDKFKVLRKGARHEVTGVVVNNKLSVDSKKLKKFRATLYQIEKHGLQGKHWNHSHNLLASLKGYANFINQVDPVKGKIYTERVRKILDQYQYRHEIIFKPKPKPSPLKEIPNPIPAPEAKTRKPWWKFW

SEQ ID NO: 6033 - protein, 431 aa, unidentified
  source 1..431: note = Related to JACMLS010000980.1; note = Bacteroidia bacterium
IARKEKIEAAAKAWARKKEKEIVYLGENVSAGLNNLQDSDAERLKKNNLTDIASAEQLAALMKIEMGQLRFLSYHRAVSRVSHYKKFTIPKKTGGVRTISAPMPKLKTAQHWILENILDKILLHDAAHGFVNKKSIVTNATPHLKSEVVINIDLKDFFPSVHYPRVKGMFRKLGYNEAISTIFSLICTEAEQDEVEIDGVKYYVKDGNRKLPQGAPTSPAITNIICRKMDARFTGLSKKYGFAYTRYADDLTFSASGDALLKLKQFIALVKKVISSERFTLHPDKFKVMRKGARKEVTGIVVNEKPAIEKKKLKKFRALLFQIEKEGSIAGKKWGNSKNLLAAIKGYSNFINMVDPVKGKSLIDRANKILEQHKFAHVIVHKAKPKVEPVVIQKTTSTVSQSQYVSTTTAATQQVAPEKTDSKKPWWKFWS

SEQ ID NO: 6034 - protein, 501 aa, unidentified
  source 1..501: note = Related to CP004371.1; note = Flammeovirgaceae bacterium 311
MANQSKPTRQQLYDRIRQSSRDEVVLEEMKKLGFWPDGEGAPSLPEQVIRREGELSRELGDMLVQQRRYSDREQMLKEIRQQRMEASRQKQKENKERRRQERQQRAEQWKARQEKEILYLGEGVSAGLGESDNDAAKLRLNGLPDFIDIESLARAMEIDVASLRFLAYSRQVSKVSHYKRFYIQKKTGGRRMISAPMPRLKQAQQWILLHILENVKVNGAAHGFVLNRSIVTNALPHLQPDLLVNLDLKDFFPTVTYKRIKGVFRSLGYSEKVASIFGLICTEPDITEAEMDGRTYFIASGERFLPQGAPTSPALTNILCRRLDVRLKGLARKYGFTYTRYADDLSFSARGEGKENLTKLLGNVRRIIKDEGFVIHPDKLRVMRKGSRQEVTGVVVNQKLNVCRKKVRNFKALLFQIEKDGIEGKSWQGSSDNLLAVIKGYAHYIAMVNPVQGKPLAERVEAILKKHHYRHIIKHPAKKPFMQAAAEEEPQPKKKPWWKFW

SEQ ID NO: 6035 - protein, 513 aa, unidentified
  source 1..513: note = Related to nan
MADSSLNRRQELYDRIRSSSKDQVILEEMQKMGFWPDDSEEPSVPALYFKRELELSQELRDLVIKHRRFDDQAKMLEHIRRERMAESRKKQKETKQRRRQERLARAEAWKQRKASEILYLGEGVSQGLQGATPNRARLTQHGLTDIASVEALALAMGMTVGKLRFLAYNREISRVSHYIRFHLPKKRGGTRLISAPKPGLKSAQYWVLQHILDRIELHDAAHGFRKARSIVTNAKPHLGADLVVNIDLKDFFPTVNYRRVKGLFGGLGYSERISTVLGLLCTEPDVDVVELDGETWYVAKGERHLPQGAPCSPAITNIMCRRLDARMRGLAQKYGFVYSRYADDMTFSASGDSRKLLMTLLGNVRRILKDENFKLHPDKLRIMRKGAQKEVTGIIVNEKLNVSRKKLKKFRALIFQIEKDGPEGKTWEGARDLLPAIWGYANFIKMVNPDKGAEFVARVKAIFDHLGETPPVKPVVAQPDGSEVEVEILQGSDEDEAPGATGNDPDKPWWKIW

SEQ ID NO: 6036 - protein, 485 aa, unidentified
  source 1..485: note = Related to DF820455.1; note = Candidatus Moduliflexus flocculans
MFEGFRDSHFPLNDMSNTENSQDSRLSRQQIYDRIRATSKQEYILSEMVRLGFWPDSQDAPTLPEQLIRREGELTRELTELLEKQRKFDNREQMFKEMRKKRLEESHQKQAETKERRQRERDERARRWKELKAQDIGYLGDGVSGGLQNKEHSAERLAQNNLPAFASVAELVQAMGISVGELRFLTFQRDVSKVSHYKRFYMPKKSGGMRLISAPMPRLKAAQHWVLEHLLQTVPLHPAARGFRSGESIVTNAAPHVGRDVVINLDVKDFFPTVSYPRVKGVFRGLGYSEQLATIFALLCTEPDVDALELDGETYYVVASGRHLPQGAPTSPALTNILCRRLDSRLSGMAQKMGFAYTRYADDMTFSGTEDTLQNLTKLLWRAKKIISDEGFVVHPGKLRIMRSGSRQEVTGIVVNEQMTLERGTLRNFRALLFQIEKDGLRGKTWKGRELTPASLRGLAHYIVMVNPQKGRPLLERVNALLRQA

SEQ ID NO: 6037 - protein, 466 aa, unidentified
  source 1..466: note = Related to PDSK01000128.1; note = candidate division KSB3 bacterium
MNDSEDSRAVRQQIYDRIRQSSHDEYILDEMIRLGFWSSDKDAPSVPEQLIRKEAELSRELRDLLKKQRRFENRKKMLKEMRTKRLAESRKKQQETKERKKRERDEKARQWQQKKATAIFYLGEGVSAGLNQKELLTERLNQYNLPVFTSVEALAQAMEISVGELRFLTFHRKVSKTTHYQRFYMPKKSGGVRLISAPMPRLKHAQYWVFHNILQQIPLHSAGHGFRPAHSIVSNAEPHQGQDIVINMDLRDFFPSISYKRIKGLFHALGYSEQIATILGLLCTEPEIDQVELDGETYYVANSERHLPQGAPTSPALTSILCRRLDSRLQGMADKLGFAYTRYADDLTFSASGETARQFTQLLWQARKIIEDEGFVLHPEKLRIMRKGSRQEVTGIVVNEKLSVNRKTLKNFRALLFHIEKDGLDGKHWKGQPVSLAFLKGFANYVKMVDPDKGRPLLDRINKLIV

SEQ ID NO: 6038 - protein, 504 aa, unidentified
  source 1..504: note = Related to NZ_BEXT01000001.1; note = Desulfonema ishimotonii
MTDTDTSRLTRQQLYDRIRESSKDEYILEEMIRIGFWPSGKDAPTLPEQVIRREGELTRELDDLLRKQRRYENKELMLREMRKARMAESRRKQAETKARREEERQARAERWQDIKTREILWLGHGVSGGLNRRTSDVGKLAQNGLPHYDDVKALAKAIGIPVGELRFLAFSRKTSKISHYRRFFIPKKRGGRRLISAPMPRLKALQYFVLENILAKIPPHKAAHGFLPGHSIVTNAVPHVGKDVVINLDLKDFFPTISYPRVKGLFRSLGYSEQQATLFGLICTEPDTDAVELDGETYFVARSERHLPQGAPTSPAISNLIFRKADRRLQGVADQLGFAYTRYADDLTFSASGDAAEALTRLLWGVRQIVKDEGFVLHPDKLRVMKKGARQEVTGIVVNEKLNISRKSLRNFRALLFQIEKDGFEGKRWNGAKNLPPVIWGYANYVAMVNPEKGKPLVAQTDRIFRKYRIRKSDIRPDLARKAALAKKGETSGADEEKPWWKFW

SEQ ID NO: 6039 - protein, 605 aa, unidentified
  source 1..605: note = Related to NZ_JHZA01000001.1; note = Enterovibrio calviensis
MSNEQQNDSPIQDPSPKLTRQELYDRVRRVGKDEYILSEMIRLGFWKRDANKPSLTDTFLQKRSALQSRLRELSKENALYSDPEKALKALHEERKKAALEKRELTKIERNTARYQRAFAWYTKQQTSFTYLGDNVSAGLEDKTSDEEKLVSQALPVFDNAGAVADAMGISTSELRFLCYQKDVSTISHYQDFTINKKSGGVRTISAPMPRMKRSQYWLLDNVLNKLAIHDAAHGFVSGKSIVSNAQPHVKKQVVINLDMKDFFPSVSYKRVKGMFINLGYSEELATTFALLATKRETQALEMDGKTWHVAVGERVLPQGSPCSPAITNVLCRRLDARLLGMAEKLGFTYTRYADDLTFSSDDASKVQALLWRSKQIVSSEGFVIHPDKTRVMRRHQKQEVTGVVVNDGLSVERKTLKRFRAVLRHVEMDGPENKHWGSGELFQSLAGYANFVAMVNPEKGIPLQKAVVHLKRQHNIPTPAGKISALNKKLFRIKAAKGEAPRETWWQPMIKPAPELEFTPAQIQHKKREAMAEQRQLSDASSGTQTEDVDNTASESGKKKRGIGFWIFAVIFSPIILLVAISRTSTTAKIALAASILFWMYYFFM

SEQ ID NO: 6040 - protein, 605 aa, unidentified
  source 1..605: note = Related to NZ_SCHN01000009.1; note = Enterovibrio sp.
MSNEHQSDSPIQDPSPKLTRQELYDRVRRVGKDEYILNEMIRLGFWKKNTDKPNLTDTFMEKRASLRARLRELSAENALYSDPEKALKALHDERKKAALEKRELTKLKKNTARYKKAFSWYMKQQDTFTYLGENVSAGLDDKTSDEEKLISQEIPVFENAGAVADAMGVSTSELRFLCYQKDVSTISHYQDFAITKKSGGVRTISAPMPRMKRAQYWLLDNVLNKLAVHDAAHGFVSSRSIVSNAEPHTKKRVVINLDMKDFFPSVSYKRVKGMFKQLGYSEELATTFALLTTKPATEALDMDGKTWHVAVGERTLPQGSPCSPAITNVLCRRLDARLKGMAEKLGFTYTRYADDLTFSNDDDSQVQALLWRCKQIVSSEGFVIHPDKTRVMRRHQKQEVTGVVVNDGLSVERKTLKRFRAVLKHVELDGPENKHWGSGELFQSMAGYANFVAMVNPEKGIPLQKAVIHLKRQYDIPTPSGKISALNKKLFRMKAAKGETPRDTWWQPPIKPAPELELTPAQLEHKKREAIAEQKRHSGTPTDSKTETQNSDATDSEKKKRGIGFWIFAIVFSPIILIVAMARASTTAKIAFAASLFFWVYYFFM

SEQ ID NO: 6041 - protein, 605 aa, unidentified
  source 1..605: note = Related to NZ_JMIB01000006.1; note = Photobacterium galatheae
MSNSHSNPQTHEPTQDPSPKLTRQQIYDRIRESSKDEYILSEMTRLGFWKPGDSKPSLAEQFVNKRASLMARLHGLSQLDKRYSDPEKALAEMHKARKLAALEKREQTRIARNRAAFEQALAWYQRQKKQFTFLGESVSAGLSQKASDPLRLSTRHLIHFQSVEDVARQMDISTAELRFLCYRKEVSTVTHYQEFELPKKSGGTRVISAPMPRMKRAQYWLLDYVLNLLPVHDAAHGFVPGRSIVTNAQPHVGKAVVINLDLKDFFPSITYRRVKGLFGKLGYSEELATTFALLATKPVTQAVEMDGRTWHVAQGEHVLPQGSPCSPMITNVLCRRMDARLQGMADKLGFTYTRYADDLTFSSQDAGKVQSLLWRCKQIVTDEGFVVHPEKTRVIRRHQRQEVTGVVVNDRLSVDRATLKRFRAVLQQVALDGPEGKTWGAGELFQSLAGYANFVAMVNPEKGLPLQKQVLHLKRQYGFTVPKGKIGELNKRLFRLKVARGQKPRTHWWQPEEKPMPVLALTPKQRQEELEQKRAVVPKKEASVSDVEPEETEAASDEVKLSPFAWVMVVAVMPFALLWMFIKAPIKSKLWVLGIGAVIYWLFFS

SEQ ID NO: 6042 - protein, 603 aa, unidentified
  source 1..603: note = Related to NZ_CP073578.1; note = Photobacterium sp.
MSDSNKHQSAETVQDPSPKLTRQQIYDRIRQSSKDDYILREMIRLGFWKSDKDQPSLTERFVAKRTALITRLRTLTQLDRLYSDPEKALAAMHKARKKAALEKREQTRIARNQTRFEKALAWYQRQREAFTFLGESVSGGLARKTSDPLRLSRYQLMHFQSVAEVAGSMAIPMSELRFLCYRKEVSPVSHYQDFEVAKKSGGTRIISAPMPRMKRAQYWLLDAVLTRIPVHDAAHGFVPERSIVSNARPHVGKAVVINLDLKDFFPTISYRRVKGMFHQLGYSEELATTFALIATKPVTQAVEMDGKIWHVAQGEHVLPQGSPCSPAISNLLCRRMDARLQGMADKLGFTYTRYADDLTFSSDDVSKVQSLLWRCKQIVADEGFVVHPEKTRVMRRHQRQEVTGVVVNDGLSVERKTLKQFRAVLRQVELDGPAGKQWGKGELFQSLAGYANFVAMVNPEKGIPLQKQVVRLKRQYGFSVPKGKMGELNKRLFRLKVARGESPRSRWWQPHEKPAPELALTQQQKAAQRQAAKADSVSPQVVTPAATSETDSETDPTAFSPMMWVMMMLTLPFALLWMLVTASWKTKLWVLSLGYVLYWLFFG

SEQ ID NO: 6043 - protein, 607 aa, unidentified
  source 1..607: note = Related to BMYC01000011.1; note = Photobacterium aphoticum
MRNSDPSQNNSNNNNNSVLPPEPSPKLTRQQIYDRIRQSSKDEYILSEMIRLGFWQKDRTKPSIAEKFIEKRSALLSRLRELTRLNRLYQDPEKALLALHKTRKKAALEKREQIRINHNLARYEKALRWHKKQQTHFTYLGDAGYGDKALTAGLQQTTCDTARLTAHGLPAFSHVGELADAMGISTSELRFLCYQKDVSTVSHYQHFALSKKTGGTRLISAPMPRMKRAQYWLLDNVLNLLPIHDAAHGFIQGRSIVTNAKPHTNKQVVINLDLKDFFPSITYPRVKGIFKQSGYSEALATTFALIATKSDTQAVEMDGQTYHIANGKRELPQGSPCSPAITNVLCRRLDARLQGMAHKLGFTYTRYADDLTFSSDETDKIQYVLWRCQRIVTDEGFTLHPDKTRVMRKHQKQEVTGIVVNDGLSVDRPTLKRFRAVVRQIELDGHYGKHWGTGELFQSLTGYANFVAMVAPEKGIPLQKQVAHLKRQYNIPVAAGKITALNKRLFRLKAAKGEAPREAWWQPAEKPAPVLALTQQQMDAQKQQARQAAKANQANTHSAHPEMAPDHTNPAFISGGNETNTASPNRFGSPVVWTVVVVLLLLKIFVY

SEQ ID NO: 6044 - protein, 632 aa, Vibrio sp.
  source 1..632: note = Related to PIZL01000001.1
MSDSSSQSTSRSNSSNASHQEASVTDSAPKLTRQQIYDRIRESSKDEYILQEMIRLGFWNKDDEQPSLTQEFIERRSELTRKLRELSDLDSLYADPEKALEALHKERKKAALEKREQTRQALNQKRYDRALAWYNQQKETFTWLGDDVSLGLKNKENDDGRLEERELPTFENIAALAGAMGISVSELRFLAYQKDVSNVSHYQRFSIAKKTGGLRHISAPMPRLKRAQYWLLDNILAKLSVHDAAHGFVTGRSIVSNAQPHVGKAVVINMDLKDFFPSISYKRVKGLFQSQGYSEELATVFGLLTTESETQELEMDGQTWFVAQGERRLPQGSPCSPAITNVMCRRLDARLQGMADKLGFAYTRYADDLTFSTDSAEKAQALLWRAKQIVVSEGFTLHPDKTRVMRRHQKQEVTGVVVNEKLSIDRKTLKRFRATLKQIELDGPDGKHWGAGELFASMEGYANFVAMVDAEKGIPLQKTLVHLKRQHGVTTKHGKVTELNKRLLRVKAANGENPKEGWWQPEEKPAPELELTPNQIAERKRAIKRQRNQEQRENQGANSEWQDADFNQDNEANQGDGWSDLESDAKKKWTTREYILGLLFLPIVLVMLFFKAPWNIKCIVVGVLWLLYLYLN

SEQ ID NO: 6045 - protein, 616 aa, Vibrio sp.
  source 1..616: note = Related to CAOA01000064.1; note = Vibrio nigripulchritudo
MSDTSHHSSQSDSQEATLSDSAPKLTRQEIYDRIRETSKDEYILQEMIRLGFWDKDEEQPNLTQEFIERRAELMRKMRELSQLDSLYSDPEKALEALHKERKKAALEKREQTRQARNQERYERALAWYHKQKESFTWLGDDVSLGLVNKESDAGKLENQDLPHFENIASLAQAMGISVSELRFLAYQKDVSNVSHYQRFTIAKKSGGERHISAPMPRLKRAQYWLLDNVLEKLTVHQAAHGFVSGKSIVTNAQPHVGKAVVINMDLKDFFPSISYKRVKGLFRAQGYSEELATVFGLLTTEPEVQELEMDGKTWFVAQGERRLPQGSPCSPAITNALCRRLDARLQGMADKLGFTYSRYADDLTFSTDEPDKVQSLLWRAKQIVSDEGFTLHPEKTRVMRRHQKQEVTGVVVNDKLSVDRKTLKRFRAVLKQIELDGPEGKTWGAGDLFRSLEGYANFVAMVDPEKGIPLQKTLVHLKRQYGIQTKHGKVTALNKRLLRAKAAKGEASRENWWQPEEKPEPELELTPNQKAEQKRAEQSARRAEQRANTESQNVESEQGDGWDELDSDANKVWTPREYVLVTLMLPLVLIHLFFRAPWNVKCIVVGVLWLLYLYLT

SEQ ID NO: 6046 - protein, 592 aa, unidentified
  source 1..592: note = Related to NZ_JAIMJA010000004.1; note = Motilimonas cestriensis
MSESSTKLTRQEIYDKIRKSSKEEYILDEMKRLGFWRNDEEQPNLTQEFVEKRAQLMAQLRELSSQDELYSDPEKALAHLHQERKKAALEKREQVRQTRNKTRYENALNWYQKQQKEITYLGEKFSAGLSEKISDKSKLTSQGLPYFADSQALAQGMGISIGELRFLCYQKEVSQTSHYKKFAIEKKTGGKRHISAPMPRLKRAQYWLLENVLAPVKLHSAAHGFVPGRSILSNALPHINKGVVVNFDLKDFFPSISYARVKGLFCKQGYSEELGTLFALLATEPDTEAVAMDGQIWHIDQGPRILPQGAPCSPAITNILCRRLDARLAGMAEKLGFAYTRYADDLSFSSDEPNKVQSLLWRVKQIVTSEGFLLHPDKTKVMRRHQKQEVTGVVVNEKASVDRKTLKRFRAILHQIDLYGPEGKSWGPGALFPSLEGYANFVAMLDAQKGIPLQKQLVHIKRKYGVKTRSSKVTQLNKRLMRVKAGLGEAPRENWWQPAEKPEPILELTPKQQAAQKQARKVTGPVEQEYAESASEQNPQSEAEEDTKLSTKDYIFIGLFMPIALAQMIYKASWKTKIKLMVVGTIIWLLFG

SEQ ID NO: 6047 - protein, 569 aa, Citrobacter sp.
  source 1..569: note = Related to NZ_CP057483.1
MSESPKLTRQQLYERIRETSKEEVILAEMIRLGFWDGEQKKPDLTAEFIAQRAALEKRLAELGQQQQLYSDPQKALRELHKARKKAALEKREQTRIARNQARYERAQQWHQKQQSEISWLGEGFSFGLSDTTQNEARLKQQNLPLLADSQTLATLMGITINELRFLCFQKDVSRINHYRRFSLLKKSGGERLISAPMPRLKRAQYWILENILNRVKLHDAAHGFVAGRSILTNALPHVGRAVVINLDMENFFPTVSYRRVKGLFRQLGYGEQIATELALLTTEPETEQVVLDGENWFVQQGERFLPQGAPSSPAISNIICRRLDSRLHAMAHKLGFAYTRYADDMTFSCADNRGNVQQLLWRCKQIVQDEGFRVHPQKTRVMRKPQQQQVTGIVVNEKPSLDRKTLKRFRALLFQIAKDGMEGKRWGPGELMASIEGYANFVALVAPGKGIPLQKQVTDIKRQYGYATQPGRITALNKKLFRAKAARGESPRDSWWQAQGPSAPELEQTALQKQALRRAASAAEDVPSAAKNASVPDDFAETPPERPKKSSRLWWWFLAFVVYLIFRWA

SEQ ID NO: 6048 - protein, 567 aa, Citrobacter sp.
  source 1..567: note = Related to NZ_CP011132.1; note = Citrobacter amalonaticus
MSETPKLTRQQIYERIRETSKEEYIQAEMIRLGFWDATQEKPDLTTEFITRRAALEKQLAELGRKQQLYSDPQKALRELHKARKKAALEKREQTRIARNKARYERAQQWHEKQRSEITYLGAGYSFGLDETTHDDARLQQHHLPQLANSQALATAMGITLNELRFLCFQKEVSRINHYRRFSLMKKNGGQRLISAPMPRLKRAQYWILENILNRVPLHDAAHGFVTGRSILSNALPHVNQAIVVNLDMENFFPTVNYRRVKGVFRQLGYSEQIATELALLTTEPEAEQVVLDGENWFVQQGERFLPQGAPSSPALSNIICRRLDSRMHGMANKLGFTYTRYADDMTFSCADKSANVQQLLWRCKQIVQDEGFRLHSEKTRVMRKPQKQEVTGIVVNEKPSLDRKTLKRFRALLFQIAKDGIEGKRWGAGELMASLEGYANFVAQVAPDKGIPLQKQVTDLKRRFGYATRPGRITALNKTLFRAKAARGEAPRDNWWQAQGPSAPVLELTMQQKQAMRRPVSVTSPTSPNNDTPRTVNADAPAHQPARTSVKWWIILIAIILYFLMRK

SEQ ID NO: 6049 - protein, 536 aa, unidentified
  source 1..536: note = Related to NZ_HE578945.1; note = Phytobacter massiliensis
MSESPKLTRQQIYERIRETSKEEYILAEMIRLGFWDASQEKPDLTAEFIAERAALQKKLASLGERQRLYDDPQKALRELHKTRKKAALEKREQTRIARNQARYERAQRWHQTQQSTITWLGEGYSFGLDDTTHNEARLAQQNLPPLADSQALASAMGITLNELRFLCFQKAVSRVNHYRRFSIAKKSGGERFISAPMPRMKRAQYWILENILNRVALHDAAHGFVAGRSILTNALPHVNRAIVVNLDMENFFPTVSYRRVKGLFRQLGYAEQLATELALLTTEPEAEQVALDGENWFIQQGERTLPQGAPSSPAISNIICRRLDSRLHAMAQKLGFTYTRYADDMTFSSADKTANVQQLLWRCKQIVNDEGFRLHPEKTRVMRKPQKQEVTGIVVNEKPSVDRKTLKRFRALLFQIAKDGTQGKRWGAGELMASLEGYANFVALIAPEKGIPLQKQVTDLKRQYGYVTQPGRITALNKKLFRARAARGEAPREKWWQAQGPAAPVLEQTPQQKQPAPQPAPVSSQPEPQSFAARRG

SEQ ID NO: 6050 - protein, 566 aa, unidentified
  source 1..566: note = Related to NZ_CP051548.1; note = Phytobacter diazotrophicus
MSESSKLTRQQIYERIRETSKEEYILAEMIRLGFWDETQDKPALTAEFIAQRAALQKQLAELGQKQRLYDDPQKALRELHKTRKKAALEKREQTRIARNEARYARALQWHQKQQAEITWLGEGVSFGLADTAHNEARLQAQKLPLLADSQALASAMGITINELRFLCFQKNVSRVNHYRRFSLAKKNGGERLISAPMPRMKRAQYWILENILNRVKLHEAAHGFVTGRSILSNALPHVNQAIVVNLDMENFFPTVNYRRVKGLFRQLGYAEQLATELALLTTEPEVTQVALDGETWFVQEDARFLPQGAPTSPAISNIICRRLDSRLQAMAQKLGFVYTRYADDMTFSCAQPSANVQQLLWRCKQIVQDEGFKIHPEKTRVMRKPQKQEVTGIVVNEKPSVDRKTLKRFRALLFQIAKDGMEGKRWGSGELMASLEGYANFVAMVAPEKGIVLQKQVTDLKRQYGYTTQPGRITALNKQLFRAKAARGESPRDNWWQAQEAPPPVLEQTAQQQATQKATSSATEALHFDAQPETHAGQVPDKSRSPLRFFWVLILVLLIMILARMF

SEQ ID NO: 6051 - protein, 587 aa, unidentified
  source 1..587: note = Related to NC_007645.1; note = Hahella chejuensis
MSEEKKLTRQEIYQRIRETSKDEYILSEMVRLGFWPDNSEKPTLSEAFIKKRTELQAALRELGQQQMLYSDPEKALKEMHKQRKQAALAKREETRRKRNEERFQRAQHWREVQAHQITYLGEGVSGGLEDATADEARLRSQNLPIINAAEELATAMGVTLNELRFLAYSKEVSKLSHYQQFAIAKKTGGVREISAPMPRMKRAQYWVLDNILAPLTLHEAAHGFVVERSIVSNAQPHVGKDVVINLDLKDFFPTVSYARIKGAFRHLGYSEQIATILGLLCSQPKTQEVEMDGQKWFVSEGERFLPQGAPTSPAISNVICRKLDRRLQSMAAKLGFTYTRYADDVTFSADGKSDDDVKRLLWRCRSIIKDEGFVVHPDKTRIMRKHRRQEVTGVVVNDKASVERKQLKRFRALLFQIDRDGPAGKSWGRGELFAAIDGFANYVAMVNPVKGVPLQQKVAQLKLKYGVKVKPSRVLALNKKRMRLKAAKGEAPREDWWQAQASAAPELEKTAEQVKEERKAEKAEQQTQAVPAASSADPAPVRTSTPVQSQQQAQPSAPAPEGESHAKTGWIMLAIGILIYLAMKMLG

SEQ ID NO: 6052 - protein, 575 aa, unidentified
  source 1..575: note = Related to NZ_CP020038.1; note = Agarilytica rhodophyticola
MSDGNKLTRQQLYQRIRETSKDEYILSEMKRLGFWPEDSDKPSLAEEFINEKSEISKKLRELGQKQGLYSDPEAALKELHKQRKKQALERREQKRQERNQARYDRASRWYTTQQKLITYVGDHFSKSLNNVESHEDKLKQQGLPVLHSSKDLAGAMGITLNELRFLAYQKDVSAVNHYQHFEILKKTGGSRLISAPMPRLKRAQYWVLANVLEPLSIHDAAHGFVPKRSIVSNAIPHVGKDIVINLDLKDFFPTVTYPRIKGVFHTLGYSEHLATILGLLCTQSNIQEVELDGQTWFVGNGERYLPQGAPTSPNLTNILCRKLDARLNGMAEKLGFTYTRYADDLTFSSDSKDEQQVKKLLWRCRKIVQDEGFVIHPKKTRIMRRHKKQEVTGITVNDKMGVDKKTLKRFRAVLFQIDKDGPDGKTWGNGDIFCAIDGYANYVAMVSPDKGIALQQQVAHIKRKYGVNVKKGKVLSLNKKLLRLKAAAGEHPRQEWWQALPPAKPEKEKTAEEIKQSKVTDQQEKSKDRDNKNHWTQANTNLSQDDKKVSSTGYNMLKIFLFVTALAIAYSFLKN

SEQ ID NO: 6053 - protein, 574 aa, unidentified
  source 1..574: note = Related to NZ_ML660163.1; note = Aliikangiella coralliicola
MSASSPGKLTRQQLYDLIRESSKDEYILSEMIRLGYWNEDSGKPSLPAELIARKGELEREFQALLKKQQQYQDPQKALKELHKQRKAEALKRREETKQNNNEARYQRAVNWHNKNQAEITYLGEDFSAGLQGSFTDRERLTNQELPVIDSSLALAKAMGISINELRFLSFGRKTSKTTHYQQFLIEKKTGGTRRISAPMPRLKRLQYWILGNILEKLPLHDTAHGFVAQRSIVTNAKPHVGADVVVNMDLKDFFPTVTYKRIKGLFCKLGYSEQVATVLALLCSEPEIDEVELDGETFYVARGERYLPQGAPTSPAISNLLCRNLDRRVFGASKKLDFTYTRYADDLTFSGTRKSAHQLRKLLWRVEQIVIDEGFVVHPDKTRIMRKNARQEVTGLVVNQKLSVDRKTLKQFRALLFQIEKDGIEGKVWGKGQLIPSIEGYANFVAMVNPEKGLALQKRVTQIKKQYGFEVKPGKLAALNKKIMRVKATRGEAPREDWWQAEPKPSPVKENTAEQLKAQKKAKAIEKKEAEQSLPEHSTNEQREIENTEDTNNIGTLMIYIAIGLLLIVIFLGS

SEQ ID NO: 6054 - protein, 567 aa, unidentified
  source 1..567: note = Related to JALJPK010000085.1; note = Pseudomonadales bacterium
MQTSAPGKLTRQQLYDLIKQSSKDGYILKEMIRLGFWNETTGKPSLTQEFITRKGELEKQYSQLLSLHHKYQSTESLLKDFHKQRKAKALLNREETKLKNKQIKFEKAQNWFKRNLTEILYLGENVSAGLNGKFTDHDKLKSNSLPVIENFETLAQSIGVSVSEIRFLSYDRKVSKVSHYQQFLIAKKTGGTRKISAPMPRLKHVQYWILTNILEKVAIHDSAHGFVTGKSIVTNAKPHVGADVVINMDLENFFPTVNYKRIKGVFCNLGYSEKISTVLALLCSESDNCEVVLDGQTYYRNQGERVLPQGAPTSPALTNILCRKLDRRMLGMSDKLGFKYTRYADDLTFSSSQQTAHNLQKLFWRVNQIIPDEGFILHPDKTRVMRRNNKQEVTGVVVNEKLSVDRKTLKKFRALLFQINKDGVGDKTWGKGALIPSIEGYANFVYMVNPIKGVALQKAVVLIKQKYGMPVKPHKLSLLNKKLMRLKAKEGLLPKKDWWIPKQKTTPLVELTQKQNEEAKIEHKQQITDDNRNVNILTPQSDKPKSYGYVFYVIAVVIFILFQIFNK

SEQ ID NO: 6055 - protein, 593 aa, unidentified
  source 1..593: note = Related to NZ_CP048878.1; note = Spartinivicinus ruber
MSDQQSTPASPSRLTRQQLYDRIRESSKDEYILAEMKRLGFWDASEDRPSLSESLIIKQGELERELRELLAKQRQLKNPEKALKAMHKQRMKEARDKREVTRQHQAEERYQRSLAWYNKSQQTLSYLGEKVSSRLDSVEAQQARLLDNHLPIIKSYLQLATMMGVSLAELRFLAFSRNVSQVSHYQHFLLPKKNGGTRLISAPMPRLKRVQYWVQANILESVALHDAAHGFVTKRSIVSNAEPHVGKAVVINMDLADFFPTISYPRVKGVFSHLGYGEGIATVLALITTAQTVTPVELDGKQYFVGQGVRHLPQGAPSSPALTNIICRRLDKRILGTAQKLGFAYTRYADDLSFSSEQGEPAKVRQLLWRIKRIVKEEGFAVHPNKTRVMYRHKRQEVTGVVVNDKPSVDRRTLKRFRALLFQIEKDGITGKSWGTKSGKESAALIPSIDGYANYVAMVSPEKGVKLQQQVAKIKQQQGFQVSPKRVMALNRKLFKQKAMKGEAPRDSWWQPAEKQPPVKELTSLQLEAEKQQEKVECSAEQQADKKQPLVEQVQPPVQIHTKPKTQQFQFDKHHYWVIFWIGLLLLLLMIFN

SEQ ID NO: 6056 - protein, 589 aa, unidentified
  source 1..589: note = Related to NZ_SUNB01000001.1; note = Pleionea sediminis
MSEISPGKLTRQQLYDRIRESSKDEYILEEMKRLGFWDESEQPPEAEELIKEKARLRKELNKLLRNKRLMDDPEKALELMHKERKKKALEKRKETKKERIKSAYERALNWFKLNQKEITYLGENTKIEISQTETNEQKLNQQNLPKFVESSELAEAMGLCLSELRFLTYTRDVSKVTHYQRFSLVKKSGGVRHISAPMPRLKRIQYWVKTNILDTLPLHDCAHGFVKERSIVSNAAPHIGQSIVINMDLKDFFPTITYKRVKGLFQQLGYNEKISILFALLTTEPHCDELSLDTETYYVAQGKRLLPQGAPTSPAIANLICRRLDRRISDCAKKLGFEYTRYADDLTFSIKDNDSDKVRKLLWRVKAIIKDEGFNLHPEKTRIMRSHQQQEVTGIVVNEKINLSRKKLKRLRATLFQIEKDGFSGKNWDDSKDILRSLTGFVNYYAMVDPAKSVKYKEQLKRIIQKHPYEISKTPFIGKLKKSVFIEKSKQGLSPWDDWWQPVEKTEPELILPKENEKQDSRRKATDSIESTSSSQSNRGSTRNRSSELPELIGKGFFTVTLIIIAVALAKVSPLILLLAGYLIYRLWK

SEQ ID NO: 6057 - protein, 580 aa, unidentified
  source 1..580: note = Related to CP059265.1; note = Candidatus Thiothrix singaporensis
MSQLTRQQLYDQIKAXPKDEYILSEMKRLGYWKEAEQPTLAESIIQRRGELQRQINALSSQASDPAAALKAIHQERMAAARQQRIDTKVKRETARYQRALAWHERRQQHIHYLGDAAGFQPSAAADVADAERLRSLNLPVLSNAAELAAAMGVTLNELRFLTYSNQVARICHYQHFAIQXKSGGVRLISAPMPRLKRLQYWVLDNILQPLELTEQAHGFVKGRSIVSNARPHVGXKVVINMDLQDFFPTVTYPRILGTFAQLGYNREVAALLALLCSEPDTQIVEMDGKRYYLNQSTRRLPQGAPTSPALSNVICRRLDRRLQGLAHKHGFTYTRYADDLTFSGDDSTAIRALLHWRATVTEEGFNPHPDKTRIMQQGRRQEVTGIVVNQQLSLERQALKRFRALLFQIEKDGYAGKSWGNGCNLLASIKSYAHYVRMVHPEKGERFLAQIAVIQQKHGKPDGNGRAWGRTTDTFRARSAQGQAPLDGLRVAPVRPAPQLEQLIQHRDVLPQVQAALGLQPVAEATSTDISPSASTEGQAAGESSGGLVSTLLSFYGGDKHAIDPAHNPAFSGRLFRQSL

SEQ ID NO: 6058 - protein, 556 aa, unidentified
  source 1..556: note = Related to NZ_FNQP01000009.1; note = Thiothrix caldifontis
MSQLTRQQLYDKIKETSKDEYILSEMQRLGYWKEDAQPTLAASLIKRRGDLQRQINALSSQITDPQAALKAIHQERMAAARQQRIDTKVKREVDRYHRAQAWHEKQQNHIHYLGDAAGFKPSAAADVSDAERLNSLGLPVYSNAAELAAGMGITLNELRFLTYSNQVSRVCHYQHFAMQKKSGGTRLISAPMPRLKRLQYWVLDNILQPLELTEQAHGFVTGRSIVSNAQPHLAQKVVINMDLKDFFPTVTYPRIKGTFAQLGYNNEVASLLALLCSEADTQTVEMDGQRYYLNSTSRRLPQGAPTSPALSNVICRTLDKRLQGLATKHGFAYTRYADDLTFSGTDTAAVPALLYGAKATVTAEGFNVHPDKTRIMKQGSKQEVTGIVVNQHLSVDNKKLKQFRALLFQIDKDGYGDKSWGNGYNILASIKSYAHYVRMVNPEKGSQFLQQIAAIQQKHGKPNVAMKFSTTQFRERAAQGKLPLDAMHVAPIKPAPTLDDTIQHRDVLPQVEAALGLSVPEAVETEPESTPATTPETPNQPQGLVSTLMSLLRGKS

SEQ ID NO: 6059 - protein, 559 aa, unidentified
  source 1..559: note = Related to SSFA01000023.1; note = Thiothrix sp.
MTNLTRQQIYDQIKATSKEQFILSEMQRLGYWPNPEAPTLHSELIKRKTQLQQGIRELSQQVDDPQAALKQLHKTRMAEALAKREQTKINRELKRYEKALSWHERRQNQLDYLGDAAGYKPSPNPQDSHSQTLLHYHLPVCSTGKELAALMGVTLNELRFLTYTNQVSTVQHYQQFALAKKTGGTRLISAPMPRLKRLQYWILEQVLQPLALTDQAHGFVQGRSIVTNARPHLGQAVVINLDLKDFFPTITYPRIKGVFEQLGYNHEIATLFALLCSEPITQTVELDGQRYYLAQNPRRLPQGAPTSPYLSNLITRQLDKRLQGLAQKYGFVYTRYADDLTFSSASTEAPTCGLLHWIKAIVQEEGFQLHPDKTRIMHKGRRQEVTGLVVNQQLNIERQTLKQFRALLFQIQKDGYVGKSWGKNRNLLASIKSYAHYVRMVNPVKGEQFLQQIAVIQQTHGVPAQTLKYSTQDFRQRSAQGQLPLATMQIAQASHKPQLEDIIQYSEVIEQIRAELKLAPPQTSLNTETSPPYPPPISEPASLIHNVISLFSGLFRGKL

SEQ ID NO: 6060 - protein, 576 aa, unidentified
  source 1..576: note = Related to JAKIVF010000151.1; note = Methylococcaceae bacterium
MTQLSRQELYDKIKETSKDEYILSEMQRLGYWKEGEKPSVAETLIKKKAELQTEINKLSREIKDPKEALKAIHKQRMAEARQRRIDTKVKQELKRFKSAEEWHKRKQNKIEYLGNACSTNSKSDETAKNTNSDKLRLHQLPTCSTAIQLAEAIAITLNELRFLCYTNEVSKITHYQRFGIHKKTGGVRLISAPMPRLKRLQYWVLDNILQKIPLSNNAHGFVPLRSIVTNAQPHVGKKVVINMDLKDFFPTVGYPRIKGLFANQGYGEEVSILLALICSEPDTQTVEMDGQRYYIHSKERFLPQGAPTSPAISNIICYRMDKRLQGLAKKYGFVYTRYADDLTFSSQDIDKIMPLLNWVKATVTEEGFVVHPEKTRIMHQGVRQEVTGIVVNEQLSVNRKHLKQFRALLFQIKKDGYGNKKWGKGGSLLPTLKGYAHFVKMVNPLKGQQFLTQIQEIIQLHGYPNETPKQGRSTSDFRKAAAQGKLPLGSMQVAQPTLPPDINKMIQHRDVLDLVREELGLPALEDPKQKKETGSSDKPMVQPLTAEDENRSHVNENDINSSGFFSRIKSLFGGDK

SEQ ID NO: 6061 - protein, 562 aa, unidentified
  source 1..562: note = Related to QOAQ01000092.1; note = Aquificaceae bacterium
MTQLSRQELYDKIKETSKDEYILSEMKRLGYWKEGDKPSVAATLIKRKTELQTEIYKLSREIKDPKAALQAIHKQRMAEARQRRVDTKVAYELRRYQRATDWYQRKLSTIDYLGSACVLTQEKKQKIKVLDTAKLARYQLPNISTAKELAEQMGVTLNELRFLCYTNEVSKITHYQRFGIHKKTGGTRMISAPMPRLKRLQYWVLDNLLQKIPLAEQAHGFVPSKSIVTNAKPHIGKKVVINMDLKNFFPTVSYPRIKGVFLSQGYNDEVATLFALICSEPETQTVEMDGQRYYIHSKQRYLPQGAPTSPNISNIICYKLDKRLQGLANKYGFVYTRYADDMTFSSNDASKVKALLNWVKATVTEEGFIIHPEKTRIMHQGARQEVTGLVVNEKLSVSRKQLKQFRALLYQIKKDGYDGKQWGKGGSLLPTIKGFAHFVKMVNAEKGEKFLANIKEIIDLHGYPDADKKQNKTSDDFRKAAAQGKLPLNSMRIATAPPPPDINTMIQNTDVLDLVRKELGLSENNPETTNDTAISSAQSEDNREEGSAGFLARLKTFLGGEK

SEQ ID NO: 6062 - protein, 528 aa, unidentified
  source 1..528: note = Related to JADMKE010000002.1; note = Candidatus Sericytochromatia bacterium
MGLSRQELYEQIKASSKEGYILAEMQRLGFWTESEPQPARELIARKAEIQQEIASLSAKIKDPEAALKLIHKQRMAAALEKRLQTRIKRELKRFQSAHLHHQNKQKKLITLGDAAHFGPKQQATQSEKLQAYKLPEIDTALELAEHAGITLNELRFLTYSRRVSKLSHYQRFEMAKKTGGTRLISAPMPRLKRLQYWILEHILNPLPVTPAAHGFVPQKGILSNARPHIGKKVVINLDLKDFFPTISYPRVKGLFLSLGYGNEVATLLSLLCTEAESQQVEIDGQRYFIAADQRRLPQGSPCSPAISNQICKRLDKRLAGLAQKWNFAYTRYADDLTFSADSSQYLGALFKGLRQILKAEGFVLHPDKTRIMHQGARQEVTGLVVNQGLSVSASTLKRFRALLFQLDKDGLNGKTWAGHSSTEPGFLERLQGFAQYIRMVQPEKGQKLCAHLQAIRQKYPDTGLLSAHSTLPKGKKTAFRQKSANAELPLPGQRVAPVPPPPRLAETILDRGILAEVEAAWQAQGGQV

SEQ ID NO: 6063 - protein, 554 aa, unidentified
  source 1..554: note = Related to CP002831.1; note = Saprospira grandis
MQLLSILDQLGFGLSSPKLKVVFFCLNLLPMSDHRMTRQQIYDRIRQTSKEEYILEEMKRLGFWDTTEEAPKISEELIQKKGALRRELRELMEKQRMFRDKERMLAEMRKKRMADALARREETKERRKAEKEARAKAWQEKKERSIVFLGKDYSAGLSEEEADLAKLAALNLPAFKDIKELAEAMDISVGRLRYLCFQRKLSTVSHYERFYLAKKTGGKRLISAPRPMLKNAQYWLLENVLARLEMHEAAHGFVPERSIVSNAKLHEKKELVINMDLKDFFPTVTYPRVKGMFKGLGYSEQQSIIFALLTTEPEVDQVEIDGQLYYAQKGERYLPQGAPTSPAITNWLCRRMDRRFEGVAKKLGWTYSRYADDLSFSANDTSNISRIIWQAQQIIQDEGFVIHPKKLKIMRKGRRQEVTGLTVNEQVAVDRKTLKKFRACLHTIETKGYQAAEWGQGFILASIKGFANYVRMVQAEKGQALCEQVDRILAKEENKQAWKAYFANPSRKKYAYEAQKQQATIEANAVDFGSSGLAESLTPVDPQQKDEEQWWSLW

SEQ ID NO: 6064 - protein, 500 aa, unidentified
  source 1..500: note = Related to JABWAJ010000099.1; note = Saprospiraceae bacterium
MTRQEIWDRIKELGGRDEFILHEMKRLGFWDVSEGVPQLSESLREQRKSLEGELKEALQQQAVYKNKKKMLRDMRQKRMAEAKARRVETKERRERQRAEKAAAWAEAQQQDIGWLGPAVSAGLQQKESNVPQLESFGLPVFNGVKGLAEAMNLPLNELRFLAFDRQVSRTCHYQRFKVAKKTGGFREISAPAPRLKKAQHWILDHLLYKLQLHEAAHGFVPQRSILSNALPHVGAQVVINMDVKDFFPSVSYRRVKGVFQSLGYSEQLATILGLICTEPQTDEVTLDGQRFFVAKGDRRLPQGAPTSPAITNILCRGLDRRFEGMAKALGWTYTRYADDLTFSKKATDARDVNRVLWQARQIVENEGFVLHPDKIKVMRKGTRQEVTGVVVNEKPNVSRAKLKQFRAVLHRIETQGLSAADFGKGQVLESIQGFANYVWMINPEKGAALKAQVKNILAKPELQQVLAQKNTYPEKGKVAIFTPYKDKEVQPLSTDWWRLW

SEQ ID NO: 6065 - protein, 517 aa, unidentified
  source 1..517: note = Related to CACVAP010000086.1; note = Sulfurovum sp.
MTRQELYDEIKKTSKDSYILSEMKRLGFWDSAKPKVAQELIEKKTALQKELNGLSTKIRNPEAVIKDIHKQRMADALLRREETKAKKEKIFQENLAKRQEKKNSELGFIGHAFMADLDEKESNQKLLNENNLFLIKDAKDLASKMGITLKELRFLTHTQKLSNRTDYVHFKMVKKSGGFREISAPKPQLKRLQYWILENILNKVAVSNEAHGFVAKRSIVSNAKPHLQKALVINCDLENFFPTLSYARVKGLFKSLGYSVELATILAILTTEAEQKEVLLDGEKLYLYTGKRYLPQGSPASPMITNLICRKLDKRMSGISKSLDFNYTRYADDMTFSSDTYLNINKMMFWIKGIVKEEGFILHPKKTKIMKKGARHEVTGIVVNEKLSVNRKNLKKFRALLYQIEESGLEGKRWQGKSENLMASVWGYANFINMVDPEKGAKYKKQVEVLLEKYPLGNLGSSSGEFRAKSAKGEQPWESKVQEIEAKTLEPEMQVKEVAEQKETPSFVNNILSMFRK

SEQ ID NO: 6066 - protein, 520 aa, unidentified
  source 1..520: note = Related to CACVAX010000056.1; note = Sulfurovum sp.
MTRQELYDEIKKTSKDSYILTEMKRLGFWDNAKPKMPEELIEKKTELQHELNQLSTKIKNPASVIKEIHKQRMADALVRREETKAKREAQAQKKAKERAEKKENKLGFIGHSFIHDDETSAKLELLVTNNLFLIKDAKDLANKMGIDLKALRFLTYTQKLSRQSNYVHFKMAKKTGGFREISAPKPQLKRLQYWILENILNKVAVHEKAHGFVTNKSIMSNAQPHIGKAVVINCDLENFFPTLDYGRVKGLFKSLGYSAEVATILAILTTEAQQKEVTLDGEKLYLYTGKRYLPQGSPASPMITNLICRKLDKRMSGIADSLAFTYTRYADDMTFSATAYQNINKMMFWIKKVTKEEGFILHSKKTKIMKKGACHEVTGIVVNEKLSVNRKELKKFRALLYQIEQHGLEGKSWQGKTENLMASVLGYANFINMVDPVKGADYLKRVKALLQKYPMPSLGLSDKTFRIKSAEGKQPWESKPVFLVTEETRVVSSKELGEEASKTTLENPSFLNNILDMFRK

SEQ ID NO: 6067 - protein, 521 aa, unidentified
  source 1..521: note = Related to DQOI01000098.1; note = Campylobacterales bacterium
MTRQELYDEIKKTSKDSYILSEMKRLGFWNNSKPKVATELIEKKTKLQQELNQLSTKIKNPEAVIKDIHKQRMADALVRREETKAKREAKEQEAIKNRREKKENNIGFIGGSFISDINEQEANTELLKSNNLFLIKDSRDLANKMGINLKQLRFLTYTQKLSNRTDYVRFKMAKKTGGFREISAPKPKLKRLQYWILDNILNKVEVSEQTHGFVVKRSIISNATPHINRAVVINCDLQNFFPTLSYPRVKGLFKSLGYSAEIATILAILTTEAEQKEVVLDGEKLYLYTGKRYLPQGSPASPMITNLICRKMDKRMQGIATTLNFTYTRYADDMTFSANEYPNINKMLYWVKGITKEEGFTLHPEKTRIMKKGSCQEVTGVVVNEKASVNKKELKKFRALLYQIEQTGIEGKSWHGKSENLVAVIWGYANFIKMVDSEKGAKYMAQVKAIMEKYPSLNITSTTNEFRVKSAKGEQPWEDEIIEEIEEVTEVVTDQTKTNVQEKEVPTTPSYINNILNMFRK

SEQ ID NO: 6068 - protein, 629 aa, unidentified
  source 1..629: note = Related to NZ_QGKL01000042.1; note = Leucothrix arctica
MFNSAPGQLTRQELYDKIRETSKDEYILAEMKRLGFWESDDDKPEVPETIIKRRGELQRQLNDLLKQQRLYSDPEEALKALRKERMQAALQKRVETRKKKADERHERALTWHEKQQHTISWLGEAVSLGLTAPTADSNASHQGSTTSLSSDQAVSAHGANTQNEAVNNASGMKHQDLPTFDNHKALAESIGITLNELRFLSFQRSTSKVSHYQHFQIAKKTGGFREISAPMPRLKRAQYWVLDNILCHVPLHEAAHGFVAGRSILTNAKPHVGQAVVVNLDLQNFFPTISYRRIKGLFHKMGYDESIATVLALLCSEADTQKMELDGEQWFVQQGEQHLPQGAPTSPTISNIICRSLDVRLQGLAKKHGFNYSRYADDMTFSGDKTARESLRKLLWGVQAIVADEGFILHPDKTRIMNKGQQQEVTGIVVNDYPSIDRKTLRRFRALLHQVEQTGIQGKSWNGVSEPEHLLRSMLGFSNFVAMVLPEKGEAFKQQAKALYEKHSNKVGTKTIGQLRKAEFRKRAAAGQAPWESWKEAPVKIAPVREKTVDELQEERNQVLAERREAKKIEKEQQDRQRSRRGGFPGASRSDSRREDDRWNLPEDSSGDNGPNVIIRFLGFIGSLFTGKK

SEQ ID NO: 6069 - protein, 559 aa, unidentified
  source 1..559: note = Related to PDPH01000009.1; note = Proteobacteria bacterium
MSNSNSRQQWYDRIRASSKDAVILAEMKRLGFWQDTDVPTLSETIIQRRSELQSELSRLYHQKNLYQHPEQALKAMRKQRMQKAREQRALTQRKQAELRQQRARNWYEQHQNGIVWLGEGISAGLQDLSSDIERLQAHDLPVLHSPKMLAEAMGITLNELRFLAYQRKTSRINHYQRFQIVKKTGGLRDIAAPMPRLKRVQYWLLDNILHKLALHNAAHGFVLGRSIISNAQPHTAKALVINLDLENFFPSIRYARVKGLFKSLGYSESLATVLGLLCTEAAVDEIILDGETWFVMRGERHLPQGAPTSPMISNLLTRSLDRRLQGIATKYGYAYTRYADDLSFSCEKPYTANVTRLLWAVRQTVQEEGFKLHPDKTRLMHQGRRQEVTGLVVNQHLSLERKTLRRFRALLQQIEHTGWQGKHWNGVTDPIRLQQFVWGYAHFVAMVLPDKGAQFKAQLNRIQHIHFGGVVNKKYQSAQNSKAQFRVLSAKAQAPLVSWKQAQARPLVLLETIQQPLAQTQHEPVEQAASGIIEQQSAVTEVKQAPLAGLVAWLRSLLR

SEQ ID NO: 6070 - protein, 634 aa, unidentified
  source 1..634: note = Related to PTEU01000001.1; note = Ideonella sp.
MSERTPTRAELLARIAQSSKDAVVLAEMQRLGFWPKDTTQPTLEAALIEREAELAQALNGLQEELRVKGDPQAALKAMRQERMARAREQREAHAQAREQQRYERALRWHQARTQQAGFLGLGVSGGLQAEADPAACAARLERHGLPVLNTALELAEAMGLSVPELKFLCFHREVATTTHYRRFNLPKKTGGVRTISAPMPRLKRAQYWVLDQVLAKVACHEAAHGFVPGRSIVSNAAPHCGQAVVINLDLKDFFPSIHFPRIKGVFKGLGYGEAVASMLALLCSENACDELEVDGERFFVGGKGRDRVLPQGAPTSPMLTNILCRKLDRRLQGLAQKLGFTYTRYADDLTFSASDEGAARVGSLLRQVHHVLRSEGFTPHPDKQRVMRQGARQEVTGVVVNAKPSVSRTERRKLRAALHRANTQGLGAATWQGQPATNEVLTGYARFVRMVSAQQGQPLLQQALALPSAKTAATAARGNSFRQRATQGQAPLRQQGGEWWQVIPPPVPQLALTAGQIKAARQERLNAERAARQSALQAQRLADGNSSASRPSAASTGASAAEHTEHQNTAAPVAWWRFFFQLFIIIKLAASFKSALVLMLGALILGQALMTRSLGWGRFALTVIVLALVGSLLR

SEQ ID NO: 6071 - protein, 633 aa, unidentified
  source 1..633: note = Related to NZ_JAGQDG010000004.1; note = Ideonella paludis
MTERTPTRAELLARIALSSKDAVVLAEMQRLGFWPKDAAQPTLESALIQREAELQQALNELQDELRVKGDPQAALQAMRQARMARAREQREAHAQVREKARYERALRWHQARDTEVGFLGLGVSGGLQADADPAGTTARLVRSGLPALSTPLELAQAMGLGLPELKFLCFHREVARTTHYRRFDLPKKTGGVRTISAPMPRLKRAQYWVLDQILVKVPCHDAAHGFMPGRSIVSNAAPHCAQAVVINLDLKDFFPSIHFPRIKGVFQGLGYGEAVASLLALLCSENVCDELEVDGERFFVGGKGRERVLPQGAPTSPMLTNILCRKLDRRLQGLADKLGFTYTRYADDLTFSASEEGATRVGSLLRQVHHVLRSEGFTPHPDKQRVMRQGARQEVTGVVVNAKPSVSRTERRKLRAALHRAKTQGLAAATWQGQAASRDVLVGYARFVRMVSAPQGQALLQQALALPGTAPSAAAARADAFRVMAAKGQAPQRRQGAWWQPTPPPLPQLALTAQQVKTARQERLNAERAARQAAKRPAAPAQGRDANTQAPGMSHTQGHTPDAPTTSAPPVSWWRFFLQLFILIRVAVGLKSALFLMLGALCLGHALMTRRQGWIRFALTLVILAVLSSFTKL

SEQ ID NO: 6072 - protein, 634 aa, unidentified
  source 1..634: note = Related to NZ_QUSW01000004.1; note = Proposed Albitalea terrae
MSERVPTRAELLARIALSSKDAVVLSEMQRLGFWPQNATQPTIEAALIEREVELQKALSELQDELRVKGDPQAALQAMRKERMARAREQREANAQARERQRHERAMRWHEARKTEAGYLGDGVSGGLQVDAEAAAVKARLQSRNLPALSTPLELAQAMGLTLPELKFLCFHREVARTTHYRRFSLPKKTGGVRTISAPMPRLKRAQYWVLDNLLAKVPCHDAAHGFLPGRSIVTNAAPHCAKAVVINLDLKDFFPSIHFPRIKGVFQGLGYGESVASLLALLCSENACDELEVDGERFFVGGKGRDRVLPQGAPTSPMLTNILCRKLDRRLQGLASKLGFAYTRYADDLTFSAPAESADKVGRLLRQVHHVLHDEGFTPHPDKQRVMRRGARQEVTGVVVNAKPSVSREERRKLRAALHRAGQQGVEAATWQGHAATRDVLVGYARFVKMVDARQGQPLLQQALALPGANASLAAGKPDVFRIQAAKGEAPARKQGAWWQPAPSPEPQLALTAMQIKTARQERLNAERAARNEAKRQEQIARGEAPAPRRPQPSAEAMASAAQMTGAVHKPIAWWRYAIQLVIVIRLAVGLKSPLVFMLGMLWVGYAVMTRQLGWWRFAIAILGIAILGSVLNV

SEQ ID NO: 6073 - protein, 628 aa, unidentified
  source 1..628: note = Related to RXJW01000018.1; note = Burkholderiales bacterium
MSERMPTRAELLARIAASSKEDVVLAEMRRLGYWPGEAGQPVIQAALLEREAELQQALSALQEELRVKGDPQAALQAMRRERMAQAREQREARAQARERERYERALRWHERRKMEAGYLGPGVSGGLGAEVDPEAVKARLAAAGLPALTTPSELAQAMGLSLPELRFLCFHREVARTTHYRRFQLPKKTGGVRTISSPMPRLKRAQYWVLDNLLAKVPSHAAAHGFLPGRSIVSNAAPHCGQDVVINLDLKDFFPSIHFPRIKGVFRGLGYGDAVASLLALLCSENVCDELSVDGERFFVGGKGRERVLPQGAPTSPMLTNLLCRKLDRRLQGLALKLGFSYTRYADDLSFSAAGDAAQRVGRLLRQVHHVLRDEGFTPHPDKQRVMRRGARQEVTGVVVNDKPSVSRAARRQLRAALHRAGRQGVQAATWQGEAATRDVLVGYARFVHMVNAAQGQPLLKQALALPGASSHAPRPDAFRAQAVKGVAPARRSGPWWEVVPAPEPQLALTAGQMQAARQARLNAERAQRSGKPAVAPSAQPATATPGARPVARPAPVAEQPVPWKRYGLQVFGYAFMALVLHSAAFLFLALIWHSQSLKKRDLGWGRFGLGVFVLSIVAVMLKGLLAR

SEQ ID NO: 6074 - protein, 638 aa, unidentified
  source 1..638: note = Related to SCTF01000217.1; note = Aquabacterium sp.
MSDRIPTRAELIARIMLSSKDAVVLAEMQRLGFWPADAGKPTLESALIQREVELEQALQGLYAQLRVKGDPEAALKAMREERMARAREQREATAQARERRRFERALRWHEARKTDIGYLGAGVSGGLQPPPAAAPARTLQPGLPPLASPLELAQAMGIALGELKFLGFHREVARSTHYRRFTLPKKTGGERTISAPMPRLKRAQYWVLDNILAKVPCHDAAHGFLPGRSIVTNAAPHCARAVVINLDLKDFFPSIGYPRIKGVFQGLGYDERVAGVLALLCSENACDELEVDGERFFVGGKGRDRVLPQGAPTSPMLTNILCRKLDRRLQGLADKMGYTYTRYADDLTFSAPPEAADRVGRLLRQVDHVLHDEGFTPHPDKQRVMRAGSRQEVTGVVVNQKPSVSRDERRRLRAALHNAQRNGIEAATWQGRPATRETLVGYARFVQMVDAHQGAGLFAQALALPGGAHAARPARAGAFRRSAAQGQAPALARGAWWQPAERPAPRLAQTAGQMKAARQERLNAERAERNAAAKPARDAAREEARRHEQQERRAAQRAAAETARQSLRQQPALTWRHWLQYAIQLYIVIRVATGMKSAVVFAAGMAWVGYSMMTRKTGWLRFIVAMVVIALVGAMIRL

SEQ ID NO: 6075 - protein, 628 aa, unidentified
  source 1..628: note = Related to VOBQ01000016.1; note = Caenimonas sp.
MSAPQPTRAELLERLRKSSKDAVILEEMQRLGFWPAGSGAPTVEEAMIQREVELAKALEQVRSQLGTRTDPESALKQMRKERMAEARARREANAQAREQRRLDNALRWHERSGQEIAYLGDQVSAGLYPGHAAVRPERLARHGLPLFETPLQLATAMGVPLAELKFLGFHREVARTSHYRRFRLPKKTGGERTISAPMPRLKRAQYWVLDNILARVPVHAAAHGFVPGRSITSNAAPHCGQAVVINLDLKDFFPGVAFPRIRGVFRGLGYGEDVATVLALLCSENPADELVVDGELFFVGRKGRDRTLPQGAPTSPMLTNVLCRKLDRRLQGLAGRFGFAYTRYADDLTFSAPPEGSASVGRLLRQVHHILHDEGFTPHPDKQRVMRSGARQEVTGVVVNREPSVARSSRRRLRAALHRAQKSGVAQAHWEGAPANAGQLQGHAQFVRSVNARQGAPLVAQARMLVRSPHTLAAAGSGAAFRQRAAAGQAPMRPGDRAWWSPAAKAAPQLQLTQEQKKAERAERRARRRDEARAAAQPARGERAAGAGPGPFTTPPEIPISWWRFGFQLFFVLWFASATRSSLVFMGGAAWFGWSLAQRRQGWPRFLLGMLIVFLASVVIQGFWRHRY

SEQ ID NO: 6076 - protein, 621 aa, unidentified
  source 1..621: note = Related to CP015118.1; note = Rhizobacter gummiphilus
MSERVPTRAELLARIQASSKDAVVLAEMQRLGFWPAGSGTPTLEAALIEREVELTKALDGLHAELRVKGDPEAALLAMRKERMAQARERREATAQAREQRRFERAQRWHEARKTDAGYLGAGVSAGLQAPAAEGRALAPGLPPLASPLALAQAMGIALPELKFLCFHREVARTTHYRRFTLPKKTGGERTISAPMPRLKRAQYWVLDNVLAKVPLHGAAHGFVPGRSIVSNAAPHTGKAVVINLDLKDFFPSVTYPRIKGVFRALGYGEHVATTLALLCSENAADELEVDGERFFVGGKGRDRVLPQGAPTSPMLTNILCRRLDRRLKGLAAKLGFTYTRYADDLTFSAAPEGTTQVGQLLRRVHHVLRDEGFTPHPDKQRVMRASSRQEVTGIVVNEKPSVSRTERRRLRAALHTAQRKGLEAATWQGQPATRDTLVGYARFVQMVDARQGAALLPRALALPGSAAAVSPFPSRFRRQAAKGEAPTLASGTWWQPAEPAAPTLALTAGQVKAARQERLNAERAARRADAEAEVERMSATEDVAHGEDADDTPTTAQPPIRWWSLAIQFFLVVQLASGAKSAIVFTLGIAWLVFSLVTRKTGWWRFVFAMMCILAIVAGLK

SEQ ID NO: 6077 - protein, 657 aa, unidentified
  source 1..657: note = Related to NIOE01000004.1; note = Mitsuaria noduli
MSDRVLTRAEIIERIRASSKDAVVLEEMQRMGFWPAGDGKPGIEAALIEREIELTRALDEVQATLRTHSDPEAAMKAMREQRMAESRARREATAQAREQRRHERALRWHAARRTDAGYLGAGVSGGLQSPAADAIHTTDATGVTGEPGAKPRALLDGLPALATPLDLAGAMGLTLPELKFLCFHREVARTTHYRRFLLPKKTGGQRTISAPMPRLKRAQYWVLDQLLAKVPCHAAAHGFLPGRGIVSNAAPHTGRAVVINLDIQDFFPTITFPRIKGVFRGLGYDERVATMLALLCSENPCDELEVDGERFFVGGKGRDRVLPQGAPTSPMLTNVLCRKMDRRLQGLADKLGFTYTRYADDLTFSASGEGAAKVGTLLRQARHVLLDEGFTPHPDKQRVMRAGSRQEVTGVVVNEKPSVSREERRKLRAALHKATRDGVEAATWHGHPATREVLVGYGRFVAMVDRQQGATLLKQALALPGGSAKKRSAFGALFRKKAAEGEAPTLARGAWWQPADRPEPVLQQTAAQIRAARQERINAARTERRGGAAPKPDQYQQRRQEQSNRAAENAARWSAATSAASGAAPRAGHPINWGLYARQFGVMTLAAFLIASWLVFFGGLAHLALRIKTRSTGWGEFWIGLILLIAAAVKFFPHSTA

SEQ ID NO: 6078 - protein, 638 aa, unidentified
  source 1..638: note = Related to JACHYU010000002.1; note = Mitsuaria sp.
MSDRVPTRAEIVERIRASSKDAFVLEEMQRLGFWPAGEGKPSIEAALIQRELELMKALEDMQQELRSHSDPEAALKRMREERLAQARAKREATAQAREQRRHERALRWHEARKTDAGYLGEGVSGGLRPAAAGAPARPLADGLPTLATPLELARAMGLTLPELKFLCFHREVARTSHYRRFLLPKKTGGQRTISAPMPRLKRAQYWVLDQVLAKVPSHAAAHGFLPGRSIVTNATPHAGREVVINLDIQDFFPTITFPRIKGVFRGLGYDERVATMLALLCSENPCDELEVDGERFFVGGKGRDRVLPQGAPTSPMLTNVLCRKMDRRLQGIADKLGFAYTRYADDLTFSASGEGAGQVGTLLRQVRHVLKDEGFTPHPDKQRVMRAGSRQEVTGVVVNDKPSVSREERRKLRAALHKASREGVEAATWQGQPATREVLVGYGRFVAMVDREQGAPLLKQALALPGGAAKRRSAFGALFRQKAAAGEAPVLARGAWWQPAEPPEPVLQQTAGQIKAARQARLNDERTARRGGKPPAPSRADQRRAEQAQRLADHEAQRAARRSAGAAPGAAGADRPWLLYVKQFALLLGIAAGLKSELILYAGVIHLLLRIKSRDRGWWEFWLGIGLLVLVNALLFRR

SEQ ID NO: 6079 - protein, 647 aa, unidentified
  source 1..647: note = Related to NZ_JACHXO010000001.1; note = Roseateles terrae
MTERMPTRADLIERIRTSSKDAVVLQEMQRLGFWPQGEAQPTLEAALIEREAEVTQALQGLQERLRVIQNPEAALQAMRKQRMQESLIRREAAAQLREQRRHERALRWHEARKTQVPYLGAGVSGGLSLPTAQAPARALQAGLPSLDTPMALAQAMGLTLPELKFLTFHREVARTHHYRRFLLPKKTGGHRTISAPMPRLKRAQYWVLDNVLAQVPCHAAAHGFLPGRSILTNAKPHVGQDVVINLDIQNFFPTITFPRIKGVFQGLGYPEPVATMLALLCSENPCDELVVDGEAFFVGGKGRDRVLPQGAPTSPMLTNVLCRRMDRRLQGLAHKLGFTYTRYADDLTFSGSGEAAALVGKLLRQVRHVLKDEGFTPHPAKQHVMRAGARQQVTGVVVNDQPSVSRQERRKLRAALHRARHQGMEAATWHDQPATREVLLGYSRFVAMVDAAQGAPLIAQAMRLPGPAAPPRSGDAAAFRTKSAEGQAPQLKRGSWWQPAERPAPVLQLTDAQRKDARRDKRAAALGQPSPAAVGGAPSRAAVASAGLAGTPVPGATGGASAASARGAADAAHPANATKLPPPPWAQYGFQSSLLLFLWIAGVSSFVVVGGFAHMAFRFKKREGGWNGFWTGLGVLLLIQWLVRALT

SEQ ID NO: 6080 - protein, 623 aa, unidentified
  source 1..623: note = Related to LMDI01000056.1; note = Rhizobacter sp.
MTARQPTRAELIERIAASSKDAVVLDEMRRFGFWPADAGKPSVEAALIEREAELVQALNRLQAVVRERGDPVAALKAMRKARMAQARERRETTAQAREQKRHERALRWHAARASHAGYLGQGVSGGLQAPTDAEAALARLREGGLPLLATPQALAEAMGLSVPELKFLSFHREVARVTHYRRFALPKKTGGERIISAPMPRLKRAQYWVLDNVLAKVPCHAAAHGFLPGRSIVTNAAPHAGQGVVINLDLKDFFPGVAYPRIKGVFAALGYPEAVATVLALLCSENVSDTLEVDGEPFHVGGTARERVLPQGAPTSPMLTNILCRRLDRRLQGLAAKLGFRYTRYADDLTFSASGDGEALVGRLLRQVHHVLKDEGFTPHPDKQHVMRRGARQEVTGVVVNDGPSVSRTQRRALRAALHRAGTAGGGQATWNGTPASRDTLLGQAQFVRMVNATQGGKLVTAARALPVGGEAVRPRAADTFRQRSARGEAPLRAEGAWWVPAPRPVPQLQLTAGQIQAQRQAARQARQQAARATEPAPAATETATETATAEGDTPVLTPPQVAVPWVTFGIQAGLMMLVAARSGSALALLLASGWLGYALLRRKFGWLRYAVALAVLTRLTLG

SEQ ID NO: 6081 - protein, 640 aa, unidentified
  source 1..640: note = Related to NZ_JAJNKD010000004.1; note = Ideonella azotifigens
MSGERQPTRAELIARIAASSKDAVVLKEMQRSGFWPADAAAPTVEAALIQREAELVQVLNKLQAELREKGDPQGALKAMRQQRMAEARERREATAQKLERERYERAVQWRERSRHEIGYLGQGVSAGLQARADNAGSHEKLQREGLPLLDTPQALADAMGVPVAELRFLAFHREVARTQHYRRFSLPKKTGGVRTISAPMPRLKRAQYWVLDNLLAKVPVHAAAHGFLPGKSIVSNAAPHVGQAVVINLDLKDFFPSVSFPRIKGVFRALGYGEATATLLALLCSENVCDELQVDGERFFVGRTARERVLPQGAPTSPMLTNILCRTLDKRLQGIATKLGFTYTRYADDLSFSASGNAAGLTGRLLRQVHHILKAEGFTPHPDKQHVMHAGRRQEVTGVVVNQQPAVSREQRRALRAALHRAKHKGLDAATWQGEPAARNVLLGYAQFVAMVNARHGAPLLAQAKALPSAATPAAKVPPSQFRQHAAAGKAPPRANGLWWQPAPKPEPVLLKTAGQIKAERRAHLAAQRAERDAARKAAEIASSPRRALRAAMQAAAAAPAPEGGAPQETHAPLLPLIRWPLVIAQAALLVYLSVKLKSPGLFLAGGLWLGWRVMRRKFGWPSYFLALFVIGFVAGILHL

SEQ ID NO: 6082 - protein, 630 aa, unidentified
  source 1..630: note = Related to nan
MSDRQPTRAELIARIAASTKDAVVLQEMQRLGFWPQGSGEPGIEAALIEREAALVQRLNALQAELKIVGDPQAALQAMRRERMAAAKARREATAQAREQRRHERALQWLERSRDAIGHLGHGVSAGLSPQPLEADDRRRLEATGLPCIDTPLALAQAMGIGVAELKFLCFHREVARTQHYRRFGIPKKTGGVRTISAPMPRLKRAQYWVLDALLAKVPLHAAAHGFVPGRSIVSNAAPHAGRDLVINLDLKDFFPSITFARIKGVFRRLGYPEQIATLLGLLCSENVCDELQVDGERFYVGRTARERVLPQGAPTSPMLTNILCRRLDRRLQGVAAKLGFTYTRYADDLTFSACGEAAGRSDRLLRQVHFILRDEGFTPHPDKQRVMRAASRQEVTGIVVNERPGVSREQRRALRAALHRAQQKGMEAATWQGQPARKDVLVGFAQFVAMVQPAQGQALLARAKALPATGTKAAAAAPSRFREFAGQGKAPPRAAGPWWEPAPKPLPVLQKTAGQLREERRARLAEARALREGRPPRTAATPTAPSASGSPPSSATAPTGPNAKAGPVNWDAWLLQLGMMVLMSVRLHSAVFFLLGAIWMGSRLVRRRFGWPSFIAVLLAVGLAAEWLKP

SEQ ID NO: 6083 - protein, 671 aa, unidentified
  source 1..671: note = Related to NZ_CP049905.1; note = Diaphorobacter sp.
MSNPQPTRAEIFERIKQSSKQEVILEEMQRLGFWPRSEGQPEVAADLIQREGELQRELAELNKKLAVKRNPERALREMRKQRMKDARDKREVTKRAQAQQRYDKALLWHEKRASHVAYLGPGVSASLHENSSATQEQGDKGKPKRARDRAVPDLQRLTLNGLPALISAAQLAESMGVSVAELRFLSFHREVARTNHYHSFTLPKKTGGERLISAPMPRLKRAQYWVLDNVLAKMPAHDAAHGFLAGRSIISNAKPHAGQDVVINLDVKDFFPSIAFGRIKGVFRQLGYGESIATVFALLCSENRAQAWQVDGERLFVGGKARERVLPQGAPTSPMLTNLLCRRMDRRLLGLAKQLGFVYTRYADDLTFSASGEPARDNVGKLLSRVRWILRDEGFTPHPDKERVMRKGRRQEVTGLVVNSDTPSVSRETRRRLRAALHRASQPDAASKPAHWQGHTAQPSQLLGLATFVHQIDPKQGKTLLADAQQLMRSPIDRANDAAKSASRADAAQQSFRVLAAAGKPPVLADGKNWWQPAPPATPVLEKTDQQRREERQATRRQQAAAAAPPPSSTRRNERPQQAAHEQQGDAQPQNEAPPRFDPDQYAPPPRNVMTYWAQIAISFFLGSILHNRLITIFAMVAVIALYYMRRQRWDVFMGILVVATLLGYLVRGMG

SEQ ID NO: 6084 - protein, 673 aa, unidentified
  source 1..673: note = Related to NZ_CP049910.1; note = Diaphorobacter sp.
MSNPQPTRAEIYERISQSSKQEVILEEMQRLGFWAKDSGQPQLAEELIRREGELQRELSELHKQLAVRRDPERALREMRKQRMKDARDKREVTKRAQAQQRYEKALAWHDKRATHVGYLGPGVSASLQDADEPIAQSDKKPKRARDRAVPDLTRLAVNGLPALTSAAQLAQSMGVSVAELRFLSFHREVARSHHYHSFTLPKKTGGERLISAPMPRLKRAQYWVLDNVLAKMPAHDAAHGFLAGRSIISNAKPHAGQDVVINLDVKDFFPSIAFGRIKGVFRQLGYGEKIATVFALLCSENRAQVWQVDGEKLFVGGKARERVLPQGAPTSPMLTNLLCRRMDRRLQGLAAQLGFVYTRYADDLTFSASGEAAHDNVGRLLGRVRWILRDEGFTPHPDKERVMRKGRRQEVTGLVVNGDTPSVSRETRRRLRAALHRASQPGAAAKPAHWEGHAAQPSQLLGLATFVHQIDARQGKPLLASAQQLMRNPIDRANDALLAASRADRATTTNAGDFRRLSAAGHPPVRADGKTWWQPAEPSAPVLEKTDQQRREDRKAARQSAQPQPQLQLQPQTGGNANGTARTSQSGNRQQNASQTAPQSDPPKERGTRNMMVYWAQIAITFFLGSILHNRLITIFAMVAVIALYYMRKQRWDVFMGILVVATLLGYLVRGVG

SEQ ID NO: 6085 - protein, 678 aa, unidentified
  source 1..678: note = Related to NZ_CP060783.1; note = Diaphorobacter aerolatus
MSNPQPTRAEIYERIAQSSKQEVILDEMQRLGFWPKAEGQPQLAAELIHREGELQRELSELNQQLGVRRDPERALREMRKQRMKNAREKRETTKREQAKKRHERALAWHARRASHVGYLGPGVSAALVDGPLTQQEQEQTSRRTRDRAIPDLPRLARHGLPALSSAAQLAESMGVSVAELRFLSFHREVARTHHYHSFTLPKKTGGERLISAPMPRLKRAQYWVLDNVLNKIPAHEAAHGFLAGRSIISNAAPHAGQDVVINLDVKDFFPSIAFARIKGVFRQLGYGEGVATVLALLCSENRAQAWQVDGERLFVGGKARERVLPQGAPTSPMVTNLLCRRMDRRLQGLARQLGFVYTRYADDLTFSASGEAARDHVGKLLGRVRWILRDEGFTPHPDKERVMRKGRRQEVTGLVVNGPSPSVSRKTRRRLRAALHRASRSAADASTSTQAHWQGQQAQPSQLLGLAQFVHQINARQGRQLLADAQQLMRSPLDRANDALLAASRQDQRSASSSSPASFRALAAAGRAPVRTNGEPWWQPAAALEPVLEQTDLQRREARQLARHGASSASGASSNRRSSSDSHFGRGPQSGSSRQEDQGNASGRFSFDDAAGRDDQGASKDKPAGRLGTYWMQMVICFVMGSILHNRLITIFAMIAVIVLYYMRRQRWDVFMGVLVGL

SEQ ID NO: 6086 - protein, 673 aa, unidentified
  source 1..673: note = Related to NZ_CP060714.1; note = Diaphorobacter sp.
MSAPQPTRAEIYDRIKTSSKQEVILEEMQRMGFWPQGEGEPQVAADLIQREGELQREMSELREQLAVRRNPERALREMRKQRMKQARDQREETRRRHAQERHDKALAWHGTRASHMGYLGPGVSAALHAPGQDGSADGASGRKPARERSAPDLRRLALNGLPALTSGAQLAEAMGVSVAELRFLSFHREVARTHHYHSFTLPKKTGGERQISAPMPRLKRAQYWVLDNVLAKMPAHDAAHGFLAGRSIVSNARPHAGQDVVINLDVKDFFPSIAFGRIKGVFRQLGYGEGIATVLALLCSENRAQAWSVDGERLFVGGKARERVLPQGAPTSPMLTNLLCRRLDRRLQGLAAQLGFAYTRYADDLTFSASGDAARDHVGKLLSRVRWILHDEGFTPHPDKERVMRKGRRQEVTGLVVNGSQPGVSRQMRRKLRAALHRASHAAPGDAPAAHWQGQAAQPSQLLGLAQFVQQVDAQQGKALLASARQLVRDPVARVNDALREAAAEDRLAAASEAAVSFRQAAASGRSPVRANGEGWWQPEQKAAPVLEQTDQQRREARQQARRQSLAAASPASPETAPGNGARRVQGVPAEGVSPAQPGKAPEASGLPPVRRMLRYWSQMGLCFLLGSILHNRLITIFAMVMVIALYYMRKQRWDLFAGVLVIATLLGYLVRS

SEQ ID NO: 6087 - protein, 669 aa, unidentified
  source 1..669: note = Related to CP065748.1; note = Delftia lacustris
MSQPQPTRAEIYERIKASSKQEVILEEMQRLGFWPKDEGQPQLAAAHIQREGELQRELAELRQQIAVRQNPERALRQMRKERMQKALAQREETKRRQAQERHDKALAWHARRSTHVGYLGPGVSAALQDAARDGTERRQADPQRLARHGLPQLADAAQLAQAMGITVAELRFLGFHREVARTHHYHSFTLPKKTGGERLISAPMPRLKRAQYWVLDNILAKVPAHDAAHGFLAGRSIVSNAAPHAGHDVVINLDVKDFFPSIAFGRIKGVFRHLGYGEAMATLLALLCSENRAQAWQVDGEKLFVGGKARERVLPQGAPTSPMLTNLLCRRLDRRLLGLARQLGFVYTRYADDLTFSASGEAARDNVGRLLGRVRWILRDEGFTPHPDKERVMRKGRRQEVTGLVVNADKPGVSRQTRRRLRAALHRATQAGTGLPGQSVQPAQVPHWQGQPAHASQLLGMAQFVHQVDPVQGGPLLAQARQLTRSPVDRANDALLEASRQDRAAARAKPPANATFRRLAAGGQAPALASGKPWWQPAAPAAPVLEKTDQQRREQRQEERQAARQAAGPAPGAASTLPAASTSPSPSPSPAAPDPNPPASKRPPMAGLLTYWAQIVICFLLGTVFQARLITLIGIVLVVILRYRRIQRWDVFGAAMVVAVLVGLGLRLS

SEQ ID NO: 6088 - protein, 631 aa, unidentified
  source 1..631: note = Related to NZ_CP069318.1; note = Delftia lacustris
MSQPQPTRAEIYERIKASSKQEVILEEMQRLGFWPKGEGQPQLAAAHIQREGELQRELAELRQQIAVRQNPERALRQMRKERMQKALAQREETKRRQAQERHDKALAWHARRSTHVGYLGPGVSAALQDAARDGTERRQADPQRLARHGLPQLADAAQLAQAMGITVAELRFLGFHREVARTHHYHSFTLPKKTGGERLISAPMPRLKRAQYWVLDNILAKVPAHDAAHGFLAGRSIVSNAAPHAGHDVVINLDVKDFFPSIAFGRIKGVFRHLGYGEAMATLLALLCSENRAQAWQVDGEKLFVGGKARERVLPQGAPTSPMLTNLLCRRLDRRLLGLARQLGFVYTRYADDLTFSASGEAARDNVGRLLGRVRWILRDEGFTPHPDKERVMRKGRRQEVTGLVVNADKPGVSRQTRRRLRAALHRATQAGTGLPGLPGQSVQPAQAPHWQGQPAHASQLLGMAQFVHQVDPVQGGPLLAQARQLTRSPVDRANDALLEASRQDRAAARAKPPQTPRSGAWQPAGRHLRWPAASHGGSRPHPQRPCWRRPTSSGASSARRNGRPPGRRLALPPASQAPCPRHRPLHRHRHHRPHRTRIRPHRKGRRWPACSPTGRRSRSASCWAPCSRPG

SEQ ID NO: 6089 - protein, 660 aa, unidentified
  source 1..660: note = Related to NZ_LR813084.1; note = Delftia tsuruhatensis
MSQPQPTRAEIYERIKASSKQEVILEEMQRLGFWPKGEGQPQLAAAHIQREGELHRELAELRRQLAVRQDPERALRQMRKERMQKALARREETRRRQARERHDKALAWHARRDTHVGYLGPGVSAGLHEPRDEAQQPAARDRRQADPQRLARHGLPELADAAQLATAMGITVAELRFLGFHREVARTHHYHSFTLPKKTGGQRLISAPMPRLKRAQYWVLDNILAKVPAHDAAHGFLAGRSIVSNAAPHAGHDVVINLDVKDFFPSIAFGRIKGVFRQLGYGEAMATLLALLCSENRAQAWQVDGEKLFVGGKARERVLPQGAPTSPMLTNLLCRRLDRRLLGLARQLGFTYTRYADDLTFSASGQAAQDHVGRLLGRVRWILRDEGFTPHPDKERVMRRGRRQEVTGLVVNGEQPGVSRETRRRLRAALHRAAQAVPGQRPHWQGHAAQPSQLLGLAQFVHQVRPAQGGALLRQARQLLRSPLERANEALIEASRQDRARAPEAQAFRQRAAAGQAPALASGKPWWQPAAPAAPVLEKTDQQRREERQEQRQQQRQEQQQAARAQAHAAAAPAPQAASAPALPQEPAPPPPAKSALPGLLTYWAQIIICFVLGTVFQTRLVTLIGIVLTVILKWRRLQRWDVFAGAMVIAVLLGLVLKP

SEQ ID NO: 6090 - protein, 690 aa, unidentified
  source 1..690: note = Related to NZ_AUCQ01000016.1; note = Comamonas composti
MRCSTFWRLLIGSTAAATKEGRMSQQSTSRALTRAEIYERIKASSRQEVILEEMQRLGFWPKADGEPRLAAEHIEREAHLQRELAELRAQIAVRENPERALRQMRKQRMQQALAQREETKRQQARLRHEKALDWHARRATHVGYLGPGVSAALSPAASQGSPARKAALTDAPKLIGSGLPVLESAAQMAQAMGVTVAELRFLSFHREVARSHHYHSFTLPKKTGGQRLISAPMPRLKRAQYWVLDNILGRVPAHEAAHGFLAGRSILSNALPHLGRDVVINLDVRDFFPSISFARIKGVFVRLGYGEAVATVLALLCSENRAQAWQVDGERLFIGGKARERVLPQGAPTSPMLTNLLCRRLDRRLQGLASQLGFAYTRYADDLTFSASGEAARDNVGRLLGRVRWILRDEGFTPHPEKERVMRKGRRQEVTGVVVNNAQPGSSRQMRKQLRAALHQAARHGAGASDKPAHWQGQTAQVSQLLGLAQFVHQINPRQGLALVEQARSLGKGPLESANQALTQAAREDRERKAASAGFRRSAAQGQAPVRANGQPWWQPAPAEPPVLEQTDQQRRELRQQARREMHSLQAGSSAQAASGERAMAEGPTPAPAVQSQAAHETAPPTSGPALRRLLTYWAQIVVCFVLGNLLHTRVVTLVGIALVVVLYYRRKQGWGLFFAAMVLAVLVGMVFKQ

SEQ ID NO: 6091 - protein, 674 aa, unidentified
  source 1..674: note = Related to NZ_SSWX01000040.1; note = Lampropedia aestuarii
MSTPQPSRAQIYERIKASSKQEVVLEEMQRMGFWPKDAGQPQPAAELIQREGELQRELQTLRNQFAARKDPERALREMRKQRMQAARTQREATKRKQAQQRHDKALAWHRERATHIGYLGPGISAGLQTPAQDEAAVKSTSERQRRGPDMARLARHGLPELTSGAQLAEAMGVSVAELRFLSFHREVARSHHYHSFTLPKKTGGERLISAPMPRLKRAQYWVLDQVLAKIPAHDAAHGFLAGRSIISNAQPHTGQDVVINLDVKDFFPSIAFGRIKGVFRQLGYGESVASVLALLCSENRAQAWLVDGERLFVGGKARERVLPQGAPTSPMLTNLLCRRLDRRLQGLAAQLGFAYTRYADDLTFSASGEAAQERVGALLRRVRWILRDEGFTPHPDKERVMRKGRRQEVTGLVVNGAAPSVSRQTRRQLRAALHQATQAGSASAAVAPHWQGQAVQPSQLLGLAQFVHQVDAKQGQALLASAQQLAAVPGARVNQDLADAAARDRRAATRPLPFRQAAAAAQAPVRANGQAWWQPEEKAAPVLEHTDQQRKEQRQQLRREAAAAQTPDAAWGRAEPHNRSAERNSSQEPASHVAPNRASSRANKGKPATPRSLPRLGMHILLGIAQGMSLNKPLITVFALALAITLYYMKKQRWGIFIGLVLVVSWLVIGFTAY

SEQ ID NO: 6092 - protein, 665 aa, unidentified
  source 1..665: note = Related to NZ_CAKAKO010000003.1; note = Xenophilus sp.
MAAPAPTRAELLERIRASSKDAVVLAEMQRLGFWPRDEARPAPATELIEREAALMRELGELQAELHLRGDPEKALRAMRQERLAAARAQRDSRARERAQRQYERAQQWHAQRQQRIGYLGAGVSAGLERPADRPAAHVPLRAGRSERLARHGLPALDSPQALARAMGVALGELRFLSFHREVGRHTHYRRFTLPKKSGGERLISAPMPRLKRAQYWVLDNILAKVPAHDAAHGFLPGRSVVGNAQPHCGQEVVVNLDVKDFFPSIGFGRIKGVFTHLGYAEPVATVLALLCSENRADELQVDGERWFVGGAAGQRVLPQGAPTSPMLTNLLCRRLDRRLAGLARTLGFAYTRYADDLSFSASGEAAQRVGPLLRRVRWILRDEGFEPHPDKERVMRKGARQEVTGIVVNAAQPGVSRQSRRALRAALHRARTAGAGPAHWQGEPASRERLLGYAHFVQGVNEAQGRALVRAAEALPLASRAAASPAAAPGTAAGDFRIRAAQGEAPVRAQGPWWQPASPPAPVRQRTDGEIREARAAQRQAAAEARRAAQAGAAVAAPAGRSGNGSPARSGAPASVDTARQARNARAAGRGRKADASPRSRKTYWLQLFVVWLAGTLSGSGFVTVFGLIYLLGAYWARHQRWSHFSLAMLAILVLVPVLRSIGIL

SEQ ID NO: 6093 - protein, 708 aa, unidentified
  source 1..708: note = Related to SEAX01000108.1; note = Comamonadaceae bacterium
MAAPQPTRAELIERIRASSKDAVVLAEMQRLGFWPGGESQPEPAAELIEREAALIRELGELQAELQLKGDPDKALRAMRQERLAAARAQRESKARERAQRQYERALQWHAQRQQRIGYLGAGVSAGLERPDGQAAHAPLRPARPERLAQHGLPALEHPQALALAMGIELGELRFLSFHREVARHTHYRRFTLPKKSGGERQISAPMPRLKRAQYWVLDNILAKVPTHDAAHGFLPGRSIVGNALPHCAQDVVINLDVKDFFPSIGFGRIKGVFMRLGYGEPVATVLALLCSENRADELQVDGERWFVGGTAGQRLLPQGAPTSPMLTNLLCRRLDRRLTGLAQALGFNYTRYADDLSFSASGDAAQRVGSLLRRVRWTLRDEGFEPHPDKERVMRKGARQEVTGIVVNAPQPGVSRQSRRALRAALHRSHAEGPDQAHWQGQSASRERLLGYAHFVQGVNEDQGRALVMAAEALPLASRAADGVGAAADVDAVGADAAAAATDATTPAAAVGGSRALDAAAAAAGTTMAIGLFKAGKADFRARAAQGLAPVRVDGPWWQPAPPPQPVRQRTDGEIREARAARRQAAAEARRAAQPGAAAPANARHPTQAGARAQATVDAARQARRGGPTAPGADDRTADAAKPPRSAKTYWMQLFVVWLAGSFTRNGLVTVLGLIYLLGTYWMRHQRWSHFAIAMAAIVALATLMRSL

SEQ ID NO: 6094 - protein, 709 aa, unidentified
  source 1..709: note = Related to NZ_CP021455.1; note = Comamonas serinivorans
MSAPQPTRAELLERIRASSKDAVVLAEMQRLGFWPQGEGEPRLAAELIEREAELSQQLNALRQEAAQYADPEQALRRMRRERMAAARAQREATRRQRHEARHERALAWHAERDRHIGWLGEGVSAALQPVARLPADPAPRSAQPSADQADPSANAEHAAEPAGQARAATADRGGAARASTPRTDRLARHDLPLLTDAPALADAMGIGVRELRFLATHREVSRSTHYQRFTVPKKTGGERLISAPMPRLKRAQYWVLDNILAKVPVHAAAHGFLPGHGIVGNARPHADQDVVINLDLQDFFPSVGLPRVKGVFQHLGYGEAVATVLALLCTEARADTLRIDGETVHIAGRARDRVLPQGAPSSPQLTNILCRRLDRRLAALAATLGFAYTRYADDLSFSASGEAADRVGELLRRARWIVRDEGFTPHPTKQAVMRRGRQQTVTGLVVNGAAPSVSRRQRRRLRAALHRAHTQGLAQAHWQQQPVTRAQLIGWAQFVHQVQPAQAGALLSQAQALLPAAHEASAATVNALAQAASARPAGGGRLSFRAAAAQGQTPPLASGRWWQIAPRPTPVRVLTDQERREQRQARRAAQAAAAEPATTAAGVGPAGARPGQGGRRLSDPRTEDAGRAGVPAPDGHAPQSRTRRRLGTYVLQLMAAWGLGNVVFHDRLFTQVALVMLVFLYLMRRQSWALWGGTMLLAALVAWSLRFLG

SEQ ID NO: 6095 - protein, 640 aa, unidentified
  source 1..640: note = Related to CP028324.1; note = Massilia armeniaca
MLAFRVRLPAGSLPMSAPPPTSMTRQELYERLRTATREEVTLSEMQRLGFWPKDDPGVTAAQALIQREAELSRALRELSSELRGTEDPALALKAMRKERMAKARARREETKQRSARERFERASAWHHRHAGEILYLGEEVSAGLNEARSDGDKLARAALPALHDARELAQAMGLSLQELRFLAFDRRASRISHYRRFAMPKKTGGERIISAPMPRLKRSQYWVLDNVLARAPVHPAAHGFLKGRSIVSNAAPHVAQAVVINVDLKDFFPSIDMRRVAGVFGQLGYSKQVATTLALLCTEAATEQVSVDGETFFVARGARVLPQGAPTSPALTNILCRRLDARLQGAAAKLGFSYTRYADDLTFSGPEATRKLAGKLLWRVRQIVADEGFTPHPHKQHVMRASQRQSVTGIVVNEKPTIERDTLRRFRATLFQVEKDGPAGRQWNGNPNVLAALEGYAQFIRMVDPAKGAPLLARVRAARERWSDAPAASLPGPARRGGDFRALSAQGKAPWEGFWQAAPPAPPVLEQTQEQVTLAKKETRRWASVAPVVEPSAAAADVATDAVEDGPQVRAPWRALLSQFLIALVLALTYRTPLPVAGILLLSRTSRRDGRPHWTRFICAMVLLVALADVLHRWDLGLLS

SEQ ID NO: 6096 - protein, 614 aa, unidentified
  source 1..614: note = Related to NZ_CP038026.1; note = Massilia plicata
MNAKSPASMSRQDLYERLRTSSREEVTLAEMQRLGFWPANAAGRPDVEELIRREAELSSALRELGSELRAVEDPAVALRAMRKERMAKAKARRETRQRRARERFERASAWHQRHASEILYLGEGVSAGLNDTHSDGDRLARAALPPLNDARELAQAMGLTLQELRFLAFDRRVSRISHYRRFAMPKKTGGERIISAPMPRLKRSQYWVLDNVLARAPVHPAAHGFLAGRSIVSNAAPHAGRAVVVNVDLKDFFPSIDMRRVAGVFGQLGYSKQVATTLALLCTESATEEVSVDGETFHVAYGPRVLPQGAPTSPALTNILCRRLDARLQGAAAKLGFAYTRYADDLTFSGTGESRKLAGKLLWRVRQIVIDEGFTPHPDKQHVMRDSQRQSVTGIVVNEKPTIDRPTLRRFRATLFQVEKDGPDGKAWNGNTNVLAALEGYAQFVRMVDPAKGGPLLQRVRAARERWSTPAGTPAATHSTGDFRALSAQGKAPWPGFWQAGPAPAPVVEKTQVQVTLAKKAVQQEQKERVAALADAQPDTMLEAPPQALLPWRALLPQFVTAFLLALTYRTPLPLAGMLLLARKSRRDGRLGWGRFLGVMVAVVVLHGLLRRWN

SEQ ID NO: 6097 - protein, 612 aa, unidentified
  source 1..612: note = Related to CP040017.1; note = Massilia umbonata
MSDNTPAPMTRAALYARLRTQSREEVTLAEMQRLGFWPENDPGKAVAEQLIQRESELVRALRELGSDLRVAEDPALALKAMHKERKAKARARREETRERRARERFERANAWHQRRAGEILYLGQGVSAGLGEARSDADKLARAALPAMHDAKDLAQAMGLSLPELRFLAFDRRVSRISHYRRFAVPKKTGGERIISAPMPRLKRGQYWVLDNLLARAAVHPAAHGFRAGRSIVTNAGPHVGRAVVINVDLKDFFPSIGMQRVAGVFRQLGYSKQIATILALLCTESATEQVSIDGETFHVAHGPRVLPQGAPTSPALTNILCRRLDARLEGAAAKLGFAYTRYADDLTFSGGEETRRLAGKLLWRVRQIVADEGFTPHPDKQHVMRDSQRQGVTGIVVNEKPAVDRTTLRRFRATLFQVERDGPAGKAWNGNANVLAALEGYAQFIRMVDPAKGTPLLARVRAARERWSDTGSPAVTVAKAISAGNFRALSAQGKAPWPGFWQAGMAPAPVLEKTQEQVVAMKKEARQLARSHAATSPTPGGKARNARSLWHALLLQILIACFLAIAFRSPWPIIAMLALFYLSRRDRSAYWTRFIGIQTLAVAGMLALMKH

SEQ ID NO: 6098 - protein, 623 aa, unidentified
  source 1..623: note = Related to WSES01000020.1; note = Massilia sp.
MSDYPTSTREALYARIRASSRTEVTLEEMKRLGFWPEDDTSLAEAEQLIKREAELQQALSALGRELREVEDPALALKRMRKERMARAKAKREETRQRRARERHERALAWHARRAKELLYLGAGVSAGLNEARSDADRLARLSLPSMHDAQDLANAMGLSLEELRFLAFERRVSRISHYRRFAMPKKAGGVRIISAPMPRLKRAQYWVLDNVLARAPVHPAAHGFLAGRSIVSNAAPHVGQAVVINVDLKDFFPSIALPRVRGVFRQLGYGKQVATTLALLCTESATETVQVDGETFHVAHGPRVLPQGAPTSPALTNILCRRLDARLQGAAARLGFRYTRYADDLTFSGDESVRKLAAKLLWRVRQIVIDEGFTPHPDKQHVMRSHARQSVTGIVVNEKPAVDRDTLRRFRAVLFQVEKDGPAGKQWNGNDNVLAALEGYAHFIRMVDVEKGAPLLARVRAARARWNGDAAAPDAVARRAGGQFRMLAAQGKAPWPGFWQAGTPPAPVLEKTQEQVKTERTLAREEARPRKAAASPVPADDAIARRAERTARRNPLLIGGGRMTWYAVALQGVVALLLSRKLDSNTPILAMLALYWLSVRYRRMLWVPFIVVMLLIWAVLAPR

SEQ ID NO: 6099 - protein, 603 aa, unidentified
  source 1..603: note = Related to BMKG01000047.1; note = Massilia buxea
MYERVRASSREEVTLAEMQRLGFWPANDPGLAAAEELIRREAELSQALRALGTDVRIAEDPVLALKAMRKERMAKARARREETRQRRARERFERASAWHRRQACEILYLGEGVSAGLNESRSNVDKLARAALPALDDAQDLARAMGLTLQELRFLAFDRRVSRITHYRRFALPKKTGGERIISAPMPRLKRAQYWVLDKLLAHAPVHPAAHGFLRGRSIVSNAAPHVGQAVVINLDLKDFFPSIGMPRIRGVFTQLGYSKQVATTLALLCTEAATEEVSVDGETFHVAHGPRVLPQGAPSSPALTNLLCRRLDARLQGAAAKLGFAYTRYADDLTFSGGEATRKLAGKLLWRVKQIVIDEGFTPHPDKQHVMRDSQRQSVTGLVVNAKPSLERDTLRRFRATLFQVEKDGPDGKAWNGNTNVLAALEGYANFVRMVDPAKGTPLLARVRAARERWTGVPQAHRAPSLSKRSSDFRALSAQGKAPWEGFWQAAAPPPPELERTAEQLAQDKKAARRQRPASPAAEPSGDLGVVDVPATPGLPPVPWSAIGVQLGLALAYGIDQGKLLPLAFTVGLAFMAWRDRDPHWLRFGGVIVLMVLLSVLR

SEQ ID NO: 6100 - protein, 642 aa, unidentified
  source 1..642: note = Related to NZ_CP024608.1; note = Massilia violaceinigra
MTSPTPSPSELTRAQLYERIRASSKEEVVLTEMQRLGFWPADSGKPSVESALIRREAELTQALQRLGSELHHLQNPEAALRMLRKERMAKAKARREETRQKRALVRFEKAQAWRQRREHEVLYLGAGVSGGLSRADSDAGKLAGLAMPVLHKADDLAQAMGITLSELRFLAFERRVSRISHYRRFAMPKKTGGERIISAPMPRLKRAQYWVLDNVLARAPLHQAAHGFVPGRSIVSNAAPHVGQAVVINLDLKDFFPSIGMPRIKGVFAQLGYSEQLATVLALLCTEAPTDKVRIDGERFFVAHGSRALPQGAPSSPALTNILCRRLDARLQACAAKLGFKYTRYADDLTFSGDADARKLAGKLLWRAKQIVIDEGFTPHPDKQHVMRDAQRQMVTGIVVNQKPSLERETLRRFRATLFQLEKDGPEGKQWNGNTNVIDALEGYAQFIRMVDPVKGLPLLVRVRAARARWGAAGIDMKLMQSKRSSAFRALSAQGKAPWDGWWQATLASAPVLEKTAAQLAVEKKERKAAEAPTVPPAPVNMKKPAAAQTPVATPAAAVHAPPASDATANPAPGAKPDGDNNFQVAIAVQVALICAFALATQRVLPSACMAVIVLQSAMLRKPRWGWFLFIILIWSAVTLKW

SEQ ID NO: 6101 - protein, 631 aa, unidentified
  source 1..631: note = Related to NZ_AUDI01000031.1; note = Pseudoduganella violaceinigra
MSATESKPITTRAELMERLRSSSRQEVVLGEMQRLGFWPANKGEPTELEEVVRREAELSSTLNRLSQELRTIQDPEAALKAMRKERLAKARQRREETRLRRAQERFDRATAWHRRRSTELLYLGEGVSAGLNQAESDAGKLARWSLPVMNNASELAAAMGVTLPELRFLSFERRVSRISHYRRFAMPKKTGGERIISAPMPRVKRLQYWVLDNILAKVPLHSAAHGFVPGRSIVSNAQPHVGKAVVINLDLKNFFPSIALPRIKGVFRELGYSDQLATTLGLICTETPTEEVSVDGEKFFVATGERALPQGAPSSPALTNILCRRLDARVQSCAAKLGFIYTRYADDLTFSGDAAARKLAGKLLWRVKQIIADEGFTPHPEKQHVMSLSQCQSVTGIVVNKKLSLDRDTLRRFRATLFQVEKDGPAGKQWNGNENVIDALVGYAQFIKMVDAERGAPLLQKARMVRQKWNTEAPVVSEAAARASSGFRKLSAQGKEPWAGFWQAAGSPAPVLEKTQQQLKEEKLAKREKPAEKPKAAAHADGQAARQQGVTASPGTQAPAQGGRGMFAGRPWVSIIIQVYFAFTLCLNFRTPLPLVVAIVLGYQAWRDYSGHWLRYFGAMAVAVVLGLWLR

SEQ ID NO: 6102 - protein, 625 aa, unidentified
  source 1..625: note = Related to LMFZ01000021.1; note = Duganella sp.
MSATESKPITTRAELMERLRNSSRQEVVLGEMQRLGFWPANTGQPTELEEVVKREAELSGALQRLGQELRTIQDPEQALKAMRKERLSKARQRREETRLKRARERFERATAWHRRQSTELLYLGEGVSAGLNHAESNAEKLARWSLPAMNNASELATAMGITLPELRFLSFERRVSRISHYRRFAMPKKTGGERIISAPMPRVKRLQYWVLDNILAKVPLHPAAHGFIPGRSIVSNAQPHVGKAVVINLDLKNFFPSVNLPRIKGVFRELGYSEQLASTLGLICTETPVEEVSVDGEKFFVATGERALPQGAPSSPALTNILCRRLDARAQSCAAKLGFTYTRYADDLTFSGDAAARKLAGKLLWRVKQIIADEGFTPHPEKQHVMSDAHCQSVTGIVVNKKLSLDRGTLRRFRATLFQVEKDGPAGKQWNGNDNVIDALEGYAQFIKMVDADKGAPLLQQVRAARAKWISPAPAASVTAVRRSSGFRALSAQGKEPWAGFWQAAAAPAPMLEKTQQQLALEKAGAGRKAAAPASAPSRPAARAAAEAPASAPVQGGRGTFTGRPWVAVIIQVYFAITLCLNFRTPLPFVVAVVLAVLAWRNYSAKWPRYFGAMFAAVLAGVLLR

SEQ ID NO: 6103 - protein, 637 aa, unidentified
  source 1..637: note = Related to NZ_WWCJ01000033.1; note = Massilia guangdongensis
MSATESKPITTRAELMERLRTSSRQEVVLEEMQRLGFWPSGTGQPSELEQLVQREAELSSALLKLGQELRTVQDPEAALKAMRKERLTKARARREETRQRRARERFERATAWHQRRSTELLYLGEGVSAGLNQAEGDAEKLARWSLPALHNAQELASAMGVTLPELRFLSFERRVSRISHYRRFAMPKKSGGERIISAPMPRVKRLQYWVLDNILAKVPLHPAAHGFVPGRSIVSNAQPHVGKAVVVNLDLKNFFPSIGLPRIKGIFRELGYSEQLATTLGLLCTETPSEEVSVDGEKFFVATGERALPQGAPSSPALTNILCRRLDARVQSCAAKLGFTYTRYADDLTFSGDAAARKLAGKLLWRVKQIIADEGFTPHPEKQHVMGAGHCQSVTGIVVNQKLSLERETLRRFRATLFQVEKDGPAGKQWNGNANVIDALEGYAQFIRMVDAEKGAPLLQRVRAARARWIAQAQDGGEQAARRSSGFRALSAQGKEPWAGFWQAQAPAAPELEKTQQQVKQEKLEHRQAQKAKPASGRPAVAAGAGPSARATRRQAPEAPPAEQEEPYKFSDRPWLGILIQLYLAFSLCRLYHTPLPLVFAVMLAIPAWRNYRAYWLRYFSYMCLAVLLGIVLRKLL

SEQ ID NO: 6104 - protein, 555 aa, unidentified
  source 1..555: note = Related to NZ_NSJF01000005.1; note = Vandammella animalimorsus
MRRQRLQAARQRREATRQARAQARYERARSWHERRQHSVLYLGQGVSGGLQHSDNQPERLARWQLPQPANPQQLAQLMGVSVAELRFLAYDRAVARVSHYRSFDLPKKSGGLRRISAPMPRLKRLQYWLLDNILSKVPVHDAAHGFRPGRSICSNAQPHVGKAVVINLDLQDFFPSIAYPRIKGVFRALGYSEQLASIMGLLCTQRPTQAVQLDGQTYHIATGARHLPQGAPSSPALTNILCRRLDRRLHGMAAKLGFAYTRYADDLSFSADAPAQHLVGKLLWRARQIIADEGFTLHPDKLHVMRSARRQQVTGLVVNAKPSIDRSTFKRFRATVFQVEKDGPQGKSWNGNDNVLDALLGYAHFLHMVDPQRGQPWLQRVQALRVAAQAPAQSQPSPEPQQILELESAAKASQAGRGRSAFRRASAQGQAPWAHWWQPAQPPAPVLEPTEAQRQAQRQAQRRQQAQAALPTAAQPQRQGALEPQQPPEEAQHASQRNPRMLLEQTLALLVLLFMLRKPSLLLLGLLIHLAYHLLHRSSWWLFLPLLLASLLVPF

SEQ ID NO: 6105 - protein, 627 aa, unidentified
  source 1..627: note = Related to NZ_VIRW01000011.1; note = Chitinibacter sp.
MSQPSQSNPNQSNSAQPPNSREAILQRMRNSSKDEVILEEMRRQGFWPKDEPSPEQAAALALIEREGELVRALHDLSQQLHQVEEPQAALKAMRKERMRLAREKREVTRRQQAQRRYDRALAWHTQQQNDITYLGEDVSQGLADPRSDEARLASKGLPHFSSVAALAQAMGVTVAELRFLSFSRNVTRISHYRRFTVPKKTGGVRLISAPMPRLKRLQYWILEQILLKLPVHAAAQGFVAGRSIVSNATPHTGQAVVVNFDLQDFFPSIHWQRVSGLFQSMGYSKQLATILALICSETPCDEVAVDGAHYFVQTGVRRLPQGAPSSPALTNLLCRRLDTRLSALAQRLGFRYTRYADDMTFSAADDSQLPRLLWQAKRVIREEGFTLHPDKQKVMRRHARQEVTGIVVNQRPAVCRETLRRFRAVLFQVEQTGPTGKHWNGNENVLAALAGYAQFIVMVDAEKGRPLLARVHAAQLKWSAPEAARSSYYRDFRTASSKGIAPKGITQMAQRAIPIIELTQEQHQQAKQSAQQPNSQRAVIPADPDVVLLEQQQAPPLAAHANTPVSIYLQIAAAFLALMLIGLLSSNYLLSAGSIVWVWYCMQKRKFSWWGFVLVLIVCRWLWQQIE

SEQ ID NO: 6106 - protein, 638 aa, unidentified
  source 1..638: note = Related to NZ_SCOH01000042.1; note = Chitinivorax sp.
MSNATQTSREAVLARIQASSKDSVILEEMQRLGFWPAGSGTPDQQRATELISQEQALLSELRELNQKLSIAKDPVAALKALNKQRMAEAKARREQTRLAAAQRRYEKAAAWHARRALDIGYLGEGVSQSLSDARTDPHRLAARELPVLDSPKVLADAMGITVEELRFLTFHRSVSRISHYRRFGIPKKTGGLRMISAPMPRLKRAQYWVLDRVLAKLPVHDAAHGFVPGRSIVSNATPHAGQAVVVNFDLKDFFPSISYQRVRGLFQTFGYSRQLATLFAMICTELPTDEVSIDGLHFHVQNGERHLPQGAPCSPTITNLLCRRLDTRLAGLAKRLGFIYTRYADDMTFSADAASAGNLPRLLWQVKRIIAEEGFTLHPDKQRIMRNSARQEVTGVVVNHHPTVCRETLRRFRATLYQVEKDGPQGKAWNGNGDVLNALAGYARFVKMVDPAKGGPLCAKVAAVQAKWGDNASQPRGQYYRLFREASVAGKALPSHQWQAKRQPAPTLEKTATQLQQEKQATRQAESDQAAAVAAETIASAAALPTTHTQSGELIERNAVSADAIPPNVHEDVPASVYLQLAMQFVLMLVSGLLTGNVLMAMASVGWMWFGFKRRRANWWLWLGVYFACRLLWRLTTA

SEQ ID NO: 6107 - protein, 624 aa, unidentified
  source 1..624: note = Related to JAEUND010000226.1; note = Chitinimonas sp.
MSDAAQTSREAVIARIRNSSKDAVVLEEMRRLGFWPQGQASPGEGEVAALIEQEAALIQELQQINRNLARVRDPQAALLEMKKERMAAAKRRREETRQRHAQLRYQRATAWHARMQQDIVYLGAGVSAGLDDARHDTARLASKQLPLLDGPQALAAAMGVPLAELRFLAYHRSVSRISHYRRFGIAKKTGGVRLISAPMPRLKRAQYWVLDRILARLPLHEAAHGFVPGRSIVGNALPHVGRAVVLNLDLQNFFPSIAYPRVRGLFQSFGYSRQMATLLALICTETPSEEVELDGNRYHVQTGERCLPQGAPSSPAITNLLCRRLDKRLTATAAKLGFSYTRYADDMTFSADAPQADGLARLLWRVKRIIADEGFTLHPDKQRIMRAASRQEVTGVVVNRQPAICRDTLRRFRATMFQVEKDGPLGKQWNGNSNVIAALEGYARFIAMVDPAKGEPLCQRAALLRAKWGSVLPAPASTGYRRAFRAASAEGRQTPGRIWLPAERPVPQLEQTDQQQREQRAAAREAAQPSPVPQTTASRANATPPAAQPQGANPAAIGWVQQYYGLLAVGQFMALLAIGVLGRFWLLPLCGLVLMLYALRTRHISGWHFALALVVGILFDGVLH

SEQ ID NO: 6108 - protein, 635 aa, unidentified
  source 1..635: note = Related to NZ_KB892857.1; note = Uliginosibacterium gangwonense
MSYQETPELQALRERIRASTKDAVVLEEMRRLGYWPKDEAIPDSRDAASEIGQIIQREGELVGELHKMAQDLHRLSDPQQALQEMRKQRMAAARAKREETRRRHAEERHQRAAAWHAQRQKSIAWLGEEVSTGLADVRTDAARLHAKSLPVIESIGELARLMGVPLAELRFLGYQRSVSRINHYHRFGIAKKTGGVRVISAPMPRMKRAQYWVLDKLLVSQPVSASAHGFVPGKSIVDNARVHAGHDVVINFDLKDFFPSIHYPRVKGLFSSFGYSDSVATLLALLCTEAPTETVEMDGQRYHVQTGPRCLPQGAPTSPAITNLLCRKLDRRLEGSAKKLGFSYTRYADDMTFSAPAEARSKLGQMLWCAKQIIADEGFILHPDKQRVMHAGRRQEVTGLVVNERPAVPRETLRRFRATLFQVEKDGPEGKSWNGNGNVIAALDGYARFIYMVDADKGAPLLARIAQLKERWSGAPVRKAPGLLSGPAFRRAAGEGKAPRENWWTPAEQAAPVVEKTDQQRAEDRAAAKAAIRLQKAEAQATAAPASSEQAETAPPPASLAPEEAAKARALSASDSIQILIQSIVMVLAGLVTHNYLVLLGAVVWFFLSMSKRKRYNWLIWAVVYIACRILGGVH

SEQ ID NO: 6109 - protein, 667 aa, unidentified
  source 1..667: note = Related to NZ_JACOGF010000004.1; note = Undibacterium hunanense
MTQNKQSASVTSPPLSQMTRDELYAHVRTTTKDAVVLQEMRRLGFWPADTGKPSVTEELIQREAQLSSMLRELTSQLQHVHDPKAALRDMRKQRMAAAKEKREQTRQKHAQLRHAKALAWQEKRQNDIGYLGEAVSSGLNYTTTDIEKLARYQLPVLQKAPELATALGIPLAELRFMSFQRKVSQVSHYQRFSIPKKTGGLRYISAPMPRLKRCQYWVLDHILSKVPCHPAAHGFLPQHSILSNALPHVGQAVVINLDLKDFFPSIEYARVKGVFKSLGYGDQIATLLGLLCTEQASEEVRVDTQRYFVAGKKRSLPQGAPSSPMITNILCHGLDKRLHAAASKLGFVYTRYADDLTFSSKQKERPPVGKLLWRVKQIIADEGFTLHPDKQRIMRHSQKQEVTGIVVNHSPTIDARTLHRFRATLHKVEKNGPAGYHWNGNTDVLSALEGYARYICMVNPAKGQPWLQRVKQLRVVYAAPTSVPAHSARPPRLSLRQQVAAGNTPLRANGKDWWQVKEAAVPVLELTAQQLAEQKQAEKQAEKQALKEAKQGKDTQAKAPVRENQTQSYAQRQVVTPQPVRANASKRNRDDAAPVSDEQPVVFKLRPIPWWSILLQFVACIMVTISLRSIFPVTLGLSLLAISIITRRSMMVWVMVVLVLSVLLINS

SEQ ID NO: 6110 - protein, 658 aa, unidentified
  source 1..658: note = Related to JAKZHX010000005.1; note = Undibacterium sp.
MTQQQQSAPVKPLSQMTRDELYAHLRTTTKDAVVLQEMRRLGFWPADTGKPTLTDEIITREAELSTTLRALSEQLHRVQDPKAALREMRRQRMAAAKEKREQTRQKHAQLRYAKALAWQEKRKTDIVYLGEGVSGGLNYTATNTDKLARHQLPLLQSASELATAIGIPLAELRFMSFQRQVSQVSHYQRFAIPKKTGGQRIISAPMPRLKRCQYWVLDHILAKVPCHPAAHGFLPQHSILSNATPHVGQAVVINLDLKDFFPSIDYQRVKGVFKSLGYGDHIATVLGLLCTEQASEEVRVDRQKYYVAGKKRSLPQGAPSSPMITNILCHTLDKRLHAAATKLGFVYTRYADDLTFSSKQKERPPVGKLLWRVKQIIADEGFTLHPDKQRIMRYSQKQEVTGIVVNHSPTIDAKTLHRFRATVHQVEKKGPAGLHWNGNTDVLAALEGYARYICMVNPAKGQPWLQKIKQLRAQHAAPAVTRPTRPSLRQQLAEGKTPERANGQDWWQIKEPAAPVLELTTQQVAEAKKALKQEAVQATKAAKASRQGTATPDYGRQQTAGRTAPVNLNVSAGNTRPGQADDGNQTYNATEQSKLNNKRNARLFAILFQLFLCVFFTLQLKSLYPVILGLPLLALSIISGRSKFMWIMLVLVACVLFR

SEQ ID NO: 6111 - protein, 651 aa, unidentified
  source 1..651: note = Related to NZ_QJKB01000012.1; note = Undibacterium pigrum
MTQQQQPSAQSASDKPLSQMTRDELYAHLRTTTKDAVVLQEMRRLGFWPADSGKPSVTDELITRESQLINELNTLTDKLRRVQDPKAALRDMRKQRMAAAKEKRELTKQKHAQLRHARALAWQEKRQNDIGYLGEGVSTGLNYTSTNTDKLARYQLPALQKSLDLATAIGIPLAELRFMSFQRKVSQVSHYQRFAIPKKTGGQRFISAPMPRLKRCQYWVLDHILAKVPCHPAAHGFLPQHSILSNALPHVGQAVVINLDLKDFFPSIEYPRVKGVFKSLGYGDQIATLLGLLCTEQATEEVRVDKQKYFVAGKKRSLPQGAPSSPMITNILCHTLDKRLHTAATKLGFVYTRYADDLTFSSKQKERPPVGKLLWRVKQIIADEGFILHPDKQHIMRHSQKQEVTGIVVNHSPTIDAKTLHRFRATLHQVEKNGPAGYHWNGNTDVLGALEGYARYVCMVNPVKGQPWLQRIKALRARYAPQYATQSATHPARPTLRQQVASGKTPQRANGKDWWQVQEAAAPVLEQTAQQIAEEKKVVRQAEKEEKKAAAMPQSVQPDVAGNTGNQAANTANPANTENLTAAEKNKLNKRLYGTLGRVFQVLLCAIFSASLHSLYPLTFGIALVALSLISGRSSLVWVMVMLVLSVVLLS

SEQ ID NO: 6112 - protein, 641 aa, unidentified
  source 1..641: note = Related to NZ_RXFT01000001.1; note = Variovorax guangxiensis
MTMQSPASSSSIPDSALTREELYERIRKSSKQEVVLEEMQRLGFWPRDAAQPTVEEQLIRREGELQTALSKLGSELRGIEDRDRALKIMRKERMARARERREETRQRAAQGRHARAVAWHERRQRELLYVGDGVSGGLNDAHSDSQALARNALPALDHVSDLAQAMGIGLGELRFLAWHREVSSVSHYQRFTMPKKSGGERHISAPMPRLKRAQYWVLDNILAKMPVHEAAHGFMPGRSILTNAAPHVGRDVVINLDLKDFFPSIGMRRVRGVFRQLGYSSQVASLLALVCTEAPTDEVQLDGNRYFVARGDRVLPQGAPTSPMITNLLCRRLDARLSASAAKLGFRYTRYADDLTFSAGPEHSRDTAKLLWRAKQIVASEGLTLHPDKQQVMRKHRQQHVTGIVVNDKLSVDRDTLRRFRAVLHQAERNGLQGLQWNGNSDVIGALRGYANFIAMTDAARGEPYLQRVRALAAKHEGGAAPKTQASQRRLGAGEFRKQSAAGKAPWPAWWQPAEAAAPVLEKTAEQIAEEKKAQREAARPQPVAASPAPARAPATAQPAAAPAAKQAPGALSQIGWVASMMLQALYVVSVFLSGTSPLIWLMTGGVAIGNFVQRKSGWLRFIVAIFISSALASLVHSMKN

SEQ ID NO: 6113 - protein, 659 aa, unidentified
  source 1..659: note = Related to NZ_CP060295.1; note = Variovorax sp.
MQPPASSSSVPDSALTREQLYERLRGSSKQEVILEEMQRLGFWPQDAAQPTVESQLIRRESELQTALGKLGEELRGISDRDKALKMMRKERMAKARERREETRQRLAQGRHARALAWHERHQRELLYVGDGVSGGLNEAQSDSQALARNALPALNHAGDLAGAMGIDLGELRFLAWHREVANVSHYQRFTIAKKSGGERHISAPMPRLKRAQYWVLDNILAKMPVHEAVHGFLPGRSILTNAVPHVGQDVVINLDLKDFFPSIGMRRVRGVFRQLGYSSQVASLLALVCTEAPTDEVQLDGRRYFVARGERVLPQGAPTSPMLTNLLCRRLDARLAASAAKLGFRYTRYADDLSFSADSQHSRDTGKLLWRVKQIVASEGLTVHPDKQQVMRKHQQQHVTGIVVNDKLSLDRDTLRRFRAVLHLAERQGPQGLQWNGNVDVIGALRGYANFIAMTDAARGAPYLQRVRALAAKHKGSAMTTPIAPASPVASQQPQRQVAPDQFRKQSAAGQAPWPAWWQPAQASAPVLEKTAEQLAAEKKAKRDAERAEAAAKAAAATAASAPVPRAAAAPAVAPSSPEAPTPEAPKRLESQFVLTVSLMLQSAYVVMSLLTSRSLVVLLPVGAIVIGNWIQRKSGWMRFLIVLIAASGLSGLVRHLTQ

SEQ ID NO: 6114 - protein, 646 aa, unidentified
  source 1..646: note = Related to NZ_CP091716.1; note = Variovorax paradoxus
MQSPPASSIPDSALTREQLYERIRKGSKQEVILEEMQRLGFWPQEAAQPTVEVQLIRREGELQAALSKLGDELRGIEDRDKALKTMRKERMAKARERREETRQRLAQDRHARAIAWHERRQRELLYVGEGVSGGLGEAQSDAEVLARNALPALHHAGDLAQAMGIGLGELRFLAWHRDVANVSHYQRFTIAKKSGGERHISAPMPRMKRAQYWVLDNILAKMPVHDAVHGFLPGRSILTNAAPHVGQDVVINLDLKDFFPSIGMRRVRGVFRQLGYSSQVASLLALVCTEAPTDEVQLDGRRYFVARGERVLPQGAPTSPMLTNLLCRRLDARLAASAAKLGFRYTRYADDLSFSAGPAHSRDTAKLLWRVKQIVASEGLTVHPDKQQVMRRHRQQHVTGIVVNDKLSLDRDTMRRFRAVLHQAESRGPQGLRWNGNSDVIGALRGYANFIAMTDAARGAPYVERVRALAAKHGDGKATAPAVQQTQPSQRSLPAGQFRKQSAAGQAPWPEWWQPAQAPAPILEKTAEQIAEEKKAQREAARAQAAPPAVARPAQTQQAPAAQPAATTSTPAAPGALSHIGWIASMMFQALYVVTTFLAGSSPLIWLLTGGVFISNFLRRKSGWGGFLAAVVVSSAVASLVHSMRK

SEQ ID NO: 6115 - protein, 642 aa, unidentified
  source 1..642: note = Related to CP063166.1; note = Variovorax paradoxus
MTPPSPSSVPDSALTREQLYERIRASSKQEVVLEEMQRLGFWPRDTAQPTVEAQLIRREGELQTALRDLGDELRGIEDRETALKSMRKERMARARERREETRQRLAQQRHARALDWHGRRQRELLYLGEGVSGGLNEARSDEQSLARHALPALHDATDLARAMGLELGELRFLAWHREVARVSHYQRFTVPKKTGGERRISAPMPRLKRAQYWVLDNVLAKVPVHEAVHGFLPGRSILSNAAPHVGQAVVVNLDLQDFFPSIGLRRVRGVFRQLGYSPQVATLFALLATEAPTDEVELDGERYVVARGERVLPQGAPTSPMLTNVLCRRLDARLAACAARLGFRYTRYADDLSFSADAEHGRDVGKLLWRAKQIVASEGFVVHPDKQQVMRRHQQQHVTGIVVNDKLSTDRDTLRRFRAVLHQAERHGPQGLHWNGQHDLVAALRGYANFIAMADPARAEPYLRRVKALAAKHASAPATAATPARAPLPAGHFRRQSAAGLAPLPTWWQPARAPEPVLEKTPEQIAAEKKAKREAERERQRAQEEPQRVEQAPPRTAEPAAAPQTAKPRSTLSLLGLWVSIAIQGTYVLGFLLSLRDAWLIGLMTGAIWVANIYQRKAGWMRFFIALIAGSGLSAVLRKMWS

SEQ ID NO: 6116 - protein, 635 aa, unidentified
  source 1..635: note = Related to NZ_JAGSPN010000003.1; note = Undibacterium luofuense
MLTMTANSTTPAKPLSQMTRDELYAHVRSQGKDLIVLREMQRLGYWPQSTDIPAPEEELLEREKFLTQRLLDMQSELAKISDPEKALRLLQRERMDAARERREQTRREKIKQRYEKAQAFWQRRQTGIDYIGEDLSAGLVQQQSNVQRLQQYGLPEFHDAAGLASFLNISLPELRFLSFQRKVSRYSHYQYFSLKKKTGGLREIAAPMPRIKRVQYRILDALLQKVPVHDAAHGFVGGKSVLSNAIPHTGQAIVINLDVKDFFPSVGWRRVKGIFRQLGYSEQAATLLSMLCTELPVSPVKIDGQQWLVARADRRLPQGAPTSPALTNLLCFGMDKRLQQLAQRLGFRYTRYADDLTFSAAEPKAPVGKLLWRVSKLMTAEGFTLHPDKQRVMRAHQRQEVTGIVVNQHPSLNRDTLHRFRSLLNKLEKQGPAGLHWNGNTDVLRAAEGFARYLMMVQPSKGAVALQRVHRLKKQWSGAPAFTGGNVWRKTAADGGVPLRKNGAQWWKASTTPAPVQEKTDLQRREQRMQEKHAQLAPDASNDAALPENRQAAPVNHTTQNAGANQSVSKLPPVISAGTMIADLIAGLTLSILMGVATPLLLTLLSFYATFRFRRNFRPLLLGVLILLLILHVMK

SEQ ID NO: 6117 - protein, 638 aa, unidentified
  source 1..638: note = Related to NZ_BMYU01000002.1; note = Undibacterium squillarum
MTANSTSSAKPLSQMTRDELYAHVSAQGKDLVVLREMQRLGYWPQQQDIPAPEQALLEREQVLTKRLRDMQSELAQISDPEKALRMLQRERMQAAREQREQTKRQHAQRRFEKAHAVWQRRQTDIDYIGDNLSAGLLQRTSDTQRLQRHGLPEIHDAAGLAAFLGISLHELRFLSFQRRVSRYSHYQYFSLKKKTGGLREIAAPMPRIKRVQYRILDALLQKVPVHDAAHGFVYGKSVLSNAQPHTGKAVVINLDVKDFFPSVGWRRVKGIFRQLGYSEQVATLLSMLCTELPVSPVDIDGQRWLVARADRRLPQGAPTSPALTNLLCFGMDQRLQKLAQRLGFQYSRYADDLTFSAADPKAPVGKLLWRVQQRMTAEGFTLHPEKQRVMRAHQRQEVTGIVVNQHPALNRETLHRFRALLNKLEKHGPAGLHWNGNSDVLRAAEGFARYLMMVQPSKGAPALQRIHRMKQQWGAAAAGTANVLWRKIAADGGVPPRSEGQAWWSAALPPEPVPELTDLQRREQRRQPAGTEKISEPVSQSRSGTDYDAGSPDAAPAQVFPENAEQTSMNLSKLPPSVSAGTMLTDLIAGLVLSILLKGALPLMMSLLSLYASFRWKRSFRPLLALAFVLLWLWHLSR

SEQ ID NO: 6118 - protein, 606 aa, unidentified
  source 1..606: note = Related to JAFGZG010000009.1; note = Methylobacterium goesingense
MTVRPGSLTRQQLYDRIRESSKDEVVLEEMIRLGYWPDGVDQPNLPDDLIRRRGEITREISDLHRREALWRDPEAALKAMHKRRKKAALVRRAETRLRGARDRHERALAWHERRKTEILYLGEGVSAGLSAQEAAPVSPANGLPPLASPAALARAIGISLGELRFLAYDRALTSVSHYQRFTIPKKTGGVRAISAPMPRLKRAQYWVLDVVLAQVPVHEAAHGFVPGRSILTNAAAHVGRDVVVNLDLKDFFPSLDYRRIKGKFRGLGYAEPVATVLALLCTEPDVDAVEIDGQQLYAARGPRRLPQGAPTSPALTNLVCTRLDARLSGLARSLGFAYTRYADDMTFSASGEAAAKVGPLLKYVHEIVAKEGFTVHPDKTRVMRRGRHQEVTGLTVNERVAVPRETLRRFRALLHGIERHGPIGRRWGRSADGAVLGAALGFARFVRMVTPEVGTPLVARARSLAERHGTQPEQARPRVAAFRERSAQGVPPREGGWVPAEPPVPHPDPLLVQAEAAQAEAARRAEGAADRRVVPPIGRQPPAPQPVSGQATDDADAAGMRPWMVVVGVFVLFQAAALLHPGLGLFVLAAALTIGLRRWLRRRRGK

SEQ ID NO: 6119 - protein, 602 aa, unidentified
  source 1..602: note = Related to BPQF01000021.1; note = Methylobacterium bullatum
MSVQPGSLTRQQLYDRIRESSKDEVVLEEMIRLGYWPAGKDQPNLPEEVIRRRGELARELTELHRSAALWTNPDAALKAMHKRRKKAALERRRETKLNGARGRHERALAWHGRRNREILYLGEGVSAGLSGGDAGASRADGLPELASPGAVAEAMGIGLGELRFLAYDRALATVSHYQRFTIPKKTGGLRAISAPMPRLKRAQYWILDAVLAHAGIHDAAHGFVPGRSILTNAALHVGRDVVVNLDLKDFFPTLDYRRIKGKFRGLGYAEPVATVLALLCTEPDVDEVEIDGQRLYAARGPRRLPQGAPTSPALTNLVCTRLDARLTGLAASLGFTYTRYADDMTFSASGEAAGKTGALLKYVHEIVAGEGFTVHPDKTRVMRRGRHQEVTGLTVNERVAVPRETLRRFRALLHGIEGHGPAGRRWGRSEGQAVLGAALGFARFVRMVTPEAGAPLVAQARRLAETHGAPQQSAQPRITPFRAQSARGVPPREGWWSPAERPPPQPDPILLEAERPAISAPGRSGLPSIGRRPAPPPDQPRPGSPPGGDIEEDTPLKPWMAVLGVFVLFQAGAIVHPVIGLLVLAAALVIAIRRWLRRRRRR

SEQ ID NO: 6120 - protein, 606 aa, unidentified
  source 1..606: note = Related to JACHWM010000004.1; note = Methylobacterium sp.
MSAQPGSLTRQQLYDRIRESSKDEVVLEEMIRLGYWPEGADQPNLPEDLIRRRGEISRAITDLHRREALWRNPDAALKEMHRRRKKAALKRRRETKLRNAQGRHERALAWHARRDDELLYLGEGVSAGLSRPAHPAREPTPGLPALASPKVLAQAMGISLNELRFLAYDRALATVSHYQRFTIPKKAGGLRTISAPMPRLKRAQYWVLDALLARAPVHEAAHGFVPGRSIVTNAGAHVGRDVVVNLDLKDFFPSLDYRRIKGKFRGLGYAEPVATVLALICTEPDVDAVEIDGQTLYAARGPRRLPQGAPTSPALTNLVCTRLDARLSGLARSLGFTYTRYADDLTFSASGEASGKVGALLKYVHEIVAAEGFTVHPDKTRVMRRGRHQEVTGLTVNERVAVPRETLRRFRALLHGLERHGPTGRRWGGSGENGVLRAALGFAHFVRMVTPDAGAPLVARAQALAEPNGVQVPAARPRMSEFRARAARGVEPLPRWWESAARPVPEPDPILAQAAAEAAAPARRATPSGRSFVPVIGRSSAPSSVDPAPAPQVDPEAAPMKPWMVALGVFVLFQAGVVIHPVIGILVLAAALLIGLRRWLRRRRDQ

SEQ ID NO: 6121 - protein, 632 aa, unidentified
  source 1..632: note = Related to CP001001.1; note = Methylobacterium radiotolerans
MSQQPGSLTRQQLYDRIRESSKDEVILEEMIRLGFWPDGEAQPNPPDDLIRRRGEIARALADLHRREAAWRDPEAALKEMHRRRKTAALERRRETRLRNARDRHARAQAWHARREAEILHLGDGVSAGLSAGLAHAAPDAGTPARGPAPGLPPLASPKALAEAMGIGLGELRFLAYDRALSTVSHYRRFTIPKKAGGLRRISAPMPRLKRAQYWILDALLAHAPVHPAAHGFVPGRSIVTNAAAHVGRDVVVNLDLKDFFPSLDYRRIKGKFRGLGYAEPVATVLALLCTEPDVDAVEIDGARLYAARGPRRLPQGAPTSPALTNLVCTRLDARLSGLAGSLGFTYTRYADDLTFSASGEAAGKVGALLKYVHAIVAGEGFTVHPDKTRVMRRGRHQEVTGLTVNERVGVPRETLRRFRALLHGLERHGPVGRRWGAAGEAGVLRAAVGFAQFVRMVTPETGAPLLARARALADRHADRPSARPGARPLPDFRARSARGEVPLARWWAPAPRPAPEPDPILAEAEAAAAREAEEAAARAAARAAAPVPGRSGVPVSGRPRLGAPEPTARAEVAPDTGAEPDDAPMKPWKVILGIFVLFQAAALLHPALGLLVLAVALLLGLRRLLRRWRRRR

SEQ ID NO: 6122 - protein, 604 aa, unidentified
  source 1..604: note = Related to NZ_JACJIM010000008.1; note = Methylobacterium fujisawaense
MSPQPGSLTRQQLYDRIRESSKDEVILEEMIRLGFWPDGAEQPNPPEDLIRRRGEIARALADLHRREAAWRDPEAALKEMHRRRKTAALERRRETKLRNARDRHARAQAWHARREAEILHLGGGVSAGLANADAPARGPAPGLPALASPKALAEAMGIGLGELRFLAYDRALSAVSHYRCFTIPKKAGGLRRISAPMPRLKRAQYWILDALLAHVPVHGAAHGFVPGRSIVTNAAAHVGRDVVVNLDLKDFFPSLDYRRIKGKFRGLGYAEPVATVLALLCTEPDVDAVEIDGARLYAARGPRRLPQGAPTSPALTNLVCTRLDARLTGLAASLGFTYTRYADDLTFSASGAAAGKVGALLKYVHAIVAGEGFTVHPDKTRVMRRGRHQEVTGLTVNERVGVPRETLRRFRALLHGLDRHGPAGRRWGAAGEGDVLRAAVGFAQFVRMVTPETGAPLVAQARALADRHGLRPAVRPQPDFRARSARGAMPLARWWAPAPRPAPEPDPILAEAEAAAAPVPGRSGVPASGRPRFGTPEPVAPAQAAPGTVAEADDAPMKPWKVVLGVFVLFQAGALLHPALGLLVLVVALVLGLRRLLRRWRRRR

SEQ ID NO: 6123 - protein, 601 aa, unidentified
  source 1..601: note = Related to NZ_FOPM01000031.1; note = Methylobacterium gossipiicola
MSAQPGSLTRQQLYDRIRESSKDEVVLEEMIRLGYWPDGADQPNLSDDLIRRRGEITRALGDLHRREALWRDPDAALKEMHRRRKKAALERRRETKLCNARDRHARALAWHARRDDELLYLGEDVSAGLSAAAEGREPLAGLPVLADPKAVAQAMGISMAELRFLAYDRALATVSHYRRFTIPKKTGGLRTISAPMPRLKRAQYWVLDAVLTHAPTHEAAHGFVPGRSIVTNASAHVGQDVVVNLDLKDFFPSLDYRRIKGKFRGLGYAEPVATVLALICTEPDVDAVELDGQSLYAARGPRRLPQGAPSSPALTNLICTRLDARLSGLGRNLGFTYTRYADDLTFSASGAAAAKVGALLAHVHEIVAAEGFTVHPDKTRVMRRGRHQEVTGLTVNERVGVPRETLRRFRALLHGLERHGPAGRAWGRSGEDGVLRAALGFARFVRMVTPEVGAPLVARAKALAERDGVPATAIRPRVSPFRERAARGVAPLPNWWEPAARPAPEPDPILAEAAARLASGAPTGRSGVPAIGRTTAAPANEPVPAPKDDPDAAPMKPWMVVVGLFVLFNAGAVIHPALGFTTLAVALVIGLVRWLKRRRTR

SEQ ID NO: 6124 - protein, 613 aa, unidentified
  source 1..613: note = Related to NZ_CABFVH010000047.1; note = Methylobacterium dankookense
MTLRPGSLTRQQLYDRIREGSKDEVVLEEMIRLGYWPDGAEQPNPPAELIRRRGEISRAIADLHRREALWRDPDAALKEMHRRRKKAALERRRETKLRGARGRHERALAWHARRDAEILHLGEGVSAGLSGTDADPRALKAGLPALANPKAVAEAMGISLGELRFLAYDRPLSTVSHYRRFTIPKKTGGERTISAPMPRLKRAQYWVLDALLARAPLHEAAHGFVPGRSIVTNAAAHVGRDVVVNLDLKDFFPTLDYRRIKGKFRGLGYAEPVATVLALICTEPDVDAVEIDGQRLYAARGPRRLPQGAPTSPALTNLVCTRLDARLAGLAASLGFAYTRYADDLTFSASGEAAGKVGPLLKYVHAIVAAEGFTVHPDKTRVMRRGRHQEVTGLTVNERVAVPRETLRRFRALLHGIERHGPAGRRWGKGGDGTVLQAALGFARFVRMVTPEAGAPLVAQVRALAERHGARQAPAQPRIATFRARSADGVAPLARWWIPAARPLPAPDPIIAEAEAAEAEARRKRQDGPGRVPGRSGLPAVGLRPAPAPEPARQADPVQGDRDGTPMKPWMAVLGVFVLFQAAAVLHPGLGLLVLVAALAIGLRRWLRRRRGR

SEQ ID NO: 6125 - protein, 601 aa, unidentified
  source 1..601: note = Related to NZ_CAKLBV010000001.1; note = Methylobacterium sp.
MSAQPGSLTRQQLYDRIRETSKDEVILEEMVRLGFWPDGAERPNLPDALIRRRGEIVRTLGELHLREALWSDPDAALKEMHRRRKKAALERRRETKLRNARGRHERALAWHARRDEDLFHLGEGVSAGLSAPDAAGHAPAPGLPALASPKALADAMGIGMGELRFLAYDRALTAVSHYRRFTIPKKAGGERLISAPMPRLKRAQYWVLDALLAHAPVHEAAQGFVPGRSILTNARAHVGRDVVVNLDLKDFFPTLDYRRVKGKFRGLGYAEPVATVLALLCTEPDVDAVEIDGQRLYAARGPRRLPQGAPTSPALTNLICTRLDQRLSGLGRSLGFTYTRYADDLTFSASGEAAGRVGPLLKYVGEIVASEGFTVHPDKTRVMRRGRHQEVTGLTVNEQVAVPRETLRRFRALLHALERHGPTGRRWGRSADAGVPRAALGFARFVAMITPEAGAPLVAQARRLAERHRAGAAMARPVIPVFRSRAAQGAAPWEPWWRPAKPQAPTPDPILIEAEAEAAALRETEGDRPRRRTSARSWLPSIGRSTDTALAGTGRAPMKPWMIALGVFVLVQAATVIHPALGGLVLIAALGVVLWRWFRRR

SEQ ID NO: 6126 - protein, 611 aa, unidentified
  source 1..611: note = Related to NZ_JACHOP010000028.1; note = Methylorubrum rhodinum
MSTQPGSLTRQQLYDRIRESSKDEVILEEMIRLGFWPDGADRPNVPADLIRRRGEISRELADLHRREALWRDPEAALKEMHRRRKKAALERRRETKLRNARTRHERALAWHARRNEDVLHLGEGVSAGLLAPDETGREPGPGLPRLANPKALAQAMGIPMGELRFLAYDRALATVSHYRRFTIPKKTGGTRLISAPMPRLKRAQYWVLDALLAHAPVHESAHGFVPGRSIVTNASAHVGRDVVVNLDLKDFFPTLDYRRVKGKFRGLGYAEPVATVLALLCTEPDTDDIEIDGQRLHAARGPRRLPQGAPTSPALTNLICIRLDRRLTGLARNLGFTYTRYADDLTFSASGTAAEKVGPLLKYVGEIVAAEGFTVHPDKTRVMRRGRHQEVTGLTVNERVAVPRETLRRFRALLHALDRNGPAGRSWGRSADHAVLRAALGFAHFVRMVTPEAGAPLVAQTRRLAERHGVGVGEARPRIPSFRQRSAEGAVPLARWWSPAEPSAPRPDPILAEAEAEAAKAAEHARRPAAPGRSGLPSIGRAGPSGAARPLGDPEPPSGSGADGGTMKPWMVVLGVFVLFQAGAVVHPVIGLLVLVAAVVIGLRRWFRRRR

SEQ ID NO: 6127 - protein, 598 aa, unidentified
  source 1..598: note = Related to NC_011894.1; note = Methylobacterium nodulans
MTAQPGALTRQQLYDRIRETSKDEVILEEMIRLGFWPQGETQPSPPEELIRRRGEIARELAALHTAEARWRDPEAALKEMHKRRKKAALERRKETKRRGAEQRHARALAWHERRAEELVFLGDGVSAGLRADAAAPPAPRPGLPVLATPKALADAIGIPLAELRFLAYDRALSRISHYWRFTIPKKAGGVRLISAPMPRLKRAQYWILDNLLAHAPVHDAAHGFVPGRSIVTNAAAHVGRAVVVNLDLKDFFPTLSFRRVKGKFRGLGYAEPVATVLALLCTEPDVDEVEIDGERLFAARGPRRLPQGAPTSPLFTNLICARLDARLSGLARSMGFTYTRYADDLTFSGAAAEKIGALIGLVGEIVAAEGFVVHPDKTRIMRRGSRQEVTGLTVNERVAVPRDVLRRFRALLHQIEATGPAGKSWGQTRDVMAAARGFACFVRMVTPEAGEPLVATVRRLGERHGLTGTAPAPAAFRAKAAAGEPPLARWWIPAAPPAPEPEAVLREPAPPQPAKPMRSALDLASLRADLRDRAAPPAGPAQDPGEPAMKPWVAVIGVLVLWSAASAINPALGTIVLIAAIVIATRWLIRRWRRRRRR

SEQ ID NO: 6128 - protein, 606 aa, unidentified
  source 1..606: note = Related to NZ_JAFBCY010000002.1; note = Methylopila capsulata
MSAQPGELTRQQLYDRIRESSKDEVILEEMIRLGFWPRNANKPDVPEALIRRRGEIDRELAALHAQEARWRDPDAALKEMHKRRKKAAMERRKETKRGHAQTRYERAVAWRERRATEILYLGEGVSGGLGGTDPARPLKAGLPEITSPKALADAIGVPLAELRFLAYDRKLSRISHYQRFAIAKKTGGVRQISAPMPRLKRAQYWILDALLGHAAVHDAAHGFVRGRSIVTNAARHVGRDVVVNLDLKDFFPTLDFRRVKGKFRGLGYAEPVATVLALICTEPDVDEIEIDGERLFAARGPRRLPQGAPTSPLLTNLICARLDARLTGLAASLGFVYTRYADDMTFSASGEAAAKVGAMLKFVNEIVAAEGFVVHPDKTRVMRRGGRQEVTGLVVNERVAVPRDVLRRFRALLHQIEATGPAGKRWGKARDVMDAATGFACFVRMVTPEIGEELLATVRRLDARHGAARAGAAPSKSPHGDFRGKAAAGVAPLARWWTPAEPPPPEPEPILREPEAAPEPDPPTSPQRPRSALDIAGLRAEMRDRAASAPEPQPDETEMKPWVAAIGIFVLLNVAFGIHPLLGLIALVATVVMVIRRALRRRRRRR

SEQ ID NO: 6129 - protein, 610 aa, unidentified
  source 1..610: note = Related to NZ_JACIDN010000003.1; note = Methylobacterium brachythecii
MTVQPGSLTRQQLYDRIRESSKDEVILEEMIRLGFWPGDEAQPNLPAELIKRRGDIHREISELHKKERLWSDPETALKEMHKRRKKEALARRKETKLRNARGRHDRALAWHERRKSDVLYLGEGVSAGLHSDGVAKPLKPGLPALGSPKALAEAMGIPLAELRFLAFDRALSRISHYQRFTIPKKTGGERLISAPMPRLKRAQYWVLDAILDKVAVHEAAHGFVPGRSILTNAGAHVGREVVVNLDLKDFFPSLTFKRVKGKFRGLGYPEPVATVLALLCTEPDVDELELDGERLFAAKGPRRLPQGAPTSPMLTNLVCIRLDKRLAALAASLGFTYTRYADDMTFSASGEGAAKVSALLKYVGEIVTAEGFTVHPDKTRVMRRGRHQEVTGLTVNERVAVPRETLRRFRALLHQIGKNGPEGRHWGKARDVFDAALGFSFFVRMVSPAIGDPLIAEVRSLAARHGHAPKAVPEPTAFRAKSARGEAPLARWWIPAERPAPEPEAILIEPPKPAPRPAQANAPRSAIGAAAGMRARMQQEGPSGAWNQGSGRQTVEDGSIGSAFRRLPRRTYKILGILMLFGLVASVSPRLAALGLIFLIGYVIAERKKR

SEQ ID NO: 6130 - protein, 599 aa, unidentified
  source 1..599: note = Related to NZ_LABY01000112.1; note = Methylobacterium variabile
MTVRPGSLTRQQLYDRIRESSKDEVVLEEMIRLGFWPGDAAQPDLPAALIKRRGEIHREIADLHAEERLWRDPETALKAMHKRRKTEALARRRETRLRHAQGRHDRALAWHARRGSEVLFLGPEVSAGLHSHAARRPLLPGLPDLATPKALADAMGLPLAELRFLAYDRALARISHYQRFTIPKKTGGERLISAPMPRLKRAQYWVLDAILAKVPVHEAAHGFVPGRSILTNAGAHVGRDVVVNLDLENFFPTLTFRRVKGKFRGLGYPESVATVLALLCTEPDVDELELDGERLFAARGPRRLPQGAPTSPMLTNLVCTRLDRRLAALAASLGFTYTRYADDMTFSASGEGAAKVSVLLRGVGTVVAAEGFTLHPDKTRVMRRGRRQEVTGLTVNERVAVPRDTLRRFRALLHQIDRSGPAGKRWGVARHVFDAAFGFACFVRMVSPATGDPLVSEVRRLSARHGTAQRAVPEASAFRARAARGETPLARWWSPAERPPPTPEPILLESPDPAPSTVPQSAIGAAAGAQTADRDGVWGRMPDDLPPGKAGLSRIVSGLLTLAGGLVLFVALLRISPPLALLGALVLAGLYAAGFFRRR

SEQ ID NO: 6131 - protein, 609 aa, unidentified
  source 1..609: note = Related to NZ_SNZR01000011.1; note = Enterovirga rhinocerotis
MTVQPGSLTRQQLYDRIRESSKDEVVLEEMIRLGFWPGNEKQPNLPADLIKRRGEIQREIGELYRQQRLWRDPESALKEMHKRRKKEALLRRKETRRRNAAARHERALAWHERRKTEILYLGAGVSGGLGANEPELGRSPRDGLPEVATPKALADAMGIPLGELRFLAYDRALSRVSHYQRFTIPKKTGGERLISAPMPRLKRAQYWVLDNLLAKAPLHEAAHGFVPGRSILTNAGVHVGREVVVNLDLKDFFPSLTFRRVKGKFRGLGYPEAVATVLALLCTEPDVDELDLDGERLFAARGPRRLPQGAPTSPALTNLVCIRLDKRLTALAGSLGFAYTRYADDMTFSASGEGAAKVAVLLKMVGEIVADEGFTVHPDKTRVMRRGRRQEVTGLTVNERVAVPRDTLRRFRALLHGIDKQGPEGKSWGVARDVFDGALGFAFFVRMVTPEIGEPLVAQVRALAARHGGRDVAAPAISAFRAKAARGEAPLDRWWQPAERPAPKPEPVLAGAAPAPAPNGIRSAPGAAAGTGRPSPEATSVWGPGPARSAPESGSPSVTGSLWRLSIGLLKLAALLMLFSAGMVFAPRLAILGVFALIGVLAYRFIRRG

SEQ ID NO: 6132 - protein, 595 aa, unidentified
  source 1..595: note = Related to VOHA01000021.1; note = Reyranella sp.
MTEPGTLTRQQLYDRIRESSKDEVILEEMIRLGFWPPGADQPDVPADLIRRRADLQREIADLHRQEALWRDPEAALKEMHKRRKKAALQRRAETKLRNAKGRHERALAWHERRQQELLYLGDGVSTGLHQTGTAMAPKAGLPSIASPKALAEAIGVSLSELRFLAYDRAVTRVSHYQRFTIPKKAGGERLISAPMPRLKRAQYWVLDNLLAKAVVHDAAHGFVPGRSILTNATPHVGRDVVVNLDLKDFFPTLTFRRVKGKFRGLGYSEAVATVLALICTEPDVDELEVDGERLFATRGPRRVPQGAPTSPVLTNVICFKLDARLSGLARALGFTYTRYADDMTFSASGEAAKKVGALLKYVREIVTAEGFVVHPDKTRVMRRGAHQEVTGLTVNERVAVPRDTLRRFRALLHQIETSGPVGKTWGAARDVLDAALGFAFFVRMVTPSSGEVLVTQVRALAARHGATPVPAVAPRDFRVKAARGETPLGRWWIPRERPAPAPEPVIVAHEAAAQAAAAPGTSRATSAGQAQLPPAFTPAPAAPAAKRGGTLATIGKWILGLLVFIVLMGIHPVLGGLFIAAVVGYMATRKRGGRD

SEQ ID NO: 6133 - protein, 523 aa, unidentified
  source 1..523: note = Related to NZ_LLXZ01000195.1; note = Bradyrhizobium jicamae
MTETVSPGTMTRQELYDRIRQSSRDEVILEEMIRLGFWPDEGAPAPAAETIRERAEAMRELSELQRQNATLADPVRALKEMHKRRKAEAMARRQETKRRNAEARQTRAFAWFERRKRDVLYLGEDVSPGLHSRTTTIPLHDGLPPLADAKALADAIGVPLGELRFLAFNRKVASVNHYQRFTIPKKSGGERLISAPMPRLKRAQYWVLDNILARVPLHDAAHGFAPQRSILTNARNHVGRDVVINLDLKDFFPTLTYARVKGLFEALGYAEAVAIPLALLCTEPVVDEVTLDGERHFIADGPRLLPQGAPTSPAITNLICRRLDRRLMGLARTLGFVYSRYADDLTFSASGEAVKKIGTLLKAVHGIVEAEGFKVHPDKTRVMRRSTRQEVTGLTVNEALAVPRDLLRRYRAVLQQVERHGPDGKHFGPGKDVIRSLLGFGHFAVMVDPESGTPLLQRAQRLAAQYAPTRSERLPTRAAFRKAASAGQTPPGRQWTPAERPPPAPDPVLVALARQEEKTRAAQ

SEQ ID NO: 6134 - protein, 604 aa, unidentified
  source 1..604: note = Related to NZ_LFLZ01000017.1; note = Bradyrhizobium tropiciagri
MNETVAPGTLTRQELYDRIRQSSKDEVILEEMIRLGFWPDGEDAPAPAADAIRGRAEAMRELTELQRQNATLADPERALKEMHKRRKAEAMARRQETKRRNAEARQSRAFAWYDRRKRDVLYLGEDVSLGLHTRTTTTPLRDGLPPLADAKALADAMGVPLGELRFLAFNRKVASVNHYQRFTIPKKSGGERLISAPMPRLKRAQYWVLDNILARVPLHEAAHGFAAQRSILTNARNHVGRDVVINLDLKDFFPTLTYARVKGLFEALGYAEAVAIPLALLCTEPMVDEVALDGERHFVADGPRLLPQGAPTSPAITNLICRKLDRRLVGLARTLGFVYSRYADDLTFSGSGEAVRKIGTLLKAVHGIVAAEGFTVHPDKTRVMRRSSRQEVTGLTVNEAVAVPRDLLRRYRAVLQQVERHGPAGKHFGPGKDVIRSLLGFGHFAVMVDPESGAPLLQRALRLAPQHAPARSARRPTRAAFRKAAAAGQTPPGRQWTPAERPPPAPDPVLVALARQDAKKRAAQARAAAPSPSRPPNVPPPPPGVTRPDGPPPAARPATAPSGKRPWFVTALVILLALALLPLPGGPAMAGALLFLYFSRWWKR

SEQ ID NO: 6135 - protein, 474 aa, unidentified
  source 1..474: note = Related to CP069300.1; note = Bradyrhizobium sp.
MIRLGFWPDGEDAPAPAADVIRARADAMRELTELQRQNAMLGDPQRALKEMHKRRKAEAMARRQETKRRNAEARQSRAFAWYDRRKRDVLYLGEDVSRGLHARTTATLLRDGLPPLADAKALADAMGVPLGELRFLAFNRKVASVNHYQRFTIPKKSGGERLISAPMPRLKRAQYWVLENILARVPLHDAAHGFAPQRSILTNARNHVGRDVVINLDLKDFFPTLTYARVKGLFEALGYAEAVAIPLALLCTEPMVDQVALDGERHFIADGPRLLPQGAPTSPAITNLICRKLDKRLVRLSRVLGFVYSRCADDLTFSGSGEAVKKIGTLIKAVHGIVAAEGFNVHPDKTRVMRRSSRQEVTGLTVNEAVAVPRDLLVALARQDEKKRAAHARVTAPIPSRVPNVPSPPADATRAAGPQAAPATGPATAPSKKRQPWFVTALVILVALAFLPLPGGPAIAGAMLFLYFSRWWRR

SEQ ID NO: 6136 - protein, 611 aa, unidentified
  source 1..611: note = Related to NZ_CP043489.1; note = Labrys sp.
MNQTVAPGTLTRQELYDRIRESSKDEVILEEMIRLGFWPDGTAAPSPAAAAIRERGEAMRELGELQRQNALWSDPERAIKEMHKRRKAEALAQRTETRRRHAQARQDRAEAWHIRRQREVLYLGEGVSAGLSADPIRRSLLPGLPDIADAKALADGIGIPLSELRFLTYSRKVSSVSHYQRFRIPKKTGGERLISAPMPRLKRAQYWVLDNILARVGLHEAAHGFVPQRSILTNARNHVGKDVVVNLDLKDFFPTLTYARVKGMFRSLGYAEKAAIPLALLCTEAKVDEVHLDGERHFVGDGRRLLPQGAPTSPTITNLICRYLDRRLDGLANELGFTYSRYADDLTFSGSGEAVRKIGTLLKAVQSIVTAEGFTIHPDKTRIMRRSGHQEVTGLTVNERVAVPRPLLRRYRAVLQQVEKHGPAGRHFGPGKDVVRSLLGFGQFAAMIDPDKGRALLERARRLASQSTANSKLSRSGGQAAFRAAAAAGRAPAGCHWTPTERTAPALDPVLAALEREEAKKAEQAQRKAHASQQAMAQSALRRPSAEPAGQARGQAQGSSGQPARKKLRFTPKRLLMIAAIVIFPTLIPGVGPFIAGLLLYLYLRWMWKQG

SEQ ID NO: 6137 - protein, 544 aa, unidentified
  source 1..544: note = Related to JACMJA010000359.1; note = Verrucomicrobia bacterium
MSILPENTQPRTRQELYDLIRQTSRDEFVLNEMIRLGFWKKNEGQPSLPEQLIRQETQLHQELKTLVSEKKRLDDQQKMLKEMRKKRMLESRLKREETKKRRELERQQKAENWKNKKTTEIGYLGENVSSGLNFTASNPEKLSRYNIPFFTNAVSLAQALNISVGELRFLAFSREVSKVNHYHRFQIPKKTGGQRLISAPMPRLKKVQTWILENVLEKIELHTSAHGFVASRSIVSNAIPHLKAETVVNLDLKNFFPTLTYARIKGLFLGLGYSEAMATLLGLLCTEPETDAVILDKETWFVASGERFLPQGSPASPALTNIICATLDKRLQGLAQKLGFVYTRYADDLTFSATGEGTKNIHKIISLTQKIVEDEGFSVHPDKTRIMRKGSKKEVTGIVVNEKPSVDRTTLRKFRALLHQMEKEGFAGKSWGHTPDVLAAVEGYANFVKMVDAEKGDKFKQQIKGIIAKWGDSIPTPVRKVYPKKEKQTVSPVFETMTILPTSETQISENQVVIPQVTIPETANKDTSNEKPEEKKTFWKTWKK

SEQ ID NO: 6138 - protein, 525 aa, unidentified
  source 1..525: note = Related to NZ_FNFO01000004.1; note = Catalinimonas alkaloidigena
MAEETPPQPRTRQELYDQVRQSSREAVTLREMARMGFWPKGQGIPPIPQALLEKQQALQQELQPLVEQSRKMEDRVRMLKELRKKRMAESRQKRKETKERRERERQARQAAWEQRKTHEILYLGEGVSGGLSQTDDDAQKLQHYQLPRFENAKALAEDMGITVNALRFLAYNRPVSTLTHYQRFTMPKKTGGQRLISAPMPRLKDAQYWVLHHLLQLLPVHEAVHGFCAGRSIVSNARPHVGRQVVLNFDLKDFFPTLTYTRIKGLFCALGYAEAIATPLALLCTEPDTDEVTLDGQTYYVANGERYLPQGAPTSPALTNLICLRLDRRLTGLATKLGFTYTRYADDLTFSADAEGMKHINTLRVMLHRIVEEEGFQVHPDKSRVMRKGSKQEVTGIVVNEKPGVDRATLRRFRALLFQIEKDGIAGKRWGTSPDVVAAIHGYANFVAMVDPEKGKALQERVARIIATVAPHFKKRPRKTYPARSGKWLQTASSEASSSEASTDSGNVNAIPEPPAAKKPWWKFW

SEQ ID NO: 6139 - protein, 542 aa, unidentified
  source 1..542: note = Related to CADCTQ010000349.1; note = Cytophagales bacterium
MAEQSNLPEGTRPADRQELYDLIRRTSKDDFILRDMKRLGFWPDDAGQPTLPEQVIFRETDLNRELSALLTEKRRLEEQEAMLKELRKQRLAESRLKREETKQKREQARKDKAADWQRKKQSGILYLGEGVSGGLNETAADPGKLAGLNLPVLTDAASVALAMQVPVGQLRFLAFSRQVSRTTHYQRFYVPKKTGGERLISAPMPRLKAAQAWILANILDRVPSHEAVHGFLPGRSIVTNAAPHVGAGVVINLDLKDFFPSITYRRVKGVFRALGYSESVATILGLLCTEPQVDQAELDGETWYVATGERHLPQGSPASPAITNILCATLDRRLQGLARKRGFSYTRYADDLTFSASGEGTKNINILKNAVKAIIESEDLTLHPDKTRIMRMGSRKEVTGVVVNDKPGVDRTTLRRFRALLHQIELKGPQGKKWGHSADLLAAIEGYANFVLMVDAEKGKKLKAQVKAIAQKYGDAMPRRPRKVYPKKEKPAAPTPATATVAALPPTPPPPPVPAQPPVPGPDASAPESAEPKKTWWKLWKK

SEQ ID NO: 6140 - protein, 535 aa, unidentified
  source 1..535: note = Related to JACMKY010000311.1; note = Ferruginibacter sp.
MSSDSEPLRPATRQELYDRLRQAGTRDAFLLEEMKRLGFWPSNHEVPNVSEQFILREADLARELRALYSEHRRLEDEAAMLRELRKQRLAESRQRREVTKLRRERERKDRADQRKKRQESEIGYLGEGVSGGLNHPEADEARLARFHLPVLTDAQSVAGSLGVSVGELRFLAFSRAVSRTNHYQRFYLPKKTGGRRLISAPMPRLKAAQYWILENILRLVPVHDAAHGFVGGRSIVSNARPHVGAQVVINLDLKDFFPTVTYPRVRGVFRKLGYSEAAATILALLCTEPDVDQAELDGETWFIADGERHLPQGAPTSPALTNLLCTRLDRRLAGLAAKLGFAYTRYADDLTFSASGERTKNVNKLRSLVHLIVEGEDFRVHPDKTRVMRPGSRKEVTGIIVNDKPGVDRTTLRKFRALLHQIEQEGIAGKRWGHTDDVLAAIQGYARFVAMVDAQKGQVLTARVKAIIDQIEPAFAKRPRKTYPQGARRWIKKMVVAETPTASGVPANPSAPTPNPEKPQGIVWKLLGKLGGKKK

SEQ ID NO: 6141 - protein, 516 aa, unidentified
  source 1..516: note = Related to JADLDL010000134.1; note = Saprospiraceae bacterium
MAEQSNLPDGARPTTRQELYDLLRRDGLNRDSFVLQDMKRLGFWPDTKDQPSVPEQFLNRESQLYRELNALVTEKRRVEDREQLLKELRKQRMAESRRKREETKKRRIEAARLRAENWEKRKETEINYLGEGVSGGLNDTATDTERLALAQLPVLSDPAAIAAAMNIRVSELRFLAFSRAVSKTSHYRRFLIPKKTGGFRQISAPMYRLKDAQYWILQQILDKVPLHEAAHGFVPARSIVSNARPHVGAGVVINADLQNFFPSITYPRVKGVFRKLGYSDAAASTLGLLCTEPAIDEVVLDGENWFVAAGERFLPQGAPTSPAITNILCRQMDRRLQGLAQKLGFTYTRYADDLTFSASGEGEKKVNLLLKFVRQIIENEGFVLHPDKTRVMRTGRRKEVTGIVVNEKPGVDRKTLRRFRALLHQLETEGPAGKTWGHTPNLLAAIEGYANYVFMVDPEKGAALKAQVRQVAGALTRAPRKRYPARKKLAGSAPLPETPTAAPTEQESAKPWWKFW

SEQ ID NO: 6142 - protein, 467 aa, unidentified
  source 1..467: note = Related to KI932172.1; note = Candidatus Entotheonella factor
MPDEQPQTRQALYDRIRESSKWEVILEEMIRFGFWPAEGTLPDDPADEIRQRGELERELKALRTEQARLKNQAMMLREMRRRRLEASRLKQKENRERRERERQERAAAWQERKSREIGYLGPGVSGGLQAVESDTDRLESFGLPVLHTPAQLAEAMGLRVGALRFLAFSRDVSRTSHYVRFKMPKKTGGERLISALMPRLKQAQRWILDHLLVRLTPHDASHGFRHGRSIVSNARPHTGCAVVVNMDMKDFFPTVDYPRVKGFYRALGYSEAVSTVLALLCTEAETEEVVLDGITWYVTLGERHLPQGAPTSPAISNLICRRLDQRLSGIAGTLGLTYTRYADDLTFSAEAADAPMIGKLLRQTRFVVEAEGFELHPAKTRVMRRHQRQDVTGVVVNQQPAVARKTLKRFRALLHQIETTGPDGKHWGGNPNVLHSIQGFANYVYMVDPDKGAVLKQRVQRILASQR

SEQ ID NO: 6143 - protein, 467 aa, unidentified
  source 1..467: note = Related to PPXO01000342.1; note = Candidatus Entotheonella serta
MSEEQPQTRQALYDRIRESSLGEVILGEMIRHGFWPAENKIPEDPPEEAQQRGELERELKALRTEQARLKNQAAMLRELRRRRLQASRLKQQENRERHERERQARAAAWQERKARDISYLGSGVSGGLHGTESPAARLEQLGLPVFHTPSQLAEAMGLRVGTLRFLAFHRDVSRTSHYIRFKLPKKTGGERLISAPMPRLKQAQHWVLSNLLVKLTSHDASHEFRHARSLVTNAQPHTGQAVVINMDMKDFFPTVSYPRVKGFFQALGYSEAVGTVLGLICTEAETEEVVLDDTSWYVALGERHLPQGAPTSPAISNLICRRLDQRLHGIARKFGMIYTRYADDLTFSAEAEAPAAIGKLLRQTRFVVEAEGSQLHPTKTRVMRHHQRQDVTGGVVNQQPAVARKTLKRFRALLHQIETTGPDGKQWGGNPNVLHSIQGFANYVYMVDPDKGTALKQRVQRILAMQS

SEQ ID NO: 6144 - protein, 347 aa, unidentified
  source 1..347: note = Related to NC_019695.1; note = Chroococcidiopsis thermalis
MVVKHQATIPRLTEGSIEQLRKRGLPECNTDEEIALAMGISVEKLHFLAGDRSISSTSLYSRFQISKKTGAARTITAPTPELKAAQRWILKHILDKIEIHDAAHGFCRDRSIVTNATPHVGRDVIVKLDLQNFFQLITYKRVKELFHGFGYSETAATIFGLICTIATTNNSNKTSCKNIEKRHLPEGAPTSPAISNLVCDRLDTHLTKLANNLGFRYTRYADDLTFSCYGAAHKVDKLIQESKSIVTQESFTVNSDKTQVLSKSVQQIVTGIVVNQQLNLSRKTLKAFRATLYQIEREGLSGKKWGNSNNLIATITGFANYVAMVNPSKGAEFLASVERIKQKCDRS

SEQ ID NO: 6145 - protein, 348 aa, Scytonema sp.
  source 1..348: note = Related to JTJC03000001.1; note = Scytonema millei
MVVKHQATIPRLIEGSIEQLRKKGFPECNTDEEIAMAMRISVEKLRFLAGDRNLSSNSLYSRFQIFKKTGEARTISAPTPELKAAQRWILKQILEKIEIHDAAHGFCRDRSIVTNASPHVGKDVIVKLDLQNFFQSILYKRVKELFCSFGYSETAATIFSLICTVTKIDINGKNSCNDIEKRHLPQGSPTSPAISNLVCDRLDTHLTKLAHNFGFCYTRYADDLTFSSFEKTSRQVNNLIHGSKLIITEEGFTVNPDKIKVLSKSVQQEITGIIVNQQLNLSRKTLKAFRATLYQIEQEGLSGKKWGNSNNLIAAITGFANYVAMVNPSKGAEFLASVERIKQKCDRS

SEQ ID NO: 6146 - protein, 348 aa, unidentified
  source 1..348: note = Related to NDGV01000134.1; note = cyanobacterium TDX16
MNIQPQVTISRLTEGSIEQLRKRGLPECNTDEEIALAMGIGVEKLYFLTNKYPTSSTSHYFRFQISKKTGETRTISAPSPELKAIQKWILKHILEKIEIHDAAHGFCRNRSIVTNARPHVGRDVIVKLDLQNFFQSILYKRVKELFCSFGYFETAATIFSLICTVAEINVNNKINYKDTEKRHLPQGSPTSPAISNLVCDRLDTYLTKLANNLGFCYTRYADDLTFSGFENASHKINNLIHESQLIITEEGFTINPDKIKVLNKSVQQEITGIIVNQQLNLSRKTLKAFRTTLYQIEQEGLSGKKWGNSTDLIAAITGFANYVAMVNPSKGAEFLASVERIKQKCDRP

SEQ ID NO: 6147 - protein, 354 aa, unidentified
  source 1..354: note = Related to JAHHHA010000036.1; note = Cyanosarcina radialis
MSPSDEGDLNRLWSKGLPECNSEAEIALVMEMSIEKLRSLAFNYPTSSTTNYHRFQILKKPGESRAISAPMSDLKVAQKWISTRILEKIQVHDAAHGFRRNRSIVTNAKPHVSADIIVKIDLQDFFRSISYQRVKKLFLDVDYSETAARIFGLICTVNETEEIEIDGKINYKTIGKRHLPQGSPASPAISNIICYDLDRRLSQVAQELGFCYTRYADDLTFSGSRDVKSKISKLISETRTLIESEGFTINPNKTQILGTSVQQKVTGVVINKKLNVAKKTLKAFRATLYQIEREGLAGKRWGNSTDIMAAITGFANYVAMVNPNKGVELLTSIKRIEQKYAPPESPRFTIEEEF

SEQ ID NO: 6148 - protein, 317 aa, Chondrocystis sp.
  source 1..317: note = Related to NZ_AP018281.1
MYNTEAELALSMNISVKQLRWLAFKPFTYPVIHYSRFQIAKKTGETRTIYAPKPYLKTAQIYILKNILDNLAVHDAAHGFRRHRSIITNAQPHVGADIIIKLDLENFFSSITYKHVQKLFLSLGYSQSIGTLLSLICTIKDVETCHPRCLPSGSPASPTISNLVCYNLDQNLSQIASDLGFTYTRYADDLTFSGKRDRANISTLIKQLLAVIAQFGFKINPNKIQILPKSVRQEVTGIVVNHKLNISQTKLKAFRATLHQIEQDGLSGKKWGNSPNLIASITGFSNYVAMINPEKGGELLESVERIKQKHILNTPVL

SEQ ID NO: 6149 - protein, 354 aa, Oscillatoria nigro-viridis
  source 1..354: note = Related to NC_019729.1
MASKATYKLHVTSVSAEGHPKNLQLHGLAECNTAEEIALAMGISRGKLRFLTLNSPASTITHYTRFKISKKTGEERSIVAPGPNLKSAQRWILDNILEKLEVHSAAHGFCKKRSTVTNAKPHVGADILVKIDLQNFFQSISYKRVKGLFSGLGYSETAANIFGLICTAFEIKEIEKEGQINYTASGDRHLPQGSPASPAISNLICRHLDSRIAIVAKNLGFCYTRYADDLTFSGCGEAARRISNLMKEIKLIIAAEGFSINRDKTKIMGRSVQQEVTGIVVNTQLNISKKTLKAFRATLYQIEQEGLSGKKWGNSTNLIASIAGFANYVSMVDPSKGAELQLRVARIKQKYEGK

SEQ ID NO: 6150 - protein, 357 aa, Nostoc sp.
  source 1..357: note = Related to LWTK01000036.1
MYGTNLITIPLAMDGNSERLETDKSVVLRSHGLAEYNTVTEIACAMGITPGQLRFLTSSFSGSQVKHYVHFQISKKTGGERLISAPKPNLKAAQKWILQNILEKLEVHNSAHGFCKNRSIVTNAQPHVGNDVIVNIDLQNFFEAITYKRVKELFSGFGYSETAAKIFAVICTTSEIEIHGQANDITSGNRHLPQGSPASPAISNLICYHLDSRIAAMAENLGFCYTRYADDLTFSASGQASHKIYNLIKNVKLIINSEGFTVNFHKTNILSKSVQQEVTGVVVNTKLNISKKTLKAFRATLYQIEQEGLSGKHWGNSTNIIAAITGFANYVAMINPDKGAELRSRVERIKQKYECQE

SEQ ID NO: 6151 - protein, 349 aa, Nostoc linckia
  source 1..349: note = Related to LAHB01000047.1
MYATNLTTTPLAIEGNSAVLRSHGLAEYHSAAEIACAMGINPGQLRFLTSSFPGSEVKHYVHFKISKKTGGERLISAPKPHLKAAQRWILENILEKLEVHHAAHGFCKNRSIVTNAQPHVGADVIVHIDLQNFFQSITYKRVKELFSGCGYSGIAANIFALICTTSEIEIHEQAHNISIENRHLPQGSPTSPVISNLICYHLDRRMVKMAENLEFSYTRYADDLTFSASGQASERRYKLIKNAKLIINSEGFTVNSHKTNILGKSVQQQVTGVVVNTQLNISKKTLKAFRATLYQIEQEGLSGKHWGNSPNIIAAITGFANYVAMINPNKGAELRSRVERIKEKYESQE

SEQ ID NO: 6152 - protein, 361 aa, Nostoc punctiforme
  source 1..361: note = Related to NC_010628.1
MYSQNLTTIPLATESNLERLETDNLALLRSHGLAEYNTAEEIAFAMVISLEKLHFLTTSTSLTRHYLPFKISKKTGGKRIISAPKPELKAAQRWILENILEKLEVHNAAHGFCKNRSIVTNAKPHVGANVIVNIDLQNFFQSISYKRIKELFSGFGYSESTATIFGLICTTAEIAINGQINHTASENRHLPQGSPASPAISNLVCRNLDIRLAAIAENLGFCYTRYADDLTFSTSEDASSKISNLIKNTKFIIHGENFTVNDNKTKISSKSVQQEVTGVIVNTQLNISKKTLKAFRATLYQIEQEGLSGKSWGKSTNLIAAITGFANYVAMINPDKGAEFKSSVERIKQKYGGSQTDEVRF

SEQ ID NO: 6153 - protein, 346 aa, Nostoc piscinale
  source 1..346: note = Related to NZ_CP012036.1
MSCQNYTQNNIEQLKKCNLDVYNNAEQIAAAMEISIDKLRFLTFTSKTSQISHYIYFKTAKKLAGDRIISAPMPDLKRAQYWILQNILQKIAIHDAAHGFCGDRSIITNANPHVGAEIIMNIDLQDFFSAITYQRVKGLFQSFGYASSVATIFGLLCTAPVVEERNLDGKTDFVEFKQRHLPQGSPASPAITNIICRNLDQRLCAIAEKFGFTYTRYVDDLTFSASGENLQHTKNIIKQVQSIISDEGFAINPDKTRILRNSQQQEVTGIIVNQKINISRKKLKSFRATLHQIENEGLEGKHWGNSSNLIASITGFANFVAMVNPEKGAEFQQQIQRIQEKYGKNK

SEQ ID NO: 6154 - protein, 346 aa, Nostoc sp.
  source 1..346: note = Related to AP018318.1
MNFQNHNQNNIEQLKKYNLDVYNNAEQIAASIEISIARLHFLAFNSQTSHISHYIHFKTAKKIAGTRIISAPLPDLKRAQYWILHNILQKIAIHNAAHGFCGDRSIITNATPHIGAEVIINIDLQDFFSAITYPRVKGLFQSFGYSSYVATIFGLLCTAPVVEERNVDGEINFVELKQRHLPQGSPASPAITNIICRSLDERLSAIATQFGFTYTRYVDDLTFSASGEQIKHTSSFIKQAQSIISDEGFAINPDKTRILRNSQQQKVTGIIVNQKINISRKKLKSFRATLHQIENEGLEGKYWGKSSNLVASITGFANFVAMVNPEKGAEFQQQIQRIQKKYGKKN

SEQ ID NO: 6155 - protein, 347 aa, Nostoc sp.
  source 1..347: note = Related to JAIVFW010000047.1
MDLQNNTQENIEQLKKYGLDAYNTAEEIAAAMEISFDRLRFLVFNSKNSTVSHYIHFKTAKKTEGERIISAPLPDLKRTQHWILKNILQKIGIHDAAHGFCRDRSIVTNATPHVGAEVIINIDLQDFFSAISYQRVKGLFQSFGYSSSIATIFSLLCTTPAVAERDLDGKADFVKLKQRLLPQGSPASPAITNIICGSLDDLLSAIAQKSGFTYTRYVDDLTFSTSGESIKYISNIIQQTQSIVSDEGFTINSEKTRILRNSQQQEVTGIIVNEKINISRKKLKNFRATLYQIEHEGLEGKHWGNSPNLIASITGFANFVAVYRRLVTGKNPGLSATTPSPWVKAPC

SEQ ID NO: 6156 - protein, 351 aa, Nostoc sp.
  source 1..351: note = Related to MTAV01000048.1
MGLQSNKQGNIDYLNNYGLDAYNTAEQIAAAMEISVDKLRFLAFNGKTSTVSHYIHFKTAKKNVGQRIISAPLPDLKRAQHWILKSILQKIEIHDAAHGFCCDRSIVTNATPHVGAEVVIKFDLQDFFSRISYQRVKGLFQSFGYSPAVAAIFGLLCITAAVEERELDGKTYFVELKHRQLPQGSPASPAITNIICRNLDRRLMAIADKYGFTYTRYVDDLTFSASAENVKHISNIIKQTQSIVADEGFAINQEKTRILRNSQQQEVTGIVVNEKINISRKTLKSFRATLYQIENEGFEGKHWGNSGKLIASITGFANYVAMVNPQKGAEFQEQIKRIQKKYEIKHSSENQ

SEQ ID NO: 6157 - protein, 469 aa, Calothrix parasitica
  source 1..469: note = Related to NZ_AP018227.1
MSEQPRTRQELYEQVRKVGKEEFILEEMIRYGFWSPQGTIPEDPADEIRRASQIRKELQELRRESSRLHNEQQLRKDALKRRLAESRKKQQETKERRERERLERAEAWKQRKQREIIYLGEEVSAGLNHAESNLERLRNNNLPLCNTAEEIAVAMGINIGKLRFLAFNRKTSTVSHYIRFKMPKKTGGERFISAPMPNLKQAQHWILTNILDKLNVHEAAHGFCRQRSIITNATPHVEKDVVINFDLKDFFPSISYKRVKGLFHSFGYSETAATIFALLCTSADVEKLQLDARTYYVAVGDRYLPQGSPASPAISNLLCRRLDKRLTGMAEKLGFTYTRYADDLTFSADGESLRHICNILKRTESIVTHEGLRINQDKTRVLRNTRQQEVTGIVVNEKLSVCRKTLRKFRATLFQIEKEGLEGKKWGNSTNLIAAITGYANFVAMVNPERGQEFQKQVKRIKAKYLGNW

SEQ ID NO: 6158 - protein, 466 aa, Calothrix sp.
  source 1..466: note = Related to NZ_VLKB01000009.1; note = Calothrix desertica
MSDQPRTRQELYDRIRQTGKDEFILEEMIRFGFWAPQGTIPEDPADEIRRQGEIRRELETLRQQSSQLRNEKELRKQMLKQRLEESRRKQKETKERREQERLERAAAWQEKRQKDIIYLGEDVSGGLNNTEANIERLQSHNLPLCNTALEIAEAMGVTIGKLRFLAFNRKTSTISHYIRFKVPKKTGGERLISAPMPNLKQAQYWILENILNKLEVHDAAHGFRENRSIITNATPHVGADVIINFDLKDFFPSISYKRVKGLFQSFGYSEAAATIFGLICTAADIEQVELDGKTYYVALDDRHLPQGSPASPAITNLLCRRLDRRLQGMAENIGFTYSRYADDLTFSAKTENRRHICNIMRRTESIVTHEGFNINHDKTRVLRNTNQQEVTGIIVNNKLNISKKVLKKFRATLHQIEQEGLQGKHWGNSHDTLAAITGFANFVAMVNPEKGAEFQQQVQRIKKKRK

SEQ ID NO: 6159 - protein, 469 aa, Scytonematopsis sp.
  source 1..469: note = Related to JAHHIC010000071.1; note = Scytonematopsis contorta
MTDQPRTRQELYDRIRTMGREEFILEEMIRYGFWPAEGTMPEDPADEIRHRGELERELRELRQENNRLHNEQAFKKEMLKQRLEESRRKRQETKERRERERQERAEAWKQKKQKEITYLGEEVSAGLNNTQSNEERLRSNKLPLCNTSEELATLMGISLGKLRFLAFNRKTSTVSHYIRFRMPKKTGGERIISAPMPSLKAAQHWILENILQKLQIHDAAHGFTKERSIVTNATPHVGADVIINLDLKDFFPSISYKRVKGLFTSFGYSEATATILALICTAAQVEELELDGKTYYVALGDRQLPQGSPASPAITNLLCRRLDKRLTTMSGQLGFTYTRYADDLTFSGSGDSLRHICNILRRTESIVTHEGFTVNQEKTRVLRKSRQQEVTGVVVNQKLSVCKKTLKQFRATLYQIEKEGLEGKHWGGSPDLLAAITGYANFVAMVNPEKGLELQKQVQQIKKKYRRPR

SEQ ID NO: 6160 - protein, 469 aa, Calothrix sp.
  source 1..469: note = Related to NZ_VLKB01000007.1; note = Calothrix desertica
MSDQPRNREELYQYISKVGREKFILEDMQRYGFWQGDSPQGSEEDTRRQLEIQREINELGRQSSKLQNEKLLRELSLKKRLEESRRRRQETKERQERERQERAEAWRQRKEKEILYLGEDVSGDLNNTEGNEERLNSLSLPVCNTAEQIAAAMEITVGKLRFLAFNRKTSTVSHYIRFKMPKKTGGERIISAPMPQLKQAQHWILASILEKLELHDAAHGFRRERSIVSNATPHVGAEVIINFDLKDFFPSISYKRVKGLFRSFGYSGAAATIFALICTAAEVEELELDGQNYYVAVGDRFLPQGSPASPAISNLLCRRLDRRLTEMAEKLGFAYTRYADDLTFSASGDSLNSICNILRRTESIVTHEGFTINQDKTRIQRKYNQQEVTGVVVNEKPSVCRKTLNRFRATLYQIEKSGIEGKHWGNTSNTIAAITGFADFVAMVNPEKGAEFQEQVKRIKEKLKQNTLS

SEQ ID NO: 6161 - protein, 469 aa, Calothrix sp.
  source 1..469: note = Related to NZ_AP018172.1
MSDQRRSREELSKLIREVGKEEFILEEMLRYGFWKGESLRELDAEIHRQEEIRRELETLRQQSLQLQDEQLLRQQSLKKRLEESRRKRQETKERRERERQERAEAWKQKKEKEIVYLGEAVSADLNNTQGNQEKLNSLGLPVCNTAEEIATAMGVTVGKLRFLAFNRNTSTVSHYIRFKMPKKTGGERIIFAPMPNLKQAQHWILENILQKLEIHDAAHGFRRERSIVTNATPHVGAEVIINFDLKDFFPSISYKRVKGLFRSFGYSGAAATIFALLCTAAEVEELELDGQNYYVAVGERHLPQGSPASPAISNLLCRRLDSRLTAMAEKLEFIYTRYADDLTFSVSGESRRYICNILRRTESIVIHEGFTINQEKTRILRKSSQQEVTGLVVNNKLSISKKTLNRFRATLYQIETEGLEGKHWGNSSNLIAAITGFANFVAMVNPEKGAEFLERIKRIKKKFRRNNIE

SEQ ID NO: 6162 - protein, 470 aa, Chlorogloeopsis fritschii
  source 1..470: note = Related to JACYLT010000232.1
MTDQPRTREELYDRIRKMGREEFILEEMIRYGFWPAQGTIPQDPADEIRRAGEIRRELEQLRRESSRLQNEKALRKQMLKQRLEESRRKQQETKERRERERQERAQAWNQKKQQEIIYLGEGVSAGLNNSQGNEERLRSLGLPLCNTAEEIAAAMEISVGKLRFLAFDRKTATVSHYIRFKIPKKTGGERLISAPMPNLKQAQHWILENILQKLQVHDAAHGFRIQRSIVTNATSHVGADVIINFDLKDFFPAISYKRVKGLFLSFGYSEAAATIFGLLCTAAEVEELELDGKTYYVALGERHLPQGSPASPAITNLLCRRLDRKLTTMAESLGFNYTRYADDITFSASGDSLRHICNIIKRTESIVTYEGFAINQDKTRILRKSRQQEVTGVVVNNKLNVSKKILKQFRATLYQIEKDGLEGKHWGNSPNLIAAISGFANFVAMVNPEKGAEFQQQVQRIKKKYARRKN

SEQ ID NO: 6163 - protein, 470 aa, Chlorogloeopsis fritschii
  source 1..470: note = Related to RSCJ01000007.1
MTDQPRTREELYDRIRKMGREEFILEEMIRYGFWPAQGSMPQDPADEIRRAGEIRRELEQLRRESSRLQNEKALRKQMLKQRLEESRRKQQETKERRERERQERAQAWNRKKQQEIIYLGEGVSAGLNNSQGNEERLRLLNLPLCNTAEEIAAAMEISVGKLRFLAFDRKTATVSHYIRFKIPKKTGGERLISAPMPNLKQVQHWILENILQKLQVHDAAHGFRIQRSIVTNATPHVGADVIINFDLKDFFPAISYKRVKGLFLSFGYSEAAATIFSLLCTAAEVEELELDGKTYYVALGERHLPQGSPASPAITNLLCRRLDRKLTIMAGSLGFNYTRYADDITFSTSGDSLRHICNLLKRTESIVTYEGFAINQDKTRILRKSRQQEVTGVVVNNKLNVSKKILKQFRATLYQIEKDGLEGKHWGNSPNLIAAISGFANFVAMVNPEKGAEFQQQVQRIKKKYARRKK

SEQ ID NO: 6164 - protein, 469 aa, Tolypothrix sp.
  source 1..469: note = Related to NZ_JHEG04000001.1; note = Tolypothrix bouteillei
MTDQPRTRQELYERIRQIGREEFILEEMIRYGFWPAEGTIPQDPADEIRRVGEIRRELEELRQESSRLHNEKELRKEMLKQRLAESRRKRQETKERRERERQERAEAWKQKKQQEIVYLGEGVSAGLNETEGDSERLQSYGLPLCNTANEIATAMGINVGKLRFLAFDRKTSTVSHYIRFKMPKKTGGERLISAPLPSLKQAQHWILGNILQKLEVHEAAHGFRCDRSIVTNATPHVGADVIINFDLKDFFPSISYKRVKGLFRSFGYSEAAATIFSLLCTAAEVEELELDGKTYYVALEERHLPQGSPASPAITNLLCRRLDKRLTAIAQELGFSYTRYADDLTFSASGDSLRHICNLLKRTESAVIYEGFAINQEKTRILRKSSQQEVTGVVVNDKLNISKKTLKQFRATLYQIEKDGLEGKSWGNSSDVLAAVSGFANFVVMVNPEKGAEFQQQIQRIRKKYKQKK

SEQ ID NO: 6165 - protein, 470 aa, unidentified
  source 1..470: note = Related to NZ_JTCM02000014.1; note = Hassallia byssoidea
MSDQPRTRQELYDRIRQVGTEEFILEEMIRYGFWSAQGEMPQDPADEIRRAGEIRRELNELRQESRKLQDEKELRKRLLKQRLEESKRKRQETKERREQERRSRAEVWKQKQQQDIIYLGEDVSAGLNNTQGNEERLHSYNLPLCNNAEQIAAAMGITVGKLRFLAFDRKTSTVSHYIRFRMPKKTGGERIISAPMPNLKQAQHWILANILEKLELHDAAHGFRRDRSIVTNATPHVGADVIINFDLKDFFPSISYKRVKGLFHSFGYSEAAATIFGLVSTAAEVESLEIDGKTYYVAVDERHLPQGSPASPAITNLLCRRLDRRLTAMAEKLGFTYTRYADDLTFSASGDSLRHICNILKRTESIVTHEGFTINQEKTRILRKSRQQEVTGVVVNDKPNVDNKTLKRFRATLFQIEKDGLEGKHWGNANLIAAIAGFANFVAMVNPEKGAEFQQQVQRIKNKYVRNGRS

SEQ ID NO: 6166 - protein, 478 aa, unidentified
  source 1..478: note = Related to NZ_JAAKGC010000016.1; note = Aetokthonos hydrillicola
MTDQPRTRQELYDRVRQVGKEEFILEEMIRYGFWFAQGELPQDPADEIRRAGEIQRELQQLRQENNRLHNEKALRKQMLKQRLEESRRKRQENKERREKQRKEKSEAWNQKKQHEIIYLGEGVSGGLNNTEGNQERLQSYGLPLGDTPEQIAAMMGISMGKLRFLAFNRKVSTVSHYIRFKIPKKTGGERLISAPMPSLKRVQHWILENILNQLEVDDAAHGFRRDRSIVTNATPHVGADVIINFDLKDFFPSISYKRVKGLFHSFGYSEAAATIFALLCTTAEFEEVELDGKTYYIALDERHLPQGSPASPAITNLLCRRLDRRLTGMAKNLGFTYTRYADDLTLSGCGNSLRHICNILRRTDSIVAHEGFTINQEKTRILRNCHQQEVTGVVVNDKPNVSKKTLKQFRATLYQIEKDGLEGKSWGNSHDIIAAITGFANFVAMVNPQKGAEFQQQVKRIKQGVRSQNTGVRNQESE

SEQ ID NO: 6167 - protein, 568 aa, unidentified
  source 1..568: note = Related to JAGHZQ010000069.1; note = Cyanobacteria bacterium SBLK
MSQQPRTRQELYDLIRSRGGKREFVLEEMIRLGFWPQQGTLPEDPADEIRQEGEIRRELSELRRESSRLHSEKQLRKQALKQRWSESRRKQKETRERRERERQERAEAWQQQKQREIIYLGEEVSGGLNNQDGDRDRLQSRGLPMVNNAEEIAAAMGITVGELRFLAFNRKVSSLSHYIRFKIPKKRGGERLISAPMPRLKRVQHWILREVLEKIEVHEAVHGFRRDRSILTNARPHVGADVAINFDLKDFFPTISYKRVKGLFRSFGYSEAAATILGLLSTEADLEEVELDGKTYFVASGDRHLPQGSPASPAISNIICRRLDRRLSGMATSLGFTYTRYADDLTFSASGENNLRSLCNLLRRTESIVTHEGFIINDEKTRIMRRKSSQLEVTGIIVNERPTIDSKTLRRFRATLYHLEKDGIQGKYWGNSRDVGIMLAVQGFANFVNMVHPEKGKVFLEQIDRIREKWTLKETKKSSPTPSISLPVIEEKTPEAIPEQSLPDGIILECYKQGSKLKVRVISQGYNSSWNVQIPRNLMAEGARYRVEELRESAVGGFYRTVGSIQKL

SEQ ID NO: 6168 - protein, 565 aa, Spirulina major
  source 1..565: note = Related to NZ_JACSWA010000397.1
MSEQPRTRQELYDLIRSKGSKPAFVIEEMIRLGFWPAEGTLPDDPADEIRREGELLRELSELRRESSRLHSEKQLRKEALKQRLQESRRKQQEIKERREQERRDRTEAWQKRKEREIIYLGEGVSGGLNHQDGNIERLQSYGLPILNDAEQIAVAMGISVGELRFLAFDRKTATLSHYIRFKIPKKTGGERLISAPMPRLKKVQHWLLHEILDKVEVHEAVHGFRGDRSILTNAVPHIGADVVINFDLKDFFPTISYKRVKGLFRALGYSEAVGTILALLSTEADVEEVELDGKTYFVALGDRHLPQGSPASPALSNIICRRLDKRLSGMAANLGFTYTRYADDLTFSASGENLRYICNLLRRTESIIEHEGFAINAEKTRILRRKSSQLEVTGIVVNEYPNIDRKTMKRFRATLYQIEQEGIQGKQWGQSNNIMLSVQGFANFVKMVNPQKGQVFLEQIDRIREKWRLGESKARSVSPPPISPPIIEQEISQEILLDSIILECYKQGSKLKVRVISEGYNPTWNVQIPRNLMEEGARYRVTEISESAVGGFYRIAGTIEKLSPS

SEQ ID NO: 6169 - protein, 542 aa, Oscillatoria sp.
  source 1..542: note = Related to JACJSM010000006.1
MSDQPRTRQELYDRVRAMGKEQFILEEMIRFGFWPAEGEMPEDPADEIRRKAQIQQELTQLRQQNRSLQDEAAARKRLLQERLAESRRKRQETKERRERERQERAAAWRERQQQDIGYLGEGVSAGLNERDCREERLQARGLPILKNAAQIAEAMGISVGQLRFLAFNRKTSKISHYVCFNIPKKTGGVRRISAPMPKLKAAQHWVFVNILERVEVGEAAHGFLRDRSIVTNAQPHVGAEVIINFDLKDFFPSISYKRVKGLFRAIGYSEAAATIFALLCTEADTVAVELDGTTYYVATGDRHLPQGSPASPALSNVLCRRLDKRLSAMAAECGFTYTRYADDLTFSASGESLRHLCNIMRRTEAIVTHEGFAINPEKTRILRRKSSQMEVTGVVVNEFPNCDRATLKRFRATLFHIERDGIEGKHWGNSNNVLAAIQGFASFVAMVNPEKGREFQAQIQRIKAQIQPQSVTPTGIIVECYKKGSQLKVRVVSPGYNSDWNVQFPRNLREEGARFIVEELQEDVRGGFYRAGGKIERMNSEL

SEQ ID NO: 6170 - protein, 540 aa, unidentified
  source 1..540: note = Related to NZ_JADEWZ010000014.1; note = Lusitaniella coriacea
MSDSPRTRQELYDRVRQVGREQFVLEEMIRFGFWPAQGEIPNDPADEIRRKSELRQELNKLRQESRTLQDEQAARRRLLKQRLAESRRKRQEAKERRERERQERAEAWQERQEREIVYLGEGVSAGLNDCEENSERLASRGLPSLPTAEHIAAAMGISIGQLRFLAFNRKTSTHTHYIRFKIPKKTGGERLISSPMPKLKAVQHWILSHILERVEVDDAAHGFRRDRSIVTNAQPHVGADVVINRDLKDFFPTISYKRVKGIFRSFGYAEATATILALLCTEADTTAVELDGKTYYVALGERHLPQGSPASPAISNILCRRLDKRLRAMANELEFTYTRYADDLTFSASGESLRYICNVLRRSESIVTHEGFAIHPEKTRVLRRKSSQLEVTGIVVNEFLNCDRATLKRFRATLFQIERDGFEGKHWGNSTDALASVQGFANFVAMVNPEKGKKFQEQIQRIKTKWLTPEPSTTTGIIVECYKQGSKLKVRVVSPGYNPDWNVQFPRNLREEGARFRVEEIRETAKGGFYRVVGDIEKID

SEQ ID NO: 6171 - protein, 467 aa, Merismopedia glauca
  source 1..467: note = Related to NZ_PVWJ01000029.1
MTEQPRTRQELYDRIRQTGKEEFILQEMIRYGFWPAQGEIPQDPADEIRRLGELNRELQQLHQQNRQLHNEAALRKQLLKERLAESKRKQQETKERRERERKERAEAWKARKEQDILFLGQGVSGGLDRREPNLERLQNQKLPVFTTPESLASAMGVTIGQLRFLAFHRQVAKTCHYIRFYISKKTGGQRLISAPMPRLKQLQHWILRYILNPIAVNDAAHGFRQGHSILTNATPHVGADVVVNFDLKDFFPSISYKRVKGLFQALGYGEAIATILGLLCTYPDVEEVELDGSTYYVATGDRHLPQGSPASPAISNILCRRLDRRLLQMAQELGFTYTRYADDLTFSASGDNLRNICNLLKRTEAIALHEGFALNPSKTRIMRKNSQQEVTGIVVNQFPNISKSTLKRFRATLFQIERDGIAGKKWGNSTDTMAAIQGFAHFVAMVNPEVGTKFVEQVKQIQAQNRN

SEQ ID NO: 6172 - protein, 469 aa, unidentified
  source 1..469: note = Related to MLAW01000010.1; note = Roseofilum reptotaenium
MSDQPRTRQELYDRIRKMGREAFILEEMIRYGFWPEQGELPQDPADEIRRRSELYRQLTELRQKNRQLQDEQAIRRQLRKQRLAESRRKREETKQRREEERQARAQAWQERQQQEIVYLGEEVSGGLGEQQSNPSELDRHGLPQLATAADIAQEMGITLGELRFFAFDRKTATVSHYIRFKMPKKTGGERLISVPMPRLKRAQYWILSQILEKIPVHEAAHGFCRDRSIITNASHHVGAEVVINLDLKDFFPSISYRRVKGLFRSLGYSEAVATILALICTAPDVEEVSLDGQTYYIALNQRHLPQGSPASPAISNLICRRLDKRLTQMADELGFTYTRYADDLTFSASGDVLRNICRILRRTESLINYESFTLHPEKTRILRRKSCQLDVTGIVVNEGLNIDRKTLKKFRATLHQIETQGLEGKHWGHSRNVLASIQGFANFVAMVNPEKGAQFQEQVGRIRQKYGRN

SEQ ID NO: 6173 - protein, 471 aa, unidentified
  source 1..471: note = Related to JACJRA010000002.1; note = Desertifilum sp.
MSDRPRTRQELYERIRTMGREAFILEEMIRYGFWPAEGTIADDPADEIRRQGELQQELERLRQENRRLYDEKALRREALKQRLAESRRKQQETQERRERQRLERAQAWQQRQQQEIVYLGEGVSGGLSESQSHQERLQSYGLPIYETAADLAAAMGMSIGQLRFLAFNRKTSKVCHYIRFTIPKKTGGERLISAPMPRLKQAQSWIYQQILAKIPLEAAAHGFRCDRSILTNAHPHLEADVIINLDLKDFFPSISYKRVKGLFRSFGYCEAVATLLGLICTEADLTSVELDGVTYYVATTERLLPQGSPASPAISNLICRRLDRRLTQMAQDLGFTYTRYADDLTFSAHEPYLQGICNILRRTEAIVAHEGLTINDQKTRILRKKSSQLDVTGIVVNGDRPSLDRKTLKRFRATLHQIEQNGPTGQHWGHTENVMSAIAGYANYVASVLPEKGAKFQEQVRHIHQKWQRLP

SEQ ID NO: 6174 - protein, 539 aa, Oscillatoria sp.
  source 1..539: note = Related to NZ_JAAHBQ010000037.1; note = Oscillatoria salina
MTNQPRSRQELYDLVRQVGKQEFILQEMIRYGFWSPEQETQEDVSEELRQRKQLQQELSQLRQENRLRQDEQALRKHLLKQRLAESRRKRRETKERREKERRERAEAWQEQKKRDLVYLGEGVSAGLNNTEANLARLQSNKLPVLSTAAEIATAMEITVGQLRFLAFSRRTSQISHYIRFKIPKKTGGERLISAPMPRLKQAQHWILTKILEKIEPHAAAHGFRQERSIMTNAQPHVGAEIVINFDLKDFFPSISYKRVKGLFRSFGYSEAAATIFALLCTQPEIEEVELDGKTYYVAQTERHLPQGSPASPAITNLLCRRLDRRLTRMAQELDFVYTRYADDLTFSCGSDNPRICNLLRRVESIVAHEGLTINQEKTRILRKSRQQEVTGIVVNEYPNIDRKTLKRFRATLFQMEKDGIAGKKWGNSDDVLLAIAGFANFVKMVNPEKGAAFQAQIQRIRQKWLGEIPDTTDTSPQGIIVECFKQGSKLRMRVISPGYNPDWKVQFPKALREEGARFLVEEIQESNGFYRTVGEIRKL

SEQ ID NO: 6175 - protein, 473 aa, Phormidium ambiguum
  source 1..473: note = Related to NZ_MRCE01000029.1
MTEQQPRTRQELYDRIRQTSREEVILEEMIRLGFWPAEGEIPADPADEIRRRGEIERELSELYRQNRQLHNETYLKKQVYLQRLEESKRKRQENKERRERERQERAEAWRQRKEQEIVYLGDRVSAGLNDTEYNQERLESYSLPAYNTAQEIADAMGISIGELRFLAFSRKTSLITHYVRFKIPKKKTGDRLISAPMPRLKKAQHWILNNILEKIPLHNAAHGFRPGHSIVTNAQPHIGAEVIINFDLKDFFPSISYKRVKGLFQSLGYSDIAATIFGLICTEPEVVEVELDGKNYYVALSERHLPQGAPTSPAITNIMCRRLDRRLEQMAQKLGFVYTRYADDLTFSTSGEFRRHICNILRRTESIVDHEGFVINEEKTRIMRNTNQQDVTGVVVNSKLNVDKKTLKRFRATLYQIEKDGLEGKHWGHSGNLLASIQGFVNYVAMINPEKGAEFQAQIERIKEKHGRGKKSV

SEQ ID NO: 6176 - protein, 466 aa, unidentified
  source 1..466: note = Related to JACJPW010000041.1; note = Planktothrix sp.
MTDQPRTRQELYDRIRETSREEVILEEMIRLGFWPAQGEIPQDPADEIRRRGELQKELNDLYKQNRQLNDENLLKKQLYKQRLAESRRKRQETKERRERERLERAEAWRQKKQQDIVYLGDRVSGGLNYTDCDEQRLQSYGLPIYGTAEQIATAMGITMGQLRFLAFSRKTSPISHYIRFRIPKKTGGDRIISAPMPRLKKAQHWILNNILEKVELHNAAHGFRPGRSIVSNAQPHIGAEVVINFDLKNFFPSISYQRVKGLFISLGYSEAAATIFSLLSTEPDIEEVELDGKTYYVALSDRHLPQGAPTSPAITNILCRRLDRRLTQMAENLGFTYTRYADDLTFSASGDNRRHICNVLRRTESIVEHEGFVINEEKTRILRNSRQQDVTGVIVNDKPNVDKKTLKRFRATLYQIEKDGLEGKRWGNSSDLIASIQGFANFVAMVNPELGAEFKEQVKRIREKYK

SEQ ID NO: 6177 - protein, 470 aa, unidentified
  source 1..470: note = Related to DNGJ01000185.1; note = Cyanobacteria bacterium UBA11371
MSDLPQPRTRQELYDRIRQTSREEVILEEMIRLGFWPAEGTVPEDPADEIRLRGEIWRELSDLYKQNRTLHNEAELKKQVYQQRLAESRRKRQETKERRERERLLRGEAWRQKKQQDIVYLGDRVSGGLNYTECDRQRLQSYNLPEYGTAEQIAAAMGITIGQLRFLAFDRKTSTVSHYVRFKIPKKTGGDRIISAPMPRLKQAQYWILSNILEKVELHDAAHGFRPGRSIVSNAQPHVGAEVVINFDLKDFFPSISYQRIKGVFRSFGYSEAAATIFGLLCTKPDIEEVELDGKTYYVALSERHLPQGAPTSPAITNILCRRLDRRLSGMAENIGFVYTRYADDLTFSASGDNLRHICNILRRTESIVAHEGLAINEEKTRILRKSGQQEVTGVVVNEKPNVDRKILKRFRATLYQIEKDGLEGKHWGNSPDLIASIQGFANFVAMIDPQQGAAFQQQVRRIREKYRST

SEQ ID NO: 6178 - protein, 467 aa, unidentified
  source 1..467: note = Related to NZ_JACJTV010000005.1; note = Coleofasciculus sp.
MSDQPRTRQELYDRIRQMGKEEFILEEMIRYGFWPAQGEIPQDPADDIRRMGEIRRELDELRQQSSRLHNEKELRKQLLKQRLAESRRKRQETKERRERERQERAEDWRQRKEREILYLGEDVSGGLNYTECDEERLRSYGLPLCGTPYEIAAAMGITVGQLRFLAFSRKTSTISHYIRFKIPKKTGGERLISAPMPRLKQAQHWILGNILEKLELHDAAHGFRRDRSIVSNAQPHVKRDVIINFDLKDFFPSISYKRVKGLFHSFGYSEAAATIFGLLCTQPDIEEVELDGKTYYVALTERHLPQGSPASPAITNLMCRRLDRRLTSMADELGFVYTRYADDLTFSASGDSLRNICNILKRTQSIVAHEGFTINEQKTRILRKNRQQEVTGVVVNDYPNISKKELKRFRATLFQIEKDGLEGKHWGNSNNVMSSIQGYANFVAMVNPQKGVEFQEQIRRIRDKYRC

SEQ ID NO: 6179 - protein, 470 aa, unidentified
  source 1..470: note = Related to JACVRI010000092.1; note = Coleofasciculus sp.
MSDQPRTRQELYDRVRQIGKEQFILEEMIRYGFWPAQGEIPQDPADEIRRRGELQQELNALKSENRQLHNEQALRKQMLKQRLEESRRKRQETKERRERERIARTEAWRQRKQQEIPYLGDGVSGGLNYTDCDEERLQAYGLPVCQTPEQIASAMGISVGQLRFLAFSRDTSTISHYIRFKIPKKTGGERLISAPMPRLKNAQHWILVNILEKLELHDAAHGFRRDRSIVSNAQPHVGADVIINFDLKDFFPSISYKRVKGLLQSFGYSEAAATIFGLLCTQAQVEEVELDGKTYYVATTDRHLPQGSPASPAISNLLCRRLDRRLMGMAEQLGFVYTRYADDLTFSASGESLCNICNVLRRTESIVAHEGFAINEQKTRILRGKSSQLEVTGIVVNERPNISKKELKRFRATLYQIEKDGPEGKHWGNSSDVMASIQGFANFVAMVNPEKGAEFQEQVQRIKEKYGRRR

SEQ ID NO: 6180 - protein, 469 aa, unidentified
  source 1..469: note = Related to DOIX01000137.1; note = Cyanobacteria bacterium UBA11153
MSDQPRTRQELYDRIRQIGREEFILEEMIRYGFWPAQGTIPEDPADEIRRRGELQRELGKLREESRILHNEEALRKRLLQERLAESRRKRQETKERREKERQQRADAWREKKAQEITYLGEGVSGGLNNTDGDEERLQSYGLPICGKTAQIATAMGITVGELRFLAFSRQTSTITHYIRFKIPKKTGGERLISAPMPRLKNAQHWILNNILEKLELHDTAHGFRHNRSIVSNAQPHVGSDVIINFDLKDFFPSISYKRVKGLFHSFGYSEAAATIFGLLCTEPEIAAVELDGKTYYVALTHRHLPQGSPASPAITNLLCRRLDRRLSEMAENLGFVYTRYADDLTFSASGDSLRHICNILRRTESIVTHEGFAINPEKTRILRKNRQQEVTGIVVNEKPTIAKKELKRFRATLYQIEKDGIAGKQWGNSDDVMASIQGYANFVAMVNPEKGAEFQEKVRRIKERYGANS

SEQ ID NO: 6181 - protein, 466 aa, unidentified
  source 1..466: note = Related to NZ_KB235904.1; note = Kamptonema formosum
MTDQPRTRQELYDRIREIGREEFILEEMIRYGFWPAQGEIPQDPADEIRREGEIRRELNELQQQSRQLQNEKTLRKQALQQRLAESRRKQQETKERRERERQQKAENWQQRKQQEILYLGDGISGGLNNFNAEIERLQSYGLPICNTAEQIAAAININIGELRFLAFSRKTSTISHYIRFKIPKKTGGDRLISAPMPRLKKVQHWILDNILEKMELHTAAHGFRPHHSIVTNALPHVKAEVIINFDLKDFFPSISYKRVKGLFQSFGYAEAAATIFGLLCTEPEIEQVELDGKTYFVALTERHLPQGSPASPAITNLLCRRLDNRLTTMAEDMGFVYTRYADDLTFSASGDSLRYICNILKRTESIVAHEGFTINQQKTRILRKNRQQEVTGIVVNDRPSISKKELKRFRATLYQIEKDGPEGKHWGNSSDVIASIQGFANFVAMVDPEKGREFQKQVKQIKEKLR

SEQ ID NO: 6182 - protein, 465 aa, unidentified
  source 1..465: note = Related to NZ_NXIB02000033.1; note = Tychonema bourrellyi
MTDQPRTRQELYDRIRSTSKEEFILEEMIRFGFWPAQGEIPEDPADEIRRMGEIRRELDELRRENSLLHNEQALRKEMLKQRLIQSRQKQQETKERREKERQERAENWQQRKQQEICYLGDGVSAGLNNTNCNEERLQNYQLPLCNTAAEIAAAMEISVGQLRFLAFDRKTSHISHYIRFKIPKKTGGERLISAPMPRLKAAQHWILVNILEKLELHNCAHGFRSSHSIVTNAQPHVGSEVIINFDLKNFFPSISYKRVKGLFQSFGYSEAAATIFGLLCTEPEIEEVELDSKTYFVAVTERHLPQGSPASPAITNILCRRLDQRLDRMASELGFVYTRYADDLTFSASGDSLQNICNILRHTESIVAHEGFVINEEKTRILRKNRQQEVTGIVVNEHLSISKKVLKRFRATLFQIEKDGPDGKRWGNSEDVIASIQGFANFVAMVNPEKGAEFLEQVQRIKNKR

SEQ ID NO: 6183 - protein, 467 aa, Oscillatoria sp.
  source 1..467: note = Related to NZ_KB235948.1
MTDQPRTRQELYERIWQIGREEVILEEMIRYGFWPAQGEIPQDPADEIRRKGEIRRELDELRRETSRLQNEQALRKQMLKQRLAESRRKRQETKERRERERQERAQAWREKKQKEIIYLGEDVSGGLNRTEGNLERLQSNSLPPCQTAEDIAGAMGISVGELRFLAFDRKTSTTSHYIRFKIPKKTGGERLISAPMPRLKRAQHWILSNILEKLELHDAAHGFRRERSILTNAQPHVAADVIINFDLKDFFPSISYRRVKGLFQSFGYSESAGTIFALLCTEPEIEEVELDGKTYFVAISNRHLPQGSPASPAITNLLCRRLDRRLVQMAQELGFTYTRYADDLTFSGAGESLRHICNILRRTESIVAHEGFAINEQKTRILRKNRQQEVTGIVVNSHPNISRETLKRFRATLYQIERDGLEGKHWGNSDTLLASLQGFANFVAMVNPQKGAEFLEQIQRIKEKYML

SEQ ID NO: 6184 - protein, 471 aa, unidentified
  source 1..471: note = Related to JAHHHA010000047.1; note = Cyanosarcina radialis
MTDQPRTRQELYDRIRQVGREEFILEEMIRYGFWPAQGEMPEDPADEIRQRGEIQRELNQLRYQNRNLHNEQALRKQMLKERLAESRRKQQETKERRERERQERAAAWQQRKQQEILFLGEGVSGGLNQTEANRERLQSYGLPAWETVEQMAAAMGVSVGELRFLAFSRPAAKISHYIRFKIPKKTGGERLISAPMPRLKKVQHGILDRILSKIELHDAVHGFRRTRSIVSNARPHVGAEAIVNFDLKDFFPSISYQRVKGLFRSFGYAEATATILALLCTQPEIEEVQLDGQIYCVAIGNRHLPQGSPASPAISNLLCRRLDRRLMGMATGFGFTYTRYADDLTFSASGENLRHICRILRRTESIVAHEGFTINAEKTRIMRKQRQQEVTGVVVNSQPNIAKETLKRFRATLYQMEKDGPEGKHWGNSTDAIASIQGFANFVAMVNPSKGAKLQAQVKRIKEKYGRKSAP

SEQ ID NO: 6185 - protein, 466 aa, Synechocystis sp.
  source 1..466: note = Related to NZ_ALVU02000001.1
MSEQPRTRQELYDRLRQSSKQEFILEEMIRLGFWATAEQIAIDPTDEMRRLGEITRELQQLRQENARLGNEKKLRQELLKQRLAESKRKQQETKERRERERIEKAQKWQEQKQTGISYLGAEVSGGLNNTESNAERLSNYGLPRLENAGQIAAAMGISVGQLRFLAFSRKTSTICHYIRFTIPKKTGGSRSISAPMPKLKESQKWILVNILNKLELHEAAHGFRRDRSIVSNALPHVKQDVIINFDLKDFFPSISYRRVKGLFQSLGYSEAAATIFGLLCTELEVEAVELDGKTYYVANSDRHLPQGSPASPAITNLLCRRLDRRLTLMAENLGFTYTRYADDLTFSATGSNLRHICNVLKRTEDIVNHEDLTINQQKTRIIRKSRQQEVTGVVVNSHPNIARETLKRFRATLYQIEKDGLEGKHWGNTTDVMAAIQGYANFVKMVNPAKGAEFIAQVERIKHKYP

SEQ ID NO: 6186 - protein, 470 aa, unidentified
  source 1..470: note = Related to NZ_MKZS01000001.1; note = Moorena bouillonii
MSDQPRTRQELYDRIREIGKEEFVLEEMIRYGFWPAEGEMPEDPADEIRRRGELQRELAQLRQESQKLQNEQAVRKRLLKERLAQSRLKRQETKERREQQRLERAQAWAIRQQKEILYLGEQVSPGLNHTESDRIRLQTYKLPLLSTAQDIAQAMGIALGQLRFLAFNRKTATISHYIRFKIPKKTGGERLISAPKPKLKQAQHWILSNILEKLELDNAAHGFRRDRSIVTNAQPHVGADVIINIDLKNFFPSISYPRVKGLFRSFGYSEAAATVFGLLCTEADIEEVELDSKTYYVATSDRHLPQGSPASPAITNILCRRLDHRLTTVATDLGFIYTRYADDLTFSASGESLRFIGKLLKRTSSVVAHEGFTINQQKTRILRKSQQQEVTGIVVNHHLNISRKQLKRFRATLYQIEKDGPDSKHWGNSSNVIAAIQGYANFIAMVNPEKAAPFQAQIQRIKDKWLSNQH

SEQ ID NO: 6187 - protein, 585 aa, Aphanizomenon sp.
  source 1..585: note = Related to LTEC02000002.1
MNTNHLITIGISLYQENKYSEAIDCFNQIIANNPNSATAYHYRGLVRRRQRDDQGAIADLQKADTLVADKEYTKLCEKIQNLIGRDYPHKYNNDDNQEFDYIEYEDNWYADEDEIAAADPNYIPSSEFLSCAEEVYQLISYELNQFENFLSNRLKTIDLLRKKRAENSRFNQERLESKNLPIYNSHEEIAQAMGISVKGLRFLTFSRKGYHYIRFQIPKKPSGYRQISAPKKLLKKAQNWILDNILEKLELHDAAHGFRLKHSIVTNAQIHVGKEVIINIDLKDFFPSISYKRVKGLFKSFGYSETASTIFALICTEPKIKEVEINGQINSLLSWTDRYLPQGAPSSPAITNILCRRLDRRLNFMAKQYGFDYTRYADDLTFSASGESLVNVNNILKLTNLIVKKEDFEINENKTRVVRNYRKQEVTGIIVNEKLNISRDKLKTFRAVLYKIEKDGLQNYTWGQSQDIIAAIEGFANFVAMVNPEKGGKFIEQIHRIKEKYVRKREKIVLVHQEFLTQSNIIKQINEKLREVRFNKIEKRQYLQETYNKKYLQELTAEELLEFLHYLITLQPEQFSFGDTDDLPF

SEQ ID NO: 6188 - protein, 564 aa, Anabaena sp.
  source 1..564: note = Related to VILD01000004.1
MDNYQLITIGISLYKENKYSEAIDCFNQIIAQDQNSSTAYHYRGLICRKQRDDQGAITDLQKADTLVADQEYTNICQKIQNLIGKDYSHSSNNKNNDEFSDIEYEGTWHLEQEIYDLISSELNKFENFLSSRLETIELLRKKRGENSQFNQEKLESKHLPIYNSHEEIAQAMGISVKGLRFLAFSRKDNHYIRFQIPKKPSGYRQISAPKKLLKKAQNWILDNILEKLELHNAAHGFRLKYSIVTNAQIHVGKEVIINIDLKDFFPSISYKRIKGLFKSFGYSETASTIFALICTEPKIKEVEINGQINSLLSWTDRYLPQGAPSSPAITNILCRRLDRRLNFMAKQYGFDYSRYADDLTFSASGESLVNINNILKLTNLIVKKEDFEINENKTRVVRNYRRQEVTGLIVNEKLNISRDKLKTFRAVLYKIEKDGLQNYTWGQSQDIIAAIEGFANFVAMVNPEKGGKFIEQIHRIKEKYVRKREKVVLVYQEFLTQSNILKQINDKLRAVRFNKIKKRQYLQETYNKKYLQELAAEELLDFLHFLINWQPEQFSFDDTDDPPF

SEQ ID NO: 6189 - protein, 599 aa, Anabaena sphaerica
  source 1..599: note = Related to NZ_JACJQU010000001.1
MDLFNEPRKKSNVLIYNRKYHVINILLINLQSVAFTNNMNTNHLITIGISLYQENKYSEAIDCFNKIISTDSNCCQAYHYRGLVLRKQRDDQGAIADLKKADTLIADQEYTNIFQKLQNLIGKDYSHFSKNNDNDEFSYIEYKGTWHLEQEIYDLISSELNKLENFLSSRLQTIELLRKKRAENSQFNQERLENKNLPTYNSHEEIAQAMGISVKGLRFLSFSRKNDHYIRFQIPKKPSGYRQISAPKKLLKKAQNWILDNILEKLELHDAAHGFRLKHSIVTNAQIHVGKEVIINIDLKDFFPSISYKRVKGLFKSFGYSETASTIFALICTEAKIKEVEINGEINSLLSWTDRYLPQGAPSSPAITNILCRRLDRKLTFMAKQYGFDYTRYADDLTFSASGESLVNVNNILKLTNLIVKKEDFEINENKTRVVRNYRRQEVTGVIVNEKLNIPRDKLKTFRAVLYKIEKDGLQNYTWGQSKDIIAAIEGFANFVSMVNPEKGGKFIEQIHRIKEKYGIKKDKISDYSPVIRTQSYIINQIYYKLSKLSYSKTKRRMYLTKTYNKRSLQELTEEQLVEFLNYLKNLQSSFDDLDEPPF

SEQ ID NO: 6190 - protein, 567 aa, unidentified
  source 1..567: note = Related to NZ_LUFH02000071.1; note = Sphaerospermopsis aphanizomenoides
MDFNDILNRGIDLYKSQKYIEALECFNQIISQDPNSYQAYHYRGLIRRKQRDDQGAIADLKTANTLIFDGEYTNIFEKIQDLIGKDYPHHSNNESNDNADFIYIEYGGTWYIEKEIYEWISADLKKLESFLSKRLEKIDLLREKHRQNSQFNQQKLESKNLPIYNYHEEIAQAMGISIKGLRFLAFSRKHYHYNRFQIPKKPSGYRQISAPKKLLKKAQNWILHNILEKIELHVAAHGFCLQRSIVTNAQIHVGKEVIINMDLKDFFPSISYKRVKGLFKSFGYSETASTIFALICTEPKIKEVEINEEPKYILSWTDRYLPQGAPSSPAITNILCRRLDRRLTFMAKEYGFDYTRYADDLTFSAAGESLVHINNILKLTNLIVKKEDFEINENKTRVVRNYHRQEVTGIIINEKLNISKEKLKTFRAVLYKIEKDGLQNYTWGKSQDIIAAIEGFANFVVMVNPEKGAKFIELIKRIKEKYLRKREKSVLVNQEFITQYHIVKQINYELKELRFNKTKKRQHLQENYHKASLQQLTEAELLEFLHYLTNWQPEEFCFSDTDDPVPF

SEQ ID NO: 6191 - protein, 485 aa, unidentified
  source 1..485: note = Related to JADEWT010000004.1; note = Tychonema sp.
MSSCDINCIIQDIEGSIEGEFEQLEGRLSRRLKHSQVLQKKRINNAKFDPERLQSNNLPLCNSHEAIALAMEISVKGLRFLAFSRKKHHYIRFQIPKKTGGNRKISAPTHLLKKAQKWILENILENIQLHEAAHGFRLKHSIATNAEHHIGKEVIINIDLKDFFPSISYIRVKGLFKSFGYSETASTIFGLICTEPKMKEIEANGKTAFLLSWTERYLPQGAPTSPAITNVLCRRLDRRLHSMAKQYGFDYTRYADDLTFSTSGESLRNICNIFQNTRFIVEQEDFEINEQKTRVIRRYQQQEVTGIVVNDKLNVSREKLKNFRAVLYQIEKDGLEGHNWGQSEDIIASIEGFANFVSMVHPEKGAKFKEQIDRIKEKYGRKKNPKVPNVSQPLLSRSDIVALIDTKFQELKFSKIYTDIYLNKIYKKQSLKQLTEAELLELLRDLTSSPSEDDDRTQLNFVKRLKALIAQRIRYYTRATKDSDF

SEQ ID NO: 6192 - protein, 623 aa, Oscillatoria nigro-viridis
  source 1..623: note = Related to NC_019729.1
MAEAKIEDSRNNMDINELIVRGISYYMQGKYGEALECFNQAICHDLNCVQAYHYRGLIRRRQTDKQEAIEDLQQAARLLNDKEYTTISNNLQIFIEQNCFKKTENVKSDDSDQNLIFHNENWYECYDDLVDAFPDEFMSYWEIESLRQECESIVEEEFEKLERWLSRQLKDSQVLQKKRINNAKFDRERLQSNNLPLCNSHEAIAQAMGVSVKGLRFLAFSRKKSHYIRFQIPKKTGGNRKISAPTHLLKKTQKWILENILEKIQLHDAAHGFRLKHSIVTNAEHHVGKEVIINIDLKDFFPSISYIRVKGLFKSFGYSETASTIFGLICTEPKIKEIEVNGKIEFLLSWTERYLPQGAPTSPAITNVLCSRLDRRLHSMAKQYSFDYTRYADDLTFSASGESLDNICKIFQNTRLIVEQEDFEINEQKTRVIRRYQQQDVTGIVVNDKLNVSREKLKNFRAVLYQIEKDGLEDRNWGQSEDIIASIEGFANFVSMVNPEKGAKFKEQIERIKEKYGRKKEAKINNISQPIMNQSDIVALIYTKLKELRCSKKVKQIYLNKIYNKQSLQQLTDEELLEVLRDLTTWSSGESGRRQINFVKKYRALSCEYIRHDTPDREDVNEF

SEQ ID NO: 6193 - protein, 610 aa, Microcoleus sp.
  source 1..610: note = Related to JAEQCY010000049.1
MDINELIFQGVSYFKQRNYDEALECFNQAISCDLNCVQAYHYRCLIHRRQQNKQEALENLQQATKLLNDKEYTTISNNLQILIEQDCFKTSENVQSDNSDHNLIFYNENWYECYDDLVDAFPNEFMSYWEIESLRQECESIVEDQFLRRECWLSRQLKQSQILQEKRINNAKFDSERLQSQNLPLCNSQESIAQAMGVSVKGLRFLAFSRKKYHYIRFQIPKKTGGNRKISAPTHLLKKTQKWILENILEKIQLHDAAHGFRLKHSIVTNAEPHVGKDVIINIDLKDFFPSISYRRVKGLFKSFGYSETASTIFGLICTEPKIQEIELNGKTELLLSWTKRYLPQGAPTSPAITNILCHKLDRRLYSMAKQYGFGYTRYADDLTFSASGESLGHIFNIFQNTRCIVEQEDFDINEQKTRVIRRYQQQEVTGIVVNEKLNVSREKLKNFRAVLYQIEKDGLEGHNWGHSGDIIASIEGFANFVSMVNPEKGAKFKEQIDRIKEKYGRKNQAKVPNVSQPILNQSDIVAQIHTQLKEFRFSKRIKQIYLNKIYNKQSLQQLTDEELLELLRDLTTWSSVGHGRKMVNFQLKYIGLSCEIRSDTPNEEDVNQF

SEQ ID NO: 6194 - protein, 576 aa, Microcoleus sp.
  source 1..576: note = Related to JAAUPI010000036.1
MDINELIVKGVSYYTQRNYDEAIECFNQAISRDINCVQAYHYRCLIHRRQQNKQEALENLQQAARLLNDKEYTTISNNLQIFIGQYCFKKTENIKSDNSEQNMSSWERDLVRDAENCAEAYIEEKFYELERWLSKRLEHSQILQKKRINNAKFEPERLQSNNLPLCNSHEDIAQAMGVSVKGLRFLAFSRKKSHYIRFQIPKKTGGNRKISAPTHLLKKSQKWILENILENIQLHEAAHGFRLKHSIVTNAEHHVGKEVIINIDLKDFFPSISYRRVKGLFKSFGYSETASTIFGLICTEPKIKEVEVNGKIEFLLSWTERYLPQGAPTSPAITNILCSRLDRRLHSMAKQYGFDYTRYADDLTFSASGESLDNICNIFQNTRFIVEQEDFEINEQKTRVIRKFRQQEVTGIVVNEKLNISREKLKNFRAVLYQIEKDGLEGHNWGQSEDIIASIEGFANFVSMVNPEKGAKFKEQIDRIKEKYGCKKKAAVPNVSQPLLGRSDIVAQINTKLKEVGCSSGYTQIYLTKIYKKRSLKQLTETELLEVLRDLTSSQAGDSGRTETNFVKRWRALIYS

SEQ ID NO: 6195 - protein, 579 aa, unidentified
  source 1..579: note = Related to BLZO01000072.1; note = Okeania sp.
MDLDEILKNGIEYYWEKSYEQAIECFNQIISFNPNYAKAYHYRALVRRRQRDDKGAREDLVQAASLLGDREYTAMSQKMLKLIGCDYRHKSPPREDDFDFIFYDENWYSDYDELSEMFPEEFPPSWEYEVDILDGIAYAGEELDRLETWLFKKLERACYIQKKRAINAKFDEKRLRENNLPLCNSHEEIAAAIGISIAGLRWLAYSQKKYHYTHFKIPKKTGGERNISTPIPLLKKAQNWILNNILIKIQPHDAAHGFCTERSIVTNAQLHLGKEVIINIDLKDFFPSISYKRVKGVFQSFGYSKTASIIFGLICTAPKLKEIKLDEKLHQLLSWKERYLPQGSPSSPAISNLVCRRLDSRLTEIAVKYGFNYTRYADDLTFSASGDSLRNISHILKDTRLIVRLQDFEINENKTRIMRKSRRQEVTGIVVNSELNISRETLKRFRATLYNLEKDGLENRHWRNSQGGDIIASIEGFANFVSMVNPQKGAKFQQQVTRIKEKYKPKKTQNSLAPQLITKSDIIALINDDIRKLHWSNRDRRIYLRQVYGKQSLQQFTEEELLKVQNHFCSFLDALSQKI

SEQ ID NO: 6196 - protein, 644 aa, unidentified
  source 1..644: note = Related to DMPE01000239.1; note = Planktothrix sp.
MDNLDLQQILNRGIDNYQEKNYEQALEDFNQVISINPLFAKAYHYRGWIYRILEKKEEAIQNFQQAASLFKDREYRVLCEQLAELLESLFPSKLKKQQSSEINDDIYSEYRNLFWIDEDGNWYDDPPDYECDFYDIGDWEDYINQKLITIKNRLFKRLEKIEYLQIKREKNAQFDQRKLEDNGLPICNSHQDIAKLMKIRVKRLRFLAFSRNKSHYTCFKIPKKIGGDRHISAPMPFLKKAQLWILHNILEKIKIHDAAHGFILNHSIVTNAQPHIGKDIIINFDLKDFFPSISYPRVKGLFKSLGYSETASIIWGLLCTEPTLKQIELDGEIHSLRSWTERHLPQGAPSSPAITNLLCRRLDQRLTQMAQKYGFVYTRYADDLTFSASGNSLTNLSNIFNETGFIVKTEGFNLNQDKTRIMRKSQQQEVTGMIVNNKVNIPRETLKRFRATLYQIEKEGLIGKHWGNSKNQELMVSLEGFANFVFMVNPEKGSQFRDQVKRIKHKYYCQSKTRRSIISQEILNQSNIIGLIYAELNRLYCKNGKRRCYLMQTYGKPCLQELTEENLLEFLTDLKSHVENSPFLDSNFIRVLDFVNRLSLTPNHLRQYLIKTYGKQSLLQIKTEELKNFYSLFKKTPSNRFLWF

SEQ ID NO: 6197 - protein, 598 aa, unidentified
  source 1..598: note = Related to JAGHZN010000053.1; note = Roseofilum sp.
MNINDLLKTGIECYKAKDYETALLAFNSAISVNPNLASAYHYCGSIYLALNQKENAIKNFRKAEAILKDKEYSKLCNKLEEILVELFPSKTLDCPENHNNDALDFREYQNLFWIDEDGNWYDDPPDHDLYVGYDSDANDYYCDLLSKLTSIKDYLFSRLKKIQTLELKRSQNSEFDRKKLLSQNLPLCSSHLDIARLMGFSVGYLRCLAFSRNKYHYQSFEIPKKIGGKRKISAPNQMLKKAQKWIQNNILDKIKVHDAAHGFKIEHSILTNARPHVNQDIIISFDLKDFFPTISYRRVKKLFKSLGYSETASIVFGLLCTEPIIKNIELDGQAYELVCWTKRCLPQGAPSSPGITNLLCCNLDQRLSQMANKYGFIYTRYADDLSFSASGESLDYITNIFKGVRSIVRSEGFTLHESKTRVMRKHQQQKITGIVVNQKLNISRKTLKRFRALLYQIEQEGFFGKHWGHYRNYDLLRFIEGFSNFVYMVNPDKGVLFVEQVKRIKEKHPVNINKISQSSIITLIYSEFQRIDCSPSTRRKYLKETYGKQSLQDLTEENLLELLDHLKSTEAVYSLTNKEINYFVNINDPTSISKEDLF

SEQ ID NO: 6198 - protein, 743 aa, unidentified
  source 1..743: note = Related to JACJTF010000019.1; note = Planktothricoides sp.
MFSQSKKLDKLINQGIDYYKQSQYEAALECFNQAIALNPNCARAYHYRGWLHLANNNPGELLNDLQTVCRLLNDKYYERLVNKIEKIIPQLFYREDSLSWIYCEEDDSWYESYSDIPGGDIYIGIIGDIEAELMEQRSQEFYWLRNWLFARIEEINNLQLKRNKNAKFNQEKLIRYQLPLCNSHSEIAAAIGLSVNGLRYLAFSRNKLHYTRFNIPKKTGGKREISAPLPLLKKAQNWILHNILEKLEIHPAAHGFCRQKSIVTNALPHVGKDVIINIDLKDFFPSISYPQVKGLFKSLGYSETAAVVFGLICTEPRVQKLEIDGESCLVNLKERRLTQGAPSSPAISNLLCKKLDHRLSNMAKKMGFMYTRYADDLTFSGSIDSRENIGRLFKVTNLIVQEEGLAINPDKTKVRWKNRQQDVTGLVVNHKINISRKTLKKFRATLYHIEQDGFRGKHWGQTNTNDLMASIEGFANFVCMVNPEKGAKFKQQVQRIKDTYKKTDQKAHQANHESPKTSAQIYDVVFLIFSALFWLGWTYKKKLEYLRQTYGNTAIKQLRPNQQWEFLNYLLEAIVSQEIKTHLSLADLQSKEIHNFKQVLCCLDYYKGRKCKSYAIPSFIINNTPIWEDKMADYLDFLCRIYREYLRLGWTDNQRENSAAKTYLQEIYHVLSPLALTLKQLQDFLEYLKLQPTPEVCSNSQPDSYEYDFSDSYEYDFSDSYEYDFSDSYEYDFSDSCEYEPPY

SEQ ID NO: 6199 - protein, 515 aa, Phormidium ambiguum
  source 1..515: note = Related to NZ_MRCE01000004.1
MGVYDDYDDNDYTDDANEEYYQEYLEWATYFSQGLVDSSDQGWFSSDPSYESNGYQNIDRIVDKLYESGEDFEFDDWDKEDEYPLDFNAKREEDEKFKLAEALKIREEKQRFNKERLQENGLPLCCSHSAIAKAMGISVNKLRFLAFSRKRYHYRNFQIPKKTGAKRDISAPMPYLQQAQYWIQHNILKKLELHNAAHGFCRERSIITNAQPHVGSEVIINIDFKDFFPTISYKRVKGLFKSFGYSEEASIIFALICTEPMLKEVELNEKTNLFLSWTDRRLPQGSPTSPTISNLLCRRLDRRLTQMTEPLGFIYTRYADDLTFSASGESVRNICNVFNRMRSIIKYEGFEINEDKTRVIRKSRQQEVTGVVVNSKLNVSKETLKRFRATLYRIEKDGFQGRYWGQSNDLIASLQGFANFVYMINPEKGAKFQEQIRHIKQKYKQGPNQSVPESKLLNLSDIIALTNIELRRLNWSIQERRRYLKKTYGKQSRQQLKDEELLEFLNYLKSLPKPK

SEQ ID NO: 6200 - protein, 435 aa, Nostoc sp.
  source 1..435: note = Related to NZ_CP091913.1
MSVNQGESSDDSYEIDEDIEQQLNRWWREANDLENDYWYRQKQLQGKNTRNKQGKEKLLEKYYLPQCNSFREISKLINIDLADLRLLVFSPKQDAATKHHYILFYIPKKTGGERIISAPSQNLKNVQYWILKNILKKLEPSLHDAAHGFRNSEIIKEKHTINIKFFITQILKAKYISIFYKFRLILKLIIYAIALPELIQYPKFGKRRSIVTNAEPHVGADVIINVDIKDFFHSISYKRVKGLFRSFGYSESASTIFALLCTVTFVNHRSYLPQGAPTSPMITNLICRRLDRRLTHMAESFGFRYTRYADDLTFSSSDESVCNIGKVLRHTEGIVKHEGFEINRDKTQIMRKSNRLEVTGIVVNSKPSISREKLKRFRATLYQIEKDGLEGKFWGNSTDVMSSIQGFANFVYMVDPQKGAKFRDQIRIIKEKYKC

SEQ ID NO: 6201 - protein, 435 aa, Nostoc sp.
  source 1..435: note = Related to AP018318.1
MPVYQSESSDDSYEIDEDVEAQLSRGWRETNNLENNYWYEQRQLQGKTKRNKQGNKELLEKYCLPQCNSFRAISNLININLEELRLLVFSPKQDAATKHHYIRFYLPKKTGGERIISAPNQHLKNVQYWILENILKKLDPSIHDAAHGFRNSRIIEIENNKLDINLLPIKTLNTRYSILYKFWIIVKQIIYVDASHRLTQYPRFGKRRSILTNAEPHVGADIIINVDLKDFFHSISYKRVKGLFISFGYSESASTIFALLCTVTFVNHRSYLPQGAPTSPMITNLICRRLDRRLTEMAERLGFRYTRYADDLTFSASNENGCNIGKVLRHTQGIVKHEGFEINQDKTRIMRKSNRLEVTGIVVNTKPSISREKLKRFRATLYQIEKDGLGGKFWGESEDIMSSIQGFANFVYMVDPQKGAKFREQIRIIKEKYRY

SEQ ID NO: 6202 - protein, 321 aa, Scytonema sp.
  source 1..321: note = Related to NZ_AP018194.1
MSAPTRRLKDAQYWILNNILKKLDSSLHDAAHGFRSSRVIKTETNGKNDFLRSLQHLEPRHFGNLFNFWRRIKSTIYLLTLSLSSSKIKFGKRRSIVTNAEPHVGADVLINIDIKDFFPSISYRRVKGLFKSFGYSESASTIFGLLCTVTFVNHRSYLPQGAPTSPMITNLICRRLDRRLTQMGERFGFRYTRYADDLTFSASNESLCNICNILRQTESIVRHEGFEINKDKTRILRKCNRLEVTGIVVNSKLSISRQKLKRFRATLYQIEKDGLEGKHWGKSEDLIASIQGFANFVYMVDPEKGAKFREQIRIIKEKHGC

SEQ ID NO: 6203 - protein, 515 aa, unidentified
  source 1..515: note = Related to JAEUQL010000156.1; note = Blastocatellia bacterium
MSEKRRTREEIFQRMRETSRDEVILEEMIRHGFWPREGRLAEDPADEIRRKGEIERELQQLRAQNRSLQNEAALLREMRKRRFAESRKKRQETKERREKQRQERAEAWQQKKAEEITFLGTGVSVGLSNKKSNEELLKKYNLPVYRSPEEIAAAMAVTISTLRFLAFSRKTSTVSHYIRFKIPKKTGGQRLISAPMPRLKEAQTWILATILEKIPVHQAAHGFRAGHSIVTNAEPHLGKEVILNVDLKDFFPSVSYRRVKGLFSSFGYSEAVATLFALLCTEPDIEKVELDGKTYYVTQTRRHLPQGAPTSPAITNLLCRNLDYKLYCFAEKLGFTYTRYADDLTFSASNEAVKKVGYILKKLEEIVKKEGFEVNQEKTRILRYSRQQEVTGVIVNEKLNVSRKVLRNFRATLYQIEKDGLEGKRWGQAQDLVAALQGFANYVYMVNPEQGSLLRTRVQAIIEKTKWKAAARPVKPSKMEEVATLQTESAVEEVEIEQKKQDKDYDSSKKWWKLW

SEQ ID NO: 6204 - protein, 482 aa, Trichodesmium erythraeum
  source 1..482: note = Related to JAGGDU010000219.1
MTDQPSSRKELYARIREIGREEFLLEEMTRYGFWPEGEEMPLDPVDEIQRRGELEQQLKKLRQENAHLFNLKKLGQEAYKQRLVESRRKQQETKELRERERQERAKAWQEKKENDIIYLGEEISGGLNNVEGNIFRLEIYNLPILNTAQDIANAMDITVGELRFLAFSRPTSTVSHYIRFKIPKKTGGERQISAPMPRLKNVQTWILDNILCNVPLHEAVHGFRAGHSILTNAEPHVAKDVIINFDLKNFFPSICYKRVKGLFFSLGYSEAAATIFALLCTEPNVVVVELDGQVYYVAQSDRHLPQGSPASPAITNIMCRRLDKRLSEMAAKLDFVYTRYADDLTFSSSGDSLRHICNVFRRTESIVSHEGFTVNREKTRLLRGKSSQLEVTGVVVNEFPNISRKELKRFRATLYQIEKDGPQGKRWGHSDNVIAAIEGFANFVAMVNPEKGRELVRRVKQIKEKYTGRRRRSTKILEHDGT

SEQ ID NO: 6205 - protein, 466 aa, unidentified
  source 1..466: note = Related to JACMLN010000050.1; note = Anaerolineae bacterium
MTEQPRTRQELYDRIRQTSKDEFILEEMIRLGFWPRQGTLPEDPAEEIRRQGELQRELEALRSESRKLNNEEHLRKAARKLRLQESRQKQQQNKERREQERIARAQVWEQRKQHEILYLGEGVSGGLSATECDHERLASYGLPALGSAEQIASAMGISVGQLRFLAFSRRTSKVSHYIRFTIPKKSGGERLISAPLPRLKHIQHWLLANLLTNIPLHEAAHGFRTGHSIVTNARPHVGADVVVNLDLKNFFPTITYKRVKGLFRALGYSEAAATIFGLLCTEPEVAALSLDQTTYYVSQGTRHLPQGAPTSPAITNLLCRRFDRRLTAMATALGSQYTRYADDLTFSASGENLRHICTLLRRIESIVTHEGFVINEAKTRILRGGSQQEVTGIVVNNKLSVCRKTLRRFRALLFQIERDGPSGKHWEGAPNLFAAMQGFANFVYMVDPERGLPLRQKVRHLRSLHG

SEQ ID NO: 6206 - protein, 478 aa, Pseudanabaena sp.
  source 1..478: note = Related to NZ_ALWB01000094.1
MTNQPRTRQELYDRIRRSSRDEVILEEMIRLGFWPAAGEMPKDPADEIRRKGEIMRELEDLRAQNRQLHNEEALKKEALAQRLAESKRKQQETKERRERERQERLEIWELKKQQEIVFLGEGVSAGLNKTECDRDRLQSYGLPEYGTSGEIAAAMGISLGELRFLAFSRRASNVSHYIRFKIAKKTGGERLISAPMPRLKQAQTWILYHILEKVNLHEAAHGFCRGRSIVTNAAPHVGADVVINLDLQDFFPSISYKRVKGLFISLGYSEAAATIFGLICTDAAVEAVELDGKTYYVSLGDRHLPQGAPSSPAITNLICRRLDLRLTKMAASLGFVYTRYADDLTFSGSGENLRQICNVLKRTEAIATHEGFTIHPQKTRVLHRSQHQEVTGIVVNEKLNVDRETLKRFRATLFHIEKDGLAGKHWGNYPDLIQSIEGFANFVAMVNPEKGGKLKEQVQRIKAKYRPKRVKRIRRKSN

SEQ ID NO: 6207 - protein, 472 aa, unidentified
  source 1..472: note = Related to MQTZ01000030.1; note = Leptolyngbya sp.
MSEPSPPRTREELWDRIRQTSREEIILEEMIRLGFWPAQGELPQDPADEIRRRGEIHRELRELKREDRRLQDEKILRKQMLEKRLAESRRKQQETKERRERERQERSAAWEQRRQQEILYLGEGVSGGLNQTEGLSDRLQQHRLPLCLTAEQLATAMGLTIAALRFLAFARRTSPTSHYVRFQIPKKTGGLRLISAPMPRLKQVQYWILDNILDRLTPHDAAHGFCRGRSIVTNALPHLGADVVINLDLQDFFPTISYRRVKGLFRSFGYSEAVATILALLCTEPEVETVDLDGQTYYVALTDRRLPQGAPTSPTIANLICRRLDRRLTEMATTLGFTYTRYADDLTFSGSGDALRQICNLLQRSVAILTHEGFTVHDQKTRVLRNSRQQEVTGIVVNHKLNVDRETLKRFRAILYQIEKDGPAGKQWGHSRDLMASIHGFANYVAMVNPEKGQKLLAQVKRIKQKYKRKRR

SEQ ID NO: 6208 - protein, 476 aa, Pseudanabaena sp.
  source 1..476: note = Related to NZ_KB235911.1
MTEPAQPRTRQELWDRIRQTSRDEVILEEMIRLGFWPAQGQIPQDPADEIRRRGEIDRELKELRKEDRQLQDEKVLKKRLLEQRLAESRRKQQENKERRERERQAKSEAWQARKTQEILFLGDGVSQGLHHQQGDEQRLRSLDLPICHTPAELAAAMEISIGELRFLAFDRHVSFVSHYVRFQIPKKTGGTRLISAPMPRLKRSQYWILKHILTRISPHDAAHGFRQEFSIVTNAQPHVGADVIINFDLQDFFPSISYKRVKGLFRSLGYSEAVATILGLLCTEPEVEAIEMDGKTYYVALTERHLPQGAPTSPAISNLLCRRLDRRLSEMAENAGFIYTRYADDLTFSSAGDAQRQICNVLKRTESIVTHEGFTINPQKTRVLRSSQQQEVTGIVVNDKLNVDKATLKRFRATLYQIEKDGLEGKQWGNSQNLLSAIHGFANFVAMVNPERGKIFLEQVQRIKQKYGKKKRRDRP

SEQ ID NO: 6209 - protein, 470 aa, Calothrix sp.
  source 1..470: note = Related to JAAUPE010000002.1
MTEQPRTRQELYDLIRQTSKQEFILSEMIRLGFWDENSNNPEDPAEEIRRQGELQRQLQELQQQNRQLHNEKALKKQLLKQRLEESKRKRQETKERNERKRQERSQAWQEKQAHEITYLGEDVSSGLNNLENNCDRLQKNNLPVFQTIEELAAAMGMTVGQLRFLAFDRKTSTVSHYIRFKIAKKTGGERLISAPMPRMKSTQDWILDRILEKIPMHSAAHGFRRGRSIVTNATPHVGTDVVVNLDLQDFFPSISYKRVKGLFQALGYSEAIATVLALVCTEATTEEVELDGKSYFIATSDRHLPQGAPTSPAITNLLCRRLDKRLANMAVSQGFIYTRYADDLTFSTSGDAIRNLCNILKHTENIVSHEGFTIHPNKTRVLRKSQQQEVTGIVVNEKLNVDRATLKKFRATLHHIEKDGLAGKHWGSGNDLMAEIEGFANYVMMVNPEKGEPLVKQVKLIKKKYGLRKR

SEQ ID NO: 6210 - protein, 471 aa, Chamaesiphon minutus
  source 1..471: note = Related to NC_019697.1
MTEQPRTRQDLYDRIRQSSKEEFILDEMIRLGFWSANGEIPNDPADEIRRRGEIQRELETLRAENRRLHNEEALKKEALKLRMAESRRKQQETRERRERERQERAIAWQTRQEREITYLGAGVSAGLNLTESNLARLQQHRLPILHAAADLANAMGITVGQLRFLAFSRRIATVSHYVRFQIPKKTGGFRAISAPLPRLKQAQQWILDNILEGVVLHPTAHGFRRGRSIVTNAEPHVGALVVINMDLQDFFPSISYARVKGIFRSLGYSEAIATILGLICTESDVTEIELDGRSYYIAQELRHLPQGAPTSPALTNLLCRRLDRRLDRMAKSRGFIYTRYADDLTFSTTDRERLRDIGNILKGTHGIVTHEGLTIHPDKTRVLRQSQQQEVTGIVVNQKLNVDRTTLRRFRATLYQIEKDGLAGKQWGQGADLLQSIAGFANYVAMVDPHKGREFLASVQRIQKKYGRRKR

SEQ ID NO: 6211 - protein, 495 aa, unidentified
  source 1..495: note = Related to JAAUOP010000014.1; note = Synechococcales cyanobacterium CRU_2_2
MTSQPETRQALYDRIRQSSKDEVILNEMIRLGFWPTAGTLPEDPAEEIRRQAEIQQELADLRTESRKLNDEKALKKKLLKQRMEASKQKQQETKIRRDRERQERAAAWKSRQAQDTRLPWEGVSAGLSQTGCDRDRLQQYHLPELGTAADIAQAMGLPLGQLRFLSFSRRISHISHYVRFRIAKKTGGDRLISAPMPRLKAAQYWIVANILEPLKVHDAAHGFCRNRSIVTNATPHVGADVVVNLDLKDFFPSISYARIKGLFRALGYSEAAATIFALLCTEADVEEVELDGRTYYVAQSARRLPQGAPTSPGLTNILCRRLDRRLTGLAQELGYTYTRYADDLTFSASGAAAGQVGRLLRQVKDIVTHEGFEVHPKKTRVLRQSRQQEVTGVVVNEKLNVDRKTLKRFRATLHHIEKDGFKGKTWGHQSDVQTNVQANVQANVQESDIQGSNLLSAVQGFANYVYMVNPEKGGPFLDQVKRIKQKYKLDRKPKR

SEQ ID NO: 6212 - protein, 475 aa, unidentified
  source 1..475: note = Related to JADEXQ010000025.1; note = filamentous cyanobacterium LEGE 11480
MNQQPQTRQALYDRIRQSSKDEVILTEMIRLGFWPSSGELPNDPAEEIQRQGEIQRELSELRAENRKLNDEKALKKRLLKERLVASLQKRQETKARREQERQERAAAWKARQAQDITYLGEGVSSGLNHVECDVERLQRHNLPELGTAAAIAAAMGISVGELRWLAFSRRTSQVSHYIRFRIPKKTGGERLISAPAPRLKKAQYWIEANILQLIEIHDAAHGFCRQRSIVTNAQPHVGADIVTNLDLQDFFPSVSYRRVKGMFRALGYSEAAATIFALICTEPEVEMVELDGRTYYVAQSDRRLPQGAPTSPSITNILCHRLDRRLTGLAQEFDYAYTRYADDLTFSASGAATEQVGRLLRQVTQIVSHEGFQVHPQKTRVLRKSRQQEVTGIVVNDKLNVDRKTLKRFRATLYQIEQDGLAGKVWGHSADLMGAIEGFANYVYMVNPDKGSHFLAQIKRIKQKHRPKRHQPRKS

SEQ ID NO: 6213 - protein, 476 aa, unidentified
  source 1..476: note = Related to NC_009925.1; note = Acaryochloris marina
MSNQPRTRQELYDRVRQSSRDEVILEEMVRLGFWPAEGEMPQDPTDEIRRKGEIQRELAALRAENRKLHNEAAIKKQLYKERLAASKKKRQETKERREQERQSRAAAWRDRKARDIVYLGTGVSGGLNQTECDRTRLQQYGLPAYGTAEEIAKAMQISVGQLRFLAFSRRTAQISHYVRFKIPKKTGGERLISAPMPRLKQAQYWIAEKLLAAIPLHEAAHGFCSGRSIVTNATPHLGADVVINLDLQDFFPSISYPRIKGLFRSFGYSEAAATIFALLCTEPDVVEVGLDGQHYYVAQSQRHLPQGAPTSPILTNLLCRRLDRRLTAMAAELGYRYTRYADDLTFSATGQPQQQVGKLLRRTHAIVTHEGFTIHPQKTRVLRSGRQQEVTGVVVNEKLNVDRKTLKRFRALLHQIEQSGYDDQHWGGQPVSFAQIQGYANFVEMVNPERGAQFQAQVKRIKRKYPPRVQAFKPAS

SEQ ID NO: 6214 - protein, 514 aa, unidentified
  source 1..514: note = Related to JADJPF010000004.1; note = Blastocatellia bacterium
MSNQRPRTRQELYERIRQTSREEFILEEMIRFGFWPAQGEIPQDPADEIRRRGELQRQLGELNSQERNLRNEEKMLKELRKRRMEESKRKRQETKERRERQRQERAKAWQEKKKQDITYLGEGVSAGLNNKEVNSSRLNQHNLLSYSNASEIASAMNISINALRFLAFTRKTSTTSHYVRFKIPKKTGGERIISAPMPRLKAAQNWILHNILEKVTLHDAAHGFCQKHSIVTNAKHHIGAEVIVNIDLKDFFPSISYKRIKGLFLSLGYSEAAATIFGLICTEPIVEQVILDGKTYYVATSERHLPQGAPTSPALTNILCRRLDKRLSKMASNLGFTYTRYADDLTFSAKSEASRNVCNILAKTDNIVKHEGLTINSEKTRVLRKGRQQEVTGIVVNKQLSISKKTLKRFRATLFQIEKDGPDNKHWGHSKDVIASIQGFANFVYMVSPEKGRLLKTKVRAIIKKYNWKAAQRKRLPLPLTTVPPTVQEIQKVPETVIEKPQEQKTNKKWWKLF

SEQ ID NO: 6215 - protein, 518 aa, unidentified
  source 1..518: note = Related to JACQZQ010000027.1; note = Acidobacteria bacterium
MSERPRTRQELYERIRKTSKEEFILEEMIRFGFWPAEGQIPQDPADEIRRRGEISRQLNELHTQNRHLGNEEKMLKELRKKRMEESKRKRQETKERHERERKERAEAWKEKKKQDIIYLGQGVSSGLNNKESNEERLKSYNLPKYSNASEIATAMSISIGALRFLAFSRKTSTKTHYVRFKIPKKTGGERTISAPMPRLKSAQNWILHNILEKVKLHDAAHGFCTQHSIVSNAKPHIGAEVLVNIDLKDFFPSISYKRIKGLFKSLGYSELAATIFALICTEPTVEEVSLDNQTYYVATSARHLPQGAPTSPALTNILCRRLDKRLTEAAKELGFTYTRYADDLTFSTKGEFSRNICNILNKAHDIVKHEGLTVNSEKTRVLRKGRQQEVTGVVVNKKLNISKKTLKKFRATLYQIEKDGPEGKRWGHTPDVIAAIQGFANFVFMVNPEKGRLLKSKVKSIIQKYNWVPEWKRKLSSPSEVQPNVSTLSTLPVTSTENKVETQKTTENKTNKKWWKLF

SEQ ID NO: 6216 - protein, 524 aa, unidentified
  source 1..524: note = Related to JAIBAN010000080.1; note = Blastocatellia bacterium
MDRPRTRQELYEQIRRTSRQEFILDEMIRLGFWPAAGVMPHDPADEIRRETEIRREIAEVHQQNRHLYNEEALKREMRKRRIEESRRKQLENKQRRELARQQRAAAWNEKKQKEIGFLGETVSGGLNQTECNQGRLEKFSLPRFTTPEEIAKGMNLSVPRLRFLAFDRKTSRVSHYVRFQIPKKTGGVRIISAPKPYLKAAQEWVLQTILERVPVHPAAHGFLAGHSIVTNAQPHLKADLILNVDLKDFFPSVHYQRVKGLFKSLGYSEAAATVFGLLCTERDTQEVELDGERYFVGLSERRLPQGAPTSPAITNLLCRKLDARLHKLAMKHGFAYTRYADDLTFSASGPNTRNLCNVLKGLAAIVTHEGFTINPSKTRVLRKGDQQEVTGIIVNEKLNLAREVLKKFRAILFQIEKDGPEGKRWGTSPDVIGSVVGFANYVRMVNPEKGAQFQAQVRRIIEKYGWKRVRMTPAKPAEIAFDPAPTMILTSAPPPPEPEEKPPVAPQAPPSSADGKSKKWWKMF

SEQ ID NO: 6217 - protein, 517 aa, unidentified
  source 1..517: note = Related to JACQXX010000070.1; note = Acidobacteria bacterium
MMDQPRTRQELYERIRRTSREEFILEEMIRLGFWPREGQTPSDPADEIRRRGELSRELTKLRTENARLYNEQALIQEMRKRRLAESRQKQQETKARHERERQERAQKWREKKQHEIVFLGEKVSGGLNYTECDEARLNQNGLSAFSTAEDIAAAMGISLSDLRFLAFDRKTSTVSHYVRFKIPKKTGGERLISAPKPHLKAAQEWILHTILEKVTLHEAAHGFRTGRSIVSNARPHLKAEVIINIDLKDFFPSIAYPRVKGLFRSLGYSEQAATIFGLICTEPDVEEVELDGKTYFVALSTRHLPQGAPTSPALTNILCRRLDRRLTKLAENRGFVYSRYADDLTFSASGNAKQNICNVLRGVESITAHEGLAINTEKTRILRHSRQQEVTGVVVNEKLNVSREELKRFRAVLFQIEKDGPEGKRWGNSKDVIASIQGFANYVAMVNPEKGAEFQAQVKAIIQKYGWQRPASHRRSMASSESQYPGPASAPEPEVTSPATPESESSKSNDKKWWKLF

SEQ ID NO: 6218 - protein, 507 aa, unidentified
  source 1..507: note = Related to JAFDVL010000054.1; note = Acidobacteria bacterium
MTTQPRTREELYQRIRQTSRQEFILSDMIRLGFWPDAGVMPEDPADEIRRRGELQRQLDELRAQNRKLHNEQALLKELRKKRLLESKQKQKETKERRERERLERAEKWQQRKAKEIGYLGKEVSIGLSYAECNAERLSQYGLPHFENAEQIAAAMGITVSELRFLSFSRKTSNVNHYVRFKLPKKTGGERLISAPMPRLKHAQQWILTNLLEKVQLHDAAHGFRAAHSIVSNAKPHLGAEVIINRDLKDFFPSISYKRVKGVFKSLGYSDAAATIFGLLCTEPDVEKVELDGRIYYVATGERHLPQGAPTSPAITNILCRRLDRRMQKIADECGFVYTRYADDLTFSTSGESKQNICNVLRRSESVVAHEGLELHPDKTRVLRKSRQQEVTGIVVNEKLSIDRKELKRFRAVLFQVEKDGPDGKHWGKSPDVIASLKGFANYLQMVDPEKAAEYQKRVHALIEKHGLQPSQFTYRNPAAPVDAAPARPDLPKEETKPKPEKKRWKLW

SEQ ID NO: 6219 - protein, 504 aa, unidentified
  source 1..504: note = Related to JAFAZX010000026.1; note = Acidobacteria bacterium
MSTERPQTREELYERIRDGRKEEFVLEDMIRLGFWPARGEMPHDPADEIRRRAELQRELGELRAQHRNLYNEEALIKELRRRRLEESRRKRQETKERRERERRERAEAWRQRQGQEIVYLGEAVSGGLNHTECDAARLQSYGLPPLGTAAEIAGALGVSVGELRFLAFDRKTSTVSHYVNFQVPKKTGGLRQISAPMPRLKAAQHWVLRNVLEKVEAHECAHGFRAGRSIVSNARPHVGAEAVVNLDLQDFFPSIGYRRVKGLFRAFGYSEAAATIFGLLCTQPGTEEVELDGRRYFVATGERHLPQGAPTSPAVTNILCRRLDRRLLKVADELGFVYTRYADDLSFSASGESLRHLGNLLERVKAVVRHEGFNVHPDKTRVLRRSRQQEVTGVVVNDKPNVSRSELKRFRATLYQVEKDGPAGKRWGRSPDVIASLLGYANFVYMVNPAKGAELQRRTRALADKYGHEPVKVERPSRRRQPEPQAAAPSPEPQPTQKKWWKLW

SEQ ID NO: 6220 - protein, 502 aa, unidentified
  source 1..502: note = Related to JABFSD010000364.1; note = Acidobacteria bacterium
MSALAVKPLTRQELYERMAETSRDEVILEEMIRFGFWPAQGEVPFDPADEIRRRGELHRALDELRAEQRKLGDEAKLRKEARKKRLLESRRKQQETIVRRETERIERATQWQEKKSKEIGYLGAGVSAGLDNKEANVERLQRYNLPRFDDAASLAQAMGLTVGALRFLSFARKTSKTTHYVRFALPKKTGGVRVISAPMPRLKAAQHWVLQNILQPVELHEAAHGFRPQRSIVSNARPHVASSVVINLDLKDFFPTLDYRRIKGVFRALGYAEATATILGLLCTEPEVEKVELDGETYYVATSARHLPQGAPTSPALTNILCRRLDRRLLKVAEEMGFVYTRYADDMTFSTKQEQDSKQIGRLLHRVESIVAHEGFCIHPTKTRIMRSASKQDVTGIIVNDKPSIDKATMKRFRAVLFQVEKDGPIGKQWNHSRDVLASLRGFANFIFMVDPAKGAAYQRRVGALIDKYDWKPQPLPYQKKTKPVEPPAPQPVAQRPWWKLW

SEQ ID NO: 6221 - protein, 501 aa, unidentified
  source 1..501: note = Related to JAFDVJ010000081.1; note = Acidobacteria bacterium
MSEQPRTRQELYEEIRRQGGRDVYVLEEMIRLGFWRESTGLPDDPAEEIRRAAELQAELDRLRADNRKLYDEQAMLNELRKKRLAESREKQKETRARRERERQEKAENWRRRKETEILYLGAEVSGGLNNNETDRERLERGGLPVFSNVEELARAMNLTVGKIRFLAYDRRTSETTHYVNFKLPKKTGGHRLISAPMPALKAAQTWILENILGRVAVSDAAHGFLPAKNIVSNARLHVGAQTLVNLDLENFFPSIGYRRVKGIFRAFGYGEALATVFALLTTAPDTEEIELDGKTYFVATGERHLPQGSPASPALSNIAARRLDKGLAKLAAAHGCKYTRYADDLTFSTEDRDAAIGRLLAQVRFVVEKQGFKVNEKKTRVLRRGRQQEVTGIVVNDKLSIDRKTLRKFRAVLFQAETKGLENLRWGNSPDLVAALKGYANFVFMVDKEKGYAFQQQVRRIAEKYDWQPAPPRFPPKKKVEPEEPAPEKPAKDEKPWWKLW

SEQ ID NO: 6222 - protein, 501 aa, unidentified
  source 1..501: note = Related to JAIBCC010000010.1; note = Pyrinomonadaceae bacterium
MEQPRTRQELYEYVRQHGGRDAFVAEQMIRLGFWKSSDLPNDPVEEIKRIHDLQEELNKVRNENRKLFNEQALLKELRQRRLAESKQKQKETKLRREQERKERAEAWQKRKETEIVYLGEKVSGGLNNFEENAERLTANDLPSFANIEQLAKAMNLTVGKLRFLAFNRQTSETKHYIHFQLPKKTGGFRLISAPMPQLKTAQHWILHNILQKVSVHEAAHGFLPEKNIVSNAQPHVGAKIVVNFDLKDFFPSINFPRVKGVFRSFGYSEAIATIFSLICTAPETEEVEIDGKTYFVAIGERHLPQGAPTSPFLTNILCKRLDKGLQTLAKNYDFTYTRYADDLTFSTKNDGEKLTDFINKIRYVVEKQGLTINESKTRILRKGRQQEVTGIVVNDKISVNRKTLRKFRAVLHQAETKGLEGLRWGNSNDLIASLDGFANFVLMVDAEKGKMYKAQVGRIAEKHGWKSSRSGKFTPQELREVVEKKEEKPNDNQGKDWWKVF

SEQ ID NO: 6223 - protein, 528 aa, unidentified
  source 1..528: note = Related to NZ_JAFREP010000006.1; note = Acanthopleuribacter pedis
MNQARQALYDRIRESSKDEVILEEMIALGFWDPAQPGKEAAAELIGKTAELEREMSALRSEMARIDNQEAMLKALRKRNMEQAKARRVETKKRREAERQARAEAWRLKKQQDILYLGEGYSHSLGEQGACDAAALDENGALPAYENAAALAAAMGISIGELRWLAFGRKVSQTTHYQRFQVPKKSGGLRLISAPMPRLKEIQSWILREILEKVPIRSAARGFVRGKSIVDNARPHVGADVVINVDIKDFFPTVTYPRVKGVFRKLGYRGQVATILAMLTTEPEMVALEMDGQRYWMAKGERRLPQGAPSSPALTNIICRGLDAELEELALVNEYEYTRYADDITFSTRGREANRRIGGVLRKIEQHVGAHGFTLHPDKTKVLRNNARQEVTGIVVNEKLSVDRKTLRRFRAVMFQVEQDGPEGKHWGQAEHVIAGLTGYAHFLKMVDPARAQPFLEQLARIVEKHGNPVYPERRAARAPSWRRYQPDSDQAEATDAAPAANEAPAHPSGSEGEAATPVLEKKPWWKFW

SEQ ID NO: 6224 - protein, 532 aa, unidentified
  source 1..532: note = Related to NZ_CP071793.1; note = Proposed Sulfidibacter corallicola
MNNARQELYDRIRESSKKEVILEEMVSLGFWNEADPAFQKAQGAIERTGELEREMRALHTELSRLENKEAMIRAIRKRNMAQAKERRAETKARRLAARKARAEKWRREKQRDILYLGDGHSQTLQDRESDAARLGRTGDLPVLHDAAQLASAMEISVGELRWLAFGRKVSKVAHYQRFYVPKKTGGLRLIAAPMPRLKEMQRWVLREILEKVPLHEAATGFRNGISIVDNARRHVGSDVVINMDLKDFFPTLSYRRVKGVYRKLGYSGQVATILAMLTTEPEMDRVEMDGTLYWVARGERRLPQGAPSSPALTNIACRRLDRRLAALAEEWGYRYSRYADDLTFSANGEAASRAGKILRGARFIVEQEGFVVHPDKTRVLRRGRRQEVTGIVVNDKLSVDRKTLRRFRATLHQVERHGPQGRTWGHSPDVIAALTGYATFVKMVDSERAEPFLAQLERIREKWGYEPPAWDPGPIREPSWQRYQPEPEPAESDIATEATAEAGGAAGSEAEARAPGEAESAENHKKPWWKFW

SEQ ID NO: 6225 - protein, 524 aa, unidentified
  source 1..524: note = Related to JAGNHB010000094.1; note = Acidobacteria bacterium
MSRPAAPSQPTRENLYQRIRETSKAEVVLEEMIRLGFWPAGEGIPKGPEAEDRRTGELENELAALRTEMSRLQNEAAMRRALYQKRLEEARQKRQETRRRQEEARRARAAAWKQAKEREIGYLGEGISAGLNHQLSDATRLAQHGLPLLSTALDVASAMDISVGELRFLTFVRRVSKHTHYRRFFIPKKTGGQRLISTPMPRLKQAQYWVLGNILERIPIHSCAHGFVAKHSIVTNASMHTGTDVVVNCDLENFFPTISYRRVRGLFRALGYSEQVATILALLCTEPEVDRVECDGETYHLCTSERHLPQGAPSSPMLTNILCRRLDRRLSNLAETLGFSYSRYADDLTFSGSGEARGKVGKLLRKTEGIVSHEGFRINRDKTRVQRRGRRQEVTGIVVNERPAVNRENLRRMRAVLFRLEKDGLRGQHWGRGGEVISALEGYAHFVAQVDPAKGGRFLEQLVAIKAKLGWQRPKHLRRPKRTPSWKRSATAPAATPADVMPAVAQPAKPEPATPPKKPWWKFW

SEQ ID NO: 6226 - protein, 420 aa, unidentified
  source 1..420: note = Related to NZ_CP071793.1; note = Proposed Sulfidibacter corallicola
MPTVDSQDQVVDRDLCLDPLRTELEQRLGDEARRRLRRERNLAARRRSRTPRPTPPRVPTQTLTYLGDRLSGGLQDRRSRLDRLADHPQLPVLHDADDLAAAMGIEISELRFLAFAPTHSRVNHYQRFLLPKKTGGHRQISAPMPRLKAAQHWIYQRILAQVPVHRAAKGFLPGHSIVDNARPHVGADVVINMDLENFFPTITFARVKGLFRTLGYSEQVATILGLLCTEPEVETYEWLGERYHVARGPRFLPQGAPSSPPVTNLLCRRLDRRLDGLARSLGFHYTRYADDLTFSGSGEATDRVGKLLGKARDIIEHEGFRPHPKKTRVLRAGRQQEVTGIVVNRKLSLDRKTLRRFRAVLFQVELDGPAGKRWGNGGDLLASLEGYAHFVHMVDAEKGRAFLDRVEAIKARYGSDSIEL

SEQ ID NO: 6227 - protein, 501 aa, unidentified
  source 1..501: note = Related to JACKEM010000004.1; note = Deltaproteobacteria bacterium
MSDRRQEIYQRIRESSKDEVVLDEMVRLGFWPQQGVLPEDPAEEIKRQAALRDELASLTARLQKLGNQEALRQELKRRRLLESRRRRQETKLRRVHARELRAFEWKQKQRASITYLGEEVSRGLSNTASDEARLRALGLPVFHEASDIARAAQIEVSHLRHLAFHRVVSRRSHYVRFYLPKKTGGTRLISAPKPKLKWIQHWILRHVLEPLKAEDVAHGFVKARSIVSNASAHVGQDIVINVDLKDFFPTLTYRRVWGFFRKLGYSGHVATIFALLTTEPAVDELELDGSRYFVATGERFLPQGAPTSPALTNVICRKMDRRLAGLARTFGLTYTRYADDFTFSGPGETNVGRFFGALTRVVTEEGFSIHPGKTRIFRRGRRQEVTGLVVNSGKPTVPRATLRRFRALLFQIEKDGPEGKVWKPGVDVVRSIQGFARFVAMVDSEKGRALEARVQKIVAERGPASLASTRTVAKAKSHWYPPLKPLGEQPQLNLPHAQQDT

SEQ ID NO: 6228 - protein, 520 aa, unidentified
  source 1..520: note = Related to JAGQSB010000027.1; note = Acidobacteria bacterium
MQLLEKNKKILEEMVRLGFWPESQPLPGLNPEEQTRYETLSNELAAIRTELTRLKNREAMLKAIRAQRLADAKRKRLETKARNEEKRLERARTWKQIQAKQITYLGMGVSAGLSEQVGQSERLKTQGLPSWSTPAELAKAMNISVGELRFLTFHRRVVKHSHYIRFHMPKKTGGTRLISAPMPRLKELQHWVLEHVLEKIPIHDSAHGFRKHHSIVTNAQPHVGQPMLINLDLKDFFPTLTYRRVKGLFRQLGYSESIATVLGLLCTEPEMDQVKLDGQPFLIAKGDRHLPQGAPSSPMITNLICRRMDQRLAKLAASFGFIYSRYADDLSFSGAELDSRETGRLLKRIQNIVNHEGFVVHPHKTKICRSGQRKEVTGIVVNSFCSVDRKTRKKIRAILHHIEKDGPSGKNFGANPDVLEALLSYAQFMAMVNPEQGLPVLNKVKALANQIGYKRKTYRRLASSSKRFKRFVPDPALFAKPEPAPSLQKETAEQRPTPLPKQDLKTNAEAPAKKPWWKFW

SEQ ID NO: 6229 - protein, 465 aa, unidentified
  source 1..465: note = Related to PBIH01000081.1; note = Deltaproteobacteria bacterium
MNTQPATRQELYDRVRASSLQEVILEEMVRYGYWPKEGEIPEDPAEDIKREGELVRELGKLRSELEKLHDMEKLIKAARRKRMLESRERQKENRLRRIREREERAAAWKERKQHEILYLGEGHSGTLSSQVSDEERLAAHHLPIFHTPEDLALAMGLSIGALRFLCFSRKVSKTSHYQRFYLPKKSGGKRLISAPMQRLKSAQHWLLEHVLEQVAIHPSAHGFRKEHSIVTNAEAHVGAHVVVNIDIENFFPTFHYPRVWGCFRALGYSPAVSTCMTLLCTEPEILEIELDGELWFVQQGSRALPQGAPTSPTLTNILCRRLDKRLAGLARVHEFTYSRYADDMTFSGNDNVDVGKLLASLRSVLHQEGLKIHPNKTAVYRRGRRREVTGIVVNEKLSVSRKTLRRFRATLFQIEKDGPEGKTWGNGGDLFASIQGYANFVHMVDPEKGRAFLQRVQRIINLHSR

SEQ ID NO: 6230 - protein, 358 aa, unidentified
  source 1..358: note = Related to JACCQV010000612.1; note = Deltaproteobacteria bacterium
VELTYLGPRVSGGLGPTGDRRTSDGARLSAAGLPVVHTAAELATAAGLALGQLRFLAFAREVSTTTHYRQFTIPKRSGGDRVISAPMARLKKLQHWILEHMLNKLPLAPPAHGFRPGRSTVSNALPHLQSAIVINVDLKEFFPTVTYPRVKGLFRKLGYSEEVSTVLGLVCTEPDIVETVLDGITYYVARGPRRLPQGAPTSPAITNALCRRLDKRIAGFAAKHALTFTRYADDLTLSTKDPAGRVGACLKFLRKVAVDEGFTVHPEKVRVVRTGRRQEVTGVVVNEKPGVVRAELRRFRALLFQIEKDGPAGKKWGTPGTDVLTSALGFASYVAMVDPVKGAALRTQVLALRARFPT

SEQ ID NO: 6231 - protein, 479 aa, unidentified
  source 1..479: note = Related to JAHBVW010000058.1; note = Deltaproteobacteria bacterium
MSNLPPPRDRKELYERIALGGKDDVIAEEMTRLGFWSGEQAQLVDPPVEAARKAELRERLGKLREQAARMRNLVTLEADLKKQRMAASRKKREETKQRRLGERAAAKERTKATKARELGYLGPGVSAGLGPEHRASDVARLQAQRLPVVHTAAELAAAIGVSLGELRFLAFAREVSTTTHYRRFTIPKRSGGERVISAPRKRLKRVQHWVLAKVLEPLLGDPAASDPAHGFRSGRSTVSNAVPHVGAAVLVNVDLRDFFPTVTYRRVKGLFAKLGYGEEVATVLALACTEPDIAETQLDGLTYYVARGPRRLPQGAPTSPAITNALCRRLDRRVLGWADKHGFAYTRYADDLTLSSKDPAARVGACLGFLRQVAGAEGFTVHPEKVRVVRRGGRQEVTGVVVNERPSVPRVELRKFRALLHHIDMDGPAGKTWGRTDGADGGDVLAAALGFASYVAMVDPAKGTALRARVLALRAKYPG

SEQ ID NO: 6232 - protein, 473 aa, unidentified
  source 1..473: note = Related to JABFXX010000347.1; note = Kofleriaceae bacterium
MADLTPPKNRKELYERIARGGKEEVIVDEMVRLGFWPNTQPPPGDPPDEIRRMAELRTRLAQLRQQAQGLRNLAQLEIDLKKQRLAESKRRRELNKQKLLGERAAAKAATQEKKTRELTYLGKDVSAGLGPTLDRRTSDAPKLTTQKLPIANTAAELAAAMKVSLGQLRFLAFSREVSTTSHYHRFTIPKKTGGERVISAPHKRLKAVQHWILEHVLEPLALAEPAHGFVPGRSTVSNAVPHVGAAIVVNVDLKDFFPTVTYRRVKGLYKKLGYSEEVATVLGLLCSEPDIAQTELDGTTYFVARGPRRLPQGAPTSPAITNALCRRLDRRINGWAKKHGFIYTRYADDLTVSTRDRNAPVGKMLAFLRRVVTAEGFAVHPDKVRVVRRGRRQEVTGVVVNDRPGVPRDDLRRFRALLFQIEKDGPAGKRWGHNEGNVLEAALGYASYVAMVDPAKGEVLRAKVLALRAKYKQ

SEQ ID NO: 6233 - protein, 474 aa, unidentified
  source 1..474: note = Related to JAGPDK010000426.1; note = Kofleriaceae bacterium
MSEKAPANRKELFERIARGSKDAIILDEMQRLGFWPSQQSLPNEPPDEVTRLAAARARLAELHRNASRLRNLVELEREAKKQRMAESRARRVATKQKRLGERAVKRTATQQRKTIELRYLGATVSAGLQPGVGAITDGAAATIAQLGLPAWQTAADIARAMQVSIGTLRHLAYAREVSTINHYHRFSIAKKSGGVRVISAPQVKLKAAQRFILDELLAKFPLSNAAHGFAAGRSIVSNAAPHVAAAILINVDLRDFFPTVTYRRVKGLFRTIGYNEEVAIVLALLCTEPEITETQLDGVTYYVARGERKLPQGAPTSPAISNALCRRLDARLGGWCAKHGFAFTRYADDLTLSSHDRNANVGEALAVARRLVAAEGFVVHADKVRVVRQGGRQEVTGVVVNQKLSVPRDELRRFRALLFQLEHDGPTEKSWHGVGADGTGDVVQSARGYASYVHMVDPAKGAILLARLDALTKR

SEQ ID NO: 6234 - protein, 508 aa, unidentified
  source 1..508: note = Related to JABFRG010000606.1; note = Polyangiaceae bacterium
MSNRRQELYDRIRSTSKDEVVLEEMIRLGFWPRQGSMPLDPGDEVRRRGEIERELAALRTEQTRLGNLEALKKEALKRRLAESKEKQKETKARRERERVARAAAWAQKKAGEIGFLGTGVSGGLGHTETDEPKLVAQSLPALRSGTDIARAMGITVGELRFLAFDRRTSETSHYVRFTIPKKAGGERLISAPMPRLKSAQAWILENLLGKVALHDAAHGFRAARSIVTNARPHVGAPLVINVDLKDFFPTLTLGRIKGAFRALGYGDHVATVLGLLCSEPDVDQVVLDGKTFYVANGKRRLPQGAPTSPAITNIVCRRLDRRLASAAQKHGFVYTRYADDLTLSSIDPAANPARVLGVLRWIVAGEGFVVHPKKTRILRKGARREVTGVVVNEKLSVSREQRRKFRAFLFQLDKDGPQGKQWGASPDVFASALGYAAYLAMVDPERGKPVLAQARAIAKKHGWKGKPRPVKAVQAAPMPPVAPPVAEPMAPTSPEAPAEPKKKWWKLF

SEQ ID NO: 6235 - protein, 527 aa, unidentified
  source 1..527: note = Related to JAGQIK010000716.1; note = Myxococcales bacterium
MTYRRYSTQPSSRQELYDRIRDSSKDEVILEEMIRLGFWPAAGTMPDDPADEIRRRGELEAELRALRTERSRLHNIEALKKEARKRRMAESRRKRQETKERRLQQRVERAAVWAERKKSELLYLGEEVSAGLGEAEPDAQRLARHGLPSFSDAAQLARAMGLSLGALRQMCFDRATSRTTNYIRFVIPKRTGGVREISAPRPRLKEAQRWVLDNILSKIALHDAAHGFRDKRSIVSNAHPHVQPAVLVNVDLKDFFPTVTYRRVKGMFRKLGYSESLSTVLGLLCSEPRATELSLDGVTYYVALQERALPQGAPTSPAVTNIICRGLDARLCAIASKLGFVYTRYADDLTFSSKDKTVNVGRLLRQLRKIVDDEGFVVHPDKTRVLRAGRRQEVTGIVVNHTPNVTRDVLRKFRATLYQIEKDGPQGKTWGHSDDVIAAVEGFANYVAMVNPDKGRPLVERARALVKKHGKKPTPPKKAKKPAASTAPPPQARSEAPAATAAQSEPPETDGDDGGGKKKKKKWWKIF

SEQ ID NO: 6236 - protein, 528 aa, unidentified
  source 1..528: note = Related to JAFCZD010000018.1; note = Deltaproteobacteria bacterium
MSRPSSRQELYDRIRESSKDSVILEEMIRLGFWPQAGVLPEDPADEIRRRGELEGRLRSLRTEQSRLSNVDALKREARKRRMVESRRKQKETKERRLRERRERAEAWKERKGREIVYLGEGISAGLSDIKLDATKLAGQGLPSFADAAAVAQTMGLSMGELRRFAFTRTTSKTTNYMRFSIPKRTGGERHISAPLPRLKEAQRWILDHVLAKVPLHEAAHGFVGGRSIVSNATGHLQPTVLVNLDLENFFPTVSYRRVKGLFRSLGYSEQVATIFGLLCTEPEVTELELDGATYYVALEERLLPQGAPTSPAITNLICRALDARLTSIATALGFHYTRYADDLSFSAQGADADAGRLLRRVRHVVAEEGFVVHPKKTRVLRRGRRQEVTGIVVNGDRPSLARDVLRRFRATLFQLEKDGPAGKRWGRAVADEGDDVIAAVEGFANYVVMVDPEKGQLLQERTRKLVARYGKKPTPPRGGSGGSGGGGGPRPAAEAPAAAAQAPVVEAPPTAPTEAPSKKKKEKWWKVF

SEQ ID NO: 6237 - protein, 544 aa, unidentified
  source 1..544: note = Related to JAEUJZ010000010.1; note = Myxococcales bacterium
MAEPPRTRQELYERIVATSKDEVVLQEMIRLGFWPAAGTLPEDPADEVRRRAELQRQLDRLHEQNRHLYNEQALIKELRLRRLAESKRKQQETKERRERERLARAEAWKQEKTRSIVYVGEGVSAGLGKREAKPERLKEHGLPNFTSAADLASAMKISVGALRFLCFARKTSSVSHYVRFRIPKKSGGERLISAPMPRLKAAQSWVLHEILEKLALHTAAHGFVRGRSIVSNARPHVGHALIVNVDLKNFFPTVGYPRVKGLFASLGYSEEVATLLGLLCTEPDVEELVLDGQRYFVARSERHLPQGAPTSPAITNLLCRRLDRRLQKMADELGFVYTRYADDLTFSAKSEDVGQAAEVLRRLRNIVAHEGFVVHPEKTRVLRRGRRQEVTGVVVNHKPGVPRDVLHRFRATLFQIEKDGPSGKRWGACKDVLASIRGFASYVRMVDPARGTPLCARVDAIVAKYSGKPSPPAPSGAPAKKPDVPKPDAAKPGAAGSVPAATKTAEALAKAAPTPASVVSDAKEPSSPASDAKTPTGKKWWKVF

SEQ ID NO: 6238 - protein, 558 aa, unidentified
  source 1..558: note = Related to AFWT01000002.1; note = Thiorhodococcus sp.
MLAPCGSPPSKRLVFLGASRTLEQWLAVRPPQMHANRPEPSRAMSQPSSRQALYDRIRKSSKDSVIVEEMIRLGFWPAAGTMPEDPADEIRRRAELEAQLRALRTEQTRLHNIEALKREVRKRRMAEARERRKETKARKLAERQARAETWKAKKETDIGFLGEGVSAGLGHKGCDAERLAEHGLPELADAAAVAAAMGIDLGTLRFLAYACTTSRVSHYVHFFIPKRTGGKRAISAPMPKLKHAQHWILANVLDPVALDEHAHGFRHGRSILTNAQPHLGSRVVVNCDLQNFFPTVSYRRTKGLFQSLGYGEQVASIFGLICTAPETQEVELDGQRYFVALGDRVLPQGSPASPAITNLICRGLDRALEKTARQLGFRYTRYADDLSFSSDDANADVGRLLGRVRWLVQRHGFVVHPDKTRVLRQSRRQEVTGIVVNERPAVPRETLRRFRATLFQIEKDGPAGKRWGRATGDNGVDLMAAIEGFANYVAMVDPAKGRPLKAQVAALIARYPKQATPFKGRRRPSQSTDSPTSEPKRDATAPEVVDGTKKKKNWWKLF

SEQ ID NO: 6239 - protein, 417 aa, unidentified
  source 1..417: note = Related to JAEUKG010000966.1; note = Myxococcales bacterium
MSGDRPRTRQELYDRIRETSKDEVILEDMVRLGFWPRTGEIPQDPADEIRRRGDLERQIAALRTEQARLSNVEALRKELKRRRLLESKEKQKATKERRERERLARAAAWAEEKKRAIVHLGAGVSGGLSKGAPPNLEKLTALGLPRLATAAEVAAAMGIAVPELRFLAYARKVSQKTHYVRFTIPKKTGGARLISAPMPRLKRAQRWILDAVLAKVALEGPAHGFVVDRSIVTNARPHLGSQVVVNLDLRDFFPSLGFRRVKGMFEGLGYGEEVSTIFALLTTEPEIDEVELDGQTYFVATTARKLPQGSPASPAITNVVCRRLDKRLAGMARALGFTYTRYADDLTFSSKDRAADVGKLLRRVRWIVKQEGFAEHEKKTRVLRRGRCQEVTGVVVNDKPSVPREALKRFRALLFQL

SEQ ID NO: 6240 - protein, 519 aa, unidentified
  source 1..519: note = Related to JAESTW010000014.1; note = Kofleriaceae bacterium
MSKQPTTRKALYERIAKSSLDEVILEEMIRLGFWPSSSDAPSDPAEEIRRRGHLQRRLNEIRTEQLGLQNEAKLKEEARKKRMSDARERRLQNRERRLRERSERRAQWHQKKQEEIGYLGDGFSAGLGKRECDDKRLQAQGIPVLGDAMSLSNAMGISLGQLRFLAFSRKTSRYSHYQRFSIPKKDGGVRMISAPMPRLKAAQTWILETILNPLPMHDAAHGFRPGRSIVSNATPHIGADVVVNLDLENFFPSVGYRRVKGLFGHFGYSEEVATILALLSTEPELTQIKLDGDTYYVAKGERFLPQGAPSSPAITNLLCRRLDRRLEGICNKLDFRYTRYADDLSFSARGEPAKLVGKLLSQVEWLVAEEGFKIHPDKTRVFRRGRRQEVTGLVVNDGLSVPRAVLRRFRTLLFQIEKDGTDGKRWGASDDVLASAMGFANFVAMVQPEKGASLQTQVRKLLKTYGKAKAPRAQSAESKGTESKGAESKGTGRGPTPTSDETDKKTEDLAPKKKWWKLF

SEQ ID NO: 6241 - protein, 525 aa, unidentified
  source 1..525: note = Related to NZ_JAHXBG010000009.1; note = Cystobacter gracilis
MAQQPPRNRQELYERIQSISKEEFVLEDMVRLGFWPARSGVPGDPRDEVHRKAELEKQIRALTSEQARLGNLEKLKKELRKKRLAESKARQKETKERRERERVARAEAWKARKAREILFLGRGVSGGLNHRTPEAPKLERQGLPRLETPEALAQALGLSVGQLRALCYARTVSTKTNYVRFALPKKTGGLRLISAPLPRLKAAQHWVLKNLLEKVPMHEAAHGFRPGRSIVSNARPHVGAAVVVNLDLKDFFPTVVYPRVKGFFVKLGYSEATATALSLLCTEPDMEEVELDGQRYFVAQGGRRLPQGAPTSPALTNLLCRRLDRRLKGAAGKLGFTYTRYADDLTFSVPRGGTGDVGKMLRLARFVIRHEGFFPHPEKTRVLRRGGQQEVTGVVVNDKPGVDRETLRRFRALLHQLEKSGPEGKKWNGSTDVIASVVGFANYVAMVDPTKGKAFQDKARALERKYGRKTVLPPRPKAPAAAQPGTATVAPTPPSSGTAAPGGPPKPEEPQEPNEPPKKKWWKLF

SEQ ID NO: 6242 - protein, 520 aa, unidentified
  source 1..520: note = Related to JAFGNZ010000091.1; note = Myxococcaceae bacterium
MAQQPPRNRQELYDRIRETSKEEVIFEEMVRLGFWPARSGVPGDPADELHRKADLRAQLRALTTEQSRLGNLERLKKELRKKRLAESRRKQQETKERRERERVARAEAWKARKAKELLFLGRGVSGGLSHRTPDVAKLERQGLPKLETPEVLAQALGMTVGQLRGLCFARTVSTRTNYVRFALRKKTGGLRIISAPLPRLKAAQHWVLENLLEKLPMHEAAHGFRPGRSIVTNALPHVGAAAVVNLDLKDFFPTVVYPRVKGFFVKLGYSEATATALALLCTEPDLEEVELDGQRYYVAQGGRRLPQGAPTSPALTNLLCQRLDRRLKGVGRKLGFTYTRYADDLTFSLPPGGPGDVGKLLRLVRFVIQKEGFVPHPEKTRVLRRGRQQEVTGIVVNDKPGVDRETLRRFRALLHQLEKSGPEGRTWNGSTDVIASAVGFANYVMMVDPTKGRVFLEQARALEKKYGRKAVVPPRRKAAPPAQAGTAAAPPSGARLGEEPKSGEPASPGAPAKKKWWKLF

SEQ ID NO: 6243 - protein, 533 aa, unidentified
  source 1..533: note = Related to CP011509.1; note = Archangium gephyra
MSSQPPRNRQELYDRIRAGSKDEVVLEEMVRLGFWPARSGLPGDPADVVHRRNELQGEIRALTSEQSRLGNLEAMKRELRKRRLEESRRKQQETKERRERERLARAAAWKERKGKELLFLGRGVSGGLSERTPDEAKLTRLGLPVLATPEVLAQTLGLSVGKLRALCFTRTASTTSNYVRFQLPKKTGGTRLISAPLPRLKAAQTWVLENILEKVPVHDAAHGFRAGRSIVTNARPHVGAGVVVNLDLKDFFPSVLYPRVKGVFVKLGYSEATATVLALLCTEPDVEEVELDGQRFFVAQGGRRLPQGAPTSPALTNILCRRLDRRLAGAARKLGFVYTRYADDLTFSAHGPGPHDAGELLRFVRWLVGEEDFTPHPEKTRVLRRGRQQEVTGVVVNDKPGVDRETLKRFRALLHQLEKSGPEGKRWGNSGDVIASAVGYANYVAMVDPVKGKALQQKARALEARYGRRPSPPPRAKAAKGAAQAGSSAPVSSAAPPAQAPETPAAAPAAPAATPDSGQKPAEPPKKKWWKLF

SEQ ID NO: 6244 - protein, 515 aa, unidentified
  source 1..515: note = Related to NZ_JADWYI010000001.1; note = Archangium sp.
MSSQPPRTRQELYDRIRATSREEVILEDMVRLGFWPARTEQPGDPAEVIHRRNDLMGQLRALTTEQHRLGNLEAMKRELRKRRLVESKRKQQETRERRERERVAKAAAWRERKGKELLFLGRGVSGGLSARETDEARLTRLGLPVLTSPEALAEALGLRVGQLRALCFTRTASTTHHYVRFLLPKKTGGTRLISAPLPRLKAAQAWVLTQVLEKVPVHEAAHGFRPGRSIVTNARPHVGAAVVVNLDLKDFFPSVGYRRVKFAFMHLGYSEATATVLALLCTEPDVDEVELDGRRYYVSQGTRRLPQGAPSSPAITNLLCRRLDARLTGTARALGFVYTRYADDLTFSATGPGHHDPGTLLRRVRWLVKQEDFTPHPDKTRVLRRGRQQEVTGVVVNDKPGVDRQTLKRFRALLHQLDKTGPEGKRWGAGADVLSSAVGYAHFVAMVDPLKGRALELKARELERRYGRRPPPAPPTPPPAATAAPAPEPTPPPAPPTEPTPASPEAPKKKWWKLF

SEQ ID NO: 6245 - protein, 542 aa, unidentified
  source 1..542: note = Related to JADIZX010000005.1; note = Myxococcales bacterium
MDRRQQLYDRIRSTSKDEVVLEEMIRLGFWPARGTLPSDPGDEIRDLAEAQRELAALRTEQSRLHNLEALKKELFKRRLAESKARQAETKARRERERVARAEAWKNEKTRAIVFLGRGVSGGLADTTCDEARLQKQGLPVLRTAEDLARAAGVTVPELRFLAYARTTTAARVSHYRRFQIPKKTGGVRIISAPMRRLKALQRWLLDAVLARVEVHDAAHGFRAERSIVTNAGPHVGARVVVNLDLKDFFPTVTLPRIRGVFRSLGYGEHLATIFALLASEPDTVRVALDGAEYDVAQGPRRLPQGAPTSPAITNVLCRRLDRRLFHAAKKLGFAYSRYADDLTFSSTSKEENAGQLLKQVRFIVAAEGFVPHPDKTRVLRKGRQQEVTGVVVNDKLGVDRVTLRRFRALLHALDKDGANGKRWGSSPDVFASACGFASYVAMVDPVKGRALLARAREIAARHGWKGPPRGPDRSGGPSGPGGAPKPPAPATPSERAPAPVAGLPGEPLAAPPTPEPPAPEPPAPASPPTPETPAKKKWWKLF

SEQ ID NO: 6246 - protein, 528 aa, unidentified
  source 1..528: note = Related to JADJQX010000001.1; note = Myxococcales bacterium
MAQDKRQALYDRIRATSRDEVVLEEMIRLGFWPARGEVPHDPADEIRARTEMQRELSALRTEQSRLGNLEALKKELYKRRLAASKAKQAETRARRERERLARAEGWKIRKAGDIVFLGREVSGGLSDTTCDEAKLTKQGLPVLRTAVDVARAAGVGVPELRFLSYARTTSRISHYRRFAIPKKAGGVRVISAPMPRLKRLQRWLLDSVLSHVEVHDAAHGFREGRSIVSNAKAHVGARVVVNMDLSDFFPGVLFPRVKGMFRALGYGDFVASVLALVATEPDMQKVVLDGRTFHVAEGPRRLPQGAPTSPAVTNVLCRRLDRRLFLAARKLGFVYTRYADDLTFSAHDDASAGRTGQLLAQARFIVEEEGFTPHPKKTRVLRRGRRQEVTGIVVNDGLGVEREKLRKFRALLHSIRATGIEGKTWGDSPDVLASARGFASYVAMVSPEKGRALLGQVAELEARYGAARPPRASKEGMHAKAAPTSAGHATPVATSEAPRPENVPPEAPKPEAPKPEAEAPKKKWWKLF

SEQ ID NO: 6247 - protein, 468 aa, unidentified
  source 1..468: note = Related to JAIOQA010000029.1; note = Deltaproteobacteria bacterium
MSDRRQALYDRIRASSKDEVILEEMIRFGFWPAAGLPGDPAEEVRRQGELQQRLTALRAERDKLANVNELRREARKQRLRASKDKRRETKARRLRERAARAAAWRARQALELTFLGAEVSGGMQDTTCDRARLAAQGLPAFATAAEVAQAMGITVGELRFLAFARRASRISHYRRFTMPKKSGGVRAISAPMPRLKRAQHWLLAQILAKVPTHDAAHGFCAGRSIVTNARPHVGAAVVVNLDLQDFFPTVELPRVKGLFRALGYGEQVATAFALLATEPVTEAVELDGQVWHVAASAAARRLPQGSPASPAITNLLCRRLDRRLRGAATALGFTYTRYADDLTFSATAPAAVERAGKLLTQVRWLVGQEGFVVHPDKTRVLRRGRRQEVTGLVVNERLGVPRDQLRRFRALLHHLDRRGLEGARWGASGDVLTSAAGFASYVAMIDPVRGAPLVAEVARLAARLAPAR

SEQ ID NO: 6248 - protein, 548 aa, unidentified
  source 1..548: note = Related to JAGPCY010000008.1; note = Kofleriaceae bacterium
MPDKRQELYERIRASSKDEVILEEMIRLGFWPAQGHLPDDPADEIRQRAALEQQLAALRTEQARLHNIEALKKALRKQRLEASKAKQRETKERRERERVARAAAWREHNQRAIGYLGRGVSGGLNQTAADRAALTRHGAPVLETAAELAAAMGLTIPQLRFLAFARATSTVNHYQRFAIPKKTGGLRRISAPMPRLKAAQRWILDHVLAGVALHDAAHGFRPARSIVTNAAPHVGRDVVVNLDLKDFFPTLTYPRIRGVFRGLGYGPAVATILALLTSEPDIDTVELDGQTFHVASGERKLPQGAPTSPMITNIVCRRFDARLAGAARKLGFTYTRYADDLTFSGPRTADAGALLSAVRMIATAEGFAEHPDKTRVLRRGRQQEVTGVVVNQRLAVDRATLRRFRALLFQIDKDGPAGKTWNDAPDLFAAIIGYAHFVHMVDATKGAALVAQAKALAARHGWRPARRPPPKTRGGSGGGGGGPGGSGPGGSGSRPGEAERTATSTGPTPSTEPAQPAQPGPPDAPSPPDAPSPDAPPPAKKKKWWQIF

SEQ ID NO: 6249 - protein, 514 aa, unidentified
  source 1..514: note = Related to NZ_NETK01000001.1; note = Nannocystis exedens
MAGQPTSREALYERIRSTSKEEVILEEMIRLGFWPAQGTVPHDPAEEIRRRGELERQLAELREKSRKLYNEKVLIAEQRKARLAESRRKQKETKARRERERQERAQKWAARKAGEILHLGEDVSGGMSHKTSDPELLKGEGLPVLASAEELAKAMGLEVNALRFLAYNRKVSRVSHYHRFLLPKKTGGFRLISAPMPRLKRAQTWALEHIFAKLRVDSAAHGFVAGRSIVSNAKPHVGADVVVNFDLKDFFPTVTFPRVKGAIRRLGYSESLATALALVCTEPDLEEVALDGVTWFVARGPRHLPQGSPCSPAITNLLCRRLDRRLGGLAQALGFVYTRYADDLTFSGRGEAAESKRVGKLLRGVADIVAHEGFVVHPEKTRVMRRGRRQEVTGIVVNDRPSVPRDELRKFRATLFQIEKDGPAGKRWGNGGDVLAAVHGYACFVAMVDPARGQPLLARARALLAKHGGPSKSPGGSVPRVPSPNPQSVNAPEAPKPAAPASPAAPAKKGWKLF

SEQ ID NO: 6250 - protein, 520 aa, unidentified
  source 1..520: note = Related to JAEUJW010000075.1; note = Myxococcales bacterium
MASQPSTREALYQRIRESSKDEVILEEMIRLGFWPAAGDVPNDPADEIRRRGELQRQLDELREKGRRLYNEKALINEARKARMAESRRKQAETKARRERERGEKASAWAKRKSGEILYLGEGESGGLSQKTSDPSKLAHFGLPKLDTAEQLAAAMGIEIKALRFLAYNRRTSKVSHYRRFFIPKKTGGQRLISAPMRRLKTAQTWVLTNILDKVTLHEAAHGFRQGRSIVTNARPHVGSAVVLNLDLKDFFPTVTVRRIKGVFRALGYSEAVATALALVCSEPEVDEVALDGETYYVARGPRHLPQGSPASPGITNLLCRRLDRRIEGLAQSLGFVYTRYADDLTFSARADRAGSVNVGKLLRAVKDIVEHEGFNVHPDKTRVMRRGRRQEVTGVVVNDRMGAPRAMLRKFRATLYQIEKDGPMGKKWGNGGDLLAAIHGYACFVAQVDADKGKALMAQVDRIFNKYGKPRRPGGGGGKGPGGGGGKTPDAARPATGATTQKPAEPAPEAPKKKPAWKLF

SEQ ID NO: 6251 - protein, 528 aa, unidentified
  source 1..528: note = Related to JADKFZ010000012.1; note = Nannocystis sp.
MAAGQPSTREALYERIRASSKDEYILEEMIRLGFWPASGAAPNDPADEIRRRGELQRQLDELREKGRRLYNEKALIAEARKLRMAESKRKQKETKERREGQRIARAQLWAQRKAKELLYLGEGVSGGLSDRVSDAGKLKTHGQPHIDSVEQLAQAMGVELKALRFLAYSRRTSRVNHYRRFLLPKKTGGHRLISAPMPRLKKAQRWVLERVLDKVALHDAAHGFRTGRSIVSNARPHVGADVLVNLDLKDFFPTVSLPRVKGVFKSLGYSEAVATALALVCTEPEIDEVVLDGITYFVARGQRHLPQGSPASPGITNLLCRRLDRRLAGLAASLGFVYTRYADDLSFSARRPAVGSIKVGKLLRAVADIIRHEGFTVHPDKTRVMRKGSKQEVTGVVVNDRLSVDRATIRKFRATLYQVEKDGPAGKRWGAPGGDLLASLHGYACFVAQVDPQRAAPLLAQVRRIFEKHGRPLRGGPGPGKPPGGGGGKPPEAQVAGKPGPQAEAPRTESKPEAESTAPKKKPFWKLF

SEQ ID NO: 6252 - protein, 519 aa, unidentified
  source 1..519: note = Related to JAGQIT010000589.1; note = Myxococcales bacterium
MSAKPNRRQELYDRIRNSSKDEVILEEMIRLGFWPRAGEIPADPGDEIRRRGELQRQLDELRRKASRLYNEASLIREARKQRLADARRKKQETRERRERERQERAAAWAARKQHEVVYLGEGVSSGLAEHTSDVGRLQAAGLPLFADPGALAQAMGVPLGELRFLAFHRRVATLTHYRRFQIAKKSGGTRLISAPMPRLKRAQAWVLRNVLDKVALHEAAHGFRGGRSIVSNAAPHVGADVVINLDVENFFPTITLPRVKGVFRALGYSEAIATILALLCTEPETTEVELDGRTYYVGLGDRVLPQGSPASPAVTNALCRRLDRRLDGLAEQLGFEYTRYADDLTFSRRGDIRSTEVGELLGKAADIVRHEGFRVHPDKTRVMRRGRQMEVTGVVVNDKLSVDRKTLRRFRAALFQVEKDGPAGKRWGDGPRLLASMHGYASFVTMVDRARGEPLLRRVQALIERYGVGASNASAAPGEGKAAAPTATGEAPSAAQTDAPEPEPTPPAPQPKKKKWRLW

SEQ ID NO: 6253 - protein, 508 aa, unidentified
  source 1..508: note = Related to JACKDU010000005.1; note = Myxococcales bacterium
MSQRPTTRQELYERIRASSKDEVILEEMIRLGFWPAQGEMPTDPAEDIRRRGEIERQLEELRRKASRLYNEKSLIQDARKRRMAESKRKKEETRLRREQARRERAAAWRERKQNELVYLGEGVSGGLGQHEGHPERLAAAGLPAIADARELARLMGVSVGDLRFLAFHRAVATITHYRRFQIPKKSGGTRLISAPMPRLKAAQGWVLRSILDRVDLHAAAHGFRPGRSIVSNAQPHVGAAVVVNLDLQGFFPTITLPRVKGVFAALGYSESVATILALLCTEPETFEVELDGRTYHVGLGPRVLPQGSPASPAITNVLCRRLDRRLQGLADQLGFTYTRYADDLTFSRKKGASSAEVGEMIRKAVDIVGHEGFTVHPDKTRVMRRGNHQEVTGVVVNDKASVDRRTLRRFRATLFQVEKDGLAGKRWGAGGDLLASMHGYASFVAMVDRERGAPLLARVKRLMALHGRGPSGGGGGGGSAGPRPAATTPEPAQAPAPAPEKKKRWKLW

SEQ ID NO: 6254 - protein, 523 aa, unidentified
  source 1..523: note = Related to JACKDW010000029.1; note = Myxococcales bacterium
MSRQPSTREELYERIRNSSKDEVILEEMVRLGFWPAASGQPGDPGDEIRRRGELQRKLNDLRTKVSRLYNEQQLISDQRKQRLAESRRKRQETKERRERERQQKAELWRQRKEREVLYLGDGVSGGLLERKTDQARLVGGGLPVLAGPEAVAASMGITVGALRFLAYSRRVSRISHYRRFSIPKKTGGRRLISAPMPRLKAAQRWILENILERVPVHEAAHGFLERRSIVTNAVPHVGADVVINLDLKDFFPTVTYERVKGLFVSLGYSESVATVLALLSTEPEVAELELDGNSYYAAQGPRHLPQGSPASPAITNLLCRRLDRRLQGLARKHGYQYTRYADDLTFSARGMVSTRSSEVGRLLRGVADIVTHEGFEVHPEKTRVMRRGRRLEVTGIVINDKLSVDRKTLRRFRATLFQVERDGPEGKRWGESKDLMAALLGYASFVAMVDPQRGRPLISRVRAVHRAHGYQPAAPKRRAAPPTAASTAPSSPARDTTASVPTPDRDPDPTPPPGKKKKKWKLW

SEQ ID NO: 6255 - protein, 326 aa, unidentified
  source 1..326: note = Related to JAGQQJ010001302.1; note = Planctomycetaceae bacterium
KKTGGIRKISAPMPRLKRLQEWILSNILEKVPLQDAAHGFRRGRSIVTNAAPHVGQDVVLNMDLENFFPTIDFPRIRGVFRKLGYSGQISTVFALICSEPEIEEVQLDGQAYFVATTDRRLPQGAPTSPAITNIICRGLDARLTGVAQRFGFTYTRYADDITFSGSGGALQQIGKILRQCKYIIEQEDFKVHPQKSRVFRKSSRQEVTGLSVNERLGINRQLLRRFRALLFQIDRDGPSGKHWGHSTDVMTSIEGFANFIAMVNPDQGQIFQQRVRQLHEKHGRGQRMYNQRNRWNDQEVVTHLPDSSEKPELPAEMKKKPWWKFW

SEQ ID NO: 6256 - protein, 518 aa, unidentified
  source 1..518: note = Related to JAGQQQ010000127.1; note = Planctomycetaceae bacterium
MPTRQELYDRIRESSRQEVILEEMIQLGFWPSGSQVPYDPKEDLRRERELQQELQQLATKDRNLQNIDYVRAQARKQRLAESRQKQKETKERRLREKQERASAWQARKVSEILYLGEGVSNSLNQRESNHEKLSSAGLPRFDGVEDLAQLMGVTVGELRFLAYDRAASQVTHYRRFGLKKKTGGIREISAPMPRLKRAQEWILKQILEKVEVHDSAHGFRPGRSILTNARPHVGQDVVINLDLENFFPTVTFPRIRGVFRSLGYSGQLATLLALICSEPEKSEVILDGQHYHVARSERRLPQGAPSSPALTNIICRGLDARLAALASRLEMTYTRYADDITFSGSGEATQTIGKVLRQARYIIASEDFRIHPSKTRILRKGSRQEVTGLIVNEQLGVNRELLRRFRALLYQIEVSGPAGKHWGGKHDVMTSITGFANFVQMVDPDKGRPLQEKVASLQKKHGIGQRRYASRTPWNPSTVAPDQPSKPGGEEVAYPDSGPRDRFRNGTPEPKKPWWKFW

SEQ ID NO: 6257 - protein, 524 aa, unidentified
  source 1..524: note = Related to DLZC01000224.1; note = Planctomycetaceae bacterium
MTTRQEIYDRIRESSRDEVILEEMIRLGFWSRDTDKPEDPAEDIRRQGELEREQRRLTQEAARLRNIEALHEEARRKRMEEFRRRRQETKERREQERVQRAAAWQESKQKEIVYLGDSVSTTLNQQTTDEDRLRSNALPNLQSIVEVAEAMEISVGELRWLAFHRRTAEITHYRKFAVPKKTGGVREISAPKPRLKRIQHWILHHILDQVEVHDAAHGFRRDRSIVTNAQQHTSSGVVVNVDIQDFFPTVTFRRIRGVFKSLGYSGQISTVFALLCSEPERREVALDGRTFHVARTERRLPQGAPTSPALTNVICRGLDARLHTLSQKNGFTYTRYADDMTFSASGEATQNVGRVLRQVKHAVSQESFQLHPDKTRIQRASRRQEVTGLTVNSGVSVPRETLRRFRAVLFQIDRDGPGGKRWGASQNVMVSIEGFANFVAMVDPERGAKLQQTVAELQDRHGRGRGTVTVRQRWTFQRPEPVSSPPGPSETAVSNPLQAAASPPGADQSAPKPRKPWWMWWKFW

SEQ ID NO: 6258 - protein, 532 aa, unidentified
  source 1..532: note = Related to NZ_CP036281.1; note = Polystyrenella longa
MRSRQEILDQIRETSRDEFILDEMIRRGFWPKEGELPEDPADEIRQREELRRKLHSLTTEDRKLSDVEKLKREARRQRLAESRLKRQETKERRLRERAEKAEAWREQYTRDIVYLGSDVSGGLNQQKIEIEELQKRGLPELHSVEELAEAMETTVAELRFLAFDRRTSTTTHYQRFAIPKKTGGIRNISAPMPRLKRAQEWILWNILDKIELHPAAHGFRTGRSIVTNAEPHVKAEVVINVDLENFFPTVTWRRVRGLFRKFGYSEQLATVLALICSEPEVTEVQLDQKTYYVQQSERRLPQGAPSSPAITNILCRGLDARLTGLAEKLGFTYTRYADDLTFSHAGQGSAAVGRMLRQVSYVVEQEGFQLHPEKTRIFRKGSRQEVTGLVVNERVNIPRKKLRQFRATLYQIEKDGPEGKHWGNSPNVLEAIEGYANFVAMVDPEKGREFQLQVRTIIEKEGRTQRNDVQRDRWNPNLASEEISEIPATGAVPPSVSSLLTTQEIEPVAPAAGEVFESKSKPWWMFWARWFN

SEQ ID NO: 6259 - protein, 521 aa, unidentified
  source 1..521: note = Related to JABMRB010000852.1; note = Candidatus Nealsonbacteria bacterium
MDSQPTSRQELYDRIRESSKDEVILEEMIRLGFWRDAEAVEGDPADEIRRKGELERQLKALSTERARLQNVEALKRALRKQRLEDSRSNRKETKERRLRERQERARAWQQRKTREIVYLGDGVSAGLAEHELQREKLQAAGLPVVATPDELAHAMGVSLGELRFLAFSRRTSTTTHYKRFFVPKKTGGQRLISAPMPRLKRSQEWILQNILEKVPLHDAAHGFRRGRSIVSNARPHVESDVVVNLDLKDFFPTVTYRRIKGMFRNLGYSEAIAVVLALICSEPDVDEVELDGRTYYVARQQRLLPQGAPTSPAITNIICRGLDGRLARTAEMLGFCYTRYADDITFSGSGDAAANVGRALRRIGYAVEKEGFEVHPDKTRVLRRGRRQEVTGLVVNDRLNVSRKLLRRFRATLFQIHRDGPAGKRWGNSNDVIASIEGFANFVAMVDPEKGAGFQRKVREIIKSHGRGGGRAYPQRSRWVPKTPPAEGLAMEEEPLTAETVQGRVSRVQKPREKKPWWKFW

SEQ ID NO: 6260 - protein, 509 aa, unidentified
  source 1..509: note = Related to JABMRP010000303.1; note = Planctomycetes bacterium
MASQPTTRQELYDRIRESSKNEVILEEMIRLGFWPRGDTIPEDPADEIRRRGELERQLRSLVTERARLGNVEALKKALRKQRLDQSRQKQKETKERRLRERAERAEAWKKRKAHEIGYLGEGVSAGLDNHQGDHEKLTAAGLPVFDTPEQLARAMGIGVGELRFLAFNRRTSTTSHYRRFLLPKKTGGHRKISAPMPRLKRAQEWVLATILEKVALHDAAHGFRRGRSIVTNARPHVGADVVMNLDLKDFFPTVVYRRIKGVFRNLGYSESVATVLGLLCSEPEVDEVRLDGRTYYTARSKRFLPQGAPTSPALTNIICRGFDARLSRTAADLGFAYTRYADDVTFSGPGLPAENIGRALRRIEHIAGAEGFEVHPGKTRVLRSCSRQEVTGLVVNQRVNVSRKMLRRFRATLFQIERDGPAGKHWGHTDDVIAAIEGFANFVAMVDAEKGKGFKRQVERIIQKHGRGGGRVRVQRSRWVSSPPPVAAVVDTVESPPEPEKKKPWWKFW

SEQ ID NO: 6261 - protein, 509 aa, unidentified
  source 1..509: note = Related to NZ_CP036433.1; note = Lignipirellula cremea
MTDPPRTRQELYDLIRETSREEFILEEMIRLGFWSESTAPENPANEIRRQAELQRELQSLLTENRRLVDLDKAKKALRRERMAESRRRQKETKERREAERQARAAAWQAEQERSLAYLGEGVSAGLMRYEVDDRRLARNGLAGNPLATPLALAQAMQISLGELRFLAFSRRTSQTTHYQRFQIPKKTGGLRSISAPMPRLKRAQEWILRNVLENVPMHPAAHGFRTGRSIITNAQPHVGAAIVANVDLQDFFPSVGYPRIKGLFRTLGLSEATSTVLALLCSEPEIDEVVLDGQTYYTARSERRLPQGAPTSPAITNLLCRGLDARLQSNAEKLGFVYTRYADDITFSSQNAQADVGRALRRIRHVVASEGFTVHPDKTRILRRGSRQEVTGLTVNDRLGVSRELLRRFRAVVHSVEKTGPAGKRWGESPHLMSSLAGFANFIAMVDPEKGKPWQARVAALIEQHGRGPDLRSQRKRWVSPVPAAAAAPSTETASKPSESSNRPWWKIW

SEQ ID NO: 6262 - protein, 505 aa, unidentified
  source 1..505: note = Related to nan
MSRRPSTRQELYDRIRQSSKDEVIIEEMIRYGFWPKQSNLPNDPAEELRRIGELERRISALATEASRLNNVDAMRREARKRRMAEARARREETKRRHEAQRRARAEAWAAKKREEIVYLGEGFSGGLGQREGQSLPGLPDLQGAGALARAMEIEVGQLRWLAFHRRVSATTHYVRFQIPKKTGGVRNISAPMPRLKRAQRWIKEQILDKIELHEAAHGFVPGRSIVTNASAHVGRRVVINLDLQDFFPTLSFSRIYGVFRSFGYSPEASTLLALLCTEPEVAEVELDGRTWYVHTSERRLPQGAPSSPALTNIVARRLDRRLAGLAAHLSFTYTRYADDLTFSSDAADASIHRLIRAVEGIVSGEGFVVHPGKTRVMRRASRQEVTGLVVNDRLGVPRRLVRRWRATLFQVRRDGPGGKRFGLGSDVFASLSGFAAFVHMVDEARGARMLSEVAEVAAAHGWAPPPRRSTETRATEASSEASSEAPGVPASPSAGWGGPTWEWPL

SEQ ID NO: 6263 - protein, 554 aa, unidentified
  source 1..554: note = Related to JAHQVJ010000249.1; note = Myxococcales bacterium
MSERPQDRQELYDRIRESSKDEVILEEMIRYGFWTQEGRPDDPAEEIQRKGELERTVAALATEASRLRDVDAMKRAARKQRMQEAKARRIETKERREAQRQAKAKAWAERKTRELLYLGAGVSNGLGQQAEQIQPGLPSVPSAPDLASAMGISLGELRWLAFHRKVSTTSHYARFQIPKKTGGTRLISAPMPRLKKAQHWIRAEILERVEVHEAAHGFVRGRSIVSNAAAHVGQRVVINLDLRDFFPSVHYPRVFGLFRSLGFSPETSTVLSLLCTEAEVEEVQLDGRRWFVHASERRLPQGSPCSPALTNLVCRRLDRRLTGLATQLGFTYTRYADDLTFSSTRDNAQVNRLIRAVEHIVDDESFTVHPDKTRIMRRGRRQEVTGLVVNDRLGVPRRLLKQWRATVHQIRRDGPAGKRFGLGPDVMAGLTGFAAFVNMVDAAKGQAMLQQMAELAVSRPAPPAPQPRPTPPAAAPLPPPMPVAEPAPTDEPVRLTESSAPVLRRTRTLDEPEPPLTHQETAKTLIDESRSEVPEVVRPRRRWWQFWKWFSRRG

SEQ ID NO: 6264 - protein, 546 aa, unidentified
  source 1..546: note = Related to JAHJCH010000337.1; note = Myxococcota bacterium
MTQPRTRQELYDIISQTSKAEFILEEMVRLGFWGDRPVDPGGAHKRRGEILKRLSALQSEAARTQNREAVLKAIRRERMAESRRKREENKQARIEAKRARAEAWRQRKAKEILYLGEGVSFDLSKTANNMDAWLGAEPEPEDYRERLEGLSASALPQLKSPPDLARALGISLGELRFLAFQRVVSSQSHYRQFRIAKKTGGLRTISAPMPRLKRVQRWILDEIINKIDDIGLHDAAHGFRAGRGILSNAAPHVGQAVVINMDLADFFPTITFSRTRGLFASMGYSPSVAVILALLTTEADIEAVELDGRTWYVRGGERRLPQGAPSSPGITNLICRRLDARLSGYAAQHGWTYTRYADDLTFSGEGQDLNQLLWVARRIIEDEGLRINEDKTRILRRGRRQEVTGLIVNDQLGVPRRALRRFRALLHQVRLDGPKGKRWGQGEDLFASMMGFADFVYMVDPAKGAPLRAEVRALQARYPWRAALDEAPLSLSKPSAPLIAATPEDAPTPEDAPTPPEAAQEIEEVEEASPTQEAQPDPNRPWWRLF

SEQ ID NO: 6265 - protein, 508 aa, unidentified
  source 1..508: note = Related to NZ_CP042468.1; note = Persicimonas caeni
MTRPSREELYRRIRESSKDSVILDEMLRLGFWDSEEGANDVPEELIRREAELRQELRKLTAQQRRYENRDAALKAMRKERLRESREKRAANKQRRKEERLARAMAWDETQKTHIVYLGEDVSTHLEKLDYDAEKLAKHALPDFPDHVALADALGVSMAELRFLAYHREVSTVTHYRRFQMPKKRGGFRNISAPMPRLKRAQTWILENILDHVPLRDEAHGFRPSRSIVSNARPHVGQDVVINMDVKDFFPTVTLWRVFGVFESLGYSPSVATILALLCTELPVEELELDGKTWYVATGERCLPQGGPTSPAITNILCRRMDARLAGIADKHGFVYTRYADDLTFSASGEAAEAVTKLLWHVKTVVQEEGFELHPDKQRIMRSGRRQEVTGLVVNDRLSVPRDDVRAFRALLHRVKTAGLERAHWKGESDNLLDRIHGFASFVHMVDAERYAELRAEAKEVLDAHGYAPQPVPPKPKSERQDASAEGDGAAKPKKGLWAKIKGFFAGAD

SEQ ID NO: 6266 - protein, 418 aa, unidentified
  source 1..418: note = Related to NZ_JAFREP010000009.1; note = Acanthopleuribacter pedis
MGEREKPGARQGAGTPSLEDREQECRAIEQAALAALDRDLAEKRLDEGLKREHWYEHLIAARPRRGKRRFPWKRNRKPRPVFSAEEHRVKFDCPPLPRLEDVAHLLDIPLAELQFLAFGDRRLEISHYRRFAISKKSGGQRQIAAPMPRLKRVQRMLYEQLFQQIPLHPVCMGFRPGRSIVDNARPHVGADVVVNLDLQNFFPGIPYARVRGFLRAMGYNAAVATCLARLVTEPSVSRLQWRGRSFTVETGPRRLPQGAPTSPAVANAIAYRLDCRLMGLAKAMGWRYSRYADDLSFSAVGEPAFVVGDLLARVRSIIGEEGFTVHPDKTRIQRKGRRQEVTGLVVNRVVSVPRDELRRFRALLHQIERSGFEGKQWGRGGDLHAAIEGYLNYLAMVDEIRAEPYKKQWRRIKGAATD

SEQ ID NO: 6267 - protein, 392 aa, unidentified
  source 1..392: note = Related to SECR01000885.1; note = Myxococcales bacterium
MADSSYTKRQALYERIRQSSKDEVILEEMIRLGFWKEKTLPGQPTTDLERLRDLRAELSTVSQKLARTANLAALRQEVHARRLRESRERQQQNKERRERERREKTERWRERSRRELLYLGAGVSGGLGSPTGDEARLRERGLPIFTDAADMARQMGLTLGELRFLAFHRQVSTVHHYVRFALPKKAGGERMISAPRPRLKKAQHWVLTELLDRVPVHDAAHGFRAGRSIVSNAEPHLRSAVVINLDLQDFFPSIHYRRIRGLFRSLGYGEAFATVLALLCSEADVDALDLDGTTYYVARGPRRLPQGAPTSPALTNILCSRLDRRLTAVAHRSGFRYTRYADDLTFSAPSLTTNAVAAAPVVGAAVASAPAAGAAVASAPVTAAADATPDVG

SEQ ID NO: 6268 - protein, 338 aa, unidentified
  source 1..338: note = Related to JAGQVA010000789.1; note = Bacteroidetes bacterium
MASNSDQNRRENIRREIAQTSKDEFILKEMKRLGFWPNEEGKPRVEENLIKRQGELSREIADLSKKARIYQDREALLNKHRKERMHKSREKQKANKEKREAERLTKKEAWKEKQAKDIIYLGDKYSAGLKNKTNDLALLKKHQLPQIQNVLELAKCLKTNVSELRYLSYYRPVTKVSHYIRYALPKKNGGNRQISAPMPRLKTVQRAILDELLVKVPISQYANGFAPGRSIVTNASPHVNADLIVNMDLKDFFPTISYKRVWGMFKKLGFSDQNATVLALICTEPVEEKVEVDGEIYYISEGERVLPQGAPTSPAITNIICRRMDQRMAGIAKKLDFT

SEQ ID NO: 6269 - protein, 590 aa, unidentified
  source 1..590: note = Related to JAFEUL010000003.1; note = Actibacterium sp.
MRSNRRQELYDRIRESSMDEVTLQEMIRHGFWAEDDAMPSLPAEMIKRRGELRREISELAQDARLYRSQEQALRAIMKQKMREAKDRRIETKKRQIQARNDRAAAWHRKKTEGIVHLGDTVSGALQNRDSNAERLISQGLPDFPDLGDIADAMGITLGELRFLAYDRAVSKVSHYHRFQIPKKSGGTRILSAPMPRLKRAQYWLLDNIVNQIEPHDAAHGFRAGRSILTNAKPHMRQAVVVNYDLKDFFPSIGYRRVKGLFAALGYAEAQAAIFALLATEADRTEVVLDGQTWHVAGGERVLPQGAPTSPAITNLLCRQLDRRLTGTARKLGATYTRYADDLTFSFATDDTTALRSLDWAVGEIVLDEGFNLNDAKTRTMRRHTRQEVTGITVNDGLTISRKERRRFRAYLHNVEQGRDMGSFGSGHPKNSALGYAQFLTMVHGDGVSDLVAHARTLFGDQTSVPPEDPNHFRQMSARGEAPKADWWQPAEPAQPVPEALPQPPGTAEGRSTNIPTVGKRRARDWGAARAQPSQSGPARPRQGKKGLVGWSGFQKTAITVLALIALIPFPFSPVLMGATIYFIWFHRYRK

SEQ ID NO: 6270 - protein, 642 aa, unidentified
  source 1..642: note = Related to JAKRGB010000012.1; note = Ruegeria sp.
MSSVSNLRSRISDSSLDQVVLEEMIRHGFWGRDAEVGEMPAEFFERRAALQAEIADILARDRRLSDPDKALQAVMKERMRRARLKRVETKRKAIEARNARAAAFDARKRAEVISLGDVSSAPLQSREANNDRLTAQGLPVIEGAIALSEAMGIGLPELKFLAHDRKVARVTHYQSFEIPKKTGGVRVISAPKPRMKRAQYWVLDNILACIEPHDAAHGFRTGRSILTNAAPHVGQELVINMDLQDFFPTITYGRVKGLFAAMGYAEADAAVLALIATEAPRDTINVDGTVWHVATGPRATPQGAPTSPAIANLVARKLDRRLLGLARRFGFSYTRYADDMTFSGPFPGDQGLKIFHAAVRAITTEEGFTLHRDKTRFMRRGGRQEVTGLTVNDKVSVPRAERRKFRAWLHQAEQSGTPQRPFRTGNPVTTGQGYASFLYMVGGTEGLALAERAWLLLGRQTGASSENIEQAQAFRTASAEGRLPTPDWWQPAEPPPFEPIPLPAYDRKDQETRDVQTSIPKAGERQLRRAQIERPGADARSRAALSRSNRAWGGQASGTSPSGQSSWAKWIMSFFAFFLQVLPYIGVPLAVFAFYHIWKPQAGYLGATTVWHKLLVAAKFLFVLLGIDFALVMILAVFSGIG

SEQ ID NO: 6271 - protein, 503 aa, unidentified
  source 1..503: note = Related to PBMT01000060.1; note = Proteobacteria bacterium
MSAKKWTSIPDDFDIVRASREEVRKLRWSPVWQDFLLREVVRMGFYEPEDDTEQSYYINRSKELRAELQKLNIEIEELKEEESSLVDQRKAIAKATQRQKEAHRVRLDESRAQRQVRKQQRIEQRKAKKELWSIRKQQELLYIGAGVSRILKERNSDTAKLKSLGCPVVLTDLELLSLLQQPASEDDSIELSMAHLRRFAFRRRISQHTNYTQFTIPKKTGGERLITAPTMALKTVQRRIVKHILSTIPTHSAAHGFVEGRSIRSNAEPHTQSAIVVNMDLKDFFPTITGHRVRGLFQSFGYSPAISAILAFICTRPDVSVFELDGQNWYFYEGKDVLPQGSPASPMISNLICRKLDRRLEGLAQSTGFTYTRYADDLTFSSSDPDASVGALLHATRAIVADEQFEVHPSKTRIMRNGSCKEVTGVVVNEYPNISRARLRRFRALLHQLKTKGLENAHWEETTGPALLNKALGFAAHIKSVSQPKGAEIFEETLEIINDLKGQ

SEQ ID NO: 6272 - protein, 462 aa, unidentified
  source 1..462: note = Related to MLAY01000020.1; note = marine bacterium AO1-C
MADTNQTTNWRQELKQVGKQYFEIQEMIRMGFLKMPPEELELLKQKYTELNKVNAQLRKLSKELEGFQDITPLIKEIRKNRIERVRAARAIKKAEKAQKEKARKAEIAQRKKDTPYYLGEGVSAGLKFEGTEEAKLQEAGLPIVHNVKDLAEQMNMPQSDILWLSYHRKAASIDHYSRFQIPKRKGGFRTIASPKPKMRVAQQWILDNVLSKVPTHEAAMAFQAGKSIADNANLHLNAEILIRIDLKDFFPSIKFGRVKGLFKSFGYNEGIATVLGLICTDALRLSAKLENKQYFVALGDRYLPQGACTSPTITNLICRKMDNRLSKLSDTLSWKYTRYADDMVFSTPQKEAELKHVLGLSKKIIGEENFEIHPDKTMVMRGHQRQTVTGVVVNNDEIRISRRDIRNFRAFLHQYEQNGAEAMTKKLGKDATAYGRGYLAFVHMINPGQAAKFVEKYGWLKK

SEQ ID NO: 6273 - protein, 462 aa, unidentified
  source 1..462: note = Related to NZ_AAWS01000028.1; note = Microscilla marina
MANQTTTNWRAELRSVGKQYFEIQEMIRMGFLKLDPAELDMLKQRYTELNKVNKELNKLSKELEGLEDITPLIKEIRKNRIERVKAARAIRKVEKAQKEKERKAEIAQRKKDTPYYLGDGVSAGLKFEGGNEAQLKEAGLPVVNNVRDLSELMAMPQSDILWLSYHRKAASMDHYSRFQIPKRKGGFRSIASPKPKTRKAQQWILENILSKIDCHEAAMAFRPGKSIADNAHFHLQAEVLIRIDLKDFFPSLKFGRVKGLFKSFGYNEGVASVLALMCTDALRLSAKLEGKQYFVALGERYLPQGACTSPAITNLICRKLDNRLSKLGDKLDWKYTRYADDMVFSSSNKETDLKHILGLSKKIIGEENFVIHPDKTMVMRGHQRQTVTGVVVNNDEIRISRRDMRNFRAFLHQYEQKGAAEMTKQLGKDATAYGKGYLAFVQMINPAQAEKFKAKHGWLSQA

SEQ ID NO: 6274 - protein, 461 aa, unidentified
  source 1..461: note = Related to REBB01000084.1; note = Cytophagales bacterium
MANYDKIQELRQEIQTLGKEYYIMQEMLRTGFLKMSEVDLVRMKANLNELSKINQELSVLSKELKDIPDITPIIAEIRKNRIEKVKSERLIRRIEKEKLIIQRKEKLKEKKKNTPHYLGEIARGLEFKASDEEKLKQKNIPSLPDLQALADLSGLTREQLLWLSYHRKTAKIDHYTRFQIPKRSGGMRTIASPKSKLRVIQHWILENILQKLSIHEAAKAFAQGASVVKNAVPHLNAYVVIKVDVKDFFPSIKFNRVVGFFKSLGYSRGMSSVLGLLCTDAMRLNAEFEGEKFFVAIGERYLPQGASTSPMLTNLICKKLDARLSKLAEKYGFQYTRYADDMTFSHPEKEANVKAILGWTKKILAEESFELKKEKTSVMKKHQRQTVTGVLVNHQETKISRTDIRKFRAFLHQYTLIGAEKMSEKLGKDATSYGKGYFSYLKMVNETQAEKFKKEYAWLAS

SEQ ID NO: 6275 - protein, 460 aa, unidentified
  source 1..460: note = Related to RDXZ01000042.1; note = Bacteroidetes bacterium
MTNYDKMQEIRQEVAMLGKEYYIMREMLRTGFLKMSEADLATMKANLGELTKINQELNELSKELKDIPDITPIIAEIRKNRIEKVKTERLIKRVEKEKLLAQRKERLAQKKKNTPQYLGDIAKGLKFQNQNEEKLKEKNLPLLKDLQDLSTLSQLTREQLQWLSYHRKTAKIDHYTRFQIPKRTGGLRTIASPKPKLRVAQQWILENILAKLSIHEAAMAFNVGASVVKNATPHLNSEVVIKIDVKDFFPSIKFNRVVGFFKSLGYSQGISSILGLLCTDSMRLNVSFEGEKFFVAIGERYLPQGACTSPMLTNLICKKLDARLSKLAEKYGFAYTRYADDMTFSHKQKDANIKAVLGWTKKILAEENFELKKEKTSVMRKYQRQTVTGVLVNHEETKISRKDIKKFRAFLHQYTLIGAEKMSEKLGKDATAYGKGYFSYLKMVNKTQAEKFKQTYSWLG

SEQ ID NO: 6276 - protein, 464 aa, unidentified
  source 1..464: note = Related to NZ_JADPIB010000005.1; note = Aureivirga marina
MSEDKNWKERIKEVGKEAFEIEDMIRLGFLQMDKETMAEILDKQKAYNKLSNRFFKINRELDSDIDITPYIKIIREKRIKESREKRALRKIEKAKKEAERKQKIAEKQEKMPSYLGDEISAGLKYEGTNEERLTSTSLPVISDLKELEVKSNITAKHWQWLAFYKKVSNIDHYNRFTIPKKNGDVRKISAPKKRLRVAQEWIQNEILSKIELHEKAYAYRKNISIVDNAKLHQNAKVVVRIDLKDFFPSIKFNRVKGLFKSFGYSEALATIFASVCTDSVMVKAQMSEKVYHVSMGNKFLPQGACTSPALTNIICKKMDKRIENFTKKNGIRYTRYADDLVFSTEDENINLKSFFSWIHRIIKEEGFQINNEKTRVMRPNQRQAVTGIIINEGGDIRISRKDIRKFRAFIHNFKLKGEEEARKQIGKNPNHYLEGYLSFIRMVNKDQFEKMKAYAESKLEMEII

SEQ ID NO: 6277 - protein, 461 aa, unidentified
  source 1..461: note = Related to RDXI01000002.1; note = Bacteroidetes bacterium
MANQNDSENWREELKRLGKEYFIIQEMLRTGFLKLTPEDIALYKTKIKELNDVNGEIYRLSHELRGIEDITPLIEEIRKNRIARVKAERIIKKAERAKTLEEHKRTISEKQKSKPNFLGEKFASKLKFEGGDAGKLQASGLPTLNDLHDLSQATGISRERLQWLCYHRQAATIDHYTRFQIPKRKGGMRSISSPKPQMRLAQSWVLDNILSKLPIHDSAVAFREGKSIVDNANFHAGNALLVRLDLKDFFPSVRFHRIKGLFTSFGYNYGIATVFALLCTDAARIGAKLNDKQYFVALGDRYLPQGACTSPMLTNLICRGLDNRLTKLCASLGWRYTRYADDLVFSHEDEQADLKKLLGLVKKIIKEETFEVNEEKTLVMRPHQRQTVTGIVINDGKLRLSRRDVRNFRAFLHQYTLKGAEAMSQRLGKDATQYAKGYLAFMRMVNPEQADKFVQEYAWLA

SEQ ID NO: 6278 - protein, 461 aa, unidentified
  source 1..461: note = Related to DMHB01000192.1; note = Microscillaceae bacterium
MAQENPDNWRDQLKALGKEYYTLQEMLRLGFLKMSEQDLAFYQAKVADLNKVSTELHSMRKSLEGVKDITPLLKEIRKNRIERVRVARSLRKIAKEQAFAEAKTNRRARQMATPTYLGKGVSKHLKFEGTQAERLALFDLPRVENMAELAEAMQLTPEKLHWLCFHREASKIDHYTRFQIPKRKGGLRSIASPKRTLRVAQQWVLENILRKIAPHSAATAFEPRASIVENAKKHLNQALFIRIDLKDFFPSLKFHRVKGLFQSLGYNAGMATVLGLLCTDSARIGAKLGEDQFFVALGDRYLPQGACTSPTLTNLICRKLDKRLAQFCAKQGWIYTRYADDLMFSHAESQTDLKPMMGLVKKIVAEEGFVINPEKTLVMRPHQRQMVTGLVVNDGELRVSKQDLKRFRAFLHQFDLDGKDKLSERLGKDAEAFGKGYWAFIRMINPTQAEKFTEKYKWLAH

SEQ ID NO: 6279 - protein, 467 aa, unidentified
  source 1..467: note = Related to NZ_CP048222.1; note = Rhodocytophaga sp.
MQLTPSTTENWRARLQRLGRDYFVIEEMIRLGFLDLSQQQYKTLQDSYTRLNEINGELQKLNIELKGTEDITPLLKEIRKNRIERVRAKRAIRKVEKARVSQAKKAEIALQKQKTPYHLGEGVSKGLRFDETDTEKLSQAGLPVLHTLEDLAQFSKLEMKQWVWLSYHRRVAGIDHYTRFQIPKKKGGLRNIASPKKTLRIAQQWILENILNKRPIHPNAMAFLPGKNIRHNAEKHTGKHTVVRVDLKDFFPSVKFPRVKGLFKSWGYSEGIATVLALVCTDATRIGASLDGKAYFVALGERFLPQGACTSPAITNILCGDTGYLDHRLTRLGEKLDWTYTRYADDLVFSTNITEDNLKSLLGLMNKIIKDEGFEINQEKTSVMRQHQRQTVTGAVVNGTEPRVSREDIRRFRAFLHQMEKNGSAAMSQKLGKDAERYAQGYWAFIHMVQPTQAEKFLNQYSWLKKK

SEQ ID NO: 6280 - protein, 467 aa, unidentified
  source 1..467: note = Related to JACVSL010000462.1; note = Cytophagales bacterium
MQLPATPTESWQSRLKHLGREYFIVEEMIRLGFLEITPEQYQLLVDGYARLNAINGELQRLGQELKGTEDITPLLKEIRKNRIERVRAKRALRRVEKARARQSRREEVIRRKRQTPFYLGEGVSAGLHFTGTDEAKLAAAGLPVLHTLDDLAQASGLEARQWIWLSYHRRVARIDHYTRFEIPKKKGGTRPIAAPKRTLRQAQQWILEHLLNGRTIHPNAMAFLPGKNIRHNAEKHTGKAVVVRVDLKDFFPSVKYPRIKGLFRHFGYNEGIATVLALVCTDALRVAARLDGQDYFVALSERFLPQGACTSPALTNILCGDVGYLDHRLTCLADKGNWQYSRYADDLVFSTTDPAADLKSLLGPVRKIVADEGFVVNPEKTRVMRPHQRQAVTGVLVNEARPRVGRQELRRFRAFLHQMGQIGVPAMSVKLGKDARRYAQGYWAFVKMVEPDQASSLLGKHPWLRAQ

SEQ ID NO: 6281 - protein, 470 aa, unidentified
  source 1..470: note = Related to JACMJS010000225.1; note = Rhizobacter sp.
METTEQNTSSSKNNAWREKLKNLGKENFIISEMTRLGFLSVAPENLQVLRDGFDRLEVIQKELAAIRKELQGTEDITPLLKEIRQNRIERVRAQRTIKKAERAEAAAAARKKFLAEKQTKPFYLGDGVSKGLKFAASDASKLSDNGLPVLHTLDDVAAASGLDASKWQWLAYHRKAATLDHYTRFQIPKKKGGLRSIASPKATLRKAQAWVLAEILSKRADASSSDASFAFQKGKSIVQNAAKHLNKAVVVRMDLKDFFPSIKFRRVKGLFNKLGYNEGLATVFALVCTDSVRIEAALDGKRYFVALGERFVPQGACTSPALTNMLARDLDMRLMRFSEKYLWTYTRYADDLTFSTDHPTPDLRQLLGVAAKIIRDEGFEINAAKTLVMRSHQRQSVTGVVVNNAEAKVSRRDAKRFRAVLHHIETEGEETVSKKLGKSATAYAKGYIAYLSMINPQQAEKFKAKHKWLA

SEQ ID NO: 6282 - protein, 337 aa, unidentified
  source 1..337: note = Related to JABHVB010000067.1; note = Rhodospirillaceae bacterium
MSDELSLNPHWRKRVQEIGRMNFSREEILRLGFFSDLDDAERQQLKTFLDEAYPRLAELRKELKKVSTTIEEADDLQSLLREVRRARIERVRRERAQRKNKKERQEVERQQAWATKKSKTPPFLGVGVSGRLQFSGEDDKRLLSQGLPVPKDAEELASLMGIKSSELLWLCYERAAASVDHYTRFEIPKQSGGKRLISSPKPKMRSAQRWILDEVLAKLSPSNAATAFRPGASIIKNAEPHLNAAILVRIDFKDFFPSITFPRIRGFFEALGYNPGVSTLLSLISTDAPRVKAVLDEKTNFVAMDERSLPQGACTSPALANLIAWKLDARIGGLCKV

SEQ ID NO: 6283 - protein, 357 aa, unidentified
  source 1..357: note = Related to DTSG01000200.1; note = Planctomycetaceae bacterium
AAWLEKKSKNPPFLGIGVSSRLRFQGGDTKILTANELPTPKDAEELALLLNISTSELFWLSYERAATSLDHYTRFEIPKRSGGKRLISSPKPKLRTAQRWIAENILDKLSPAAQATAFRSGASIIKNAEPHLNAAIVVRIDFRDFFPSITYPRVRGYFESLGFNPGVATLLALISTDAPRVKVSFDGKTQYVAMGGRSLPQGACTSPALANLITRKLDARIAGLCQASTDQWTYTRYADDLTFSTQARDANVGRLLGSVQNIVSDEGFRINREKTAVMRAPGRRIVTGLIVEDEIRLSRRDLRRLRAFLHRCDKDGLARVSEEIGKDALAVAHGRLAYVQMVMPEHAGRIRGKYSWL

SEQ ID NO: 6284 - protein, 469 aa, unidentified
  source 1..469: note = Related to JAIBBE010000228.1; note = Fimbriimonadaceae bacterium
MASQDLALNPDWKERIAQIGKQNFVREEMLRLGFVSKKLGEEERARIQGFLDQAYPRLKELRKDLAEIRSQIEGINDIESLLKEVRRERIERVKREREERKVRKAEEQERRRQALAEEMRKTPRFLGHGVSAHLSFAGGDAVNLAARGLPQPEDVEQLAELMQLDPSEVLWLSYERAATTVDHYTRFEIPKKSGGRRLISSPKPKMRVAQSWIAENVLDLLSPSRHAMAFRPGTSIVDNASPHLNAAIVVKLDLKDFFPSIGFTRVRGYFEYLGFNPGIATILALICTDAPRVKVTLDGAAKYVAMGERGLPQGACTSPALANLIATPLDSRLAGLCTALESTWTYTRYADDLTFSCLDERADVGRLLKAIERIVGDEGFRINAAKTAVMRAPGRQVVTGLLVGDQIRLSRRDLRCLRAFLHRCDKEGVEAVSRAIGKDALSVARGHLAYVTMVMPGHAADIKRRYAWL

SEQ ID NO: 6285 - protein, 567 aa, unidentified
  source 1..567: note = Related to JAGQTY010000032.1; note = Actinomycetia bacterium
MSESGLPADWRTRLERLGQRNFEIREMLRLGFLSAADPLRPGETNAALLAKIAELEQLQAELDEVDDVVASASRIETLLEEIRRERLASSALRKAERRRAREEQARQKQLAWATQRCERPPYLGAGVSTRLQYTGGDDDALASAGLPEVHTVLELADDMDTTTSEVQWLSYHRSVTTIDHYNRFTTPKRSGGTRTISSPKPRMRQAQTYIKTHILDQLSPASPATGFRTGLSIVSNAEPHVGAAVVIRMDIKDFFPTITFPRVRGYYESLGYNPGIATVLALLCTDSPRTAFRFEGDRYYAASGPRALPQGACTSPSLANLVARGLDERLIAWAAGRPESWTYTRYADDMVFSSNDANSDVASLIATVHTIVQDEGFSVNERKTAVMRAPHRQMVTGLVVNDVVRISRRQMRRLRAFLHQCEVRGLNAMTESLGTDARCAATGHLAYVNMVNHDQALKLLQRHPWIQREPLSPPGVRSRSRPGRTPSSTQSAVTPVTAGVTRLELADPPDGGKFWEVWVDGATLYRRYGPLGAPGTTSEKAFSTPEAAQSAAEQLIQNKLSGGYRPA

SEQ ID NO: 6286 - protein, 470 aa, unidentified
  source 1..470: note = Related to PBFI01000001.1; note = Gammaproteobacteria bacterium
MSKEVKKLDPNWRDRIEKVGKSTFQRQEMLRLGFWEPKDIPTDELASLQNKLNETVNLLGEKRTQLGEVNKKIKEAQDVKKLLAEIRKRRIQKSLKEREIRKAETKERKQDKTTQDRQRRKVTPPYLGEGVSGRLTFLEGEQEKLKELDLPLLNNLTDLSKLLLIDEGKIAWLAYHRVATNCDHYHRFLIPKRTGAPRLIASPKPELREAQGWVKREILSKLEPELEAKAFKKETNIKDNAQIHSGKGLVIRVDLSDFFFSITFPRVRGFFISLGYNPGISTVLALLCTESDRTKVTYKNEDWFIAQGDRRLPQGACTSPALSNLIARRLDRRIRNYLASMDEEWSYTRYADDLAISHSKSDAEVKKVLKALQKIDPDEGFSINEKKTAIMRSPHRQMITGLILNDQEPRIPRPYLKKVRAMVHQADQLYKRGAIPENLYEIKGKLSFIKMIMPQHVEKIVNKYSWLNPS

SEQ ID NO: 6287 - protein, 473 aa, unidentified
  source 1..473: note = Related to VGQQ01000059.1; note = Cyanobacteria bacterium K_DeepCast_35m_m1_288
MANTDGVLDPRWRKRIDEVGKNAFEIEEMVRLGFLDADELEKRLNANGQSFKAYQSALADLAEASAALSATSREIEALGTVEAALAAIRSRRIARVKEVREERRVRKQAERQQREEAIRRQRREVPTFLGRGVSNRLNYSGGNDDMISQLGLPRLNSFTDIASALSLEPQQLQWLVYERGDSRVDHYIRFTIPKRSGGSRLISRPRPSLQQAQQWMHDSILRRQPLHPAAMAFRPGVSIVDNARLHVGARIVVRLDLKEFFPTITFARVRGLFESFGYNPGVATVLALLCTDSPRVMVRLDERSHVVPVGERALPQGACTSPTLANLVSRSLDRRIQGYASKAGWTYSRYADDLVFSTNQETASPHSLIRGICAVITDEGFVVNGEKTRVMRAPNRQTVTGLLVNRDVGLTRRDQRRIRAFLHKCTCQGLEVVSAEIGKDAESVARGYLAYVQMISAETAQKLRSRCAWLDQI

SEQ ID NO: 6288 - protein, 472 aa, unidentified
  source 1..472: note = Related to JABMNF010000410.1
MANPDGVLDPRWRKRIKEVGKNAFEIEEMVRLGFLETDDLQKYLSSNGLSFKSYQSALAELTEATAELTATSLEIESLGTVEAALAAIRSRRIARVKEERNERRARKEAERLVREEAIRRQRREEPTFLGRGVSNRLHYNGGNDDMLNQLGLPQLHSFSDIASALCLEPQQLQWLVYERGDSHVDHYIRFTIPKRSGGSRLISRPRPSLQQAQQWVQSTILHNQPLHPAAMAFRRGVSIVDNARLHSGKKIVVRLDLKDFFPSITFARVRGLFESFGYNPGVSTVLSLLCTDSPRVLLSLDNQSHVVPVGERALPQGACTSPALANLVSRSLDRRIQGYANKAGWVYTRYADDLVLSTIQETDSPHRLIRGISAVTRDEGFVVNEEKTRVMRAPNRQTVTGLLVNHDVGLTRKDLRRVRAFLHRCSSQGLEVVSAEIGKDAESVARGHLAYVQMISAASFEKLISKHAWLQH

SEQ ID NO: 6289 - protein, 482 aa, unidentified
  source 1..482: note = Related to CP000111.1; note = Prochlorococcus marinus
MSEQDADQSNSLNNQWKKRLQEIGQGAFEFEEMLRLGFIDLDTIKRFDKEMTIEESKEVFEQLTKTSAILSEVDKEINSINRIEELLAEIRSRRIKRVKEAAKEKKIKKQEEKIKRSKEIKERKINSPTFLGRGVSNRLSFEKVKKVDFKSNKIPELNSFVDVANALEVTPSKLQWLIYERGASNIDHYLRYEIPKKSGGKRLISSPKKDMKKAQKWILENILINLDVDKAAMAFQKGLSIIDNASLHVKSKIIVRIDIKDFFPTITFPRVRGFFESLGYNPGVATVFALICTDSPKVILKQEAIDGDKNNKDYPHFIAISERSLPQGACTSPSLANLICRKIDSRLNGYSSKSGWKYSRYADDLIFSTTSEDSYPHRLIKSISSIISEEGFKVNQSKTRLMRAPNRQTVTGLVVNNEVTLSRRDLKRMRAFFHQCSSKGLDFMSEKIGKDALSVARGYISYVEMVSPTIAEKFLSTNSWIK

SEQ ID NO: 6290 - protein, 472 aa, unidentified
  source 1..472: note = Related to AE017126.1; note = Prochlorococcus marinus
MSKEERSINQNWRKRLDEIGQAAYEFEEMSRLGFLSNKKIAKMIEASGISLEEYEQAKSKLSDISNFIRATNEEIESIDSVEVALEKIRSERIKRVKQKNEDRKQKKESQRKERSKLAYEQRIKSPTFLGRDVSNRLNFTGGNTEKLELNGLPVITTFAELSSTLETTPNSLQWLTYERDSQKIDHYTRFEIPKKSGGSRLISSPKPALRNAQKWILESILNKLDIHSAATAFRPGKSILDNAKLHANSKVVLRLDLKDFFPSITFIRIRGLFESLGYNPGISTVFSLLCTDSPRIILKYHGETHFVKVGPRNLPQGACTSPALANLIAHKLDRRLQKYTEKIGWIYSRYADDLVFSSNAEEMPAYRLVKAASKIVASEGFRINKHKTNIMRHPHRQTVTGLVVNKDVRISRNDLRKFRAFLHHCETKGLEFVSKDIGKNAIAVARGYLSYINMVSPELATTLSSKHLWISK

SEQ ID NO: 6291 - protein, 475 aa, unidentified
  source 1..475: note = Related to NZ_NIGF01000009.1; note = Abditibacterium utsteinense
MSEETTEIPADWRARIKEQGKEAFQLDELRRLGFWPPSAGLQEQVARAEEEVKRLDREMAPLRAQLRKIEGDISRAADVQSALDEIRKARIGRVKAAREAKKIARAMEKIDRETLWKEKRASDPQFLGRGVSVGLQFEGGDLEKLTKNEVPQLQTTAEIALAIGIETRELTWLCYHRGASTIDHYHRFQIPKKRGGMRNVSAPKTKLRRAQRFVLEQILANLPVHEAAMAFCTGVSTLDNARKHAGKRIVARLDLKDFFPSIDFSRVKRFFQSLGYNEGCATIFALLCTEAPRAQISLDGQRRYVAIGERRLPQGACTSPALSNLLCRRLDARLSGLAGKRGFKYTRYADDLVFSSDEARPDIGALLVLSQKIVEDEKFVVNSEKTLVMKTQNRQSVTGLVVNAQSRATPRVSRDDLRRFRAFLHGFETLGREAMTEKLGQDALFYARGYLAYIAMSDPLRAGKLRVMHPFLARD

SEQ ID NO: 6292 - protein, 487 aa, unidentified
  source 1..487: note = Related to AP024152.1; note = Abditibacteriota bacterium
MANKNSTPEPEPEVAPKDWRARMRAQGKEAFQLEEMRRLGFWPPAEGVEAQIEVAEREVARIDRELAPLRVELAAVETEITRLGDVQSAIDDVRKNRIARVKRERGERRARQELEKARRIEAAKVRAKNELPFLGHRVSSGLAKTESDVQKLALLDLPLFHSALDVADAMGMSAPHLAFLTFHRGAATVDHYHRFQIPKRRGGMRNVSAPKTKLRAAQNFVLEQVLTKVPVHEAVAAFAPGTSTVQNAARHMGAQVVVRLDLKDFFPSIDFARVRNAFSSLGYSGAVSTVLSLLCTESPRVQMSLDGETRHVAIGERVLPQGACTSPALSNWICRRLDARLSGLAKRFGWTYSRYADDLIFSSSELTPDIKTLISCARSIIRDEKLVVNDEKTRIMRPNARQCVTGLVINAQDANAPRPARTDQRRFRAFLHAYETHGRDEMTQKMGRDALAHARGMISYLHMSQPGKASALIEKHPWLALESETAS

SEQ ID NO: 6293 - protein, 301 aa, unidentified
  source 1..301: note = Related to SDZA01000028.1; note = unidentified bacterium
SYHRGASFVDHYHRFQIPKKRGGLRNVSAPKTKLRRAQNWVLANILTPLPVHEAAVAFRPGISTAQNAARHAGKEVVVRLDLKDFFPSISFTRVKRLFQSFGYNEGCATVFALLCTEAPRVELALDGQKRHVAVGDRVLPQGACTSPAITNLLCRRLDARLTGVAAKEGFTYSRYADDLIFSSDTKRADVGWIFTFAQRIVTDEKFVVNAEKTMVMKPQNRQSVTGLVVNSQDGLGPRVSRDDLRKFRAFLHGYEIKGREAMTEKIGQDALHYAKGYLAYINMSDPAKAAKLRAAHSFLGS

SEQ ID NO: 6294 - protein, 509 aa, unidentified
  source 1..509: note = Related to JAFAZH010000051.1; note = Abitibacteriaceae bacterium
MAAETPPSVPENDLFPKDWRQQVKLYGGRKGFIRKELKRLGFWPPAPGSKYKHVTASEEAELEQLYNQLIELRAPLLEQLDAVDARIRDAKKQLGNIGNEAILAKKIETLIAEIRLKRIERVRQERAARKAQRAEAAAAKAQKDKAWRAATLPHLGRAVSAGLSYAGGDEDKLGAQGLPNLSSAGEVAAAMGITTAQLAWLTYHRGAAALDHYQHFTIPKKSGGRRAISSPKAKLREAQSWLLENVLEKIAVHEAAMAFRPALNIAHNAARHAGASVIVRLDLKDFFPSITFKRVKRMFQRLGFNEGVATLFALLATEAPRVQLTLDGQQHFVAVTERFLPQGACTSPAITNILCRSLDARLSGAACKLGFTYTRYADDLVFSARGDKLKGIAMRELATKIIADEKFVVNEAKTAVLRPHSRQTVTGLVVNAQSTGEGTGTPRVSRRDIRNFRAFLHQYELRGREAMTEQRGQDALSYARGYLSFVHMVSPAQAAALQQKHPWLERYTL

SEQ ID NO: 6295 - protein, 472 aa, unidentified
  source 1..472: note = Related to JACMJB010000482.1; note = Cytophagales bacterium
MNAEQRTRFKELGKSAFIREEMTRLGYWPPSSEIANQSALAESKLKPLYEELIRVRKEFDTVSAEIAVSGDIPTLLAEVRKRRIERVRAERAVKKAEREQARSEAKTADAAWRRKTLPYLGVGVSGGLAYSDGDSAKISERALPSLTTAAQVAAAIGIGENELAFLCYERAVSGVDHYARFAIPKKKGGVRVLSSPKRRLRVAQSWLLKNVLEPLPVHSAAMAFRPGKSVVDNAAPHAGQAIVVKTDLKDFFPSLGLRRIKGLFEGLGYNEGVATLFALLATETPRIAVMFDGKRRFVAVSKQRGLPQGACTSPALTNLLCRNFDARLAGAAAAFGFRYTRYADDLTFSHASDKAPVGVLLALIRKIVADENLTVNEEKTQVLRLSDRQSITGLVVNGSETPRVSREDLRRFRAILHQCERDGFEAVTARLGKDAQAYAGGYLSFVHMARPDIAGKIAAAHPWLAKWRQANI

SEQ ID NO: 6296 - protein, 451 aa, unidentified
  source 1..451: note = Related to NZ_JACHGW010000004.1; note = Armatimonas rosea
MTAAERQRLKEIGKDAFIREEMVRLGFWPPSPEIAEQSAEAERKLRPLYDELVGVRRELDGVEKAIRESGDVPALLAEIRRKRIERVRAARVVKKVEREAARVKKQEQDALWRRTALPHLGRGVSGGLTFVEGEIEKLCAAMGLTERELAWLCYQRPASKTGHYSLFTIPKKRGGKRVLASPKSKLRQAQRWILSEILANQAPHAAAMAFSPGASVVKNAEPHTGKSVVVKVDLQDFFPSLGVKRVKNYFEHLGHSEGVATVLALLCTDCPRVAVEFDGEKKFVAVGPRGVPQGALTSPALSNLLVEKLDKRLTGAAQKLGFVYTRYADDLTFSHADGSAPVGLLLTLVRQIVADEKLTVNEKKTQVLRSSDRQIITGLVVNGEQGVRLSRDDVRRFRAILHHCDTEGFDKVSERLGRSAQAYCQGYLAFIKMVRPELADKLVTAHSWLVR

SEQ ID NO: 6297 - protein, 471 aa, unidentified
  source 1..471: note = Related to NZ_BHFQ01000005.1; note = Capsulimonas corticalis
MNSEQRKQLAAIGKSAFVREEMVRLGFWPPSPEVAELAAGAEKELRVYYDEMIALRTELNGVEAKIAEAGNIPALLAEVRRKRIERVRAERIARRERRAQEKIESHAKDTEWRKRALPYLGHGVSDALVYKGGDPEKTATLGLPALTTASDVAAAIGISESDLAWLTYHRGAATIDHYSRFTIPKKRGGVRVISSPKRRLRTAQSWVLESVLSPVPVHDAAMAFRPARSVADNARRHQGQAVVIRIDLKDFFPSITLPRVRTLFRSLGYNGGVATLLALLTTEAPRVAATLDGARRFVAVGGRSLPQGACTSPAVTNLLCRKLDARLTGAAEAMGFVYTRYADDLVFSHAKPDAPVGMLLDLTRRIIADEGLTVNEEKTSVQRGQHRQTVTGLVVNGGAPRLSRENLRRFRAMLHQCERDGLPAVSERLGQNAQAYAAGYVAFIHMVDPEKARQIVAAHPWIARWKRAGGA

SEQ ID NO: 6298 - protein, 441 aa, unidentified
  source 1..441: note = Related to JACMIS010000372.1; note = Fibrella sp.
PPSPEVAAKSVEAEAILRPMYEELAILRTELTGIEKEIALIGDIPNLLAEVRRKRIERVRAARVVKKAAREKEQGERKASDIAWRRSTLPFLGHGISAGLRYAGGDPAKLTASGLPVLVTAGDLAAGIGIGTRDLAFLTYHRGVAMLDHYSRFTIPKKRGGVRVISSPKRRLRVAQQYVLEKVLALLPVHDAAAAFRPGLSIVDNAAKHAGKPVVIRIDLKDFFPSVPFPRVKRLFESFGYNPGIATLFGLLCTEAPRAAVTLDGSAKRFVAVGERCLPQGACTSPTLTNLLCRRLDARLSGLADAAGFTYTRYADDLVFSHAEAGAAVGALLRAVRQIITETGFVVNEEKTVVLRPHHRQSVTGLVTNTETPRVSRQDLRRFRAFLHQFETKGAEAVTQQIGKDALAYAGGYLSFIHMVSPEQAEKIAAKHPWLSRWKKL

SEQ ID NO: 6299 - protein, 471 aa, unidentified
  source 1..471: note = Related to VGYZ01000107.1; note = Planctomycetes bacterium
MSSISKRDLDQVDEMIARGFYTPSGDVRRALDALRENQGQIDRIEQELARLRAELADGPSLAELIKQARARRIERVREERARRRALREAEQSERRAAFAARKRRAPLFLGEGVSAGLRFDGGDAARLAERGLPALTDAAALATAIGLPVKPARGMPTFTEGADQLAWLCYHRRVVDHDHYSRFRIPKRSGGYRQLASPKPLLRKAQQWVLDHLTSRLEPHARIATAWRKGRSVVDNARPHVGKAVVIRVDIQDFFPSISWRRVRRVFMDLGYSEGVGTMLALLTTDTDRVAVRLDGELRFVARGKRGLPQGACTSPSLANFVALRLDKRVDGLCRSLGFDYTRYADDLTFSHAQPRANVAVLLQQVYAILRDEGFEPNERKTAVMRAGGRQMVTGLMVQDAIRVSRRDVRRFRAIAHQCKLHGFETISQRLEKDARSYLDGFLAWVRMANEEQAQKLEMWLESLGLPRRDM

SEQ ID NO: 6300 - protein, 526 aa, unidentified
  source 1..526: note = Related to RFQH01000103.1; note = unidentified bacterium
MHLRHVSARRHDPRALHPHRGGDHVHAVAGTRRRGTRGGTCRAGRGPGIRAMSGDITSLRARVAKVGRGQAVYEEMIRSGWWTVRPEDTQLLAEASKRVTDILVALDPLVLERQRIDEELLTLANIDVKAVLEEIRAERIAESRARRAAAKEERRRRREAAAAAHAARVRKTPLHLGHGVSSRLAFTEAPNPELDRAGLPRVCNAEELAAAIGIDAGRLQWLCYHRQVSAVDHYNRFTIPKRSGGSRPIAAPKKSLRVAQRWVFEHIVEKLVPNMAVTMAFRPGVSIVDNARLHAGRAVVMRIDIRNFFPSVTFPRVRGLFESIGYSPGVATLLGLVCTEAPRRVADLHGRRYAVATGPRGLPQGACTSPGLANFACRRLDARIRGYARKLGFRYTRYADDLVFSHEDADAPVDGMRRAVYRILRAEGFEPNEAKTCVMRRHQLQVVTGIAVNTVPRVSREAVRRFRAIAHQCRTRGVEAVTADIGRDALAYLNGYLSFVRMVNPAQADRLAALVPESGSEKGPQA

SEQ ID NO: 6301 - protein, 483 aa, unidentified
  source 1..483: note = Related to AP024152.1; note = Abditibacteriota bacterium
MSNWQDEIKRLGKREFELREMERLGFWPPATVGDVPQTFDDMRAKIAPINHELRDIAEQTRPLRLRQSEVERELAQTGDIEARLTLIRQQRIERVKIARAERKERRAREREERLATDKVRRRELLPHLGRGVSSRLHFCIPSDAEKLARFQLPVWNEPADLANSLGISREQLAWLCYHREVAPIDHYSHFSIPKRSGGTRAISAPRPYLKAAQAQILTGVLNQVEVHEAAAAFLPGRNIANNAQKHAHCAEGGPSVVLRVDLKDFFPSITFARVAGVFASLGYNAGISTLLALICTESPRIEATFDGQKSFVALGDRFVPQGAPTSPALTNLLCRRLDARLTGLAKHYNFTYTRYADDLVFSSPRSDARVISLQRGIFKILDSEQFTVNPDKVAIMRRGSRQSVTGLVVNSDLGPRLSRRDLRRFRAILHDIETDGADTVSEKMGKSALHYARGYLAFVHMVNPETATKLRLKHTWLNTNGPV

SEQ ID NO: 6302 - protein, 481 aa, unidentified
  source 1..481: note = Related to SDZD01000020.1; note = unidentified bacterium
MSNWRDEIKKLGKREFERREMERLGFWPPASSGDEAQTVEALRAKIAPLNDELREITEKTRPLRLRQTEVERELAATGDIEAQLAEIRKQRIERVKAARVERKERRAREREARLAADGERRHALLPHLGRGVSRRLHFDVASDNEKLARFQLPAWNEPADLAAFLEITREQLAWLCYHREVAPLDHYSHFSIPKRSGGTRAISAPRPYLKTAQAKILEGVLKQVEVHQAAAAFLPGLNIGDNAHKHTHTEAGGPAVVMRIDLKDFFPSINFNRVAGVFVSLGYNAGISTLLALICTESPRIEATFDGQKSFVALGERFVPQGAPTSPALTNLLCRRLDSRLSGMAKHYGFTYTRYADDLVFSSPHSDARVISLQRGVFKILEAEQFIVNPDKVAIMRRGARQSVTGLVVNNNLGPRISRRDLKRFRAILHDIETNGAESVSQKMGKSALHYARGYLAFIHMVNPETATKFRTKHTWLAASE

SEQ ID NO: 6303 - protein, 489 aa, unidentified
  source 1..489: note = Related to NZ_PZZP01000001.1; note = Desmospora activa
MAEEDIKQEAGPLTREEWIAKVRSQGRDNTIREEMIRLGFWSNDELSSEEQRQQATEDEEYQQLLKELNKLKAESAKLSNLNELLKIARKKRIEESKRKRAERKARREREQAEAAQRWQAHKQTHVIHAGRGVSGGLQSTVYDEAKLIENNLPLIRSSLELAEAMEIPVGRLKWLTYHRKTATLNHYQRFTIPKKSGGRREISAPKKSLRAAQQWVKTHILDALTVHPAARGFVSGKSTLDHAEPHLQQAAVVKMDLKDFFPTIRFRRVKGFFHYLGYSEAVSTIFALLCTEPPRKEIQFNGTRYYVAMDERQLPQGACTSPALSNLICRRLDQRLRGLAEKHGFHYTRYADDLAFSCGEDGLNEIGAIINTSRDIIRFEGFAVNEEKTRILRASNRQNITGIVVNQKPNIRRKDLRAFRALLYSVEKNGLEQENRHNHPHFWDYIKGYASYIRMVRPDLEEKLAPRLLRISQKHGLHAPDWCKQVAAK

SEQ ID NO: 6304 - protein, 488 aa, unidentified
  source 1..488: note = Related to NZ_FXTI01000004.1; note = Melghirimyces algeriensis
MAEEETRPLTREEWRKRVQSEGRMETIRKEMIRLGFWNDAQLSPEEKQQQALEDEEYERLQKELNKLKMESAKLSNLKQLLKEARKKRIEESKRKRAERKAQREKEKAEAKKRWQEYKETHVIHAGEGVSGGLQNTEYEEAKLRKNGLPVIGSALQLAEEMNIPLQRLKWLTYHRNTATLCHYHRFTIPKRSGGKREISAPKRSLRQAQEWVKHQLLDRLPIHPAACGFVPGKSTLVNARQHLGQSVVVKMDLKDFFPSITFRRVKGLFQSSFGYSESVSTLLALLCTEPPRKEVEFDGTYYYVAMGDRQLPQGACTSPTLTNILCRRLDRRLQGLASKFGFQYSRYADDLTFSCSKHDAEKLGGLINGARSIIQSEGFKTNEKKTRILRDTNRQTVTGIVVNQKPNIRRKELRRFRALLHRVEINGLNEENRDNHPNFWEYISGTAGYIRMVRPDLEARLASSLIGIGEKYNLHIPPWCKQATVADR

SEQ ID NO: 6305 - protein, 486 aa, unidentified
  source 1..486: note = Related to nan
MAEGENRPLTREEWIARVREEGREETIRSEMIRLGFWSNDSLPEEERRQQALEDEEYRRLRQKLAELQRESAKLENIDQLLKEARRKRIEESKKKRAERKERRERERAEAKKRWESYRQHHIVHAGVGVSGGLQETEWDEEKLRQHQLPLIRTAEELAEAMGITLSRLKWLTYHRQTATVCHYYRFTIPKKSGGRREISSPKKALREAQSWIKEQILDRIPPHPAACGFVPGKSTLDHARQHLRQHVVVKMDLKDFFPSITFYRVKGLFQSFGYSELISTLLALLCTEPPRKEVTFDGKVYHVAIGERQLPQGACTSPAITNLICRSLDRRLEGLAKAKGFRYSRYADDLAFSGGIDGEQQIGSLLNMARRIIRDERFEVQEEKTRVMRSSNRQKITGIVVNEKLNLRRRELRAFRALLHSVEKNGLAQENRHHHPDFWGYIKGMANYIRMVRPDWEARLAKQLVRIGKKHELPVPKWCQQAVVKG

SEQ ID NO: 6306 - protein, 487 aa, unidentified
  source 1..487: note = Related to QJKK01000010.1; note = Thermoflavimicrobium daqui
MGGEAMAEEQNHPLTREEWLERLQQEGRTEVIKKEMIRLGFWSEEPLTPEEEEQLAIENRERQQLEKELQRLKEESEKLPNIQEKINEVRKKRIEESKRKRAERKAQRELARQEAKKRWEEHQATHIVHVGEGYSAGLTSIHYDEEKLITHQLPLIRSAMELAEAMEMPLSRLKWLTYHRDTATLCHYARFTIPKKSGGVREISAPKKELRQAQAWVKEHLLDPIPVHSAAYGFVQGRSTVDNAKQHLQQAVVIKMDLKDFFPTIDFYRVRGVFQSFGYSEAISTLFGLLCTEPPRSEVEFDGRYYYVAMGKRQLPQGACTSPALTNIICRRLDQRLSRLADTHGFYYTRYADDLTFSCKEASMSRIGLLLKKIRDIVSSEGFMINEAKTRILRASRRQRVTGIVVNEKPNLSRKELKAFRALLHNVEKNGLEKENRSNHPHFWEYIKGYVNYIRMVRPDLGEKFTQQLVRIAGKYRLNLSLPVNNL

SEQ ID NO: 6307 - protein, 481 aa, unidentified
  source 1..481: note = Related to NZ_FORR01000019.1; note = Thermoflavimicrobium dichotomicum
MSEEQFQPMTREEWIERIKKEGREEVIKKEMIRLGFWKEEPVDPATAEQIAKEQEERKQLVEELNQLKKESEKLPNIKEKLKEAREKRIEESKRKRAERKAEREKERQEAKKRWEEYKATHVIHVGDSFSAGLQNFDHDEEKLIRLGLPLIRSAMEMAEVMHLPLSRLKWLTYHRNTATLCHYARFTIPKKNGGVREISAPKKELRQAQAWVKERILDRIPVHQAAYGFVPGRSTVDHAKQHLKQAAVIKMDLKDFFPTINFWRVKGVFRSFGYSEAISTLFALLCTEPPRTEVEFDGKYYYIAMGERQLPQGACTSPALTNIICRRLDHRLSRLAETLGFTYTRYADDLAFSCDESALCRIGALMTKARDIIDSEGFMVNEEKTRVLRSSQRQKVTGIVVNEKPNISRKELKKFRALLHNVERNGLEKENRQNHPRFWEYIQGYVSYIRMVRPDLGEKFSEQLVRIARKYQLRLSAPVSK

SEQ ID NO: 6308 - protein, 473 aa, unidentified
  source 1..473: note = Related to NZ_FQVL01000006.1; note = Seinonella peptonophila
MSEETQPLTKEEWRERIQREGKEETIKQEMIRLGFWTDKPLTPEEMASVEADDQAEAALKSELNKLRSESRKWSDTDQLIKKARQKRIEESKQRRAERKKARAIERKQQEERWAEYRQNHLVHLGNGVSGGLEQSTTNQERLKQLDLPLIETPQQLASEMGITLGRLKWLTYHRDLATLSHYYPFTIPKKNGGIREISAPKKELRAAQAWVKQSLLDQLSTHPAAYGFVQGRNTVDHAKQHLNQAIVVKMDLADFFPTITFYRVRGLFASFGYSQQMSTVFALLCTEPPRKRVRFDGTYYYVAMGERQLPQGASTSPAITNLICQRLDQRLSGLAEKENFIYSRYADDLTFSTSDQQDRRVGALLQTVRQIIHFEGFQPNEAKTRILRKSRRQRVTGIVVNEKANLSRQDQRRFRAILHNVGKNGFDIENRDHHDDFLAYLQGYISYAHMVRPDLAETWQNQLDRAIAAHLKD

SEQ ID NO: 6309 - protein, 487 aa, unidentified
  source 1..487: note = Related to NZ_PZZP01000001.1; note = Desmospora activa
MSEEQSQETQQLTREEWIQRIREETKGEVIKKEMIRLGFWSEEPLPPEEKEQQEQEDREFARLQKELQALQQESEKLEDTDTLIREARKKRIEESKRKRAERKAEREQRLAEAKKRWEEYQANHVVHAGIGVSAGLQNHTMNGYQLEQLGLPILTSPAIMAAEMGIELSRLKWLTYHRDTAALSHYHRFTIPKKSGGRRIISAPKPELRHAQEWVKTYIVDRVPVHEAAYGFIPKRSTVDNAQHHLQRAAVIKMDLKDFFPSITFQRVKGLFQSFGYSEAVSTLLALLTTEPPREKVSFDGKFYYVAVGKRQLPQGACTSPGITNLICRRLDARLTELAEKMGFTYTRYADDLTFSCDQDGLEQLGVLLRGVRDIVRFEGLQVNEKKTRVLRASRRQRVTGIVVNDKPSLPRQELRTFRALLHNVEKNGLEAENRENRPHFWEYIQGYVSYVRMVRPDLGEQFGEQLQRIAAKYGLKLNAAREREAK

SEQ ID NO: 6310 - protein, 480 aa, unidentified
  source 1..480: note = Related to NZ_CP048104.1; note = Kroppenstedtia pulmonis
MAEEEKQPLTREEWIQRIQEESRDEVIKKEMIRLGFWIEKPLDPEDEKQQAQENEEYARLQKELNQLKQESAKLSNVDALIREARKKRIEESKRKRAERKAQRERERSEAKKRWETYRSQNIIHAGIGVSGGLQYHESDEEKLKSLQLPLLSSPAVLADEMGMDLSRLRWLTYHRDNATLCHYHRFTIPKKGGGERLISAPKQELRKAQNWVKEHILDRIPLHDAAYGFVPGRSTVDNASCHLGQEAVIKMDLQDFFPSITFRRVKGVFGSFGYSEAISTLLALLTTEPPREEVMFDGKYYYVAIGERQLPQGACTSPGITNIICRRLDQKLEELARGLNFYYTRYADDLTFSCGKESTQHIGILLRGVREQVRFEGLRVNEGKTRILRSSRRQRVTGIVVNEKPNLTRKELRRFRALLHNVEANGLEAENRDDHPRFWSFIQGYVSYIQMVRPDVAAKMSDQLNRIAEKHGLHRTIRTS

SEQ ID NO: 6311 - protein, 486 aa, unidentified
  source 1..486: note = Related to NZ_JAECVR010000023.1; note = Paenactinomyces guangxiensis
MAEENQQETQPLSREEWIERVMQEGKDEVIRQEMIRMGFWSEKPIPPEEKAKQEQEDEEYALLTEELNRLKQESEKLGDIESMIRERRKQRIEESKRKRAERKAERERLRAEARKRWEEYKSKNVIHVGAGFSKDLQSFDMDEEKLRLNKLPVIRTAEELAGKMGISLSELKWLTYHRDTATICHYHRFTIPKKSGGMREISAPKPKLRRAQEWVKTHILGGSEVHPSAYGFIPGRSTVDNAKCHLKRAAVIKMDLKDFFPSITFWRVKGLFQSFGYSAAISTLLALLCTEPPRKQVQFDGKFYYVAIGERQLPQGACTSPGITNLLCRRLDLRLTGLGEANGFTYSRYADDLTFSCDEEGLPQMGGVINTARHIIRFEGFRVNEEKTRVLRSSRRQKVTGIVLNEKVNISRKELRAFRALLHNVEKTGPEKQNIYHHPDFWGYIKGYASYIRMVRPDLNETLEQQLNRINRKYNLEKSAVAEAKG

SEQ ID NO: 6312 - protein, 487 aa, unidentified
  source 1..487: note = Related to NZ_LN812102.1; note = Risungbinella massiliensis
MSANNPSEEVQPLSREEWVQKMREEGGKGNLVRKEMIRLGFWTEKTLTVEEYQKKRELDQEYQELSQQLEKFQQENAKLEDVKTLVRQARAKRIKESKERRAKRKAEREEALAQRQRKWQEYRDTHILHVGENVSSHLEDQEYEEEKLISQQLPILRGSLHLAEEMGVSLSRLKWLTYHRKTATISHYHRFTIPKKSGGKREISSPKSELRQAQSWIKQEILDHLKVHSQAYGFVPSKSTVDNALPHVGKQVVVKLDLQDFFPSITFPRVRGLFRSFGYSGEVSTVLALLCTEPPHREIEFQGKKYYISIEERQLPQGACTSPAITNLLCLRLDERLAQLASKRGFTYSRYADDLTFSCSGDSEQQIGKMLGTIRKIVQAEGFQVNEKKTRVLRSSGRQRVTGVVVNEKPSLDRKRLRNFRALLHNVEKKGLDAENRENHPNFWQYILGNASYIQMVRPDLKEEISQKLAKIAEKYGQNYSLQSVNK

SEQ ID NO: 6313 - protein, 485 aa, unidentified
  source 1..485: note = Related to NZ_SLXV01000034.1; note = Baia soyae
MSNETNYEQHQPLTKEEFQARMKEMGKSQFIREEMLRLGFWTEETLTPEEQAERSQDLSELQIVQKELDELRSEARKLGDIKEQLKIARQKRIEESKRKRDEKKAQMEQASAEAQKQWTKYKKIHIPHVGNRYSIGLEHTGMDKEKLEAWRLPVLQTAKELACAMEIELNRLQWLTYHRDTATLCHYHRFSIPKKSGGTREISAPKPELRQAQQWVKEHILDLLPIHPTAYGFVKGKSTVDNARVHIQKRIVVKMDLQDFFPTITFWRVRGLFEWMGYSRQISTLLALLTTEPPHQQVKYDGKYYYIAIGERQLPQGACTSPAITNLITWGMDQQLHAWTEKMGYAYSRYADDLTFSSETLSSSQQVGVLLKRVRSTVKLHGFQVNEEKTRILRHTRRQRVTGIVVNEKPNLTRRRLRQFRALLHDVELHGLEAANRQNHPNLWAYINGYISYMAMVRPDLSHKYNEQASRISQKYGLSYVGIPV

SEQ ID NO: 6314 - protein, 482 aa, unidentified
  source 1..482: note = Related to JAKWBN010000001.1; note = Shimazuella sp.
MSEENKVLTREEWINKIRSEGKAETIRSEMIRLGFWEAPNLSEEEREQQAKEDEEYKEVRKELQELQKKSKQLKDIDFLLKEARKRRMEESKKRRAERKAVRKKAQAEAKEKWRKYRQNHVIHVGDGVSAGLASTETNEQKLMQHQLPLIRSALQLAHDMNITLSELKWLTYHRNTATINHYQHFTIPKKSGGKREISAPKSKLRSAQSWIKANILDKLAVHDAAYGFVTGKSTVDNAKHHIGKDAVVKFDLKDFFPSISFVRVRGLFESLGYSRAISTLFALICTEPPRQEVEFNGKMYYVAINERQLPQGACTSPTLTNLLCRRLDEKLTHLAKEKGFTYTRYADDLTFSGNEEALKQIGSLMGSVRSVVDFEGFIINEAKTRVLRNGRRQRVTGIVVNEKPNLTRKDIRSFRALLHNVEHHGLEQENHRNHPHFWEYINGYVSYVQMVRPDIGKKFAIQVQRIADKYGLPIRVYIEKLG

SEQ ID NO: 6315 - protein, 482 aa, unidentified
  source 1..482: note = Related to NZ_ATZF01000012.1; note = Shimazuella kribbensis
MSEENKMLTREEWIAKIRSEGKHETIRGEMIRLGFWEAPNLTDEEIEQQAKEDEEYTEVRKELLALQKESKQLKDIDFLLKEARKRRIEESKQRRAERKAQREKSQAEAKEKWKQHRETHVIHVGDGVSAGLASKETNETKLMERQLPLIRSALQLAEEMGITLSELKWLTYHRNTATINHYTRFTIPKKNGGQREISAPKAKLRTAQTWIKETILDNLTVHPAAHGFVTGKSTVDNAKHHIGKDAVVKFDLKDFFPSISFVRVRGLFESLGYSRAISTLFALICTEAPRKEVEFNGKIYYVAMKERQLPQGACTSPTITNLLCRRLDEKLTQLARDKGFTYSRYADDLTLSGNGDTLQQIGSIMNSIRNIVSFEGFVVNEEKTRVLRAGRRQRVTGIVVNEKTNLTRKDIRSFRALLHNVEQKGLEEENHKNHPYFWEYINGYVSYVQMVRPDIGQKFATQVLRIAEKYGLPIRVHAKKLG

SEQ ID NO: 6316 - protein, 485 aa, unidentified
  source 1..485: note = Related to JACXAG020000009.1; note = Hazenella sp.
MSEDSKPLTRAEWYERIKQEGKYETIRSDMLRLGFYQEPEVSPQKKEQWKQEDEAYQQLLQELQQVQLEAGKLPKINDLLAEARQKRIAASRQKRVERKAVRLKEKEEQQAHWQQYKADHIIHLGRGVSAGLQQQETDETQLNKLGLPVLTSSKQIATQIGLSLSELKWLTYHRNTATISHYHHFTIPKKNGEKRVISSPKPLLRIAQSWIKEAILDHIDVSPHALGFLPQKNIMDNARPHVKKDLIAKMDLKDFFPTITFWRVRGLFQSFGYSEAISTLLALVCTEPPRKKVSFAGKVYHVALGERQLPQGACTSPSLTNIICRRLDSRMNGLADSLNMTYTRYADDLTFSGTKVKNHHIRTLLSKSRSIITFEGFHINEEKTRILRATQRQKVTGIVVNKKLNISRQELRSFRALLHNVKRSGLVEENRDQHPYFWGYIIGYAGYIRMVRPDLTQRIASELIEIAQKYQQEIPAWVHQTSKSE

SEQ ID NO: 6317 - protein, 484 aa, unidentified
  source 1..484: note = Related to NZ_SMAG01000003.1; note = Hazenella coriacea
MTEEQNQEEVKQLTREEWIERIKSEGRTEAIKKEMLRLGFWIEKPLTPEEKREQAEDELKLKQLQAELQELQKESAKISNLNKILKQARAKRIEESKKKRADRKAAIEKREADRKARWQDYKESHIVHVGDGLSAGLQSFETDEKKLMEQRLPLIRSAVQCADEMGITLSQLKWLTYHRDTATINHYYRFTIPKKNGGEREISSPKPLLRQAQAWIKAHILDQIQVHSAAYGFVPQINTVDNAKQHVNQAAVIKMDLKDFFPSITFWRVRGLFHSFGYSEAISTLFACLCTEPPRKEASFNGKIYHVALGERQLPQGACTSPSITNILCRRLDERLTGLAQTNGFIYTRYADDLTFSCQESSLSKIGTLLNSVRNIVKFEGFTVNEEKTRVLRASRRQRVTGIVVNEKPNLTRQDLRRFRALLHNVEKNGLEAENRSNHPNFWAYIQGTTSYIRMVRPELGEKLGEQVERIAIKYHLAGSVVSK

SEQ ID NO: 6318 - protein, 485 aa, unidentified
  source 1..485: note = Related to NZ_BMEX01000001.1; note = Kroppenstedtia guangzhouensis
MQGKNDGEVQPLSREEWLERVMQEGRDEVIRREMIRMGFWSEEPLPPEELEKQKQEEKELAQLKEELESLEEKTRKLGDLEAMIRRRRQERIEESRRRRAQRKEERIRRRAEAQAKWKEYREQHVVHVGEGFSGDLELLNSDEERLRESGLPLIHTPQELAEAMEIPLGRLKWLTYHRDTATISHYHHFTIPKKNGGKRILSAPKKHLRQAQEWIRAHLLNRVEVHPCAYGFVRGKSIVDNAAHHVGKAAVIKMDLKDFFPSVHYPRVKGMYQSFGYSPAVSTLLALLCTEPPRRKVEFDGRIYHVAVGDRHLPQGAPTSPAITNILCRRLDERLLGLADSHGFAYTRYADDLTFSCWPSGEKRIGALLGTARGIVRYEGFEVNEEKTRVLRRSRRQAVTGIIVNEKTNLNRGELRAFRALLHQVEQKGLKGQNIHNHPNFWEYIKGYTSYIEMVRGEAAAPYREQVKRIARKYGLDPKVASDHA

SEQ ID NO: 6319 - protein, 484 aa, unidentified
  source 1..484: note = Related to PVTZ01000010.1; note = Laceyella sediminis
MSEEKRPLTREEWIQKVSANGREATIREEMIRMGFWSNDSLTEEEKKQQQAEDEERARLAAELQRLQSKGMSMPKVQQLLQEVRQKRIEASRKRREEQKAEREQKRREAKAAWEQHRARHVVYAGEGVSGGLENKETQTEMLRQAGLPIVTTAEELAEAIGISVSKLKWLTYHRNTATLSHYFRFTIPKQNGEEREISAPKQTLRQAQAWIKTHLLDRLPVHSAAQGFVPGKSIVDNAKQHVGQAAVIKMDLRDFFPSIHFYRVRGLFQSFGYSEMISTLLALLCTEPPRRAVTLGGRVYHVAIGERQLPQGACTSPAITNLLCRRLDERLSGLAQKYGFQYSRYADDMTFSCSEAGIGQIGAVINQVRRIVAFEGFTVNEDKTRVLKRTNRQTVTGIVVNEKINVNRREWKQFRALLHNVEKNGLEAENRKGHPHYWDYIKGYANFVRMVRPDLEEKLIRQLRAIAVKHRLSLPGWARKTVQS

SEQ ID NO: 6320 - protein, 489 aa, unidentified
  source 1..489: note = Related to NZ_CP034118.1; note = Staphylospora marina
MSDERMEEKRPRTLEEWVEQVRRLGREHAIRTEMIRLGMWEEKELTPEEKAQQQREDAEYQKLAEESMRLQRELTKLGNLQHLLAEARKKRIEESRRRREERKKEIAKREAERKRRWAEHLEMHIVHAGAGVSGGLNAFEHQEEKLMAAGLPLIRSARELAELMDMPISRLRWLTYHRNAATVCHYHRFTVPKRGGGLREISSPKPELRRAQEWIKREILDRFPVHSAATGFLPGKSVLDNAAPHLGQAAVIKLDLKDFFPGITFHRVKGLFRSFGYSEAIATLLALLTTEPPRRPVEFDGKMYHVALGERQLPQGACTSPAITNLLCRKLDARLEGLARKHGFRYSRYADDLTFSCPAERTDAIPVLLGTARAVIRHEGFEVNAEKTRVLRSSTRQQVTGVVVNEKPNISRNELRRFRAILHRVWQNGPEAENRDGHPRFWEFIQGYAAWIRMVRPDLEGKLAVQLARIAEKHRLPVAGWVKETAVRG

SEQ ID NO: 6321 - protein, 464 aa, unidentified
  source 1..464: note = Related to NZ_CP036426.1; note = Tautonia plasticadhaerens
MNEDEKARLYREVTRSASESAVLRRMHALGFWPHGEGLPPDPPEEHAERARIEAELADLRRTHARVEDPEAALVEERRRRWEESKARRAEARARRLQEQQVRREEWDRHRSSTMVHAGIGVSAGLQDARSDEEALSRRGLPVLHRAEDLAGQIGIELGALRWLTYHRRSASVVHYHRYEIAKKTGGVRCISAPKPALAFAQRWVFDQILRRLDPEPQAHGFVPGRSIVTNASTHAGRAVVVNLDMKDFFPSVTFRRVKGLFRAIGYSEHLATVLALLCTEPPRVPATLDGKTTHIALGDRVLPQGACTSPSITNALCRRLDRRLDGLARRHGFTYTRYADDLTFSGDRPAVVGRLLRSVRSILAAEGFVEHPSKTRIMRRGGRQEVTGVTVNDRPNVSRRELRTLRAILHNAARLGLESQNREDHPDFASHLRGRVEFACMVDPSRAGTYRDALSRALQGPGAP

SEQ ID NO: 6322 - protein, 464 aa, unidentified
  source 1..464: note = Related to NZ_RYZH01000020.1; note = Tautonia sociabilis
MNQDEKARLYRRVRHLASDSVVLRRMQTLGFWPKGEGLPPDPPEEAAERARIEAELADLRQKFAKVSDPEAALAEERRRRWEASKARRLEAKRRRAEEQRNRRAGWDQTRSATVVHAGIGVSAGLQGRQSDSEALRRRGLPILHQAEDLADRIGIELKALRWLTYHRRGATVVHYRRYEIAKKSGGVRCISAPKPALAWAQRWILDEILRRLEPEPQAHGFVSGRSIVSNAEPHSGKAVVINLDVKEFFPTITFRRVKGLFGSLGYGEHIATVLALLCTEPPRVAATLDGKTYHVALGDRVLPQGACTSPALTNAICRSLDRRLDGLARRHGFTYTRYADDLTFSGNRTAASGRLLRSVRIILVDEGLIEHPTKTRVMRRGGRQEVTGLTVNDRPAVSREELRTLRAILHSASRFGLDSQNRDGHPDFASHLRGRVEFACMVDPSRTPALREALDRALRGPSGS

SEQ ID NO: 6323 - protein, 780 aa, unidentified
  source 1..780: note = Related to JAGQQD010000063.1; note = Planctomycetaceae bacterium
MSDNEKAQLYKRLIQQTNDWFVLERMRELGFWPEDQPLPTVPQEEAVERTELEAEIAKLRQQNSKVANPEAALAEERKRRWEASKARRAEAKIQKEKERQARREAHEAHKETTIVHAGLGVSGGLQGTGSNPVALKSRWLPVLHRAEELAAEMGIELNTLRWLTYHRRGAAVVHYHRYELPKKTGGSRAISAPKAALDQAQRWILVNILNRLNVESQAHGFVSGRSIVTNATEHVGREVVINLDLKDFFPTITFRRVKGLFVALGYGEHIATVLGLLCTEPPRVAAEFAGTTYHVALGDRVLPQGACTSPAITNAICRRLDRRLAGLAKKHGFNYTRYADDLTFSGDAPRRVGRLLKSVRAILVDEGLTEHPSKTRIMRKSSRQEVTGVTVNEKPSLSRMEFRKLRAILHNAAKFGLESQNHEQHPNFENHLRGKVAFAAMVDPSKSAALWDAFHKAITEPQMTFSSVQEGSVDDRRRGTLIGLAVGDALGAAVEFKPPGTFEPVTNYRAGGPHRLNPGEWTDDTSMALALADSIAKAGWDLDDQARRYCDWWRDGKYSVNGRCFDIGITCRSSLGQFHLTGDARKAASTDEYSSGNGSIMRLAPVSIQFASLFPDRIDELAHLAEESSLTTHASAQCLSACRYFALILAGLISGRSREEVLSPDWEPLSQLRELKPLAEPVEDVALGSFRRLNPPEIKGSGYVVKSLEAALWAFHDARDFEEAVLKAVNLGDDADTTGAVCGQLAGAYWGESGIPARWRNYLARTDLLEAALKGMIEKD

SEQ ID NO: 6324 - protein, 461 aa, unidentified
  source 1..461: note = Related to JADJAE010000011.1; note = Deltaproteobacteria bacterium
MATDHKAALYRRLVREASDAAAIERMRVNGFWPWGQGIPRDPPDELKERAQIEAEIAKIQAQSTKSVDPDKALAQERKRRWEESKKRRAAKRLERASLLKKRRDDFIRYRKANVLHLGVGVSAGLQDTRPDTGELTRRGLPSLTNGSDLAMMMGVPLASLRWLCFHRRGAALMHYHRFGIPKKSGGTRSISAPKPRLANAQRWVLQNILERLDTAPPAHGFVRHRSILTNATPHARRAVVMNFDLKDFFPSITFRRVKGLFRKLGYNEHVATILGLLCTEPPRARVEVDGRVIYLALGDRVLPQGACTSPAITNALCKRLDARLLALASRHGFTYTRYADDLTFSGDDGALVGRLRRSVVSVVSSEGFTENTAKTRIMRQGSRQEVTGLTVNDRPTMPRDEFRQLRAMLHNAAKHGLESQNRTQHPAFAQHLAGRVEFACWADPTRAEKLRSALAAALARG

SEQ ID NO: 6325 - protein, 461 aa, unidentified
  source 1..461: note = Related to JAIEMG010000089.1; note = Gemmataceae bacterium
MPDNEKARLYKRIVQQTNEHTLLERMRIHGFWPAREGLPQGPAEEAAERTRIEAELAELRKAHSAVKNPEKALADERKRRWEESKKRRAANKAKREEEAKQRREAWAAVRQESVVHAGAGVSDRLHQTTSDVAELTRRHLPILHQSADVAKQLGIGLPALRWLTYHRRGATLVHYHRYSIAKKTGGARCISAPKPALAKAQHWVLENILDRLDVDPAAHGFIRGCSIVSNAIPHANRGVVVNLDMKDFFPSITFRRVQGLFRKLGYSGHVATLLALLCTEPPRIATELDGKVYHVALGERILPQGACTSPAITNALCRRLDRRLDGLARKNGCAYTRYADDLTFSGDDPGVVGHVLRNVRYILKGEGFVPHPNKTRVMQRASRQEVTGVTVNVRPTLARQEMRTLRAILHNAAKHGLESQNRDGRPNFAAYLRGRVAFACMVDPTRAEALRAALALALRPV

SEQ ID NO: 6326 - protein, 460 aa, unidentified
  source 1..460: note = Related to JAEUIF010001171.1; note = Planctomycetia bacterium
MANDEKAQLYRRIVQQNSEQQLLERMRIHGFWPQRAGLPQDPPAEAAERARIEAELEELRRTQSAVKNPESALHAERKRRWEESKKRRAERKAQKLQEQHKRREAYEALRQTTIVHAGAGVSGRLQETISNEAELRRRQLPVLHIAADLAREMGMPLSKLRWLTYHRRSATLVHYHRYEIEKKTGGVRCISAPRPALKQAQGWVLEHILGKLTVEPQAHGFVPGRSIVTNALPHVGRAAVINLDLKDFFPTITFRRVQGLFRKLGYSGHLATLLALLCTEPPRVPAELDDKVYHVALGQRVLPQGACTSPAITNALCRRLDRRLDALARRHGFAYTRYADDLTLSGDNTEMIGHVLRNVRYILKAEGFTLHPTKSRLMRRGQRQEVTGVTVNVRPGVSRQEVRTLRAILHNAARHGLESQNREKRPNFAAYLKGRVEFVRMVDPQRGRVLRAALQAVLRG

SEQ ID NO: 6327 - protein, 470 aa, unidentified
  source 1..470: note = Related to nan
MADDEKAKLYQQIVSRADEQRIVERMRLHGFWPADKPLPKDPPDEVRERQQVEAELAHLRREHSTVRDPEKALAQERIRRWQESKKRRADRKVQKLQEQVRRREAWKKTRDANIVHTGEGFSAGLQQKNSDAAALQARGLPVANDSPELANLIGIKLSTLRWLTYHRKGATVVHYHRYSISKKTGGLRYISAPKAALRQAQEWVLQNILSRLPVEPQAHGFVLERSVVSNALPHVNKNVVINLDLKDFFPSITFRRVKGLFRQVGYGEHVATVLALLCTEPPRVATELDGKVYHVALGQRVLPQGACTSPAITNLLCRRLDRRLAGLAKRHDFAYTRYADDLTFSGENGKAVGRLLRSVRSILTSEGFAEHPRKTKVMRRASRQEVTGLTVNVRPTVSRKEVRQLRAIIHNVARHGLESQNRSDHPDFEGHLRGRVQFVRMVDPQRGEPLLAALHRALGTSAGDGTANIS

SEQ ID NO: 6328 - protein, 461 aa, unidentified
  source 1..461: note = Related to JADLFP010000276.1; note = Acidobacteria bacterium
MNEKARLYQRITSEMNEETVLARMRMHGFWPASAGVPPDPPEEVKDRQRIEKEIARLAGERKKAADPEKALAQERNRRIEESRKRRAELKEKRAAEREARQKEWAAFRERSVVHAGTGVSAGLETPGRSSLEELVRRGLPMMHDGQDLARWLGITIGKLRWLTYHRNAAALVHYHRFGIPKKSGGIRAISAPKASLAVAQRWILTRILSRLTPDDAAHGFVHGRSIVSNAAPHAGRRVVINMDMKDFFPTVTFRRVKGLFRRLGYNEPVAVLLALLCTEPPRVAAELGGKAYFIALSSRTLPQGACTSPAITNAVCHRLDRRLTGLAARHGFTYTRYADDLTFSGDDATAVGRLLRSIQSIAGSEGFVPHPEKTRVMRRGERQEVTGVTVNDKVGVSRREVRELRAILCNAARLGLATQNREAHPDFAGYLRGRVAYVAMVDPSKKSKLEAALARALEART

SEQ ID NO: 6329 - protein, 461 aa, unidentified
  source 1..461: note = Related to MGST01000139.1; note = Deltaproteobacteria bacterium RIFOXYA12_FULL_58_15
MDEGEKRNLYRRIVASVPEDMLLGRMRVYGYWPTGVPIPADPADEVAQRKEIEREIAKLQSAHSTAKDPDKALAEERKRRWDESKKRRAENKKKREAENKQRREAWDIYRKKTVVHAGEGVSSGLQDVLSDTDALVARGLPVMHCAADVAVMLGLPLPTLRWLTFHRRATALVHYHRFDIPKKTGGRRLISAPKATLKKAQQVVLDNILSRLPTEPEAHGFVAQHSIVTNAACHAGKAVVINVDLKDFFPSIGFRRVRGLFQRLGYSGQVATMLGLLCTEPPRIKAELDGKVFHVALGERVLPQGACTSPAITNTICRRLDRRLVGLASKHGFTYSRYADDLTFSGNVPKKAGRLLRSVRAILENEGFAENGKKTRVMRQSRRQEVTGLTVNDKPRVSREQRRELRAILHNAAKSGLESQNREGRSNFASYLRGRVAYLSMVEPERAALLKATLERALAKR

SEQ ID NO: 6330 - protein, 460 aa, unidentified
  source 1..460: note = Related to JAIOJK010002653.1; note = Sandaracinaceae bacterium
MSDDKAKLYKLITSQLSEHQVLWRMRELGFWPEGQPIPDEPLDAQEERAKLTKELEQLRKQGAKIANPEKALAQERIRRWQESKKRRAIAKAERAASAKERSEKWKAHKAVALVHAGEEHSAGLQDRESDAAKLASRSLPVLHDAPDLAKAMGIELSALRWLTYHRRAAALVHYHRYTIPKKAGGTRAISAPKPALAKAQEWVLGAILDRLVPEPEAHGFVAEHSVLTNAAPHAKKKIVVNLDLRDFFPSLGFRRVKGLFRKLGYSEHIATLLSLLCTEPPRVEAELDGKVWHVALGERVLPQGACTSPAITNAVCRRLDRRLRGLAGRHGFAYTRYADDLTFSGDDRKKVARLLKSVRAILQSEGFVEHPRKTRVMGSGSRQEVTGLTVNAGVKLGRGDKRRLRAILHNAAKHGLASQNRRDHRDFAAHLAGLVSYASMVEPERAADWKARLDRALSSS

SEQ ID NO: 6331 - protein, 461 aa, unidentified
  source 1..461: note = Related to JACRDB010000039.1; note = Deltaproteobacteria bacterium
MADDEKARLYKRLTTTWNEFEVLARLRHNGFWPAGVGIPQDPPKELKERATLTKELASLRASQLAVKDPEKALSEERTRRFKASLERRKAARARRLADEKTRRERWLKARKDSVVNLGEGVSAGLQDVSCDKAQLQARGLPVLGDAVALAGALGVKLSVLRWLTFHRRGATLVHYHRYAIPKKTGGQRAISAPRRKLAGCQCWVLTQVLEKLHAEPPAHGFVRHRSVVTNATPHVGRRVVVNLDLRDFFPSVTFRRVKGLFRKVGYGEQVATVLALLCTEPPRVPVTFDDKRFYVALGQRVLPQGASTSPAITNALCRRLDRRLQGLARRHGFTYTRYADDLTFSGDEPPRVGRLLKSVKAVVVDEGFQVHPTKTRVMRSTRRQEVTGVVVNHRVGVPRDELRALRATLHNCARHGLQSQNREHHADFAAHLRGKVSWVCMVDPARGPALRAALERALASP

SEQ ID NO: 6332 - protein, 461 aa, unidentified
  source 1..461: note = Related to JAEUKH010000004.1; note = Myxococcales bacterium
MAYDDKARLYRRLVTGTSDATVLARMRLHGFWPLGRGLPADPPDELKKRLDLEQKLVILRDAEVVATQSPEKLLEAERKRRWAALKQRRAEKKAARAKAVQARRDAFAKLRRSSVLHAGIGVSKLLNDTKSDHAALRARGLPVLDAGPDLAMMLGIPLGVLRWLTFHRRGATLVHYHRFSLPKKTGGQRAISAPKPRLKTAQAWVGQNVLGPLALSPHAHGFVPGRSTVTNAALHVGKKVVVNLDVRDFFPTFGFRRVRGLFRHLGYSGQVATLLALLCTEPPRLEASVDGTRVWVALGHRVLPQGASTSPALTNLLCHRLDQRLAGLARRHGFAFSRYADDLTFSGDHPERLGRLLKSARAILAAEGLVEHPDKTKVMRASQQQEVTGIVVNTQLGLPRDTMRRLRATLHNCARHGLDSQNREGHPNFRGYLEGMVAYASMVNPEKAAPLRAALTLALGG

SEQ ID NO: 6333 - protein, 463 aa, unidentified
  source 1..463: note = Related to JAIBCE010000260.1; note = Sandaracinaceae bacterium
MSDTKDDPLKKLKAQLSALPDATVRERMIALGFWPPGEPLPADPIDEANARAALESGRARLLAQAGTAENPEKALRRERIRRLRESQKRRTLRKLERENEKKARRAAWDAEKAGRIVDAGEGVSAGLAQTGSNADQLTGLGLPVVHDASELAERLGLSLSQLRFLTYHRRGATLVHYHRFGIPKKTGGIRAISAPKPALARAQRWVLAQVLDKLEVRAPAHGFVRHRSIVTNAAPHVGRRVVLNLDLESFFPTVGFRRVKGLFRKLGYAEQVATLLALLCTEPPRVEARLDGKRLWIALGQRVLPQGACTSPAITNAICRRLDARLSGLAKHFGFTYTRYADDLTFSGDDRGRVGRLLGCVRKVVTSEGFREHGDKTHVMGSGRRQEVTGVVVNQKLSTARDERRALRAMLHNVARRGLAAENRDGHADFASYLRGRVAFACMVDPSLEPVLRPALDRALARG

SEQ ID NO: 6334 - protein, 468 aa, unidentified
  source 1..468: note = Related to NZ_CP011125.1; note = Sandaracinus amylolyticus
MSDEKDPQKAALVKAVLASLDDATALSRMKTLGFWPVHEPVPGDPPGEIVERAELDAELATLVKIASDGEKPEKALQRERIRRWKESRERRKAKKAERIAEAKQRADAWRAQRAERLVYAGLGVSAGLHDVESDVATLEACGLPIWRDARDVASALGISIAKLRWLTFHRRGATLVHYHRYGIPKKTGGIRAISAPKPALAEAQQNVQSLVLQRIAPSDEAHGFVRERSVVSNARPHVGRAVVVNLDLRDFFPTISFRRVKGLFAKLGYSEQVATVLALLCTEPPRVPAELDGQRYHVALGARVLPQGACTSPAITNLICRRLDARLRGIARALGFTYTRYADDLTFSGDDPTKLASLFGMVRKVIASEGFAEHEGKTRVMRRGARQEVTGVVVNRAVRLPRDEKRALRALLYNCARFGMESQNRDGRPSFASYLRGRVAWAVMVEPALGPRLFPALERALEGRRSDL

SEQ ID NO: 6335 - protein, 467 aa, unidentified
  source 1..467: note = Related to JACOUT010000011.1; note = Deltaproteobacteria bacterium
MPDDAKPKPEKSEKQKLWERISARPDWIVVERMRVNGFWPAGETLPEDPPDEVKERAALEVERARLLKSALAVQHPEQALKAENQRRIEVSRKKKAERKVLREAAARERREAFIKKKRATLVHLGLGVSGGLEKTGADEARLQAFELPVLRDGNDVAAAIGIPLGELRWLTYHRRGAPLVHYHRYDIPKKTGGARHISAPKGKLARAQQWVLDAVLDKVPASAHAHGFVRGRSVVTNARPHVKCKSVVNLDLKDFFPTITYRRAKGLFEHLGYGEHVATVLALLCTEPPRVLVEHDERRTHVAIGERVLPQGACTSPAITNLLCRRLDARLAGLARRLGLAYTRYADDLTFSGDTVDERALLGAVRRVIAAEGFVVHPDKTRVMRKGRRQEVTGVVVNAKPSIAREQWRSLRAVLHNCAKHGLASQNREQHPDFAGHLAGKVAWVRMVDPRRGAQLGLLLQRALARP

SEQ ID NO: 6336 - protein, 467 aa, unidentified
  source 1..467: note = Related to JADZDY010000308.1; note = Deltaproteobacteria bacterium
MADDAKTKSEKSEKQKLWERVSSRPDWVVVERMRVNGFWPQGEKLPEDPPDEVKERTALEADRTKLLKSALAVQDPERALKEENERRILESRKKKAERKVLRDKARRERREAWVKKKQAALVHLGLGVSAGLEHVESDVARLQTLGLPVLNDGTQLAASMGIALAELRWLSYHRRGAPLVHYHRYDIPKKTGGARHISAPKARLARAQQWVLANILDKLPVSEHAHGFVRDHSVVTNARPHVKRACVVNLDLKDFFPTISFRRCKGLFGKMGYSEHVATVLALLCTEPPRVLVELDDKRTHVALGERVLPQGACTSPALTNLLCRRLDKRLAGLARRHGLAYTRYADDLTFSGDSLDESALLGSVRRVVEAEGFRVHPDKTRVMRKGRRQEVTGVVVNTRPSIAREDWRQLRAILHNAAKQGLQSQNRDQRPDFAAHLAGRVAWVRMVDPRRGAQLGLLLQRALARG

SEQ ID NO: 6337 - protein, 461 aa, unidentified
  source 1..461: note = Related to nan
MADDEKAKLYKEIVRRTSDAFLLDRMRTHGFWPEKEPLPKDPPDELSERAKIEAELQKLKQTSLAVKDPEKALAEEQKRRWEESKKRRKEAKEKREAEQKARSEAWAKVRKQKVVHLGLGVSKGLEDTKSDAEKLLENGLPVLHTSADVASMLGVSLPVLRWLTYHRKSVALVHYHRYGIPKKTGGIRNISAPKKSLSAAQEKVLVLILEKIAPEPQAHGFVAGRSILTNAAPHAGRKVVMNLDLRDFFPTITFRRVKGLFHKLGYSEHAATVLALLCTEPARAKAELSGRVYHVALGERFLPQGTCTSPAITNLLCRRLDKRLSGLAQKAGFLYTRYADDLTFSGDDTGEVGRLLRAIRKVITSEGFEEHAKKTRVMRRGRRQEVTGLIVNSRPAVPREEIRRLRAILHNAARSGLDAQNRENVPDFAAHLRGRVAFVEMVDKERGEKLRAALNRVLAGR

SEQ ID NO: 6338 - protein, 461 aa, unidentified
  source 1..461: note = Related to JAEUKD010000148.1; note = Myxococcales bacterium
MAKQDDKARLYHRITQVHHGIVLDRMRVNGFWPMNQGLPPDPAPEAQERKLLEADLAVLKQDAAMSPGDVEKALKAERMRRWEESKKKRAEKKKLREARAAARRAAWVERRKGLVFHAGEGHSGGLQHATSDEAALTKRALPVLHTAHDLAVALGISLARLRWLTYHREGATLVHYHRYSIPKKTGGIRGISAPKPALAKAQKWVFDSVVQKLVIEPEAHGFVVDRSIVTNAKLHVGKRVVTNMDLKDFFPSVTYKRTKGLFVSFGYSEQVATLMALLCTEPPRVAASVDGKPVNIAIGERRLPQGACTSPGLTNAVCRALDRRLGGLAQKLGFTYTRYADDLTFSGNDDKRLGLLLRSVRSIVKDEGFLEHPTKTRVMRRGRRQEVTGVVVNDRPTIAREELRELRAILHNAMRQGLEAQNRKGHPRFIDHLQGRVAYVAMVDPVRGEKLEQALARVLGR

SEQ ID NO: 6339 - protein, 461 aa, unidentified
  source 1..461: note = Related to JAHBWD010000079.1; note = Labilithrix sp.
MDADEKAKLYRRISSANIHLVLERMRVHGFWPQGQGLPPDPADEVAARAAIEKEIGQLQGAAVAGGLAAIEEALREERRRRWEASKKKRAERKKIRQAQDAERRAQWREEKKSRVVHAGVGVSAGLEDRQSNEEELQRRGLPVLHTAADVAASAGVAFPKLRWLTFHRRGAALVHYHRYSIPKKTGGMRAISAPKSALADLQLWVLSRILTPLHVEPEAHGFVPERSIVTNAKPHVRQRVVVNLDLKDFFPSVTFRRVKGLFQKVGYSEHVATLLALICTEPPRIPVEIDGKKLYVALGERMLPQGACTSPAITNLVCRRLDRRLAGLGHRWGYTYTRYADDLTFSGDGKQGLALLLKGVRGIVSDEGFAEHPTKTRVMRPGRRQEVTGVVVNDKLGVARKDVRQLRAILHNAKVHGLASQNRDNHPNFEAHLRGRIAFVHMIDEAKGKKLLDLLKEAIHG

SEQ ID NO: 6340 - protein, 462 aa, unidentified
  source 1..462: note = Related to PABA01000151.1; note = Sandaracinus sp.
MADDPKEKKKALYQQLVESADEELVLARMRELGFWPSSEPLPEDPDDEVKETLELEYELAQLRKKATVVADPQKALEQERVRRWKESKERRAKAKIERELEAKQRREAWETAKKERVWHAGEGVSAGLESHTPSPDGVRFGAPPIATPKALAEAMGIDLPKLRWLTYHRRAAALVHYHRFSVPKKTGGLRHISAPKKDLRRAQEWILVHVLERVGPQPTVHGFQRGRSVKSNATPHVSKRVVVNLDLEDFFPTLGFRRVKGVFRSVFGYPESVATVMALLCTEPPRVEAELDGKVFHVALGERVLPQGACTSPMLTNIACYALDRRLGGLAGSLGFAYTRYADDLTFSSDDPRKTGRLLKAVRDVVKNEGFVVNEAKTRVMRRGGRQEVTGVTVNRKANVSRKERRRLRALLHNAKKTGLAAQNRTKHPRFREHLRGRIAWIGMLDAAQGAKLRAMLDACPD

SEQ ID NO: 6341 - protein, 492 aa, unidentified
  source 1..492: note = Related to NZ_OKRA01000001.1; note = Clostridium sp.
MMENQENNRKDYREAVNAMGKKEFTLIKMQEYGFWPQNLPTPYERQENETSEQYENRKNLLEKYEKVIDEIANLYEEKDKINSKLIELQKKYDETWDYEKIRLDVSKTIMEESIARRAERKKQRELEKRQRSEEWKKEKEDKIVFIGKGYSSLLKDKETHKEKLLAQDLPIINDDKELASFLGIEYKKLRFLVYHRDVVSVDHYYRYTIPKKRGGVRNIAAPKSVLKNSQRKILDDILLKIPTSDEAHGFLKGKSVVSAAESHFKQPELLINIDLEDFFPTITFERVRGLFKSFGYSGYIASMLAMICTYCERMKIEIRGEEKYIKTSNRILPQGSPASPMITNIICIKLDKRLKGLSSKYNFTYTRYADDMSFSFNGDDYELNIGRFIGLVSKIVKEEGFNINKDKTKFLKKNNCQCITGIVINNEEIGVPKKWVKKLRAAIYNANKARNSGEVLSSKVINEISGMTSWIKSVNEKRYKAIIDSAMELINS

SEQ ID NO: 6342 - protein, 495 aa, unidentified
  source 1..495: note = Related to NZ_JAHXPT010000003.1; note = Clostridium weizhouense
MMENQENNMNNRKNYREAVNTMGKKEFTLIKMQEYGFWPKNLPTPYERQESETEEQYKERKCLLEKYEKVIDEISKLYEEKDKINLKLRELQKKYDETWDYERIRLDVSKTIMQESIERRAERKRQRELEKEQRSEEWKKEKENKIVFIGKGYSSLLYDKETDENKLLLQELPIIKDDKELANFLGIEYKKLRFLVYHRDVISVDNYHRYTIPKKKGGVRNIAAPKSILKNSQRIILEEILSKIPTSNYSHGFLKGKSVVSAAKVHVKKPDLLINIDLEDFFPTITFERVRGMFKSFGYSGYVASMLAMICTYCERMKVEVRGEEKYVKISDRILPQGSPASPMITNIICVKLDKRLNGLSTKYDFIYTRYADDMSFSFTGDINELSVGSFMGLVSKIVKEEGFNINKDKTKFLRKNNRQCITGIVINNEEIGVPKKWIKILRAAIYNANKVKNSGEILSNKVINEISGMTSWVKSVNEERYKDIINDAMNLINN

SEQ ID NO: 6343 - protein, 497 aa, unidentified
  source 1..497: note = Related to NZ_FOMG01000001.1; note = Clostridium uliginosum
MMENHENNMNNRQNYRETVNKMGKKEFTLIKMQEYGFWPKNLPTPYEKQENETKEQYAQRKDLLEKYQKIIDEIANLYEEKDKINERLREFQKKYDETWDYEKIRLDVSKIIMEESIARRAERKKQREFEKRQRSEAWEKEKADKIVFIGKGYSSLLQDTETDDEKLLSQELPLIKDDKELANFLGIEYKKLRFLVYHRDVVSVDHYNRYTIPKKKGGVRNIAAPKSILKNSQRKILEEILSKIPTSNYAHGFLKGRSVVSGAKAHTKQPELLINMDLEDFFPTITFERVRGMFKSFGYSGYVASMIAMICTYCERMKVEVRGEEKYVKTSNRILPQGSPASPMITNIICVKLDKRLSGLASKYSFVYTRYADDMSFSFMNDNSDLNIGKFMGLVSKIIEEEGFNINKNKTKFLRKNNRQCITGIVINNEEIGVPRKWIKRLRAAIYNANKVKNNGDLPSSKVINEISGMTSWIKSVNARRYEDIINDAMDLINSQL

SEQ ID NO: 6344 - protein, 385 aa, unidentified
  source 1..385: note = Related to AE015927.1; note = Clostridium tetani
MEESIKRRAKRKKQREFEKQQRSEAWKRTKEDKIVFIGKGYSGSLQDVETNIEKLKAQKLPIIKDDKELAKFLGIEYKKLRFLVYHRDVVSVDNYHRYTIPKKKGGVRNIAAPKSLLKNAQRKILEEILSKLPVSEYAHGFLKEKSVVSGAKAHKNKPELLINIDLEDFFPTITFERVRGMFKGFGYSGYVASLLSMICTYCERMEVEVRGEIKYVKTSHRILPQGSPASPMITNIICRKLDKRLSGLASKYSFTYTRYADDMSFSFINENTDLTYGRLIGLISKIVKEEGFNINKNKTKFLRQNNRQCITGIVINNEEIGVPKKWIKNLRAAIYNANKLKNNEQIPSSKTINEISGMTSWIKSVNSEKYKNIIDDAMNLINSLE

SEQ ID NO: 6345 - protein, 501 aa, unidentified
  source 1..501: note = Related to CP016086.1; note = Clostridium saccharobutylicum
MIESQENSKNNRQEYRKQVNELGKKEFTLIKMQEYGFWPKNLPTPYEKQENETKEEYLERKNLTKEYEKIINAITDLYDEKDEINAKLRDLNKKYNETWDYEKIRQDVSKAIMEESIARRKERKEKRELEKRQKSEAWQKEKADRIVFIGRGYSSLLYDKEDNEEKLLNQGLPVIKDDRALADFFGIEYKKLRFLVYHRDVVLVDHYNRYTIPKKKGGERNIAAPKLILKNVQRKILEEILSKIQVSDYTHGFLKGKSVVSGAKSHIADKASGENTALLINMDLEDFFPTITFERVRGMFKAFGYSGYISSLLAMLCTYCERMPIEVKGKVKYVKTSDRILPQGSPASPMITNIICVKLDKRLSGLSSKYNCVYTRYADDMSFSFMEESSDLNLGKFMGLISKIVNEEGFNINKSKTRFLRKNNRQSITGVVINNDEIGVSKKWIKTLRAAIYNANKLKNSGEKIPQSTINEISGMVSWVRSVNEKRYADIIESGMNLINT

SEQ ID NO: 6346 - protein, 526 aa, unidentified
  source 1..526: note = Related to NZ_QXDJ01000001.1; note = Clostridium chromiireducens
MMENQETSKNKRQDYREIVNQMGKKEFTLLKMQEYGFWPKNLPTPYERQENETQEEYAHRKSLIKKYEKIIKQISDLYNEKDKINQKLRELKKRYNETWDYEKIRSDVAKAIMEESIARRKERKEKRALEKEQKSEDWKKEKERRIVFIGKGYSNSLFDKESDTERLLSLGLPIIEDDKELSELFEIEYTKLRFLAFHRDVVTLDHYHRYTIPKKKGGERNIAAPKSILKNVQRKILEKILSKIPVSHYAHGFLRGRSVVSGAKAHAIDEKHVIIEDSRISKNIDTERSAQERVPLLINIDIEDFFGTITFERVRGMFKSFGYSGYVSSLLAMLCTYCERMPIEVRGEIKYVKTSNRILPQGSPASPMITNIICGKLDKRLSGMALKNNCGYTRYADDMSFSFKQEINKQELRNFIGLTSKIVMEEGFKINHKKTHFLRNNNRQCITGIVINNHEIGVPKKWIKTLRAAIYNSKKLIKSGEKVPMSTINEISGMVSWIKSVNEERYVNIIEEGTNLIKELTYTPYS

SEQ ID NO: 6347 - protein, 520 aa, unidentified
  source 1..520: note = Related to NZ_AP024849.1; note = Clostridium sp.
MIENQETLKNKRQDYREKVNQIGKKEFTLLKMQEYGFWPKNLPTPYEKQENETKEEYAQRKNLIKEYEKIINEISDLYGEKDKINEKLRELKKKYDETWDYEKIRIDVSKTIMEESIARRKERKEQRELEKRQKSEAWVKEKAKGIVFIGKGYSNLLYDKQNDEDKLLSQELPLIEDDKALAEFLGIEYKKLRFLVYHRDVVTVDHYHRFSIPKKKGGERNIAAPKSILKNAQRKILEEILSKVPVSDYAHGFLKGKSVVSGAKAHVAAKADLGEKASGVEKTHDEEKVSGEKTQLLINMDLENFFPTITFERVRGMFKAFGYSGYIASLLAMICTYCERMPIEVRGEIKYVKASNRILPQGSPASPMITNIICVKLDKRLSGLAPKYNCTYTRYADDMSFSFCEENSDLNLGRFMGLVSKIINEEGLKVNKKKTRFLRKNNRQCITGIVINNHEVGVPKKWIKTLRAAIYNANKLTRNGEVVPAKTINEISGMVSWVKSVNGERYSGIIEDGMNLINNI

SEQ ID NO: 6348 - protein, 525 aa, unidentified
  source 1..525: note = Related to NZ_LZZM01000063.1; note = Clostridium puniceum
MIENQENTKNKRQDYREIVNQMGKKEFTLLKMQEYGFWPKNLPTPYERQENETKEEYAQRKSLIKEYEKIINQISELYEGKDKINQKLHELKKKYDETWDYEKIRVDVAKAIMAESIARRKERKEKRALEKRQKGEAWEKRKSESIVFIGKGYSSLLNDKENDNDKLLLQGLPIIKDDKALAEFLGIEYKKLRFLIYHRDVVSVDHYHRFTIPKKKGGERNIAAPKSILKNAQRKVLEDILSKMPVSNYAHGFLKGKSVVSGAKAHVAEKGYLSEETDMVEKAFVVEKVHGTDKVSSENTQLLINMDLENFFPTITFERVRGMFKAFGYSGYISSLLAMICTYCERMAIEVRGEIKYVKTSNRILPQGSPASPMITNIICAKLDKRLSGLAYKHNCTYTRYADDMSFSFKEESSDLNIGRFMGLVSKIVSEEGLNINKKKTRFLRENNRQCITGIVINNDEIGVPKKWIKTLRAAIYNANKLKNNGKEVPVKTINEISGMVSWVKGVNTERYAGIIREGMELIDS

SEQ ID NO: 6349 - protein, 451 aa, unidentified
  source 1..451: note = Related to DPOH01000092.1; note = Clostridium sp.
MMDNNVNNIDRKQNYREAVSVMGKKEFTLLKMQEYGFWPKDLPTPYERQKSETQEEYENRKALLEKYHKVINQINDLCKDKEDINNKLKGLQKKYDDTWDYEKIRKDVAQTIMKESIERRKEVKILREIEKKEKSDAWKKNKSENIVYIGKGYSKWLYLKDTDEEKLKEHEIPIIKDDKELAQFLGIEYRQLRFLTYHRDVVKFDNYTRYTIPKKKGGVRNIAAPKKILKDSQRKILDEILCKIEVSESANGFIQGKSVVSGAESHIDNKVELLINMDLENFFPTITFERVRGMFQKLGYSGYVSSLLAMICTYCERMEMEIKGEKVYVKTTDRILPQGAPSSPMITNIICSKLDKRLKGLADKYGLVYSRYADDMSFSFGEGNIILNAINKYINLNTDKENNQDDLNVGKIIGIISKIIKEEGFNINNQKTKFLRKNNRQSITGIVINND

SEQ ID NO: 6350 - protein, 325 aa, unidentified
  source 1..325: note = Related to FPBY01000301.1; note = Clostridium sp.
MLISSIEYKQLRYLTYHRDVVKFDNYNRYTIPKKKGGVRNIAAPKKVLKGVQRKILDEILKNKIKISDSANGFIKGRSIVSGAEKHKDSNVELLINMDLENFFPTITFERVRGMFMKFGYSGYVSSLLAMICTYCERMEMEVKGENVYVKTSERILPQGSPASPMITNIVCSKLDNRLNGLASKYEFTYSRYADDMSFSFNKGNKVLDDAKDSLNVGKILGIISKIIKEEGFSINEEKTKFLRKNNRQAITGIVINNGEIGVPKKWVKNLRAAVFNGSKLIENGSILPCDLVSEIKGKSSWLSCVNRERYLKIIEECEKIIRFKG

SEQ ID NO: 6351 - protein, 502 aa, unidentified
  source 1..502: note = Related to NZ_CP013238.1; note = Clostridium butyricum
MIENNRNNIDNKQNYRSAVNTMGKKEFTLLKMQEYGFWPENLPTPYEKQSNESPEEFKKRKELLEKYEKIINDINDLYKEKDVINNKLTELKKKYDDTWDYEKIRKDVSQIIMKESIERRKEIKTLRALEKKNKSEAWRKKKSENIVYIGNGYSKGLYKKDTNEEKLLKIGLPIIKDDKELSELLNIEYRQLRFLTYHRDVVKFDNYTRYTIPKKKGGERNIAAPKMILKNAQRKILEEILYKIQISEDAHGFVKGKSIVSGASVHTKNSDIELLINMDLENFFPTITFERVRGMFQNFGYSGYIASLLAMICTYCERMEMKVKGETVYVKTSDRILPQGSPASPMITNIICSRLDKRLNGLALKYDFIYSRYADDMSFSFNKGNMVMEENEHINVDKILGIISKIIREEGFAVNNKKTKFLRNNNRQSITGIVINGTEIGVPKKWVKNLRAAIYNASKLKECGSNIPSDVINEIKGMTAWLECVNKDRYYKIIMKSKELFE

SEQ ID NO: 6352 - protein, 488 aa, unidentified
  source 1..488: note = Related to KB822566.1; note = Clostridium sp.
MDTKSEYRKLINEMGKKEFTFLKMQEYGFWPSHLPTPYERQQNETEQDFQNRKKLLDEFQKLSEQIAQAYKEKREIEIKLSSLQKQYQDTWDYEKIRAVVSQEIMKASIARRAERKAERQRQKQLKTEQWQKRKSENILFIGRGYSNILHKKQTDIQKLKQNNLPILETDKDIAQLLQIEYSTLRYLAYHRDVVTFDNYYRFDVPKKSGGMRHIAAPKTQLKTAQKQILEKILEKTEISDVAHGFIKSKSVLTGAKAHQTSPDLLINIDLENFFPTITFERVRGLFQYLGYSGYISSILAMICTYCERMAVEIKGETKYIKTSERILPQGSPASPMITNMICKRMDKRINGLCQKLGVIYTRYADDMSFSYTGELENFAIGSFLNSIQKIIEAEGFHINKQKTHILRKHNRQYITGIVINNAEIGVTRNWIKILRASIHNAQKLKNAGEAIPKQTKQEISGKIAWLKSVNETRYQKIIQQGKQLLQNS

SEQ ID NO: 6353 - protein, 487 aa, unidentified
  source 1..487: note = Related to nan
MDTRSEYRKLVSEKGKKEFTFLKMQEYGFWPSHLPTPYERQQNETEEDFENRKKLLDEFQKLSDVISKAYTEKNEIEKKLFSLQKEYQNTWDYEKVRAVVAQEIMKESIARRAERKAERERQKQLKTEAWQKRKAENILFIGRGYSNILHKKETDVAKLEQQKLPIIQTDRELANTLGIEYNTLRYLAYHRDVVTFDNYYRFDIPKKSGGTRHIAAPKIQLKMAQRQILEKILQKVEISDVAHGFVKSKSVLTGAKVHHTSPDLLINMDLENFFPTITFERVRGLYQHLGYSGYIASLLAMICTYCERMPVEIKGETKYIKTSERILPQGSPASPMITNIICHRMDKRIYGLCQKLGVTYTRYADDMSFSYIGELENFAIGSFLNSIQKIIESEGFHINKQKTNILRKHNRQYITGIVINNDEIGVARKWVKILRASIHNAQKLKNAGEAIPHKTKMEIAGKIAWLKSVNEKRYHKMIQQGMELLKS

SEQ ID NO: 6354 - protein, 489 aa, unidentified
  source 1..489: note = Related to DNJX01000261.1; note = Lachnospiraceae bacterium
MDRKAEYRNLVKNMGKKEFTFLKMQEYGFWPENLPTPYERQQNETEQDFENRKKLLDEFQKLSEKISGVYQEKSEIERKLSQLKKEYQGTWDYERIRAAVAQEIMKESIARRAERKAERERQKQLKSEAWKKRKAENIIFIGKGYSNLLGKKETDVQKLKENQMPVIETDRELARFLQIEYNTLRYLVYHRDVVTFDNYYRFDIPKKSGGMRHIAAPKTHLKTAQRQILDQILQKAGISDLSHGFIKSRSVLTGARAHSTSPDLLINIDLEDFFPTITFERVRGLYQSFGYSGYIASLLAMICTYCERMPLEIKGETKYIKTSGRILPQGSPASPMITNIICRNMDKRINGLCKKLGITYTRYADDMSFSYIGDTSGFAIGSFLNSINTIIEAEGFHMKKEKTHILRRNNRQYITGIVINNEEIGVPKKWVKILKASIHNAQKLKASGGCVSNKTINEISGKIAWLKSVNAKRYQKVIDQGTEFLKSLT

SEQ ID NO: 6355 - protein, 489 aa, unidentified
  source 1..489: note = Related to KE159636.1; note = Lachnospiraceae bacterium A2
MDTKAEYRELVNNMGKKEFTFQKMQEYGFWPSHLPTPYERQQHETQEDFEKRQKLLGEFQELSEKIAGAYREKTEIEKKLSHLKKAYEGTWDYEKIRAAVAQDIMKESIARRAERKAERERQKQLKSEAWNKRKAEQILFIGKGYSSLLGKKETDTEKLKALQMPVIETDRELANALGIEYSALRYLAYHRDVVAFDNYYRFEIPKKSGGTRQIAAPKTQLKAAQKQILTQILQKAEISDKSHGFVPSRSVLTSAKTHSTSPDVLINIDLENFFPTITFARVRGLFQSFGYSGYTASLLAMICTYCERMPLEVKGEMKYIKTSGRILPQGSPASPMITNIICRNMDKRISGLCQKLGVTYTRYADDMSFSYTGSEDGLAIGSFLNSLTKIIEAEGFHIKQEKTHILRKNNRQYITGIVINSEEIGVPRKWVKILKASIHNAQKLKESGGSVPNKTIYEISGKIAWLKSVNAKRYEKIIRQGTEFLKTLA

SEQ ID NO: 6356 - protein, 487 aa, unidentified
  source 1..487: note = Related to DVLQ01000214.1; note = Candidatus Coprocola pullicola
MDTKSEYRKQVNEMGKKEFTFLKMQEYGFWPSHLPTPYERQQNESAEDFENRKQLLDAFEKLSEQIAQAYQKKQEIEKKLSSLKKQYQNTLDYEKIRSIVAQEIMKQSIAKRAERKAEREKQKQLKSEAWQKKKAETIVFIGKEYSSLLAKKETDIQKLEKNHLPIIQTDKDLADLLQIEYKTLRYLVYHRDVITFDNYYRFDIPKKSGGTRHIAAPKTHLKTAQRQVLEQILQKVEVSDAAHGFIKSKSVLTGAKMHPTSPDLLINIDLEDFFPTITFERVRGMYQSLGYSGYIASLLAMLCTYCERMPLEIKGEIKYIKTSQRILPQGSPASPMITNIICQKMDKRIHGLCKKLGFTYTRYADDMSFSYTGQTDNLAIGSFLNSIHKIIESEGFHIKKEKTHILKKNNRQYITGVVINHKEIGVPRKWVKILRASIYNAQKLKNAGTAVPTKTKQEIAGKIAWLKTVNETRYQKMIQQGTELLKH

SEQ ID NO: 6357 - protein, 487 aa, unidentified
  source 1..487: note = Related to NFLT01000012.1; note = Proposed Tyzzerella sp.
MDTRTEYREQVNKMGKKEFTFQKMQEYGFWPSHLPTPYERQQNETEEDFENRKKLLDEFNKLSEQISEVYKEKREIDIKLSSLKKEYQDTWDYEKIRAVVCQEIMKESIARRAERKAERERQKQLKSEAWNKKKAENIIFIGRGYSGLLSQKETNIEKLEKNNLPIIENDKDLATLLQVEYKTLRYLTYHRDVVTFDNYYRFDIPKKSGGKRHIAAPKTELKKAQRQILEEILEKIEVSEFAHGFIKSKSVVTGAKFHKSGPDLLINMDLENFFPTITFERVRGLFQSLGYSGYISSLLAMICTYCERIPVEIKGETKYIKTSERILPQGSPASPMITNIICNKMDKRINGLCKKLGFTYTRYADDMSFSYIGDTENLAVGSFLNSIKKIIEDEGFNIKKEKTHILRKNNRQYITGIVINNEEIGVPRKWVDILRASIHNAEKLKNSGESIPKETKMEIKGRIAWLKSVNEERYKKIIDKGLKLLEN

SEQ ID NO: 6358 - protein, 495 aa, unidentified
  source 1..495: note = Related to NC_015275.1; note = Cellulosilyticum lentocellum
MIDQTHSQNQRQSYRSEVSQKGKKEFTLLKMQEYGFWPKNLPTPYEKQKAETKEDYEKRKALLKEYDKLSNDLANLYGEKEAINLKLQELKKKYTATWDYEKIRQDIAKTIMAESIARRAERKKEREVAQAEKSAAWQKAKTENIVFIGKGYSSGLQDKLTHTSKLESLGLPLIETDHQLASFLGLTYTELRFLTYHRDVVTSDHYYRYEIPKKKGGFRQIAAPKPLLKQVQRKILVEILEKLPIAEEAHGFIKNRSVVSSAEAHIKAPTLLITMDLENFFPTLTFERVRGMYKSFGYSGYIASLLAMLCTYCERMTIEVSGTTKYVKTSPRILPQGSPASPMITNIICKNLDHRLKGLSATYQLTYSRYADDMSFSYNEAEENLKLGQFLGLVSLIVEDEGFHIKASKTKILRPHNRQCLTGIVINNEEIGVPKKWVKNLRAAIHHAKLLNQTGQPIPTSLSQEIQGKTSWLKSVNPERYKTIIEAGLSVIAHF

SEQ ID NO: 6359 - protein, 504 aa, unidentified
  source 1..504: note = Related to NZ_FQZB01000006.1; note = Clostridium cavendishii
MMDSSSAKRENYRDMVGKLGKKEFTLLKMQEYGFWPKDLPTPYEIQKNESPESYAKRKKLLKEYEKIIDNIAKVYEEKDTINDKLKELKKKYDETWDYEKIRLDVAQQIFKESIERRENRKRLKEEERIKRSNIWKQKKSENIVFIGKGYSNLLKDKESNKDKLLKNGLPIIEDDKALAEFLRLDYSQLRFLAYHRDVTTCDNYYRYIVPKRNGKLRNIAAPKSVLKFSQKRILEDILGKLEVSKNAHGFLKEKSVITGALAHGTGIDLLINMDLEDFFQTITFERVRGMFKSFGYSGYISSLLAILCTYCERMEIEVKGEKKYVATSRRVLPQGSPASPMITNILCLRLDKRLEGLASKYGFLYTRYADDMSFSLEDKSKLLLFKEEKVDKESENKEINKFLGLASKIIIEEGFKINKSKTKFLRKNNRQYITGIVINNKEIGVPKKWVRNLRATIHNASKLKINGDIPDELVNEISGKVAWLRSVNGERYKAIIEKAMEVIK

SEQ ID NO: 6360 - protein, 496 aa, unidentified
  source 1..496: note = Related to JAAYMT010000202.1; note = Clostridiales bacterium
MIENRHQSTANYRKSIEIMGKREFTLLKMQEYGFWPKNLPTPYERQANESEEEFEARQKLTKKYEKLGEDIAKLYEEKEKIEEKLRQLKKEYNDTWDLDKIRKDVARKIMEESKARRAERKRQRELEKKQRSEAWNKRKQEEIVFIGKGYSQLLQQRESDDDKLSKLTLPIVKTDRELAELLGIEYAQLRFITYHRDVVTEDHYHRYAVPKRKGGYRNIAAPKPILRKAQRKILDEILCKIPVSDCAHGFIKGKSVVSSASEHIGSPALVINMDLEDFFPTITFERVRGMFKSFGYSGYIASLLAMICTYCERMPMEVKGEKRYVRTSPRILPQGSPASSMISNILCIKLDKRLSGLAKKNNFTYTRYADDMSFSLKGEEKIKLGSFCGLVSKIASEEGFKINKSKTRFLRANNRQSITGIVVNNEKLAVPKKWVKVLRAAIHNAKKEKEKGELAPQTIRKISGMAAWLKSVNEEKYKKIISEANELINRCQKSDV

SEQ ID NO: 6361 - protein, 493 aa, unidentified
  source 1..493: note = Related to JACMJL010000131.1; note = Clostridiaceae bacterium
MTENNELLQNKKADYRESVNNMGKKEFTLLKMQEYGFWPKDLPTPYERQDDETPEQHKERQTLLKEYQKIIDNIAKLYEQKDEINKRFQELRKEYDETWDVDKIRLDISKKIMEESITRRSERKKRKELEKQQQAEIWQKKRAEEILFIGKGYSQLLQDRSSDDNKLSTQGLPLIKTDKELAEFLGVEYKQLRFLVYHRDVISVDHYHRYTVPKRRGGVRNIAAPKPMLKTIQRKILEEILSKLTVSEYAHGFLKGKSVVSGAQAHIGQHTLLINMDLENFFPTITFERVRGMFMAFGYSGYISSLLAMLCTYCERMAIEVRGEIRYVKTSPRILPQGSPASPMITNIICVKLDRRLSGLAERTGYIYTRYADDMSFSLKEENYMDEGKLCGLVSKIVNEEGFKLNKTKTRFLRKNNRQCITGIVINSEQLGVPRKWIRAFRAAVHNANKLKLTGTVPSKVKNEISGMAAWAKSVNAERYKEVIAAAIAVIQD

SEQ ID NO: 6362 - protein, 512 aa, unidentified
  source 1..512: note = Related to NZ_LGTC01000001.1; note = Pseudobacteroides cellulosolvens
MMDNNIERDRRAEYRDNVQSMGKKEFTIYKMIEYGFWPKGLPTPFERQANETPEQYQERQRLFSEYKKIADEIAKVYKEKSEIDTKLRELKTQYNGSWDEERIRKDIAQRIMKESKERREQRKKQLELAKEQKSSAWKKKKEDSIVYIGNGYSSMLHYKSGNQDRLVANGLPIINTDRELADFLGVEYRALRFLVYHRDVVTMDHYHHYKVPKRKGGTRNIAAPKKVLKNVQKKILEGILEKLACQDNDCLGNNRFSNACSDNAHGFIKGRSVVTGADIHVKSPALLINMDIEDFFPTITFQRVRGMFVGFGYSGYIASLLAMLCTYCERMEIEVNGKRKFVATTGRILPQGSPASPMITNILCRSLDKRLNGLASKFGFIYTRYADDMSFSTKETVLADAGKLCGLVTKIISDEGFKLNFKKTRFLKKNNCQSITGVVVNSHQLGVSKKWVKTLRAAIYNARKAMAKGKVPYEIVSEISGMAAWLKCVNEERYKSIITDAYDLIRDINKII

SEQ ID NO: 6363 - protein, 494 aa, unidentified
  source 1..494: note = Related to MWAJ01001053.1; note = Firmicutes bacterium ADurb.Bin419
MIENNRVPKDKKANYRELVNQMGKKEFTLLKMQEYGFWPKDLPTPYEIQKNETPERYAKRQGLLKEYQRLIDQIAKLYEEKDDINKKLWELKKEYDDTWDLEKIRLDISQKIMRESIERRAERKKQRELEKQKRSLDWQQKKSEQIVFIGRGYSSLMNDTQIDEEKLKTQELPIIKTDRDLAEVLGIDYPSLRFLTYHREVVSVDHYHHFKIPKKKGGERSISAPKSKLKTAQRAILEKILSKLNISDQAHGFLKGRSVVSGAQTHISQPALLINMDLEDFFPTLTFERVLGMFRAFGYSGYISSLIAMLCTYCERMEIEVKGKPKYVATSKRILPQGSPASPMITNIICRDLDKRLNGLAKSFGFIYTRYADDMSFSINEVSDLNEGRFCGLVSKIVSEEGFKINKAKTRYLRKNNCQSVTGIVVNNDQLAVRKKWVKRFRAAIYNARKQKAAGELSNATKNEISGMAAWLKSVNEEKYRDMIGAVMDIVKED

SEQ ID NO: 6364 - protein, 486 aa, unidentified
  source 1..486: note = Related to JAFGGO010000116.1; note = Candidatus Lokiarchaeota archaeon
MTENTKQDYRTLINQMGKKEFTIMKMQEYGFWPKDLPTPYEKQLNETPEQYSKRKALVEDYKSIIERISKLYKEKQEINDKLRDLRKKYDETWDIERIRKDIAQTIMKESIARRTEKKKQRELEKHAKSEAWKKKKAEQIIFIGKGYSSFLYDNETDQPKLELQGLPVIKSDIDLANFLEIDYKKLRFLSYHRDVVTVDHYHRYTIPKRKGGMRNIAAPKPILKSVQRKILEDILNKFSLSQQAHGFIKERSILSGALAHNIQPALVINMDIENFFPTISFERVRGMFKSAGYSGFISSLLAMLCTYCERVSIEVKNKTRFIATTKRILPQGSPASPMITNIICRRLDQRLNGLASKFGFTYTRYADDMSFSINDETNVKVGRFYGLVSKIVKDEGFEINKEKTRFLRKNNRQSITGVVVNNEKLGVNRMWMRRFRAAIHNASKLRSNGDLPIEVKRELSGMASWVRSVNPERYKKLIETAMEVIK

SEQ ID NO: 6365 - protein, 496 aa, unidentified
  source 1..496: note = Related to SHMU01000007.1; note = Candidatus Lokiarchaeota archaeon
MTESNDIQKRTKSDYREMINKMGKKEFTLMKMQEYGFWPKDLPTPYERQENETKEHYEARKQLLKKYKGIVDQIADLYQEKADINKKLRDLQKQYDETWDIEKIRKDVAKQILKESVTRRAERKRQKELEKQRRSEAWKKKKAETIVFLGKGYSSFLNHFETDESALQSFQLPIIKTDKDLAEFLNIDYKKLRFITYHRDVVDIDHYFRYTIPKASGGKRLIAAPKNILKSAQRTILNDILTNIPIDEHAHGFLQGKSIITGAKSHPIQPELLINMDLEEFFPSITFERVRGMFHSFGYCGHVSTLLAMICTYCERIPLEIKDKEKYVAVSKRILPQGSPASPMITNIICYKLDRRLSGLAKTFNLTYSRYADDMSFSLKDKNEAEVNISRFLGLAMIIIKDEGFKINHNKTRFLRQNNRQAITGIVINKDRIGVPRKWIKQFRAAIYNAEQLQTNGGLPGEIKREIAGMASWVKSVNPERYKKYLTRAHNLLSEK

SEQ ID NO: 6366 - protein, 449 aa, unidentified
  source 1..449: note = Related to NZ_JAALJI010000007.1; note = Paludisphaera sp.
MAIQRQTDPSDLWRAIIQAGGIQPYIDAQLAERGFLVARRETDGLSERELADYKKSLKAEAQERARLRREAWAAYRAEHIVHLGDGVYWNDEPGPDKWDLPNAEERAAENELPPLDSPRQLADALGLTIPQLRWLAFHREAATRIHYRRFTIPKRDGSERAIWAPMPRLKRAQHWILRNVAEKLPVHGAVHGFVAGRSILSNASAHHDPKVAVRIDLKDFFPTVTLRRVKGLFRKAGYREHVATLLALICTESPREIVQNEGATYYVALGPRCLPQGAPTSPALTNALCLRLDRRLSGLARRQGWRYTRYADDLTFSRPSDFGGPPAIGKLLGSVRRIVEAEGFAVHDGKTAIRRRGGRQAITGLVVNGDRPPRATREFKRNLRAAIHNLESGRATPEAEPPQVLVGRAAFVAMSDPALGLSLLDRLSRATERDGSGDDSRSEPPRPES

SEQ ID NO: 6367 - protein, 437 aa, unidentified
  source 1..437: note = Related to NZ_JAHPZK010000021.1; note = Paludisphaera sp.
MAMQRQTNPFDLWRSIVQAGGIQPYINAQLSERGFLVARRETDGMSERELADYKKSLKAEAAERRRLRREAWAAFRAEHIVHLGDGVYWSDEPGPDRWDQPNAEVRAAENELPPLDSPRQLAEALGLTIPQLRWLAFHRDAARRIHYRRFTIPKRDGSERAIWAPMPRLKRAQHWILRNIAEKLPVHGAAHGFLPGRSILSNAAPHCDSKVVVRIDLKDFFPTVTLRRVKGLFRKAGYREHVATLLALICTESPREIVEQDGETYYVALGPRCLPQGAPTSPAITNALCLRLDQRLSGVARSQGWRYTRYADDLTFSRPADSKEAPGIGRLLGTVRRVVGDEGFTIHDKKTAVGHNGGRQRVTGLIVNGDRTPRAPREFRRNLRAAIHNLVTGKESPSAEPPSVLAGRAAFVAMTDPSLGRAMLERLSQAVERSPEA

SEQ ID NO: 6368 - protein, 434 aa, unidentified
  source 1..434: note = Related to CP003364.1; note = Singulisphaera acidiphila
MSRTTSRTNDPMTLWRAIEQAGGTQAYVEAQLAERGFLVKRRETDKMSERELDAYKKSLKAEAKEKRALQADAWRAYKTSHIVYLGEGIFWKDDPGGPDKWDLPHAEERAAENELPPLDSPRQLAEALELSLSELRWLAFHRDAATRIHYRRFTIPKRDGSERAIWAPMPKLKSAQHWILRNIAEKLLVHGSVHGFLPGRSTLTNAAAHANPKVVVKMDIKDFFPTVTLPRVRGIFRKAGYREQVATLLALICTESPREVVEHDGQTYYIALGPRCLPQGAPTSPALTNTLCLRMDQRLSALAKRFGWRYTRYADDLTFSLPHDHKDQPRLGALVGTVRRVVEAEGFTIHPSKTRVARSGARQTITGLVVNGDQAPRAPRKFRRELRAAIHNSRNGKPLHEGESPTTLAGSAAYVYMTDPELGAKLLDAIKQEA

SEQ ID NO: 6369 - protein, 439 aa, unidentified
  source 1..439: note = Related to NZ_WEZF01000007.1; note = Tautonia sp.
MSRATDLLSLWRAIEHAGGIDAYVNTQLAERGFLVARRDVDTMSDRERTAYKKQLKEEAAHRRELKREAWKAYRARHIVHLGEGIYWNDQATKDPWDAPDAEERAAENELPPLDSPRDLAEALGLTISQLRWLAFHRDAATSIHYRRFTIPKRDGSERAIWAPLPTLKAAQHWILRNIAEKLPVHGAAHGFLAGRSILSNASNHVDSALVVKMDLKDFFPSVTFRRVKGIFRRAGYREQVATLLALICTEAPREIVEQGKTTYYVALGPRALPQGAPTSPALTNTLCLRLDRRLDGLAQSLGYRYTRYADDLTFSLPRSHEGDPKLGTLLGKARRVVESEGFTVRLEKTRVARPGARQQVTGLVVNGAASPRTPRTLRRQLRAAVHNLQTGKPRPDADTPERLAGLISYVAMTDPTLGQALQAQWTNPSKPTSSDDSPS

SEQ ID NO: 6370 - protein, 431 aa, unidentified
  source 1..431: note = Related to NZ_CP036426.1; note = Tautonia plasticadhaerens
MSRTTDLTSLWRAIERAGGIDSYVNGQLSERGFLVERREIDTLSDREREAYKKQLKEEAARRLELRREAWQAYKARHIVHLGEGIFWDDHATEDKWDAPDAEERAAENELPPLDGPRDLAEALGLTIPQLRWLAFHRDAATSIHYARFTVAKRDGSERAIWAPMPTLKAAQRWILRNISEKLPIHGASHGFLPGRSIKSNAQEHVGSKLVLKMDLADFFPSVTYPRVRGIFRRAGYREQVSTLLALICTEAPREVVEEGGTTYYVALGPRCLPQGAPTSPSLTNTLCLRLDRRLSGLARSLGWRYTRYADDLTFSLPASHGGEPRLGALLGGARRVVESEGFAVRLDKTRVARAGARQQVTGLVVNGEGPARVPRRLRRQLRAAAHNLEVGRAGPDADPVDRLAGLASFVCMTDPALGAALLGRLRGGSAG

SEQ ID NO: 6371 - protein, 302 aa, unidentified
  source 1..302: note = Related to JAIENG010000522.1; note = Gemmataceae bacterium
RWLAYHRDAATKLHYRRFVIPKRGGGERAIWAPMPLLKAAQHWILRNVAERLPVHGAAHGFLAGRSILSNAAAHPDARIILKMDIKEFFPTVSLTRVKGIFRKAGYREQVATLMALICTEAPREVVERDGKTWYVSLGPRCLPQGAPTSPALTNTLCLRLDRRLAGLAAKLGWRYTRYADDLTFSLPDGHKDEPKTGPLMGFVKRIVAAEGFAVHPDKTSVRRKGGRQQVTGLVVNGGGPPRVTRDLKRRLRAAAHNLARGKGLKEGETPARLEGFAAYVHMTDEKLGGKLLAAFRGGVRQG

SEQ ID NO: 6372 - protein, 466 aa, unidentified
  source 1..466: note = Related to JAHJCH010000128.1; note = Myxococcota bacterium
MNQTNQDPRPSVDLGALWRAIEQAGSIQAYVNQQLSARGYLIERRDTARMSAAELKRYKQQLKDEAVEKRRLKAEAWAAYKAAHIVHLGEGIFFNEENDFDRFDLREPEARAAENELPTLDKPAQLAEALGLSVSELRWLTFHREAAESIHYQRFTIPKRRGGEREIWAPMPKLKAAQRWVMREIVEHLPVHGAAHGFIAGRSILTNAQVHLNAEILVNFDLQDFFPTVTWRRVKGVFRKAGYREQVATLLALLCTEPPREVIEHEGKRYYIALGQRCLPQGAPTSPAITNALCLRLDRRLSGLARSLGWRYTRYADDLTFSLPASEAKPKAKKGKAKPTKAKPTKAKKAQGALTGEAALARLMGGVKAIVAAEGFALNPDKTAIKRPSGRQGVTGLVVNGDGSPRVPREVRRRLRAALHNLERGQPLREGESYAHLAGLAAFVYMTDPALGGALLKRIGALARQG

SEQ ID NO: 6373 - protein, 433 aa, unidentified
  source 1..433: note = Related to JACKDP010000006.1; note = Myxococcales bacterium
MATRPNLVTQWVELWGAIARAGGIDAYITAQLTERGYLAKRRSTDGMSAAELKRYKAELKREAAERRKLKADAWQAYRASHIVHLGEGVFFNDDLDFDAFDLAEPEARAAENELPKLDKPQQVADALGMTLAELRWLSFHREAATGVHYRRFEIRKRSGGMRAIWAPLPRLKAAQRWILREIVEHLPVHGAAHGFLAGRSILTNAQAHTGSKLILNVDLKDFFPSVTWRRVKGLFRKAGYRDQVATLLALLCTEAPREIVEHEGEKLFIALGPRCLPQGAPTSPAITNALCMRLDRRLAGLARSLGWRYTRYADDLTFSLPADHKGAPGLSKLLGALHAVVAAEGFAVNPAKTRVSRPGARQKVTGLVVNGDAAPRVPRALRRKLRAAAHNLAQGKPLPAGESVAQLAGYAAFVHMTDPVLGAALLGKFGEHR

SEQ ID NO: 6374 - protein, 436 aa, unidentified
  source 1..436: note = Related to JACKDL010000029.1; note = Myxococcales bacterium
MATRPNDRQALWAAIARAGGIDAYVQAQLVAGGFAAERKPTDGMSKRELARYKAELKAEAAEKKRLKAEAWAAYKATHIVHLGEGVYFNDADDFDRFDLAEPEARLAENGLPRIDDPQALAEALALSVPTLRWLTFHRDAATMLHYRRFTIPKKSGGERAIWAPMDTLKSAQRWVLRHIVEPLPVHGAAHGFVPGRGIVSNAQAHSEARILINVDLKDFFPTVTVRRVKGVFRKAGYREQVATLLAMLCTEAPREVVRHGETDYFIALGPRCLPQGAPTSPALTNTLCLRLDRRLSGLARQRGWRYTRYADDLTFSLPVKAAKGADGNVGTLLGAVRAIVEAEGFALNPKKTRICRPGGRQKVTGLIVNGAEPPRAPRALRRMLRAAVHNLEQGKPLPEGETVARLAGYAAFIYQTNPQEGAELLRRFAAFAGEQA

SEQ ID NO: 6375 - protein, 433 aa, unidentified
  source 1..433: note = Related to JAHQVJ010000095.1; note = Myxococcales bacterium
MSTRTTDLAALWLAIAEAGGIDNYVQNQLVEHGFLVERRETDTMSKAELKRYKAQLKREAAERRELRKAAWAAYRETHIVHLGDGVYYNDAATMDRWDLDEPEARAAANELPRLDGPDDLAKELGITVAQLRWLAVHRDAATRIHYTRFTIPKRDGSERAIWAPLPRLKAAQRWILRNVVEHLPVHGAAHGFLAGRSVVTNAAAHVGSKLIVNIDLKDFFPTITWRRARGMFRKAGYREQVATLLAMICTEAPREVVEWEGQSYFVALGPRCLPQGAPTSPAITNTICLRLDRRLSGLARRFGYTYTRYADDLTFSLPLAHTGEPRVGALIGAVGHIVRAEGFQVHPSKTRVQHTGRRQQVTGLVVNGREQPRVPRSLKRQLRAAVYNLRRGRPLPAGERFERLIGYAAWIHQAEPELGSELLAALGGLNPTA

SEQ ID NO: 6376 - protein, 370 aa, unidentified
  source 1..370: note = Related to JABGPD010002235.1; note = Proteobacteria bacterium
MAALWRGIDEAGSCENWVQQQLVEHGFIVSRRDTDNMSKRELANYKKQLKREAAEKKALKKKAWEAYKANHILHLGEGDWWNDAATFDKWDLPEPEARAAENELPQLDSPDDLAEALGLTIKELRWLSFHRDAAKTIHYRRFTIPKRNGSKRPIWAPLPKLKEAQRWILHNIVEHLPVHGAAHGFLTGRGIVTNARPHGGSALLLNIDLKEFFPTVTWRRVRGVFRKAGYREQVATLLALICTEAPREVVEFNGETWYVALGPRCLPQGAPTSPALTNTICLRLDRRLSGLAKKNGYTYTRYADDLTFSLPHGFTGPPKTGMLIGAVKKIVVAEGFAVNPDKTRVLRSGGRQQVTGLVVNGPRGPRVPRK

SEQ ID NO: 6377 - protein, 439 aa, unidentified
  source 1..439: note = Related to LR594586.1; note = Gemmataceae bacterium
MTTAPVAPAPSADPQVLWRLIVQAGGMKAYIDGQLKEKGFLVTRRDADSMSDREKDGYKKALKQEADERRKLRRETWGAYKANHIVHLGEGVFWSDDLAPDKWDTPNSEERAAENELPAIDRPEQLAELLGVTIPQLKGLAYHRDAATSLHYVRFTIPKRDGTERPIWAPKKRLKAAQRWILHNIVERLPVHGAAQGFLVGRSILSNAAVHANAKAILKMDIKEFFPTVTVRRVKGVFRRAGYRDGISTLLALICTEAPREVVEVEGETYYVSLGPRCLPQGAPTSPSLTNALCMRLDRRLEGLAKKLGWRYTRYADDLTFSLPAEHKGKPRLGTMIGCVTRIVAAEGFEVKAEKTRVHRTGGRQSVTGLVVNGDGPPRVSRTVRRQLRSAVHKLKTGKPLKEGESLARLSGYAAFVYMTNPDLGKKLLADINGATGAG

SEQ ID NO: 6378 - protein, 442 aa, unidentified
  source 1..442: note = Related to NZ_JAGKQQ010000001.1; note = Gemmata sp.
MSTTTPAPSPDAQTLWRLIVQAGGMKAYIDGQLRERGFLVTRRDADAMSDREKDAYKKALKQEAEERRKLRRETWGAYRANHIVHLGEGVFWTDEPKEDKWDTPNSEERAAENELPALDKAEQLAEALGVTIPQLKGMAYHRDAATSLHYVRFTIPKRDGTERPIWAPKKRLKAAQRWILHHIVERLPVHGAAQGFLVGRSILSNALVHENPKILLKMDIKEFFPTVTVKRVKGVFRRAGYRDGISTLLAQICTEAPREIVNVEGKTYYVSLGPRCLPQGAPTSPAITNALCLRLDRRLAGLAKRYGWRYTRYADDLTFSLPMEHKGQPKLGSMLGCARRIVEAEGFEVKTEKTRVHRTGGRQSVTGLVVNGDNTPRTPRKLRRQLRSALHKLKTGKPLKDGESLARLTGYAAFVYMTNQELGRKMLADLHGFEDKPEGPAV

SEQ ID NO: 6379 - protein, 437 aa, unidentified
  source 1..437: note = Related to PNKH01000078.1; note = Isosphaera sp.
MTTAAPAPPPTAPDLATLWRLIVQAGGMKAYVDARLEERGFLVVRRDADAMSDREKDAYKKELKQEAEERRKLRREAWAAYKANHVVHLGEGVFWTDEVREDKWDTPNSEERAAENELPALDKPEQLAEALGVTVPQLRGMAYHRDAATSLHYVRFTIPKRDGTERPIWAPKKRLKAAQRWILQNIVERLPVHGAAQGFLAGRSILTNAAVHVNAKIILKMDIKEFFPTVTVRRVKGVFRRAGYRDGIATLLSQICTEAPREVVELDGKTYYVSLGPRCLPQGAPTSPALTNALCLRLDRRLAGLAKRYGWRYTRYADDMTFSLPAEHAGPPKLGAVMGCVRRIVAAEGFEVKDDKTRVHRTGGRQAVTGLVVNGDGEPRASRTLRRQLRSAIHKLKTGKPLKEGETVARLHGYAAFVYMTDPKLGKKLLADLNGVE

SEQ ID NO: 6380 - protein, 434 aa, unidentified
  source 1..434: note = Related to NZ_JH636447.1; note = Zavarzinella formosa
MATTTTDPIALWQSILQAGGVRAYIDGQLKERGFLVERRDTDAMSDREKDQYKKALKQEAAERKKLKKEAWAAYKTAHIVHLGDGVYWSDESKPDKWDTPNSEERAAENELPALDSPKQLAEALGLTIPQLRGMCHHRDAATKLHYVRFTIPKRDGKPRPIWAPLPKLKAAQRWILHNIVERLPVHGSAQGFLVGRSTLSNAAVHTNAKILLKMDVTDFFPTVTWRRVRGVFRRAGYREQIATLLALICTEAPREIVQHDGKTYYVSLGARCLPQGAPTSPSLTNALCLRLDRRLTALAAKLGWRYSRYADDMTFSLPADHAGKPQLGKLLGCVKRVVTAEGFEVKDEKTRVHRKGGNQSVTGLVVNGDGTPRTPRKVRRELRAAIHNLEKGKPLKEGETLPRLMGMAAYVYMTDAKRGKELLTALRRFAAGES

SEQ ID NO: 6381 - protein, 431 aa, unidentified
  source 1..431: note = Related to NZ_NIDE01000001.1; note = Fimbriiglobus ruber
MNSTRPDPLTLWRQITQAGGTQAYVTEQLRERGFLVERRDVEGMSDREKDQYKKALKQEAIETKKLRREAWAAYKAAHVVHLGEGVFWTDGAKPDKWDTPNGPERAAENELPPLDTPEQLAEALGITLAQLRGLCYHRDAATSIHYVRFAIPKRDGSERPIWAPLPRLKAAQRWILHNIVERLPVHGAAHGFLAGRSIATNAAAHASAKMILKMDVKEFFPTVTWRRVRGVFRRAGYNESIATLLALICTEAPREVVDLEGTTYYVSLGPRCLPQGAPTSPALTNALCLRLDRRLTGLAAKLGWRYTRYADDMTFSLPAAHAGPPKLGALLGCVKRVVEGEGFRVHADKTRVARSGGRQTVTGLVVNGTSQPRVSRKLKREMRAAVHNLGKGKPLPEGESVARLLGYAAYIYMTDPETGRKLLADLNAIPD

SEQ ID NO: 6382 - protein, 428 aa, unidentified
  source 1..428: note = Related to NZ_CP036273.1; note = Urbifossiella limnaea
MTTPRTDPLTLWRQIDQAGGVRAFVDAQLRERGFLVERRDADKMSDREKDQYKTALKQEAAERKTLAREAWKAYQAAHIVHLGDGIYWSDDATPDKWDTPNSEERAAENELPPLDSPAQLAEALGVTVAQLRGLTYHRDAATSLHYCRFAIPKRDGSERPIWAPLPRLKAAQAWVLHNVVERLPVHGAAHGFLAGRSTLTNAAVHTNANLVLKMDVKEFFPTVTWRRVKGVFRRAGYRERVATLLALLCTESPREVVQLDGTTYYVSLGPRCLPQGAPTSPALTNALCLRLDRRLTGLAAKLGWRYTRYADDLTFSLPAAHVGPPRLGAMIGCVTRVVETEGFRIHPEKTRVARPGGRQAVTGLVVNGDAAPRAPRALRRQLRAALHNRKVGKPRPDGDTEAQLHGLAAYIYMTDPVLGRKLLAEIDG

SEQ ID NO: 6383 - protein, 434 aa, unidentified
  source 1..434: note = Related to JAEUIF010000535.1; note = Planctomycetia bacterium
MTMTRIADPLTLWRNVVQAGGRQAYIAAQLEQRGFLVARRETDGMSERELAQYKQSLKAEAAERRKLRQEAWLAYRANHIVHLGDGVYWHDEATKDRWDLPYAEERAAENELPALDSPQQLADALGLTVAQLRWLVFHREAATRIHYHRFTIAKRDGSERPIWAPCKKLKAAQRWVLRNIVEKLLIHGAAHGFTAGCSVLSNARQHTNSRIVVKLDIRGFFPTVTLPRVRGVFRRAGYRDQLATLLALLCTEAPREVVEQNGQTYYIALGPRCLPQGAPTSPALTNALCLRLDRRLTGLAHQLGWRYTRYADDMTFSLPAGHTGAPRLGTLLGIVQRIVEEEGFRLHPDKTHVARASSRQKVTGLVVNGDGVPRVSRKLRRELRAAAHRLKHGKPLKEGESLARLAGYAAYIHMSDPQRGAALLAAFKSAAPAT

SEQ ID NO: 6384 - protein, 435 aa, unidentified
  source 1..435: note = Related to CP016211.1; note = Minicystis rosea
MMTTRSDYQRLFDLWRAIGQAGGVNAYVQQQLRERGFVLERKKTDGMSKAELSAYKKSLKEEAAERRRLKKEAWQAYRATHIVHLGEGIFWNDESDLDKWDHPHAAERAAENELPPIDSPQKLAEAMGLSLPDLRFLSFHREAAESIHYRRFTIPKRNGSERAIWAPLPKLKAAQHWILRNVVERLAVHGASHGFLADRSIATNAAAHTGAKIVVKVDLKDFFPTVTLRRVKGIFRRAGYRDQIATLLALICTEAPREIVEHEGKQYYVALGPRCLPQGAPTSPALTNTLCQRLDRRLAGLAKRLGWRYTRYADDLTFSLPESHKDKPKLGVLLGSVGRIANDEGFQVHPDKTNVARKGSRQKVTGLVVNGTGAPRVPRALKRQIRAAIHNAGRGKPLQAGESLSRLAGYAAYIHMTDPKLGAKLLQQLAAIEAK

SEQ ID NO: 6385 - protein, 433 aa, unidentified
  source 1..433: note = Related to JACKED010000003.1; note = Sandaracinus sp.
MTRSEHQRLVDLWRAIGNAGGVDAYVRGQLRERGFVLERKDTAQMSKAQLAAYKKSLKEEAAERRRLKKEAWVAYRATHLVHLGEGIHWSDEADVDRFDHPRAEERAAENELPPFDKPEQLAEALGLSIPELRWLAFHRDAAEKIHYRRFTIPKRDGSERAIWAPLPKLKAAQRWILRNVLEPIPIHGASHGFVPNRSILSNASRHTGAKLVVKIDLKDFFPTISFRRVKGVFRQAGYRDRIATLLALLCTEAPREIVQDGDKELFVALGPRCLPQGAPTSPAITNIVCFRLDRRLTGLAKKLGWRYTRYADDLTFSLPAEHVGAPKLGLLLGSVGRVVADEGFRVHPRKTRVARSGGRQAVTGLVVNGAASPRVPREIRREIRAVLHNLKHGKPLRDGENLHRIAGYVAYVHMTNPELGKSLRKQLEALDAV

SEQ ID NO: 6386 - protein, 445 aa, unidentified
  source 1..445: note = Related to nan
MATSTDYSRLVDLWQGIDRAGGIDNYVQKQLKERGYVVERKATDEMSRVELSRYKKALKAEAAERRNLQKESWLAYRATHIVHLGEGIFWNDDLDFDRWDLRNPEERARENELPELEDPKALASALGLSIAALRWFAFHRDDATFVHYHRFTIPKRDGSARAIWAPSPRLKAVQRWILRQIVERLPVHGASHGFMAGRSIKSNASVHTGAKIVVKVDLKDFFPTVTLPRVKGIFRRAGYREQVATLLALLCTEAPREVVEIKGKTHFVALGPRCLPQGAPTSPGLTNTLCLRLDRRLAGLAAKLGWRYTRYADDLTFSLPKAKKTRKKKGTKAKKEPPHVGALLGGIAKIAASEGFVVHPNKTRVARSGGRQQITGLVVNGDGPPRVPRALRRQVRATLHNLGQGKPMRSGETLSQLAGYIAYIQMADPKLGTKLRAQLLALDLS

SEQ ID NO: 6387 - protein, 357 aa, unidentified
  source 1..357: note = Related to JAGQIR010000020.1; note = Myxococcales bacterium
MATQIDYTRLLDLWRAIEQAGGTDKYVQQQLQERGYLVERKATDDMSKADLERYKKALKAEAAERRKIKKDAWLAYRASHIVHLGEGVFWNDDLDFDRWDLRNPEERANENELPALDNPKQLAEALGASIAELRWLAFHRDDATFVHYHAFTIPKRDGSMRQIWAPNRKLKAAQRWINREIVERLPVHGASHGFLAGRSIKSNAAAHTGAEIVVKIDLKDFFPTVTMPRVKGIFRKAGYREQVATLLALLCTEAPRHVVDIKGKVHYLALGPRCLPQGAPTSPGLTNTLCLRLDRRLAGLAAKLGWRYTRYADDLTFSRKKGASSAEVGEMIRKAVDIVGHEGFTVHPDKTRVMRRG

SEQ ID NO: 6388 - protein, 431 aa, unidentified
  source 1..431: note = Related to JADJRG010000001.1; note = Nannocystis sp.
MAFRIDTTRLLDLWRSIEQAGGRDRFIQQQLTERGFLVERKPTEGMSKAELERYKKSLKEEAAERRKLAREAWLAYRASHLVHLGEGVFWSDDHDFDRWDLRNPEERAAENELPKLEHPKALAEALGLSIAELRWYAFHREDATFLHYHAFTIPKRSGGLRSIWAPNRRLKQIQRWIHREVVERLPVHGAAHGFLAGRSIKSNAAVHAGATTIVKVDLKDFFPTVTYARVRGVFRKAGYREQVATLLALLCTEAPRRVLEIDGKTHYLALGPRCLPQGAPTSPGLTNTLCQRLDRRLVGLAKKYGWRYTRYADDLTFSLPATHQGPPRLGALLGGVAMIAAGEGFVVHPDKTRVSRAGGRQQVTGLVVNGEQGPRVARETKRQIRAALHNLARGKPLQEGETLSRIAGFIAYIQMSEPELGKRLRAQLAAL

SEQ ID NO: 6389 - protein, 435 aa, unidentified
  source 1..435: note = Related to JADKFZ010000002.1; note = Nannocystis sp.
MATTFRIDYTRLLDLWRAIETAGGRDKYISAQLKEKGYLIERKPTDSMSKAELDRYKKTLKEEAAERRKLAKEAWQAYKAAHLVHLGEGVFWNDDLDHDKWDLPDAEERQAENELPKLDKPKQLAEALKVSMAELRVLAYHRDAATKLNYYRFTIPKRDGSKRAIWAPHRRLKAAQRWILREVVERLPVHGAAHGFMHGRSIASNAAAHTNASTVLKVDLKDFFPTVTLTRVKGVFRKAGYREQIATLLALLCTEAPRQVSEVDGKVYYLALGPRCLPQGAPTSPGLTNTLCMRLDRRLQGAAHKLGWRYTRYADDLTFSLPVGHKGKPQLGKLLGCISAIAVGEGFVVHPDKTKVSRSGGRQRVTGLVVNGQGAPRVPRELKREVRAALHNLSKGKPLRDGETLSRLAGMVAFITMTDRKLGQKLRAELDKLGA

SEQ ID NO: 6390 - protein, 433 aa, unidentified
  source 1..433: note = Related to NZ_JAIRAU010000043.1; note = Nannocystis pusilla
MATTNRIDYNRMLETWRAVESAGGRDKYIEAQLKEKGYLVERKPTESMSKAELERYKKSLKDEAAEKRRLAKESWLAYKAAHLVHLGEGVFWNDQLDHDKWDLPGAEERQAENELPKLDKPKELAEALGVSIAELRRLAYHRDAATKLNYYRFEIPKRDGSKRAIWAPHRTLKAAQRWILREVVERLPVHGAAHGFLHGRSTASNAAVHRDSQILLKVDLKDFFPTVTLPRVKGVFRKAGYREQIATLLALLCTEAPRHVAEVEGTTYYLSLGPRCLPQGAPTSPAITNTLCLRLDRRLQGLAKKHGWRYTRYADDLTFSLPNDHKGKPHVGSLLGGISMIAAAEGFTVHPDKTRVHRSGGRQQVTGLVVNGGQGPRAPREFKREVRAAVHNLAHGKPLKEGETLSSLAGRIAYIYMTDKKLGKQLLAALSRV

SEQ ID NO: 6391 - protein, 458 aa, unidentified
  source 1..458: note = Related to JAGQIN010000580.1; note = Myxococcales bacterium
MTRARPTSSASPSSSLTGTWTRPRGEPMTTRSERLRDLWRSIEQAGGAEKYIQAQLRERGFVVERKPTDKMGKAELARYKQQLKAEAAERKRLAKEAWEARREHRVIHLGEGVFWNDQTDFDRWDLEGAEERAAENELPQLDNPAQLAEALGVTIPQLRWLAFHRDAATHVHYYRFTIPKRTGGERAIWAPHRRLKGAQRWILRNIVERLPVHGAAHGFLPGRSIASNAAHHTDAAAVVKIDLKDFFPTVTLPRVKGVFRKAGYREQIATLLALLCTEAPREVVEQDGKTYYLSLGPRCLPQGAPTSPGLTNTLCMRLDRRLLGLSRKLGWRYTRYADDLTFSLPKTHQGPPKLGALLSTVARIAADEGFTVHPEKTRIAKRGARQRVTGLVVNDAHGPRVPRTLRRRVRAMIHNLARGKPLREGETLGQLAGQIAFIHMTDPALGKRLAAQLSAIDG

SEQ ID NO: 6392 - protein, 434 aa, unidentified
  source 1..434: note = Related to JACKDW010000002.1; note = Myxococcales bacterium
MATDSQATRLRDLWRAVEQAGGVDKYIQSQLQERGFLVERRETDKMSKAELQRYKQQLKAEAAERRALKRDAWAAYREQHVVHLGEGVFWNDQSDLDRWDLRDADERAAENELPQLENPGQLAAALGLEIPQLRWMAYHRDAATKLHYYRFTIPKRSGGERPIWAPHKQLKAAQRWILRNIVERLPVHGAAHGFLPGRSIASNAAQHADSKIIVKVDLKDFFPTVTLPRVKGVFRKAGYREQIATLLALLCTEAPREIVESGGRTYYLSLGPRCLPQGAPTSPGLTNTLCLRLDRRLQGLASKLGWRYTRYADDLTFSLPGGHSGAPRVGTLLGSIARIAADEGFAVHPDKTRVARKGARQRVTGLVVNGDGTPRVPRTIKRQLRAAIHNLSQGKPLKEGETLSKLTGWIAYVHMTDPKLGKQLQAQLDAVGRG

SEQ ID NO: 6393 - protein, 434 aa, unidentified
  source 1..434: note = Related to JACKEV010000022.1; note = Alphaproteobacteria bacterium
MSTDPIALWRAIANAGGIDAYVSAQLVEKGFLVKRRPTDNMSKRDLARYKQQLKDEAAERRRLKKEAWLAYKANHIVHLGEGVYWNDAADADRFDHPKAEERLAENGLPVLDKPQQLADALEVPLTELRWLTWHRDAAARVHYRRFTIPKRSGGERAIWAPLPKLKAAQRWVLREIVEKLPVHGAAHGFVAGRSIATNAAVHADARVVVKVDLKDFFPTVTLPRVKGVFRKAGYREQVATLLALLCTESPREVVEEDGKTWFLSLGPRCLPQGAPTSPALTNTLCLRLDRRLTGLAQALGWRYTRYADDLTFSLPRPQGRKKPKPPQTAKLLGGIKTIVADEGFTVHPDKTRFARSGGRQQITGMVINDDHGPRAPRELRRQLRAAIHNLNQGKPLPEGESIDRLRGYVAYIRMTQPELGESLSAQLDAALSGA

SEQ ID NO: 6394 - protein, 464 aa, unidentified
  source 1..464: note = Related to JADKFE010000004.1; note = Deltaproteobacteria bacterium
MSDLTTLWLAVRTAGSVDNYVRQQLEAKGFLVKRRPTDGMSPKELEKYKQELKREAAEARSLRAAAWKAHKANHIVHVGEGVYWNDADDLDRFDVPQPEERQAENGLPPLDSPKKLAEALGLSIIELRWLSWHRDLATGVHYRRFTIPKRSGGERAIWAPMPKLKKAQRWILREIVEKLPVHGAAHGFLAGRSIATNAAAHNGALVVLKLDLKDFFPTLTLPRVKGLFRRAGYREQVATLLALLCTESPREIVEQDGKRLFVALGPRCLPQGAPTSPAITNAVCMRLDRRLAGAAAKLGWRYTRYADDLTFSRVRPAEAPVVEAAAPAAKPAKGKKATAAAETTPAPSQAPAARLSKLLGVVHEVVKDEGFIVHPDKTRVARSGGRQAVTGLIINGDQGPRPPRELRRRVRAALHHLAQGKPLPEGETVERVAGLIAYIRMTMPQEGERLYAELQKVTGAVAPA

SEQ ID NO: 6395 - protein, 432 aa, unidentified
  source 1..432: note = Related to JACKEX010000021.1; note = Alphaproteobacteria bacterium
MADDLMTLWRAVRSAGGRDAYVRAQLEEKGFLVRRRETDGMSKRELAKYKKELKAEAAERKRLAKEAWDAYKAAHIVHLGEGVYWNDAADFDRFDHPRAEERVAELGLPALDDPDALAEALGLGVAELRWLTYHRDAAKAIHYRRFTIPKSSGGERAIWAPLPKLKEAQRWVLREIVERLPVHGAAHGFVPGRSTATNAAAHADAEILVKVDLKDFFPTVTLPRVRGVFRQAGYREQVATLLALLCTESPREVVERGGETWYLALGPRCLPQGAPTSPALTNALSMRLDRRLTGLAKKLGWRYTRYADDLSFSLPVSKKKRKAAPNIGSLLGGVRIIVESEGFTVNEKKTQVAPPGARQKVTGLVINDGLGPRVPRADRRRIRAALHRLRLGKPLPEGESIERIEGWIAYIQMSQPELGERLAAELAEVRGG

SEQ ID NO: 6396 - protein, 432 aa, unidentified
  source 1..432: note = Related to JAGQPF010000572.1; note = Planctomycetales bacterium
MARQRTDIATLLRGIEQAGGIDAYVDAQLREHGFLVQRKPTDNMSQRELARYKKELKDEAAERRKLRKEAREAYETQHIVYLGEGVFWNDAYDYDKWDLEDAEERAAENELPALDKPVQLADALGITVPQLRHLAYHRDCAEMVHYRRFTIPKRNGGERAIWAPLPRLKGVQRWVLRAIVERLLIHGAAHGFVPGRGIHTNARIHRDASIVLKMDIKDFFPSVTFPRVRGVFRKAGYREQIATLLALICTEAPREIVEEDGKRWFVSLGPRCLPQGAPTSPALTNVVCLKLDRRLTGLAEKLGWRYSRYADDMTFSRPRGAKGPPNFATLRSRARQIVMDEGFRVHPDKTHVARRGARQTVTGLVTNGDLPPRVPRRNRRQIRAAIHNLGQGKPLHDGETVDTLAGYIAYIAMTDRAAADRLRQELSAALGG

SEQ ID NO: 6397 - protein, 430 aa, unidentified
  source 1..430: note = Related to PFUG01000414.1; note = Deltaproteobacteria bacterium CG_4_9_14_3_um_filter_63_12
MATTTPNYDDLWRSIAQAGGIDAYVTQQLKERGFLTERSDASQMSKNELKRYKASLKAEAAEKLRLKKEAWLAYRSQHIVHLGEGMYWNDAADIDGFDLAEPEARASENELPQLDNPKQLADALSLTVADVRWLSYHRDAARSLHYRRFTIPKKSGGERPIWAPMPKLKAAQRWIARHIVERLPVHGHAHAFLPARSINTNAKQHIGSKMVLQMDLVGFFPTVTFPRVKGIFRKAGYREQIATLLAAICTEAPREVLEHEGKTWFIAMGPRALPQGAPTSPGLTNTLCLRLDRRLTALAAKLGWNYTRYADDLTFSLLKSHKGKPNLGALMGCIKKVVTDEGFVVNADKTRVSRKGGRQKVTGLVVNGVQPPRVPREFKRRLRAAIHRLENGGALFEGETLDTLKGQAAYVFMTDPELGRKMLERLAKLG

SEQ ID NO: 6398 - protein, 445 aa, unidentified
  source 1..445: note = Related to JACOUH010000096.1; note = Planctomycetes bacterium
MARKRTDPVYIWRAILQAGGIDAYIEAQLAERGVKVEKKETAGMSARELEQYKKQLRAEAEERKKLKKEAWKAYKANHIVHLGEGVYWNDEKRQDKWDVAHAEERAAENELPPLDTPPQLAEALGLTVPQLRWLAYHREAATKVHYYRFTIPKRNGSERPIWAPLPKLKAAQQWIRVHIVEKLIVHGAVHGFLPGHSTLSNASVHRNPKIVLKMDIKEFFPTVTLPRVKGVFRKAGYREQVATLLALLCTEAPREIVHHGGKDYYVALGPRCLPQGAPTSPGLTNTLCLRLDQRLAGLAKKYGWRYTRYADDLTFSLPKAHDGDPHVGTLIGLVRRIVEDEGFAVHPDKTRLARSGGRQKITGLVVNGDLKPRVPRKLRRQMRAALHNLQCGKPLKEGETFARLAGYAAYINMSDPNLGARMLETFKIGLAATVTTNGEQTAEDK

SEQ ID NO: 6399 - protein, 435 aa, unidentified
  source 1..435: note = Related to JAGQQD010001043.1; note = Planctomycetaceae bacterium
MARRRTNVADLWRAIEQAGSVQAYVDQQLRERGFFVERRDAGQMSKRELAAYKKQLKEEAAEKRKLKAEAWQAYKANHIVHLGEHVFWNDGLDWDKWDLEHAEERAAENELPALDSPGQLAKKLDVSVAELRWLAYHREAATMLHYRRFTIPKRDGSERAIWAPLPKLKSAQRWILRNIVEKLVVHGAAHGFLPGRSILSNAAQHTDSKILLKMDLQNFFPTITLPRVKGVFRKAGYREQVATLLALICTESPREIVEHSDKTYFVALGPRCLPQGAPTSPALTNTICLRLDRRLAGLAKKHGWRYTRYADDLTFSLPQDHKGPPNLGTVMGGVKVVVAGEGFRIHPEKTRVARVGGQQKVTGLVVNEDRPPRVSRKLKRQLRAAIHNLQQGKPLHEGETLESLKGHAAYIAMSEPELGQSLLEQIAAVSEPVSN

SEQ ID NO: 6400 - protein, 432 aa, unidentified
  source 1..432: note = Related to CP042914.1; note = Roseimaritima ulvae
MTERTTDLATIFRGIEQAGTIDAYVDGQLRERGFLVERRATDDMSQRELARYKKELKQEAAEKRKLRAVAWKAYKTQNIVFLGEGVFWNDALDWDKWDLENAEARAAENELPPLDKPQQLAEALQLTISQLRWLAYHRDVATSIHYRRFTIPKRDGSERAIWSPRPTLKAAQRWVLRNIVERLTVHGATHGFLAGRSIASNAAAHTDSQMIVKMDLKDFFPTVTYPRVRGIFRHAGYREQIATLLALLCTEAPREIVEEDGQTLYVSLGPRCLPQGAPTSPALTNVICVKMDRRISGLAQKLGWRYTRYADDMTFSLPSNTGKAKTKQDANPAPLIGWVKRIVADEGFRVHPDKTRVIRKGGRQAVTGLIVNGTGAPRVPRKTRRMLRAAMHNLSKGIPLRDDETLATLQGYIAFIAQTDPEQAQRLKEQLA

SEQ ID NO: 6401 - protein, 453 aa, unidentified
  source 1..453: note = Related to NYTD01000225.1; note = Deltaproteobacteria bacterium
MSTENQKALVALWNEIQHAGGRESYIRNELTRMGIEIPARVKITNIRNKEKKAAYIALRQKEEEARGFINKKVWAAYRATHIVDLGDGIFWKDPTKDFYDTHDRAQRREDNGIPELETVDQLVEALSEAYANGDSNIELDIPTLRWLCYHREVATTTHYKSFSIPKKTGGNRQIWAPMPRLKSVQKWISRNIAEKLVNHGAAHGFISGRSILSNASVHTNSKIVVSMDLQDFFPTFTFNRVKGIFRAAGYLEGIATLLALLCTEAPRKKIKFPDEKNPGKEKWVYVASGDRCLPQGSPASPSLTNAACLRLDRRLAGYATKYGWRYTRYADDLTFSFPADSAKSPKTDLLIKRVQEFVVSEGFIVHPNKTDKMGTGGQQKVTGLIVNGVGKPRVSKGFRDNLRAAIHNQEEGKELMYEEESLETLMGYASFIFSADPTKGTTLIEKLQALEEE

SEQ ID NO: 6402 - protein, 446 aa, unidentified
  source 1..446: note = Related to PBMT01000113.1; note = Proteobacteria bacterium
MSTENSNELVELWNEIQQVGGKEAYIRRELARMGIEVPERVKITNIRDKTKKAEYISLRQKEDKARAIINKKIWAAYRKTHIVDLGDGIFWKDPSKDFFDVHDREERRKDNGIPELETVDQLVEALRSVDSDIDVPTIRWMCYHREVATTTHYRAFKIPKKTGGERHIWAPMPRLKAIQKWISRNIAEKLATHGAAHGFIVGRSIVSNAMVHTDSKVVVSMDLKDFFPTFTFKRVKGIFRAAGYLDGIATLLALFCTEAPRVPMCLPDENDPSKEKWVYVASGERCLPQGSPASPALTNSACLRLDRRLAGYAQKYGWRYTRYADDLTFSFPSSDSRSANVDLLKKFVHDIVTSEGFVVHPDKTDVMGTGGQQKVTGLIVNGTGSPRVPREFRDKLRAAIHNQEQGQPLFEDETMSTLLGYASFVFSADPERGKTQLEQLQKLNEQ

SEQ ID NO: 6403 - protein, 441 aa, unidentified
  source 1..441: note = Related to VGTA01000016.1; note = Deltaproteobacteria bacterium
MIERLSEKLSGVEREALEAKAELWSAVEQAGGARRYVEAELRRRGVFVERQDVLAMGFDEKKAYVERVAAEQEVRRPLQSKVWAAYTALHITHLGEEVFWQGDVSVDFFDPDHLAARLEQKGLPPLERPEDLCEALGLTLSELRWLCYHREAATSLHYRTFEIPKKTGGVRRIWAPLPKLKAAQEWVLRSIAERLVVHGAAHGFVAGRSIYSNALEHLDSRLVVSMDLADFFPSFTFKRVKGIFRQAGYMDGIAALLALLCTEAPREVTEHEGQRYYLALGPRCLPQGSPASPALTNAACLRLDRRLAGWAAKAGWRYTRYADDLTFSVPASAAEEPSVSQLLGVVHAIVAEEGLVVRDDKTHVMRRGARHQVTGLVVNDATPPRPPRELRRRVRAMVHNVASGRGLREGESLSQLVGFVAYLHMCDPVEGRRLMEVLRGA

SEQ ID NO: 6404 - protein, 442 aa, unidentified
  source 1..442: note = Related to NYWS01000115.1; note = Myxococcales bacterium
MSEHLNDRTSHQEFWTEIVEAGGPRKYVETQLRERGVWVKRQDVLSMGAKAKQAYIEQIKAEDAIRKPLQEKVWKTYTALHIVHLGEDIFWQSDVSIDFFDPAHRQSRLKQRQLQDIESAEELSDQMGITLGELRWLCYHREAAKSIHYHRFSIPKKSGGERQIWAPMPKLKTAQTWVLRNIAERLTVHGAAHGFMAGRSIYSNALEHTNASVIVSMDLADFFPSFTFKRVKGIFRQAGYMDGIATILALLCTEAPREVVEDEGETYYVAMGPRCLPQGSPASPALTNAACLRLDRRLSQFAEKNQWRYTRYADDLTFSVPKAESKLSEEELSAKIKQLIGTVHAVVEDEGLQVRSDKTHVMRPGKRQKVTGLVVNGQDTPRTPRELRRRVRAMIHNLKVGKTLHEGESLNHLTGLIAFIYMSDPQQGQKLLEQLKQATAPS

SEQ ID NO: 6405 - protein, 437 aa, unidentified
  source 1..437: note = Related to PBMT01000009.1; note = Proteobacteria bacterium
MNKERVQELEKRWQKIQDQGGPQAYLEQQLRKAGVWRRYRPNMIEPGINKSDEIRASRLEREKRLELKKYIWEAYKATHISHLGLDVYWNDEVGEDFFDVHERLKRQEEQGLPSIETVEELVEALSQAVPEMTIPMLRWLCYHQDVATHLHYRHFEIEKKTGGFRQIWAPLPKLKAIQHWILQNIVEHMPIHGAAHGFVSGRSIFSNAEEHCNSDVVVGLDLKDFFPSFTFPRVKGIFRNYGYKSEISTLLALLCTEAPRRIVQIEGKTVYVATGSRALPQGSPVSPALTNVASMRLDRRLSGYALKHGWRYTRYADDLTFSAPTGQGRKNIKALLETVDTIVTEEGLKVHPKKTHVMGKGRRQEVTGLVVNGSESPRVPKERRKMLRAALNNAQKGKEVELGYALQQLMGHAAFVYAAQPELGRSLIEAFSELMNE

SEQ ID NO: 6406 - protein, 429 aa, unidentified
  source 1..429: note = Related to NZ_AP019860.1; note = Candidatus Uabimicrobium amorphum
MTDLLKLWQEIEAAGNIDNYIEQQLVKNGYLVERRDTDDMSKKELDRYKKQLKQEAKAKKELKKKTWLAYKASHIVHVGEGIFWNDGANFDQWDHLRAEEQTSANELPPLDSPKELAKTMGITIEELRWFTYHRDDAKKIHYRRFTIPKRSGGERNIWAPLPKLKELQRWILREIAEKLPIHGASHGFVAGRSILSNAAVHNNSHIVVRMDLKDFFPTLTFPRVKGIFRHAGYREQIATLLALICTEAPREVIQHEGELHYLSLGPRCLPQGAPTSPALSNVASLKLDRRLSGLAKKLGWRYTRYADDLTFSLPEKYKKGNSQLGALLKSVPNIVSDEGFEINRKKTWVARKGGRQCVTGLVVNGKEMPRVPRKKQREIRSAIHNLQQGKGLREGETIEQILGYVAFIYMSQPDKGKKLLEKIGNIKLQ

SEQ ID NO: 6407 - protein, 433 aa, unidentified
  source 1..433: note = Related to NZ_FUYB01000016.1; note = Thiothrix eikelboomii
MSEHKANRYEQIWQAIEQAGSVNAYVREQLQQHGFLVTRRPTDEMSKAELEKYRQALKKEAAEQNRLRQQAWQAYQAKHIVHLGEGIYWTDDSSEDQWDAPNANQRLLENQLPAITQVAQLCQALQLSVSELRWLCYQREVSTHSHYTRFEIPKRSGGIRAIWAPLPKLKQAQHWILHEILERLVVHGSAHGFITGRSIATNAAEHGDSQVLVKLDIENFFPTISWRRVKGVFRKAGYPEQIATLLALLCTESPRQLVEHEGKSVYVALAERCLPQGAPTSPALTNALCLRLDRRLTGFAHKAGWRYTRYADDLSFSLPATNQAPPELSRLLGTVKRVLGEEGFALNLSKTRVIRPAEVQTVTGLVVNGAQPPRVKRSLKRQMRAAVHNLNQGKALPAGESLSRLKGYAAYIAMTDRDLGFDLLNQLQPVGEI

SEQ ID NO: 6408 - protein, 429 aa, unidentified
  source 1..429: note = Related to NZ_AQVE01000007.1; note = Thiolinea disciformis
MSELSRYEQVWQAIEKAGSVNAYVREQMQKNGFMVARRPTDNMNKTELEKYRQELKKEAAEQRRLNKEAWQAYKAKHIVHLGEGIYWTDDSSEDQWDVPNANKRLLENQLPAITKVPQLCEALKLSVNELRWLCYQREVADKSHYTRFEIPKRSGGLRAIWAPLPKLKQAQHWILHEILDRLVVHGSAHGFIAGRSIATNAAEHTNSQVLVKVDIKDFFPSISWKRVKGVFRKAGYPEQIATLLALLCTESPREVVEHAGKQVYVALADRCLPQGAPTSPALTNVLCLRLDRRLTGFAQKAGWRYTRYADDLSFSLPATSKNPAEISRLLGTLKRVLGEEGFDLNDKKTRVIRQGAVQTVTGLVVNGEQSPRVSRVLKRQMRAAVHNLKQGKVLPEGESLQRLRGYAAYIAMTDRELGLGLLGQLQQEQ

SEQ ID NO: 6409 - protein, 428 aa, unidentified
  source 1..428: note = Related to PDPH01000052.1; note = Proteobacteria bacterium
MAKQTKLEKLWTEIEKAGSRDAYIQEQLRKNGFMVQRRSTDNLSKSELEKYKQELKKEAAEKRRLQQAAWAAYKTQHIVHLGEGIYWTDDTSADQWDLDNAHKRLLANQLPQLTRVKHLSDALGLSIAELRWLCYQRDAALKTHYTRFEIPKRSGGVRAIWAPLPKLKQAQRWILDHILDRLLVHGAAHGFLMGRSIASNAAEHSDSQILVKMDIADFFPSISWKRIKGVFRKAGYPEQIATLLALLCTESPREQVEHNGQSYYIAMADRCLPQGTPTSPALTNALCLKLDRRLAGFASKTAWRYTRYADDLTFSFPNHSTSKANISQLLGTVKRILGDEGFKLNNSKTRVIRQNTVHEVTGLVVNGTQAPRVKRTLKRQLRAAIHNLKQGKPLPEGESIQRLKGYAAYIAMTERELGLKMLAELDNV

SEQ ID NO: 6410 - protein, 427 aa, unidentified
  source 1..427: note = Related to NZ_KB904782.1; note = Thiofilum flexile
MATEWEERWAEIEKAGSINAYIQQQLVAKGFLVERRATDKMTPRELEQYKKSLKTEATEKAQLRKAAWQVYKANHMVYLGEGIYWSDDSSEDDFDLASAEKRLLDNQLPAITKVKQLAEQLKLTIPQLRQLCYHREAATDLNYTRFEIPKRSGGMRPIWAPRLLLKNTQRWILEHILERLLVHGAAHGFLMGRSIATNAAQHNNSEILIKLDIKDFFPSISWRRVKGVFRKAGYREQVATLLALLCTEAPREVVERQGKKHYVALGARCLPQGAPTSPALTNVLCLRLDRRLTGIATKFGWRYSRYADDMTFSLPVGHAGDPQIAKVLGSIQRVMGEEGFELNRAKTHIVRRGARQEVTGLVVNNEGLPRVKRSTKRQMRAALHNLKTGKGLKEGESLNRLKGYAAYMAMTERELGLRLLSELSEFG

SEQ ID NO: 6411 - protein, 304 aa, unidentified
  source 1..304: note = Related to CACVAT010000519.1; note = Thiotrichaceae bacterium
MANQQQNKIEKLWAAIEKAGSMDAYVRGQLRDKGFLVERRDTDDMSKRALNKYKQELKAEAEEKRKLTKKAWQAYKANHIVHLGEGIYWTDDTSEDRWDLDNAQKRLLENQLPNITRVKQLAEALELSISELRWLCYHREAATSSHYIRFEIPKRSGGQRAIWAPMPKLKKVQRWILGEILDRLLVHGSAHGFLAGRSIATNAAQHTDSRLIVKMDIEDFFPSVSWKRVKGVFRKAGYNEQIATLLALLCTESPREMVEHNGRTHYVALAERCLPQGAPTSPALTNVLCLKLDRRISGTAGKFN

SEQ ID NO: 6412 - protein, 428 aa, unidentified
  source 1..428: note = Related to DQVC01000057.1; note = Thiotrichaceae bacterium
MGRTSNKVEKLWADIEKAGSINRYVRQELDNKGFLVKRVNTDNLSVRELKQYKAALKKESAEKRALNKAAWEAYKAHHIVHLGDGIYWTDDTSTDQWDLDNATKRLLENQLPQITRVKALAEALGLTISQLRWLCYHREVATQSHYTRFEIPKRSGGVRTIWAPRPKLKKVQRWILNNILDSLLVHGSAHGFLAGRSIATNAIEHTDSQVLIKMDIENFFPTISWKRVKGVFRKAGYSEQIATLLALLCTESPREVINKDGQDLYIALADRCLPQGAPTSPAITNALCLSLDRRMTSMANKAGLRYTRYADDLTFSYAAKKKKAPEISQLIGGVKRILGDEGFKVNTKKTHVIRQGSTQEVTGLIVNGKGMPRVSRKLKRQMRAAIYNLKQGRELPEGESIQRLRGYAAYIAMTDRALGLGMLEALSD

SEQ ID NO: 6413 - protein, 425 aa, unidentified
  source 1..425: note = Related to nan
MSSTLESLWIVIEQAGGIDRYVDKELKAKGYLVERSDTASMSKRALGIYKKALKQESVEKRTLKKQAWAAYKQTHLVHLGEGIFWSDAEDEDKWDVENAHKRLLENQLPAITKSKQLAEALDISIAELRWLCYHREASTSSHYTRFEIPKRDGSSREIWAPRPLLKKVQTWILREILERLLVHGAAHGFLAGRSIATNASQHINSKILVKMDIEDFFPSISWKRVRGVFRKAGYQGHIATLLALLCTEAPRKIVEHRGKTTYVALGERCLPQGAPTSPALSNALCLSLDRRLTGVATKLGWRYSRYADDLAFSQVATKKQAPELTPLFGSIKRILGEEGFVVNQKKTHVVRQGARQEVTGLIVNGKGEPRVPRKLKRQLRAAVHNFKCGKPLRDGVSLMELKGYAAYIMMTDRRLGEEMKSVLVE

SEQ ID NO: 6414 - protein, 426 aa, unidentified
  source 1..426: note = Related to VIAD01000001.1; note = Moraxellaceae bacterium AER2_44_116
MSANWETLWDEIEKAGNVERYVQQQLELKGFVVKRRATDTLSTRELENYKKELKTEALEKRKLKKEAWQAYRATHIVHLGTSIYWSDDSSHDRWDLQDAEKRLLENQLPPLTQVKHLTTALNLSIPQLRSLCYQRDATTDTHYRRFEIPKRSGGLRAIWAPRPQLKKAQRWILREILDRMLVHGAAHGFLAGRSIVTNAAQHTNSQVIVKLDIKDFFPSISWRRVKGVFRKAGYREQIATLLALLCTESPREVVSHEDKTYYVALGERCLPQGAPTSPALTNILCLQLDRRLTGIAQKFGWCYSRYADDLTFSFPQDTAETSNISHLLGSIQRVMTDEGFSVNMKKTHVIRAGNVQEVTGLLVNGQHAPRVSRTKKRQMRAAIHNLQQQKPLPEGESRERLMGYAAFIAMTDRPLGQQMIHALMAL

SEQ ID NO: 6415 - protein, 485 aa, unidentified
  source 1..485: note = Related to AUSW01000035.1; note = Psychrobacter aquaticus
MSTVNSQQTDYISPAQTMTPAERQWQQLWQDIEEAGGRYQYIQQQMLQHGFIVERKPIDNMTAKERERYKKSLKKEAAEEKSLKKQAWQAYKAQHIVYLGRHIYWSDDTSMDKWDVKDASNRLIENKLPLISKHTQLAEAVNLTVPQLKGLCYQRDVATNIPYTHFTINKRNGTPRHIWSPIPRLKFVQRWILENILNNLMTHGAAHGFVRGKSIVTNAAVHSNSALLIKLDVKDFFPSVHWRRVKGVFRHAGYPEKIAILLALLCTESPRQVVQQNGTTYYVALSDRALPQGAPTSPALTNIVCLNLDRRLTGLADKVGLRYSRYADDLTFSLPVSSTSAENNVQANVQANVQPADHNQLIGQLLGSVQKILREEGFTLNNDKTRVIRTGNQHNVTGMVINGEGVPRVPRHIKRMLRAALHNLASGQPLREDETLETLSGYASWIASAEQELGQNYLAKIDTLREQAKVVETKSSAESTSLLNE

SEQ ID NO: 6416 - protein, 479 aa, unidentified
  source 1..479: note = Related to NZ_CAJHAL010000004.1; note = Psychrobacter nivimaris
MTTHTANHNDYISPEPVPTSFERQWQQLWQDIELAGGRYQYVQQQLVSQGFMVERQPVDNMSPKERDRYKKALKKEAAEEKSLKKAAWQAYKAHHMVYLGRHVYWTDDTSTDKWDIKDAANRLIENKLPLLRKHNELAEAVNLTIPQLKGLCYQREVATNLSYSHFTIAKRNGTARQIWSPIPRLKFVQRWILHNILNNLTTHGAAHGFVRGKSIVTNAAVHSNSELIIKLDVKDFFPSVSWRRVKGVFRHAGYPEQIATLLALLCTESPRQVVQQDGITYYVALGDRALPQGAPTSPALTNIVCLNLDRRLTGLAEKLGLRYSRYADDLTFSVPTIEDTKPKLKVKTTIKATTSTAKKQADTQHNKLIGQLLGSVHKILREEGFALNNDKTRVIRKGNQQQVTGMVVNGQGVPRVSRQIKRMLRAAVHNLEAGGTLRADETLNTLSGYAAWIASAEPELGHSYLDRIERLQVQQETSV

SEQ ID NO: 6417 - protein, 445 aa, unidentified
  source 1..445: note = Related to NZ_CAJGYT010000001.1; note = Psychrobacter aestuarii
MSSTSTQNLREHWQTLWQDIEQAGGRYQYVQQQLVTQGFVVERRPIDNMSKAERQRYKTMLKKEAAEEKNLKKDAWQAYKSQHMVYLGRHVYWSDDHSADKWDVTDGERRRVSNQLPTLTQPKELAAALNLSIAQLKGLCYQREVATCVPYTHFSIQKRRGGTREIWSPIPTLKTAQRWILHHILDQLPTHGAAHGFVSGRSIVTNAEVHRDSAVLIKLDLKNFFPTIHWRRAKGVFRQAGYPESIATLLALLCSESPRQMVQQNGVTYYVALADRALPQGAPTSPALSNIVCVNMDRRLTGLADKHGLRYSRYADDLTFSIPSSSAANSDAQNALIGLLLGSVYKIVKEEGFVLNTDKTSIVRTGQQQNVTGMVVNGESAPRVPRRIKRMLRAAIHNLQQGRALPEGESLATLSGYAAWITSAEPELGRHYLEQIEALAKATPA

SEQ ID NO: 6418 - protein, 506 aa, unidentified
  source 1..506: note = Related to NZ_VFYU01000031.1; note = Psychrobacter sp.
MSNRNNNSNNPNNAQQLSQYIHNNQAHHGNLINPNGNEKLNELQQLWQDIEQAGGRYQYVQQQLVKQGFLVERQPIDNMSPKERDRYKKQLKQEALEAKKLKQQAWQAYKAQHIVYLGRDIYWTDDTSPDQWDVKDASNRLIENQLPLIDKPQKLASSLNLTIPQLKGLCYQRDVATNLTYNHFTIAKRNGTPRQIWSPIPRLKYAQRWILDNILNNLPIHGSAHGFVQGKSIVSNACVHTDSELLIKLDIKDFFPSVHWRRVKGVFRHAGYHEQIATLLALLCTESPRQIVRQNGVTYYVALADRCLPQGAPTSPALTNIVCLNLDRRLTGLADKLGLRYSRYADDLTFSLPKTDTTTGKPSKKPNTKTAKTANDNSTNNNNEQNQLIGQLLGSVSKILTEEGFAINSDKTKIIRTGNQQNVTGLVVNGDGTPRVPRKTKRMLRAVIHNLQNGGKLRADENFNTLMGYASWIAMTDPELGASYLQQLGELSKEFAKKAEKEDKTE

SEQ ID NO: 6419 - protein, 451 aa, unidentified
  source 1..451: note = Related to NZ_CP047226.1; note = Moraxella osloensis
MTNNKHTSLPQQWEQRWHAIEQAGGRYQYIMQQMKEHGFLVERKPIDNMSPTERERYKKQLKQEAAEQHKIKKDAWQAYKANHIVYLGHGIYWSDDTSEDKWDATDGAKRLLENQLPTFKNVKALAEQLNLTISQLKGLCFHREVATRIPYSHFTIVKRSGGERQIWAPVPRLKYAQRWILDNVLNPMLIHGAAHGFVRGKSIVTNAENHTNSQLIIKMDIKDFFPSIGWRRVKGVFRQAGYPEQIATLFAMLCTESPRQLVKQGNVIYYVALADRCLPQGAPTSPALTNIISLNLDRRLTGLAEKHGLRYSRYADDLTFSLPAEATIDTKAKNTLISTLLGSVTKILTEEGFAINAKKTHIIHQGGVQRITGLVVNGDSVPRVPRNIKRMLRAAIHNLEQGKPFKEGESFNTLQGYAAWIAMAEPDVGEALLKKLRQLKNRPLQIEPVSD

SEQ ID NO: 6420 - protein, 428 aa, unidentified
  source 1..428: note = Related to NZ_NDXW01000001.1; note = Zooshikella ganghwensis
MTDFQQLWQDIQHAGSIDAYVNKQLQKKGYLVKRLDAKQLSAKELARYKQQLKQEAEAKQKLNQEAWQVYKQNNIVYLGDQVYWHDNDDWDKYDRENADKALVGYQLPVIHTPAELAEQLQLTIKELRWFTYHRNAAEYSHYQQFSIPKRSGGERSIWAPKPKLKAAQRWILLNIVERMLIHGAAHGFVGGRSILTNAQQHTQSELVVKFDLADFFPSISWRRVKGIFRKAGYKEQVATLLALLCTEAPRERIEHEHKTYFIALADRCLPQGAPTSPSLTNILCKSMDRRLTAFAEKNGWRYSRYADDLTFSWSGSQSKSNIKQLIGIVHQVVKDEGLNINSKKTRILRPGSCQQITGLVVNEHAQPRVPRATKREVRAMLHNLSKGKSLHEDETLSQLQGKINFIRMVEPELGASFLTQFQQIVQSA

SEQ ID NO: 6421 - protein, 432 aa, unidentified
  source 1..432: note = Related to NZ_CP048878.1; note = Spartinivicinus ruber
MKQQSKINQLWNAIEKAGSMNAYIDGQLREHGFLVKRRDTDNMSKRELDRYKKELKAEAAEKKRLKQVAWQAYKANHIVHLGDGIYWNDHDDFDRWDLNNAEERAAENELPPLDKPQQLAHALGITIPQLRWLAFHRDAATELHYRRFTIPKKDGSDRAIWAPKTLLKQAQYWINDNITRKLIVHGAAHGFIPGRSILSNAEVHTNSKIILKMDLENFFPTITLKRVKGLFRKAGYREQIATLLALLVTEAPREVVEDQNKTYFVSMGPRCLPQGAPTSPMITNALCLKLDRRLTGIAEKYGWRYSRYADDLTFSLPDGKDKQPNLGKLMHVIKQIVKDEGFIIHPEKTRITRKGGRQKITGLVVNGQGTPRVPQKTKRELRAAIHNLKNGKPLREGETLAHLEGLAAFICMTEPALGHKMLNQLKAVANTL

SEQ ID NO: 6422 - protein, 432 aa, unidentified
  source 1..432: note = Related to MABD01000042.1; note = Gammaproteobacteria bacterium 45_16_T64
MAQRSEIDKLWNAIEKAGSMDAYIDGQLREHGFLVKRRATDNMSRRELDKYKKELKGEAAERKRVKNTAWQAYKAKHIVHLGDGVYWNDNDDFDRWDLDNAEERAAENELPTLDKPQDLALALGITIPQLRWLAYHRDAATELHYTRFTIPKRDGSDRAIWAPKTLLKKAQYWINDNIVSQLIVHGAAHGFMAGRSILTNATVHTDSKTVLKMDLRNFFPTVTFRRVKGLFRKAGYREQISTLLALLVTEAPREVVEENNKTYFVSLGPRCLPQGAPTSPMITNVLCLQLDRRLTGIAEKYGWRYTRYADDLTFSLPNGPDKEPKLGALMHVVKQIVTDEGFVVHPEKTRVTRKGARQKVTGLVVNDKGAPRVPQKRKRQLRAAIHNLQNGKPLREDETLAQLEGLAAFIYMTDPKLGSSMLADLRNIANKI

SEQ ID NO: 6423 - protein, 434 aa, Vibrio sp.
  source 1..434: note = Related to NZ_CP018616.1; note = Vibrio azureus
MTKSIKQLALEIEKAGSPEAYVKQQMQKQGFTVTRKNVADLSKKELSAYKQALKKEASEKHKLQQEAWQGYKAYNIVHLGDDIYWNDQDVCDKFDCDDRHVRMQENAIPDFKNPQALAAWLGVSMPQLRGLTYHRECAESIKYRHFTIEKRSGGMRSIWAPNHELKQVQRQILDEILSSLLVHDASHGFMQGRSIFSNALRHTDAKIVVKMDLKDFFPTISFKRVKGLFRKAGYQEQIATLLALLCTEAPRKIIERDGKKYFIALGERCLPQGAPTSPAISNVVCLRLDRRLQGLAESLGYRYTRYADDLTFSQLNDCKKPMSIGALKAAIKNIIESEGFVLHTEKTRITYPHRSQQVTGLVVNGKGLPRVPRKTKRHLRAAIHNLQQGKPLQDGESLEQLKGYAAFIAMSDPKTGQEMLAKLNECQLSLPEST

SEQ ID NO: 6424 - protein, 447 aa, unidentified
  source 1..447: note = Related to SBHC01000028.1; note = Deltaproteobacteria bacterium
MSQADYTLPPIETSEERRELWSHIDEAGGVRAYIRQEIHRQDLAATGNPEHMNASQRQRYKQAKKLEAEFRTALRKRTWAAYRETHLVHLGDDIFYNDLIDIDAFDIDNREQRREANDIPSIETVDELATFLGLTIPELRWLSYHRNAEASPHYVQFSIPKADGSRRVISAPKPKLKACQTKIYHEILSLLPVHGAAHGFVPGRSIATHASLHAGGNIIVKMDIRHFFPTIVFPRVKGFFRKIGYPEQVATVMALLCTESPRQEMEHKGQVLHVALQERCLPQGAPTSPTLTNLMCVRLDRRVLGLARKLGWTYSRYADDLAFSWHQDSEPDLAQLLGCTKAIAGDEGFKIHPKKTQVMRAKSRQMVTGLVLNATGGDEPNHPRPVRRLVRQIRAAIHNRKNGKPGKAGESLLQLQGLAAFVCQTDPRRGEPLMEDIRALIAAELAE

SEQ ID NO: 6425 - protein, 446 aa, unidentified
  source 1..446: note = Related to PBIH01000019.1; note = Deltaproteobacteria bacterium
MSKIKVPPTETHEQRVELWEEIKKAGGIEPYIQQTLSAQGLAVHNNDTSRMNQKQKSAYKKSKRAEAEAEKVVRKATWKAYCATHLVHLGNGVFYNDLVDADKFDIENREQRISNNDLPNIEHVDALAEFLSLTLPEMRWLAYHRDATKNPHYKQFTIPKSDGSERVISAPRPKLKKAQHTILHKILDRMPIHGAAHGFVPGRSIASHADKHAGRKIVVKMDLKDFFPTLTFPRVKGLFRKIGYPEQVATVMALICTEPKRKEVEHDGEMYHVSLSHRSLPQGAPTSPTITNIVCMRLDRRMSGLAKKLGWSYSRYADDLVFSTNDTDINIGALLRLSEKVIRAEGFRRHPKKTHVMRQCNRQKVTGLIVNPTPSEEKTTSRVPRKVVRQVKAGIYNRLNGKPHKSGESLEQLRGLAAFINQTNPTLGRKFLDQIKTLVEREENEI

SEQ ID NO: 6426 - protein, 431 aa, unidentified
  source 1..431: note = Related to JAHBVW010000060.1; note = Deltaproteobacteria bacterium
MTEPALTWADVAAAGGIREWVDAEVARQGLASTGVPPNMTDAEKKLFKARRDEERRVRKELYKRAWSAYKRAHIVHLGPGVFWHDTADVDRFDADDPEKKRQDNALPKLADVEAFAKAVGVDIPRLRWLSYHREVDSGTHYRRWTVPKRDGTARLISAPKPDLKRIQRWITTEVTEHLPVHGAAHGFITGRSIVSNARVHAGAHVVVKLDIRGFYPTVTMRRVKGLLRRAGLGEQVATLMALLATESPREEVETHGKVHYVAIGPRSLPQGAPTSPSITNALCLRLDCRLAGLARKLGCRYTRYADDLTFSWHGDGKAAIGSLLRATTMIVRAEGFEIHTKKTRVMRKGARQKVTGLVVNEAQGRPTARVPRTTQRELRAAIRNRELGRPGKGESLEELKGMAAFIMMTDRERGRAFMERIDKLIAAREVK

SEQ ID NO: 6427 - protein, 398 aa, unidentified
  source 1..398: note = Related to VBLP01000042.1; note = Deltaproteobacteria bacterium
MTDAENKLYKARRDEERKVRRELYRRAWQAYRRAHVVHLGAGVFWHDTADVDRFDADDPEKRRQDSALPSLDDVAALAGALGLSIPRLRWLAYHRDVDTGTHYHRWWVPKRDGSKRLISAPKPELKAVQRWITREVTEHLPVHGAAHGFLVGRSIVSNARVHAGARVIVKLDIRGFYPTISMRRVKGLLRRAGLGEQVATVMALLATESPREQVATHGKTYFVATGPRSLPQGAPTSPSITNALCLRLDCRLSGLARKLGCRYTRYADDLTFSWHGDARPQVGALLRGVAMIVRAEGFEVHAKKTRVMRAGARQKVTGLVVNQAPAERPTTRVPRVTQRALRAAIKNRELGRSGKGETLEQLKGMAAFVMMTDAARGRALMARLDRLIAARDQAGGQP

SEQ ID NO: 6428 - protein, 434 aa, unidentified
  source 1..434: note = Related to JADJJK010000055.1; note = Myxococcales bacterium
MSEPVRPPVRWADIAATGGIREWVDAEITRQGLSDPGAGNLSDAEKKVYKARREEERRVRRELYKQAWAAYRQTHIVHLGRGVFWHDTADVDRFDADDPEKKRRDNALPELKDVEALSQALGLSVARLRWLAYHREVDTGTHYHRWRIPKRDGTPRLISAPKPQLKEAQRWITREITEHLPVHSAAHGFLVGRSIVSNARVHAGARVIVKMDIEGFYPTVTFPRVKGLLRKAGLGEQVATLLALLATESPREELVLEGKTVFVATGPRSLPQGAPTSPSITNALCLRLDCRLFGLARALGARYTRYADDLTFSFHGPAGEVDHVGTLLKAVTRIVAAEGFAIKPKKTRVMRSGARQRVTGLVVNAAPGRPLARVSRQQLRELRAAIKNRELGRPGKGESLDQLRGMAAFVMMTDRERGRMLLDRINRLAAPTEP

SEQ ID NO: 6429 - protein, 447 aa, unidentified
  source 1..447: note = Related to JADJUF010000001.1; note = Myxococcales bacterium
MTAGAKLAAVPWAEVAAAGGIRPWVDAALARQGLADPGVPSSMSDGEKKAYKARREEERRVRRELFRVAWAAYKAVHIVHVGAGVWWHDTPDVDRFDAAEPERKRADADLPALPDVEALAKALGLSIARLRWLSYHREVDTGTHYQRWTVPKRDGGVRPITAPKPTLKAAQRWIARSITEHLPVHGAAHGFLPGRSIATNAVVHAGAKIIVKLDIEGFYPTVTYRRVKGLLRKGAGLGEQVATLLALMATEAPREELLVRGRTCYVATGPRALPQGAPTSPSITNALCLRLDGRLTGLARSLGCRYTRYADDMTFSWHGGAAGQADRTNAIGKLLRAVEMIVAAEGFTIKRTKTRVMRGGGRQQVTGLVVNQADGRPPARVPRATQRNLRAAIKNRELGRPGRGESIEALRGMAAFVMMTDPARGRAFMARIDRLAERAGGAPAGSE

SEQ ID NO: 6430 - protein, 406 aa, unidentified
  source 1..406: note = Related to JADJFN010000004.1; note = Myxococcales bacterium
MSDAEKKAYKARRDEERRVRRELFRVAWAAYKAAHIVHLGPGVWWHDTADVDRFDAADPAKKQQDNALPALPDVEALAKALGLSIARLRWLSYHREVDTGTHYHRWTVPKRDGGLRPISAPKPELKAAQRWIARQVTEHLPVHGAAHGFLPGRSIATNAGVHAGAKIIVKLDIEGFYPTVTWRRVKGLLRKAGLGEQVATIMALVATEAPREELVVRGRPCFVATGPRALPQGAPTSPSITNALCLRLDCRLTGLARKLGARYTRYADDLTFSWHGDAARAADAGNAIGKLLRAVTEIVAAEGFTIKRTKTRVMRAGGRQQVTGLVVNQADGRPAARVPRATQRKLRAALKNRELGRPGHGETLEALRGMAAFIMMTDPERGRAFMARIDRLAQRAGEAPAGSERA

SEQ ID NO: 6431 - protein, 443 aa, unidentified
  source 1..443: note = Related to NZ_PVNL01000069.1; note = Enhygromyxa salina
MANDTQTPPVSAVPADLPKWADIEAAGNIRSWVDAELTRLGLFEPGVDTSTLSDKQRKAYKAKREQERKVRRELMAKAWFVYRQHHLVHVGVGVWYHDTADIDRWDIPDLEGRRQLNELPELENVHALAKSLGLAIPRLRWLVYHREVDTGTHYHRWTVPKRSGKGVRLISAPKPDLKRVQSWIARNITEHLPVHGAAHGFLAGRSTLSNARVHAGARVIVKFDVRDFYPTVVLRRVKGLFRKAGYGEQVATVLALLCTECPREEIELGGRPHYVATGPRSLPQGAPTSPSITNTLCLNLDARLTGLAAKLGFRYTRYADDLTFSFHGPAGHKIAVGRLQKAVVDIVADEGFIVHPHKTRVMRSGGRQKVTGLVVNTAPEGEPVARVPRKVVRELRAAIHNRAQGKPGKGETLEQLRGMAAYVHMCDPAKGAAFMQQINSLPG

SEQ ID NO: 6432 - protein, 435 aa, unidentified
  source 1..435: note = Related to JAGQIO010000454.1; note = Myxococcales bacterium
MANDNATTTTAGPAWSEIEAAGNLRNWVDAELERRGLRDPGVDTSRLNDKQRKAYKTKREEERKVRRELMAQAWKVYRQHHLVHIGVGVWYHDTADIDRWDIADLEGRRAINELPELKDVHALAKILELPIPRLRWLIYHREVDTGTHYHRWTVPKRSGKGRRLISAPKPDLKRCQTWVARNISEHLPVHGAAHGFLAGRSTLSNAKVHAGAKVVVKFDVRDFYPTVSYRRVKGLFRKAGYGEQVATVLALLCTECPREEIEIGGRVHYVATGVRSLPQGAPTSPSLTNALCVRLDARLTGLASKLGFRYTRYADDLTFSFHGEGKVPVARLRRAVVDIVAAEGFEVHPDKTRVMRSGGRQKVTGLVINGAPEGRPEARVPRKVIRELRAAIHNREQGKAGKGESLDQLRGLAAYVHMCDPEKGRAFMARIDKLA

SEQ ID NO: 6433 - protein, 448 aa, unidentified
  source 1..448: note = Related to JABJWV010000001.1; note = Pseudenhygromyxa sp.
MANDTSSTTATTADGPEWADIEAAGSIRNWVDAELDRRGLLDDGADTSRMSDKQRKAYKTKREEERVLRRKLMAQGWACYRQNKLVHVGVGVWYHDTADIDRWDIADLDGRRQLNELPELKDVHALAKVLELAMPRLRWLVYHREVDSGTHYHRWTVPKRSGKGVRLISAPKPELKRCQTWIARNISEHLPVHGAAHGFLAGRSTLTNAAAHAGAEVVVKFDVRDFYPTVTFRRVKGLFRKAGYGEQVAIVLALLCTECPRETIEIGGRTYHVATGPRSLPQGAPTSPSITNALCMRLDARLTGLARKLGFRYTRYADDLTFSYHRGEGGEGEQETGKIPVARLRKAVTEIVASEGFRVHEGKTRVMRSGGRQKVTGLVVNGAGEGVPTARVPRKLVRELRAAIRNRELGKPGKGESLEQLRGWAAYVHMCDPSKGRAFIARLEKLAE

SEQ ID NO: 6434 - protein, 437 aa, unidentified
  source 1..437: note = Related to NZ_ABCS01000226.1; note = Plesiocystis pacifica
MANDTTAEVEGTPPKWADIEAAGNIRNWVDAELERRGLRDPGVDTSRLSDKQRKAYKAKREEERRVRRVLQGQAWQVYRQNHLVHVGVGVWYHDTADIDRWDIAGIDERRELNELPELKDVHALAKALELPIPKLRWLVYHREVDTGTHYQRWTVPKRSGKGVRLISAPKPTLKRCQTWVARNITEHLPVHGAAHGFLTGRSTVTNAAVHAGARVVVKFDVKDFYPTVSFRRVKGMMRKAGYGEQVATVLALLTTECPRESIELHGRTHYVATGPRSLPQGAPTSPSITNALCLRLDSRLTGLARKLGFRYTRYADDLTFSFHGAGKIPVGRLQKAVADIVKDEGFIIHPHKTRVMRKGGRQKVTGLVINGAPEGAAKARVPRKVVRELRAAIRNRELGKPGKGESLEQLRGMAAYIHMCDPAKGKAFLDRINALSS

SEQ ID NO: 6435 - protein, 442 aa, unidentified
  source 1..442: note = Related to JAEPMI010000008.1; note = Deltaproteobacteria bacterium
MADSHDSTEVSLPEWKGIAEAGGIESWIHRELERRQLIEEVDYASLSKAEKKAYKARRDEERRVRRLLRKHAWQAYKKAHVVHLGRGVFYHDTPDYDRYDIDGREERLADNALPEIADASALAEALGITVPTMRWLAYHREVDSGTHYRRWTVPKRDGRRRLISEPKPQLKEAQRWIAREITDHLPVHGAAHGFLAGRSTVTNAAVHAGARIVVKLDLKDYYPTITTPRVKGMFRKAGYGEQVATLLAMLCTESPREEIELDGKTWYVATGPRSLPQGAPTSPSITNAISLRLDLRLAGLARKMGFRYTRYADDLTFSHHQRSEAPIGSLFRLVGQIVVEEGFEVHPKKTRVMRSGSRQKVTGLVVNGADGAPAARVPRSVRRKLRAAIKNRELGRPGEGESLAQLRGWAAYVYMTDPAKGRALLDRLAALGGESDEGGTDG

SEQ ID NO: 6436 - protein, 433 aa, unidentified
  source 1..433: note = Related to JACKEN010000012.1; note = Deltaproteobacteria bacterium
MTTAAEDKLPDWAGIAAEGGIDAWVRSELMRRDLIDDRDTTQLSEREKKQYKARREEERRVRRLLQKHAWGAYRAAHVVHVGVGVFYHDTPDIDRFDIDDPGARRVLNDLPELADATTLAARLELTIPRMRWLAYHREVDSGTHYHRWKVPKRSGGERLISAPKPELKRVQHWIAEHITEHLPVHAAAHGFMAGRSTVSNAAAHAGARCVVKMDLEDFYPTITTPRVKGMFRKAGYGEQVATLLALLVTESPREEVPIDGKTFHVAVGARSLPQGAPTSPSITNAICLRLDTRLMALCRVLGFTYTRYADDLTFSWHQEGDAPVGHLLRAVGGIVTDEGFRVHRKKTRVMRQGRRQKITGLVVNGAHDVPARVPRLVIRQLRAAIKNRELGREGRGESLAELRGMAAYVNMSDPTKGRAFLQRLAALSKRGES

SEQ ID NO: 6437 - protein, 445 aa, unidentified
  source 1..445: note = Related to JAFGRB010000173.1; note = Deltaproteobacteria bacterium
MSDSTADKQRTEWRSIAEAGGTDAWVHQELLRQGLIDEGVDTASMGDKERKAYKARREEERRVRKILRKDAWAAYRRAHLVHVGTGVFYHDTADIDRFDIDDPEQRRQQNDLPALATAQDLAQALDLPMPRLRWLVYHREVDTGSHYHFWTVPKRSGGERLISAPKPDLKKAQRWIAEHISERLPIHGAAHGFVAGRSTVTNARLHAGAAVVVKFDLEAFYPTITFPRVKGLFRKAGYGEQVATVLALLCTESPREQVALKGKLYYVAVGPRSLPQGAPTSPSITNAICLRLDARLAGLARAAGWRYSRYADDLTFSWHRRDAAAPVGRLMRMLGRIGSDEGFALHRKKTRVLRSGRRQKVCGLVVNAAGDGQPRARVPRKIVRELRAAIRNRELGREGWDESLAELAGMASYVHMADPKKGRAFLDRIAALQAAGQQSGGEVSS

SEQ ID NO: 6438 - protein, 450 aa, unidentified
  source 1..450: note = Related to JAHQVK010000212.1; note = Myxococcales bacterium
MTESSTPPSSEYIDLPEWTAIAAKGGIHYWIQEELAKKGLLDDQAPSSPSVREKKQYRARRDEERRVRRRLAQHAWAAYRRAHLVHVGLDVFYHDTPDIDRYDVVDPPARRATNSVPEIPDARRLAEILDLPMPRLRWLVFHREVDSGTHYHRWTIPKRDGSERLISAPKPELKRVQKWISQQITEHLPVHGAAHGFLAARSTVTCAQVHAGARVLVKTDLKDFYPTITFPRVKGIFRKAGYGEQVATLLALLCTECPRDKIVRANKTYYVAVGPRSLPQGAPTSPSLTNVTCFRLDDRLTGLAKKFGVCYTRYADDLTFSWHTPGEASVGLLLGIIRGIVTDEGFELHPNKTQILSSGRRQKVTGLVVNRSDADVSVRVPRKVVRQLRSAIKNRENDRDGPESLAQLKGMAAYIHMADPVKGRQFLERIAQLEARQTVAVGSEMADRVE

SEQ ID NO: 6439 - protein, 456 aa, unidentified
  source 1..456: note = Related to JACQYO010000157.1; note = Deltaproteobacteria bacterium
MTEPNQSTQNPTGSVGGGSSELSVRVPDWAAVVEAGGRDAFIERELLRLGLVDESTEPGKLSDSEKKAFKARREEERRVRRELDKATWASYRAAHILHLGAGVFYSEGIDIDRFDLDDPKARRDANGLPDIANAQALAKLLGISMFRLRQLTYHRDVDSGSNYIRWMIPKRSGGLRLISAPKKELKRIQRFVAKEIVEHLPMHGSSHGFVRGRSTRSNAIKHAKAEVIIKLDLSSFYPTITFPRVKGLFRKAGYQEKIATLLALLVTESPREERHVENRTYYVANGPRSLPQGAPTSPAITNTLCLRLDSRLDGLCAKWGLVYTRYADDLTFSAKKGSKVHVGKAIGAVKRIVSEEGFVVHPAKTRIMRGGRRQKVTGLVVNAAPGAPLARVPRKLVRRLRAAITNRERNKPLREGAETIEQLRGYAAYVAMTDPPKGKAFLDRINRLAEREPTAG

SEQ ID NO: 6440 - protein, 443 aa, unidentified
  source 1..443: note = Related to JACPFK010000066.1; note = Deltaproteobacteria bacterium
MSQTNDPLTGQALVAPLDWGAVKEAGGRENFIDKELARRGLTDSSDPSVLGDSEKKSFKARREEERRVRKELEKAVWAAYRAAHIVHLGSGVFFNDAIDIDKYDLEDPKGRREANDLPDIPSPAELAKVLGISMRRLRQLTFHRDVDSGTNYVRWTIPKRTGALRLISAPKKELKRAQRWINREIVEHLPVHGAAHGFVRGRSTLTNATPHARAEVIVKLDLSDFYPTITFPRVKGLFRKAGYQERIATLLALLVTESPRDTRVLSGRTYYVANGPRSLPQGAPTSPAITNALCLRLDARLDGLARKFKVEYTRYADDLTFSAQRGTTPDLGRFLGAVKRVVREEGFLVHPKKTRIMRGGRRQKVTGLVVNAAKGRPVARAPRKLVRALRAAITNRERGKQAGPETLEQLRGYAAYVSMTDPARGKAFLERILRLADRGGAER

SEQ ID NO: 6441 - protein, 469 aa, unidentified
  source 1..469: note = Related to JAGQIK010000702.1; note = Myxococcales bacterium
MSEQPQTHTPDGAEAAAPPPPPPPAPAASPPEAAPRLTWDVIAEDGGIRGWIDAELRRRDLVDDGVDTQSMSDKQRKRYKARREQERRVRRELRKQAWACYREAHLVHLGASVFYHDTPDVDRYDIAEPEERLRENDLPLLKDARALADALHLSVPRLRWLTFHREVDSGSHYVRWTIPKRSGGTRLISSPKRDLKDAQRFIARKISEHLPVHSAAHGFLGGRSTVTNARAHAGAEVVIKLDIKDFYPTVTMPRVKGMFRKAGYGEQVATVLALLCTDAPREAMLLRGQTRYVATGPRSLPQGAPTSPSITNAICLRMDSRLSGLARKLGFRYTRYADDLTFSWHDGKKPAPVGMLLGGVRKIVSSEGFVVHPNKTRVMRKGRAQRVTGLVVNAAGEGAAPARVPRKLVRRLRAAIHNRERGKAREGETLAQLAGWAAYLNMTDPERAQPMLARIHRLMRGERDSSSGE

SEQ ID NO: 6442 - protein, 435 aa, unidentified
  source 1..435: note = Related to JAIOJK010001035.1; note = Sandaracinaceae bacterium
MSAEIQTTTPATAEPIPPWASVREAGGIREWVEAELARRGLIESVDTSALSAEQKKQFKARRDEERRVRRLLRKAAWASYKRAHLVHLGAGIFHHDTADLDRFDADDPEARRKDNDLPELADAQALAAALGLPIPTLRWLAFHREVDTGTHYHRWTVPKRSGGARLISAPKKTLKTAQKWIATNIVEHLPVHGAAHGFLPGRSTKTNAEVHVGARLVVKLDLSDFYPTITLERVKGLFRKAGYGEQVATVLALLCTESPREAISLRGRTCYVALGPRSLPQGAPTSPSITNALCLRMDSRLSGLARKFGFRYSRYADDLAFSWHGEGEGPVGELLGAVHRIVRGEGFVVHPKKTRILRCGRRQKVTGLVVNGQGPPRVPRALVRKLRAAIHHREHGKQGKGETLAQLRGWAAYVHMCDPQKGRAFLERLAKLGEA

SEQ ID NO: 6443 - protein, 449 aa, unidentified
  source 1..449: note = Related to NC_013440.1; note = Haliangium ochraceum
MSDPSQQTATGTATGTDPVPPEWPQIAEAGGIHNWVQADLRRRGLIEEVDTASLSDKQRKAFRARRDEERRVRKLLYAQAWAAYKRAHLVHVGVGVFYHDVADYDRFDIAEPEQRRQENDLPALADTTALAEALELPIPRLRWLVYHREVDRHTHYHRWTVPKRSGGERLISAPKPELKRAQRWIARNITEHLPVHGAAHGFLPGRSTATNAAVHAGARVIIKFDIRDFYPSVTLPRVKGVFRKAGYGEQVATVMALLCTEPPREEMVLRDKKYYVAVGPRSLPQGAPTSPSITNALALGLDSRLAGLARSLACRYTRYADDLTFSWHGDSEAPIQRLKNAVARIVHGEGFRVHEGKTRIMRAGGRQKVTGLVVNAAAGEGAMPPARVPRDVVRRVRAAIHNRERGKPGGEETLEQLRGWAAYIYMTNPERGRQFLERLDALADDGSSS

SEQ ID NO: 6444 - protein, 475 aa, unidentified
  source 1..475: note = Related to JAESTW010000770.1; note = Kofleriaceae bacterium
MTASDTNQNPQTAKPQSAKPQSESPQAHSTSERVEWTVIAEAGGIHTWVYSELERQGLIDNVDTSTLTAAERKRYRKKRDEERVVRKILQKKAWKSYREAHIVHVGRGVFYHDTPDVDVYDVEDPKGRLESNDLPPIADALGLAKRLGIGIPKLRWLVFNREVDTGCHYHYWTVPKRDGGRRLISAPKPELKKAQAWIARTISEHLPIHGAAHGFVPGRSTVTNAAVHAGASVVFKFDIKDFFPSVTTNRVKGLLRKAGYGEQVATLMALLCTEFPREELMLRGRKHYVAIGARGLPQGAPTSPSLTNALCMRLDCRLTGLANSIGLKYSRYADDLTFSWHGEGKEAPVMRLRHAVRKIVSAEGFVIKDSKTRILRSGRRQRVTGLVVNKAESAEDARVPRFMLRQIRTAIYKLERGQEAKESLEQLRGWAAYVYMTDKKRGADMLSRLAAISSATTATTTSSASNSSTTTGAKI

SEQ ID NO: 6445 - protein, 442 aa, unidentified
  source 1..442: note = Related to PABA01000191.1; note = Sandaracinus sp.
MSEDTLESEEAPAAVDPAAPPTARWPDIAAAGGIQPWVLAELRRRDLVDEGVDTSRLSAKEKKRFKARREEERRVRRLLKKHAWAEYRRAHLVHVGVGVFHHDTADVDKYDLPDPDARRAENDLPPLKDQHALAEALAIDIPTLRWLCYHREVDTGTHYRRWTIPKRSGGERLISAPKPTLMRCQRWIAQHVTERLPIHGAAHGFVPGRGTLTNAAAHAGAKTVVKLDLKDFYPTLTLPRVKGLFRKAGYGEQTATLLALLCTEAPREEMVIRGERRYVAIGDRSLPQGAPTSPSITNAICLRLDARLTGLAKKLGFTYTRYADDLAFSSDRRKAAVGKLVDAVYRITADEGFRVHPKKTRVMREGRRQQITGLVVNGQGEGPPARVPRKLVRQLRAAIHHRENGRPGKGESLEQLRGWAAYVYMCDPDKGRAFLDRLAKLQ

SEQ ID NO: 6446 - protein, 445 aa, unidentified
  source 1..445: note = Related to JACKDV010000022.1; note = Myxococcales bacterium
MTDASPERALPPWAEIAEAGGIDAWVVAELKARGLWEEGVDTSSLGDRERKKFKARREEERRVRKQLRRHAWSEFRRNHLVHVGAGVFYHDTADVDRYDIGDPETRRQDNALPKLAHAGDLAKEIGLTVPRLRWLVFHREVDTGTHYHRWHVPKRDGSLRLISAPKPQLKAAQRWIARNITEHLPVHGAAHGFVPGRSTVTNAAVHAGAEVVIKLDLQGFYPTITMPRVKGLMRKAGYGEQVATILALLCTESPREIIELNGKAHHVAIGPRSLPQGAPTSPSITNALCLRLDRRMQGLATKLGFRYSRYADDLTFSWHQADADAPVGKLLHRVRSIVGAEGFAVHPAKTRVMRSGRRQKVTGLVVNGVSAAEGAPEVPPARVPRKLRRMLRAALHNRTQGKDGPESLDRLHGFAAYVYMTDPRQGQALLERAAALREGAAGGTT

SEQ ID NO: 6447 - protein, 338 aa, unidentified
  source 1..338: note = Related to JAGQIQ010001415.1; note = Myxococcales bacterium
MTDPAATRPLPPWSEIAEAGGVDAWIVAELRARGLWEEGVDTSTLSDRDRKKYKARREEERRVRRELRRHAWAEFRRNNLVHIGAGIFYHDTADVDRFDIKDPDARRQDNALPKLPDTAALAKALGLGMPRLRWLVFHRQVDRGTHYHRWHVPKRDGGLRLISAPKPDLKAAQRWIARNITEHLPVHGAAHGFVPGRSTVTNAQVHAGARVVIKLDLQNFYPTITQPRVKGLLRKAGYGEQVATVLSMLCTESPREVIELRGTPHHVAIGPRSLPQGAPTSPSITNALCLRLDRRMQGLAGTLGFRYSRYADDLTFSWHADGEAPVGKLLHRVRSIVG

SEQ ID NO: 6448 - protein, 485 aa, unidentified
  source 1..485: note = Related to NZ_RAVZ01000142.1; note = Corallococcus terminator
MTAKLESFVPAAPPQAVPEVPPAAAASNTAIASKREARRAAHDVLLARWKAITEAGGTEEWVQAQLLSKGALADEVDFSSLKEKEKNAWKEKKKAEAVERRALGRQAHEAWKATHINHLGVGIHWSEAPGPDRFDLEHREERARVNGLPALDTAEALAKALDISVSKLRGFAFHRDVDTGSNYVSWRIPKRDGSERTITSPKPELKEAQRWVLSNVVERLPVHGAAHGFVAGRSILTNALAHQGADVVVKVDLKDFFPTVTWRRVKGLLRKGGLPEGTSTLLALMSTEAPRELLSFRGKTLHVAKGPRALPQGAPTSPGITNALCLRMDKRLSALSRKLGFTYTRYADDLTFSWTKAKAPRARRAQGAPVAVLLARVKDVVEAEGFTVHPNKTRVARKGSRQRVTGLVVNEAKDGTPAARVPRDVVRRLRAAIHNRQKGKPGREGESLEQLKGMAAFLYMTDPVKGRAYLDQLAKLEATETPAQA

SEQ ID NO: 6449 - protein, 486 aa, unidentified
  source 1..486: note = Related to NZ_FOIB01000017.1; note = Myxococcus fulvus
MTARLESFVPAAAPQAVATPAPQAPSANTVAQREARRAAHEALLARWKAIVEAGGADEWAQAQLVSRGLAVGELDFSSASEKEKTAWKEKKKAEAAERRALGRQAHEAWKATHVGHLGAGVHWEEEGGSDKFDIAHREERARANGLPELGSAEVLAKALGLSVSKLRWFAFHREVDTGSHYISWGIPKRDGGTRTITSPKPELKEAQRWVLSNVVERLPVHGAAHGFVAGRSILTNALAHHSADVVVKVDLKDFFPSVTWRRVKGLLRKGGLPENTSTLLALMSTEAPREAVQFRGKTLYVAKGPRSLPQGAPTSPGITNALCLKLDKRLSALSKKLGFVYTRYADDLTFSWTKTKQPKARRAQGAPVAVLLARVKDVVESEGFRVHPEKTRVSRKGTRQQVTGLVVNRARDGVASARVPRDVVRRLRAAIHNRQKGKPGREGESLEQLKGMAAFVYMTDETKGRAFLKSLEQLEAREKEAAPKAP

SEQ ID NO: 6450 - protein, 484 aa, unidentified
  source 1..484: note = Related to NZ_CP012109.1; note = Myxococcus sp.
MTARLDPFVPAASPQAVPTPEPTPPAPDAAAKREARRLAHEALLARAKAIDEAGGADDWVQAQLVAKGLSVDDLDFSSASEKDKKAWKEKKKAEAVERRALKRQAHEAWKATHVGHLGAGVHWTEDRPADAFDVPNREERARANGLTELDSTEALAKALKLSVPKLRWFAFHREVDTATHYVSWTIPKRDGSKRTITSPKPELKEAQRWVLSNIVERLPVHSAAHGFVAGRSILTNALAHQGADVVVKVDLKDFFPSVTWRRVKGLLRKGGLAEGSATLLSLMSTEAPREAVQFRGKLLYVAKGPRSLPQGAPTSPGITNALCLKLDKRLSALAKRMGFTYTRYADDLTFSWTKAKQPKARRTQRPPVAMLLSRVQEVVEAEGFRVHPDKTRVARKGTRQRVTGLVVNTAGKNAPAARVPRDVVRQLRAAIHNRKKGKPGREDESLEQLKGMAAFIHMTDPAKGRAFLAQLAELESAAPATPAQ

SEQ ID NO: 6451 - protein, 485 aa, unidentified
  source 1..485: note = Related to JABBJJ010000287.1; note = Pyxidicoccus fallax
MTARLESFVPAASPQTVSTPAPAAPAANAASQREARRAAHEALLTRWKAIVESGGADSWVQGQLVSRGLAVGDLDFARASDKEKTAWKEKKKAEAAERRALERQAHEAWKATHVAHLGAGVHWEEDAAGDKFDIAAREERARANGLPELDSTDALAKALGLSVSKLRWFAFHREVDTGSHYVSWKIPKRDGGSRTITSPKPELKEAQRWVLANVVEKLPVHGAAHGFVAGRSILTNALAHQGADVVVKVDLKDFFPSVTWRRVKGLLRKGGLPESASTLLALMATEAPREAVQFRGKLLYVAKGPRSLPQGAPTSPGITNALCLRLDKRLSALSKRLGFTYTRYADDLTFSWTKAKQPKAKRSQRPPVAVLLSRVQSVVEAEGFRVHPDKTRVARKGTRQRVTGLVVNEAANGKPAARVPRDVVRRLRAAIHNREQGKPGREGESLDQLKGMAAFIHMTDPVKGRAFLEQLAKLEAKEQQSPPAA

SEQ ID NO: 6452 - protein, 486 aa, unidentified
  source 1..486: note = Related to NC_020126.1; note = Myxococcus stipitatus
MTGRLESFVPAAAPQTVPTPAPQAATATALVQREARRVAYEALVTRWKAIVEAGGADAWVQAQLVSRGLAVGDLESGVTEKEKTAWKEKKKAEATERRALLRQTHEAWKATHVGHLGPNIHWEEKDGGSDKFDIPHREERARANGMPELGSAEALAKALGLSISKLRGFAFHREVDTGSNYVSWGIPKRDGGTRTITSPKPELKEAQRWVLANVVERLPVHGAAHGFVAGRSILTNALAHQGADVVVKVDVKDFFPSVTWRRVKGLLRKGGLPENASTLLALMSTEAPRETVQFRGKTLHVAKGPRALPQGAPTSPGITNALCLKLDKRLSALSKRLGFTYTRYADDLTFSWTKAKQPKARRAQGAPVAVLLTRVKDVVEAEGFRLHPEKTRVSRKGTRQQVTGLVVNQARNGVPAARVPRDVVRRLRAAIHNREQGKPGREGESLEQLKGMAAFVFMTDAAKGRAFLDSLARLEARETPEAPKVT

SEQ ID NO: 6453 - protein, 483 aa, unidentified
  source 1..483: note = Related to NZ_JAHNZT010000021.1; note = Citreicoccus inhibens
MTAKLESFVPAAPPQAIATPTPVTPTAQALVQRETRQAARAAVLARWKAITEAGGQDEWVHQQLVARGALAEEVDFSSLKEKEKTAWKEKKKAEATERRALKRLAYEAWKATHIGHLGAGIHWNEEGGADAFDIPHREERAKSNGLPEFTSAEDVAKALGLGVSKLRWFAFHREVDTATHYTSWRIPKRDGGSRTITSPKTELKAAQRWVLSNIVERLPVHGAAHGFVAGRSILTNALAHRGADVVVKVDVKDFFPSVTWPRVKGLLRKGGLPENIATLLALLATEAPREAVSFRGKTLYVAQGPRALPQGAPTSPGITNALCLRLDKRLSALSRKLGFVYTRYADDLTFSWTKAKAPKARRAQGAPVAVLLARVQEVVEAEGFRLHPDKTRVARKGSRQRVTGLVVNDAGPKVPAARVPRDVVRRLRAALHNREQGKPGKEGESLEQLQGMAAFIHMTDPAKGRAFMERLEKLSARPATTAA

SEQ ID NO: 6454 - protein, 474 aa, unidentified
  source 1..474: note = Related to NZ_JPMI01000131.1; note = Archangium violaceum
MTAKLETFVPAAAPVVVPAPAPAAPSANVVARREVSQREEQARLARWKAIEEAGGQEAWVEAELKARGLAPEHEDPSGLSEKEKTAWKEKKKAEAAERRALKRLAWEAWRTAHINHLGAGVHWEEAGGPDTFDLKDREERARANGLPELESAQTLAKALGLSVSRLRWFAYHREVDTGTHYRSWEIPKRDGGKRTITSPKKELKEAQRWVLANVVERLPVHGAAHGFVAGRSIVTNAMAHKGADVVVKMDIKDFFPSVTWQRVKGLLRKGGLAEGTATLLALMATEAPREVVQFRGKTLYVAKGPRALPQGAPTSPGITNALCLRLDKRLSALSRRLGFAYTRYADDMTFSWKKSRGKTEAPVAVLIARVEKVLEAEGFRVHPDKTRVMRPGNRQVVTGLVVNEAAKGQPGARVPREVVRQLRAALHNREKGKPGKEGETLDQLKGMAAFIHMTDPAKGRAFLERLSALEKREA

SEQ ID NO: 6455 - protein, 481 aa, unidentified
  source 1..481: note = Related to NZ_JAHXBG010000001.1; note = Cystobacter gracilis
MTSKLESYVPAAPPQPATAPAPGSPSPATLAQREARRQQHEALLTRWKAIQEAGGADEWVRAQLVAKGAAAEEVDFEELSEKQKSAWKEKKKAEAVERRALERQAWEAWKATHINHLGTGVHWDEQGGPDKFDVPNREERAKANGMPELDSPEALAKALGVTVSRLRWFAFHREVDTGTHYQSWRIPKRDGGQRTITAPKKELKAAQRWVLANVVERLPVHGAAHGFVAGRSILTNALAHRGAEVLVKVDVKDFFPSVTWQRVKGLLRKGGLPEGAATLLSMLSTEAPREVMEFRGKTLYVAKGPRALPQGAPTSPALTNALCLKLDKRVSAMAKRLGFTYTRYADDLTFSWRRAKGAKGKAQADAPVAVLLARVKSILEAEGFTMHPEKTRVLRKGTQQRVTGLVVNEAPDGVPAARVPRDVVRRLRAAIHNREKGKPGKEGETLEQLKGMAAFIHMTDPAKGRAFLQRLEALEKLEPPK

SEQ ID NO: 6456 - protein, 475 aa, unidentified
  source 1..475: note = Related to NZ_FOAP01000003.1; note = Stigmatella aurantiaca
MTAKLEPHVPAAPPVPGEAPAPTRPDPAKQEARRAHHEALRLRWKAIEEAGGTDAWVRQQLVAKGVAADEVDFESLTDKQKAAWKEKKKAEATERRAQKRLAWEAWKATHIHHLGVGVHWDEAGGPDTFDVENREERAKANGLPETLDSAEALAKALGISLSRLRWFSFHREVDTGTHYQTWEIPKRDGGKRTLTSPKRELKAVQRWVLANVVERLPVHGAAHGFVAGRSILTNALAHRGADVVVKVDMKDFFPSVTWRRVKGLLRKGGLTENLATLLSLLATEAPREVVRFRGQTLYVAQGPRALPQGAPTSPALTNALCLRLDKRVSALSKRLGFTYTRYADDLTFSWRRTKAPGQADAPVALLLARVKGVLEAEGFTLHPDKTRVQRKGSRQRVTGLVVNEAPEGAPGARVPRDVVRKLRAAIHNREQGKPGPEGETLEQLKGLAAFVHMTDAEKGRAFLRRLEALEQRQAR

SEQ ID NO: 6457 - protein, 467 aa, unidentified
  source 1..467: note = Related to JACSRE010000153.1; note = Myxococcus sp.
MTNRIDDHVFAAPPVLTTRAPPRVKLTAAERAERERQRTAAEARWLEIEAKGGVDGWVRAKLIEAGHHPDVAGPASEDEKKTFKEKKTAERAERKALRALANEARRFGTVGFLGNTVHWDDLKGPDDFDLKDRAARAERNGLPPWETATELAAAMDLSLSELRWLTFHREVSTSTHYHSWKVPKRSGGERTITAPLPKLKALQRWALEHYFEKLPVHAAAHGFLPARSVLTNALAHVGADVVVKLDVKDFFPTVSWKRVKGLLRKAGATEQVATLLALLCTEAPRQLIEFREQTLHVATGPRVLPQGAPTSPAITNALCLRLDQRLSALARALGCTYTRYADDLTFSFKKTPERKRLALGILVETTKDILKSEGFALHAKKTQVLRRGAAQRVTGLTVNEAGPQVAKARVARDVVRRLRAAIHNRAKGKPYREGESHAHLQGLAAWVFMSDPKRGAQLLEQVAKLPQ

SEQ ID NO: 6458 - protein, 478 aa, unidentified
  source 1..478: note = Related to JAGNNG010000134.1; note = Deltaproteobacteria bacterium
MTARIDTYVKASPVSAAQPRQGQLSAAERAQREQERADRQARWLAIREAGGIDKWIDQQLASRGLASDGGDESALIERDKAGYKAKKKAEAEARRALRQKAWQAYHATHINHLGAGIHWEDDPDVDRFDVENRSERARDNGLPEISTPEQLAKAMGLSIPKLRQLTYHRETDTGSNYYSFTIPKRDGSPRSIFAPKRDLKAAQRWMLRQVAERLPVHSAAHGFLPDRSILTNALQHVGAHTLVKVDIRDFFPTVTWRRVRGLLRKGGLSEQAATLLSLLATEAPREVVQFRGKTLHVATGPRALPQGAPTSPALTNALCMRLDRRMSGLARLLGCRYTRYADDLTFSFCHADGHTGTGRAPVGALLRGVGQILTAEGFKLHPDKTRVVRVGERQRVTGLVINQVPKGVTAPGARVPRDVLRRLRAALHNREQGKPGKPGETLDQLSGMAAFVHMTDPARGRVLLDRLAALKAKQPEAT

SEQ ID NO: 6459 - protein, 479 aa, unidentified
  source 1..479: note = Related to NZ_ASRX01000060.1; note = Chondromyces apiculatus
MTAKIDPIVQAAQPAILPVTTAPSVKPAGTPEERQRAHEERVARWKAITEAGGIDAWVQAELTSRGLLVSGDPARMSERERSQWKERKKAEVKERRTLRRLAWKAYLGTHIAHLGQGVHWEDKKGADKFDVPQREERAKALGLPQLAGAEDLAAGMELSVARLRWLAFHREVDTGSHYRRWTIPKRDGSERLITAPKKELKRAQRWALRNVFEKLPVHGSAHGFLSARSIVTNAAVHAGADVVIKIDIKDFFPTVTWRRVRGLLRKAGLAEGPATLLALISTEAPREVVQFRGKTLYVASGPRVLPQGAPTSPAITNALCLRLDRRMAGLARKLGLRYTRYADDLTFSWKSPATGETSREVPRARAPIGPLLHGTREILGAEGFRLHPTKTAVMRRGDQQKVTGLVVNAAGPSVPPVRVPREKVRELRAAIRNRELGREGKGETLAQLKGLAAFVFMADPVRGRAFLDRLAALETRAGG

SEQ ID NO: 6460 - protein, 492 aa, unidentified
  source 1..492: note = Related to NZ_CP012159.1; note = Chondromyces crocatus
MTAKIDPIVQAAAPVVLPVTTAPAVKPTETAEERQRALEERVARWKAITEAGGIDSWVQAELSSRGLLVSGDPARMSDRERSQWKERKKAEVKERRTLRRQAWSAYLSSHIAHLGQGVHWEEKTGVDKFDVAQREERARALGLPAIASAEELAAKLEIPVARLRWLAFHREVDTGSHYKRWFIPKRDGTQRLITSPKRDLKRAQRWALRHVFEKLPVHGTAHGFLSARSIVTNAEAHAGADVVVKVDIKDFFPTVTWRRVRGLLRKAGLAEGPATLLSLLSTEAPRDVVQFRGKTLYVANGPRVLPQGAPTSPAITNALCLRLDRRMSGLARKLGMRYTRYADDLTFSWRAPAAAVASETGKKGKGKADAKAAEPRPQAPVGALLRAARDILGGEGFRLHPTKTTVMRRGDQQKVTGLVVNAAGSSVPAVRVPRERVRELRAAIRNRELGREGKGETLDQLKGLAAFVHMADPVRGRAFLERIAALESRSSG

SEQ ID NO: 6461 - protein, 500 aa, unidentified
  source 1..500: note = Related to NC_010162.1; note = Sorangium cellulosum
MTAKIDATVQARAPVVLPITTPPAPGGAAARFHAAAGAEARRLAHEERVARWKAIDEAGGIDAWVSAELTSKGALATGDPKAMSDRERAQWKERKKVEARERRSLRRLAWEAYVATHVNHLGAGVHWSDRVGPDRLDVPGLSERARAHGLPDLPGAAELASALGLSIPRLRWLAYHREVDTGTHYRRWHIPKRDGSARTISSPKRDLKRAQRWALRNLFEKLPVHAAAHGFLASRSIVTNAAAHAGADTIVKVDIKDFFPTITWRRVRGLLRKAGVAEGPATLVALLSTEAPRDVVQFRGQTLYVATGPRVLPQGAPTSPAITNAICLRLDRRASGLARKLGLRYTRYADDLTFSFRATEAPGLAGAARPRAPVGALLRGLREILSSEGFRLHPSKTVVMRKGSRQKVTGLVVNHASEGAPAARVPRERVRALRAAIRNRELGRPGKGETLAQLKGLAAFVYMTDPAKGRAFLGRIEALERNQPAPVGEAGPHDARPVLT

SEQ ID NO: 6462 - protein, 452 aa, unidentified
  source 1..452: note = Related to JADLAG010000095.1; note = Polyangiaceae bacterium
MTEAGGIDAWVSAQLAAKGLAVTGDPASMSDRERGQYKERKKAEAKERRALRKLAWEAYLETHVTHLGAGVHWEDDAGPDRFDAPNREERARLIGLPALETADALAGALEVPVAKLRWLAYHREVDTGSHYRRWQIPKRDGTARTITAPKRDLKRAQRWALRHVFDKLPVHGAAHGFLADRSIVTNAVAHAGADVVVKVDIKDFFPTITWRRVRGLLRKAGVAEAPATLIARLSTEPPREVVQFRGKTLHVATGPRVLPQGAPTSPAITNAICLRLDRRMSGLARKLGFRYTRYADDLTLSWRAGGPPAAPPAAAAPGPGSPGGARSQRPPIGSLLRGIKQILLSEGFRLHPSKTVVMRRGDRQKVTGLVVKGAGDWVPPARVPRERVRELRAAIKNRELGRPGKGETLQQLKGLAAFVYMTDPVRGRAFLDRLAALEALQVKSGGAGEPTG

SEQ ID NO: 6463 - protein, 484 aa, unidentified
  source 1..484: note = Related to JABWBE010000187.1; note = Polyangiaceae bacterium
MTAKIDTSVRAAPPVVLPITTTPPSPPRVSAEERARVLEERLSRWKAISEGGGIDQWVSAQLTAKGALVTGDPSRMSDKERAQYKERKKVEAKERRSLRKLAWEAYAATHISHLGAGIHWEDSTDADKFDIANREERAKTIGLPPLVGAVDLAKALDIPITRLRWMAFHREVDTGSHYRRWLIPKRDGSSRTITAPKRDLKRAQRWALRNVFDRLPVHGAAHGFLSARSIVTNAKAHAGADTVVKVDIKDFFPTVTWRRVRGLLRKAGMAEGPATLLALLSTEAPREIVQFRGKTLYVATGPRVLPQGAPTSPAITNAICLRLDRRVSGLAKKLGFRYTRYADDLTLSWRAPVKPDAGTSPRAPIGTLLRGLKEILQSEGFRMHPSKTAIMRAGMRQKVTGLVINKAGENIPDARVPRDTLRRLRAAIKNRELGRPGKGESLAQLKGLAAFVYMTDPVRGRSLLDRIDMLEARSEGGGSPTPAT

SEQ ID NO: 6464 - protein, 476 aa, unidentified
  source 1..476: note = Related to SECR01001138.1; note = Myxococcales bacterium
MDPWITAQLKAKGLLTEDLSDEEDEDEDESDDDDDEDSDDEDSNDEDSDDEDSDEDAPPRKAAAKKAVAKAAPKVKSDLGKREYKEKKQAEAVERRVLKRLARQAYTAAHIAHLGAGIFWRDDTRRPDAFDHPQRETRAQELKLELTDAKQLAGALGLTIPALRWLSFHREVDTGTHYRSWQIPKRDGKSTRTISSPKKQLKTAQRWLLRNVLEKLPVHGAAHGFLSARSIVTNAQVHAGAEVVIKVDIKDFFPSITWKRVKGLLRKHGLPEGVATLLSLLSTEAPRDVVQFRGKTLYVAKGPRALPQGAPTSPALTNAICLRLDRRLSGLARSLGFRYTRYADDLTFSWHPEPVLPGTSPQPGTGALLRGIGQILEGEGFSLNQAKTRIMRDGTRQAITGLIVNGAPGKATARVPRETLRQLRAAIHNREAGKPGRPGEGLEQLRGMAAFVHMTDAARGKALLARIDALAARDKG

SEQ ID NO: 6465 - protein, 470 aa, unidentified
  source 1..470: note = Related to JADJRH010000001.1; note = Polyangiaceae bacterium
MTAPFDPHLPADSPVRAEPRSTTRRSPEETAKLAAVRAERVALWKAIEEAGGIAAWVRAEIAKKGISTDGVDPSTLSDRQKSSFKDKKRAESEARRTFKRLAWDAYKETHITHLGGIYWDEDASPDKFDIDGREERAKDNILTDIQSPGALAQALGLTVAKLRWLTFHRDVDSGTHYRRWQIPKRDGSMRTITAPKLHMKTAQRWALRNVFDKLPVHGAAHGFLAARSIVTNASVHAGADVVVKIDIEEFFPTITFRRVKGLLRKAGLSEQAATLIALLCTEPPRESVNFRGKTVYVASGPRALPQGAPTSPAITNALCRRMDLRLSGLARLLGLKYTRYADDLTFSWKCPTPGAKAPLGVLLRGVTTILKSEGFRIHKKKTSIMRKGARQAVTGLIINSEVGAASARVPRDVIRNLRAAIKNRELGRPGKEGETLAQLQGLAAFVYMSDPVKGRTFLDRIAKLQAPTKT

SEQ ID NO: 6466 - protein, 468 aa, unidentified
  source 1..468: note = Related to JAEUKI010000081.1; note = Myxococcales bacterium
MASKLETMVSAAAPVEKEQPAPKSAPTEEQLAARAKAHEERVLRWKQVQEAGGADEWIRGELRKKGLLVESDPSRLGDREKGSFKEQKKAEAAERRALKKLVWDAYRATHVVHLGVGVHWSDHFEADRFDIERREDRLKANDLPEYKDAEGLAKAMGIDVPTLRWFSYHRDVDAGTHYRRWQIPKRTGGSRTITAPKRGLKAAQRWVLRNIAEKLPVHGAAHGFLSARSIVTNAQVHAGADVVVKVDVKDFFPTVTWRRVKGLFRKAGLNEATATMLAMVCTEAPRDVVEFRGRTLYVASGPRALPQGAPTSPAITNAICLRLDRRLSGLARVLGMVYTRYADDLTFSWRKSDDRAKAPVGALLGGVKKILRAEGFVLHPDKTTVMRDGDRQKVTGLVVNKAEGQPAARVPRETLRKLRAAIKNRELGRPGKGDETIDQLKGMAAFVFMCDAKKGQAFLDRIAKLEGK

SEQ ID NO: 6467 - protein, 434 aa, unidentified
  source 1..434: note = Related to NZ_CBTJ020000010.1; note = Candidatus Competibacter denitrificans Run_A_D11
MSETPPTWEEIAQVGDIERWVVAQLQQRGLLDEVADPAKLSGNALRQFKARREEERKVRKLLRQQAWAAYRKAHLVHLGADVFHHDTPDQDRYDLPDPETRRETNGLPALKDVQALAKALDLTIPQLRWLAFHREVDSGSHYQYWTIPKRDGGQRLISSPKPTLKKTQRWILRQMAERLPVHGAAHGFLPGRSIFSNAAVHAGARLLVKLDIRNFYPTVTWRRVKGLFRKGGYGEQVATVLALLCTEAPRELLQLDGKPYHVASGPRALPQGAPTSPALSNTVCLRLDCRLSGLSQKLGFRYTRYADDLTFSWHEHSPPPLGRLLRCARLILQTEGFVPHPEKTRILRRSRRQTVTGLVVNAAPDHSSPARVPRLKIRELRAALHNRLRGKPGKAGETLAQLRGWVAYLHMTDPDKAKPFLAQLNQLEARGADE

SEQ ID NO: 6468 - protein, 433 aa, unidentified
  source 1..433: note = Related to CP065007.1; note = Candidatus Competibacteraceae bacterium
MSETPPTWEDIAQVGDIERWVVTRLRQLDLLDEVTDPGKLTSAALHQYKARREEERRVRKQLRQQGWAAFRQAHLVYLGADVFHHDTPDQDRYDLPDPETRREVNALPALKDVQALAKALDLSIPRLRWLAFHREVDSGSHYQYWTIPKRDGGARLISAPKPTLKKTQRWILRQIAERLPVHGAAHGFLPGRSIFSNAAVHAGAHTIVKLDIRHFYPTVTWRRVKGLFRKGGYGEQVATVLALLCTEAPRELLPLDGQHVHVASGPRALPQGAPTSPALSNTVCLRLDCRLSGLSQKLGFRYTRYADDLTFSWHDSSPPPLGRLLRCVHAILKAEGFVPHPKKTRILRRGRRQTVTGLVVNETPAGSPARVPRAQVRRLRAALHNRLHGKPGKEGESLAQLRGWVAFLHMTDPERAKPFLAQLKQLEERGTDE

SEQ ID NO: 6469 - protein, 528 aa, unidentified
  source 1..528: note = Related to JAFKJJ010000105.1; note = Planctomycetes bacterium
MGLFDWMFRRGRKSDPEPIAPSPVSPPPPSEAPGRPAPKAEPQPEATGDPYAATEFLPVSRQEIVDAAKGGNLLSTAFQFGRQSIIPPASDPRTQLIDRAMVTHGLLSPEELNEIHRVGEEYDRVKPTDANLAAAAGLAGAAAVKAYRESKEREKERKKAESAARKKARADAIRHRRASDIIFLGRGVSGRLHLRMSDQQRLAAHELPVMHTPADVAGALGLSIKQLRWLAYHSEAATRTHYVKFQVPKKSGGMRTLAAPHKTLKGAQHWVLANVLNKLPVTEAAHGFVAGRGIVSNANPHVGKAVVVNLDLSDFFPTITFHRVRAVFERYGYSGSVASVLALLCTECPRATVTYAGTKYEAATGPRGLPQGAPTSPGLSNQVARKLDKRLLGVAAKLGLTYTRYADDLTFSGGPELAGKIGWLLAKVRNIAREEGFAVNEKKTRVMRRSTAQTVTGVVVNDKPSVSREELRRLRAILHRAKTEGLEAQNREGRPNFRSWLAGKIAFVNMVRPDAGAKLKAAFDALGR

SEQ ID NO: 6470 - protein, 523 aa, unidentified
  source 1..523: note = Related to VGZJ01000002.1; note = Planctomycetes bacterium
MGLFDWMFRRGRKVEPDPVAPPSTDASLRGAAKPAEPAPPPPPADQYAATDFLPITREEIVDAAKEHGRLLWTAFQFGRPSQIPPTSDPRTQIIDRALVTHGLLTPEDLTEIHTVGAEYDEVKPTEMAIAAAAGLAGNAAVQEYREAKEREKARKKAESAARKKARAAEVKRRRDTDIIFLGRGVSGRLHMRLSDEASLTARGLPVLHAPADVAKALGLTIKQLRWLAYHTEAATRTHYVKFEIPKKSGGMRTLAAPHKRLKAAQHWVLANVVNKLPTTDAAHGFVPGRGIVSNANPHVGKAVVVNLDLSDFFPTITFFRVRAVFERYGYSGSVASVLALLATECPRASVTYAGTKYEAATGPRGLPQGAPTSPGLSNQVARKLDKRLLGVATKLGLTYTRYADDLTFSGGPELAGKIGWLLAKVRHVAKEEGFAVNEKKTRVMRRSAAQMVTGVVVNDKPSVSRDELRRLRAILHRAKSEGLDAQNRENRPNFTEWLRGKIAFVSMVRPDTGAKLKAAFDAL

SEQ ID NO: 6471 - protein, 522 aa, unidentified
  source 1..522: note = Related to PNKH01000071.1; note = Isosphaera sp.
MSAFDWLFRRTRKPDPEPPAPPPPLPPPVADAPGSPSPPPPVADPYGSEFLPVTRGEIVAAAKSGNLLSTAFQFGRPSVIPPTSDPRTQLIDRAMVTAGLLSPEELAEIHRVGEEYEKAKPTEANLAAAAGLAGDAAVRAYRAEKERRKAQKKAESAARKKDRAEAVATRRATDIIFLGRCVSGKLHLRLSDETRLAEFGLPVLHTPADVAKALGLTITQLRWLAFHTDVATRTHYVKFQVSKKSGGTRTLAAPHKTLKAAQRWVLANVAAKFPVTEAAHGFVAGRGIVSNAGPHVGKAVVVNLDLSDFFPSVVFARVRAVFERYGYSGAVATVLALLCTECPRAAVTYAGTKYEAATGPRALPQGAPTSPALSNQVARKLDRRLLGVARKLGLTYTRYADDLTFSGGPELNEKVGWLLAKVRNVAREEGFAVNEPKTRVMRRSAAQTVTGVVVNDKPSVDRAELRRLRAILHRAKAEGLAAQNRDGRPDFRAWLVGKIAFVRMVRPDAGAKLKAALDALPG

SEQ ID NO: 6472 - protein, 532 aa, unidentified
  source 1..532: note = Related to NZ_JAGKQQ010000001.1; note = Gemmata sp.
MSMFDWIFRRKRDVTPSAESAPPSVPPPPDPRPQQQAPKAEPQAEAVGDPYSASEFLPISRQEIVDAAQKHGRLLATAFQFGRQSIIPPVSDPRTEIIDRALVTNGLLSPEELNEIHRVGEEYEKVRPTEQGMAAAAGLAGNAAVKAYREAKERAKARKKAESAERKKARAEAVRRRRATDVIFLGRGVSGRLHLRMSDEAKLTALGLPVLHAPADVAKALGLTIKQLRWLSFHTEVATRTHYVKFQVPKKSGGVRTLAAPHKKLKAAQHWILGNVINKFPVTEAAHGFVAGRGIVTNANPHVNKAVVVNLDLSDFFPSIAFFRVRAVYERYGYSGSVATVLALLCTECPRTAVTYAGTKYEAATGPRGLPQGAPTSPGLSNQVARKLDKRLLGVAAKLGLTYTRYADDLTFSGGAELAGKIGWLLAKVRNICREEGFAVNEKKTRVMRRSAAQVVTGVVVNDKPSVSRDEIRRLRAILHRAKSEGLDAQNREGRENFREWLAGKIAFVNMVRPDVGAKLKTALDSLGERPA

SEQ ID NO: 6473 - protein, 536 aa, unidentified
  source 1..536: note = Related to CP025958.1; note = Gemmata obscuriglobus
MSLFDWVFRRKRDADTPPAPPPAAPTAPASSDKAPSGNTTSGTPGANAPRSSEGSEDQYAANDFLPISRQEIVDAAKKHGRLLATAFQFGRQSIIPPVSDPRTEIIDRALVTHGLLTPEELNEIHRVGEEYEKVRPTEQGIAAAAGLAGTAAVQAYRAAKEAEKERKKREAELRKKVRAEAVWRRRTTDIIFLGRGVSGRLHLRLSDEGRLTELGLPVMHTPADVANALGLTVPRLRWLAFHTDVATRTHYVKFSVPKKSGGTRQLAAPHKSLKAAQHWILANVVNKLPVTEAAHGFVADRGIVTNANPHVCKAFVVNLDLSDFFPSIAFPRVRSAFERYGYSGCVATILALLCTECPRAAVTYAGTKYEAATGPRGLPQGAPTSPGLSNQVARKLDKRLLGVATKLGLTYTRYADDLTFSGDADAAAKIGWLLTKVRHIASEEGFAVNEKKTRVMRRSAAQMVTGVVVNDKPSVCRDELRRLRAILHRAKSEGLDAQNREKLPNFREWLRGKIAFVSMVRPDAGAKLKAQLDAVS

SEQ ID NO: 6474 - protein, 528 aa, unidentified
  source 1..528: note = Related to CP053452.2; note = Frigoriglobus tundricola
MSLFDWMFRRRRTSEPEPVQPPVPVEPPVPAVPPVTAAPETTKTEPAGDPYASAEFLPVSRQEIVDAARGGNLLSTAFQFGRSSTIPPASDPRTQLIDRAMVTHGLLSPEELNEIHRVGDEYDTVKPTDQSMAAAAGLAGAAAVRAFREAKEREKARKKAESAARQKARAEAVKRRRATEIIFLGRGVSGRLHLKLSDELRLVANGLPVLHSPTDVAHALGLTIKQLRWLAFHTEVATKTHYVTFQVPKKSGGMRTLAAPHKALKAAQHRLLETVVARLPVTEAAHGFVAGRGIVTNAGPHVGKEVVVNLDLSDFFPSITFPRVRAVFERYGYSGSVATVLALLCTECPRQAVTYAGTKYESATGPRGLPQGAPTSPGLSNQVARKLDKRLLGVAAKLGLTYTRYADDLTFSGGPELASKIGWLLAKVRHVAQEEGFAVNEKKTRVMRRSMAQTVTGVVVNDKPSIDRDELRRLRAILHRAKTEGLDAQNHEGRPNFRAWLAGKIAFVHMVRPDAGAKLKAALDALDS

SEQ ID NO: 6475 - protein, 528 aa, unidentified
  source 1..528: note = Related to LR594584.1; note = Gemmataceae bacterium
MSAFDWLFRRKRTPESEPPAQAPPAAPAPATPVATPPAASAPAPPKAPAADPMSSEFLPVTRAEIVDAAGKGNLLSTAFQFGRPSIIPPASDPRTQLIDRALVTNGLLSSEELTEIHRVGDEYEAVKPTEAGMAAAAGLAGEAAVKAYREDKGRRKAQKKAESAERKKQRAEAVKLRRETDIIFLGRGVSGKLHLRLSDESKLAERGLPVMHTPADVAKFLNLTIKQLRWLAFHTDVATRTHYVKFQVPKKSGGVRTLAAPHQKLKAAQHAILANIASRFPVTEAAHGFVAGRGIVTNASPHVGKVAVVNLDLENFFPTVVFPRVRAVFERYGYSGSVATVLALLCTESPRASVTYAGVKYEAATGPRGLPQGAPTSPALSNQVARKLDRRLLGVAAKLGLTYTRYADDLTFSGGEELTSKTGWLLARVRHVAQEEGFTVNEKKTRVMRRGAAQMVTGVVVNDKPSIDRDELRRLRAILHRAKTEGLDAQNREGRPNFRAWLVGKIAFVRMVRPDAGAKLMAALDALG

SEQ ID NO: 6476 - protein, 524 aa, unidentified
  source 1..524: note = Related to PNLP01000016.1; note = Planctomycetaceae bacterium
MSMFDWLFRRNRKTENVPLVPPPAPAPVADVPRAEAKPQAATPSPVDPYGSEFLPITRGEIIDASKKGNLLSTAFQFGRPSVIPPAADPRTHLIDRALVTNGLLTPEDLTEIHRVGDEYEKVKPTEIGMAAAAGLAGDAAVKAYKADKERRKAQKKAESAARKAARIEAVKARRATDIIFLGRGVSGKLHLRLSDEARLAERELPVMHTPADVAKLLGLSIKELRWLAFHTEVATRTHYVKFQIPKKSGGMRTLAAPHKKLKAAQHSILSNIVSRLPVTEAAHGFVAGRGIVSNANPHVGKTVVVNLDLENFFPTVVFPRVRSVFERYGYSGSVATILALLCTECPRATVTYAGVQYEASTGPRGLPQGAPTSPGISNQVARKLDKRLLGVAAKLGLTYTRYADDLTFSGGEALNSKTGWLLAKVRHIAQEEGFAVNEKKTRVMRRSAAQLVTGVVVNEKPSISRDELRRLRAILHRAKTEGLEAQNREGRPNFRDWLIGKIAFVSMVRPDVGGKLKAALDALS

SEQ ID NO: 6477 - protein, 547 aa, unidentified
  source 1..547: note = Related to JAIEQO010000648.1; note = Gemmataceae bacterium
MSLYDWLFRRTPKPDPEPTPEARGADAPRSPSPPPPPQPAQQGVNAPRSPQPPTTPEPQPVTDPYAASDFLPITRGELLKSAQADGNLMRNAWQTGRTSIIPDANDPRTKLIDRALVAHGLLTPEQLIEIHRVGDEYARAKPEGDPIARFAGMAGEAAVQAYREAKARLKEQKKAEAKAREERRAEEVKHRRATDIVFLGRGVSGRLHLRLSDEARLADFGLPVLHTPADVASALGLSIQQLRWLAFHTEAATRTHYVKFEVPKRSGGMRVLSAPHKTLKAAQRWILANVVSRFPVPVAAHGFVAGRGIVSNAGPHVGKAVVLNMDLENFFPSIPFPRVRAAFERHGYSGSVATVFALLCTECPRTTATYAGVKYEVATGPRGLPQGAPTSPALSNQVARKLDARLLGLAAKLGLAYTRYADDLTFSGGPEFQEKVGYLMARVRHLAADEGFTVNEKKSRVMRRSIAQSVTGVVVNDKPSICRDELRRLRAVLHRAKAEGLDAQNRDGRENFRAWLEGMIAYVSMVRPDVGAKLKAEFDRLIGASKT

SEQ ID NO: 6478 - protein, 490 aa, unidentified
  source 1..490: note = Related to NZ_CP036273.1; note = Urbifossiella limnaea
MQPLPPADPYAAPDFLPIARGEIVSAAAGKNLMANAWQTGRTSIIPPADDPRTRLIDRALVTHGLLTPEDLAEIHRVGAEYARLKPSLENVALQAGFAGEAAVQAYREAKERLKQLKREEAARRKNERAEAVQRRRDTDVIFLGRGVSGRLHLRLSDPDRLAEYGLPVLHAPAEVAAALGLSIKQLRWLAFHTEAATRTHYVKFQVPKRSGGVRTLAAPHATLKRVQHWILEHVVSKFPVTEPAHGFVPGRGILSNATPHVGKAVVVNLDLSDFFPSVTFPRVRAVFERHGYSGSVATVFALLCTECPRTSATYAGTPYEVAIGPRGLPQGAPTSPGLSNQVARRLDKRLTGLAAKLGFAFTRYADDLTFSGDPEQAEKVGYLLSRVRHLAAEEGFTVNEKKTRVMRRNAAQTVTGIVVNDKPSVSRELLRQLRAILHRARAEGLDAQNRAGRENFRAWLDGTISFVAMVRPDVGAKLRAEYNALSERSS

SEQ ID NO: 6479 - protein, 533 aa, unidentified
  source 1..533: note = Related to LSTD01000254.1; note = Planctomycetaceae bacterium SCGC AG-212-F19
MGLFDWLFGRPGAKQPPAPAPAPQAAASAAAPGAAKPQTTETKGPKPQPAKAPNLSASDFLPITRIDLKESAEQIERWGPWFGRRDLIPPADNPRTKLIDRGLVTQGLMTPEQLVEIHEVGAAMDRVRPIQFQIQAQIAQSGQAAIEANRQRKAEIKAQKKAASAERKKKRSEAIAQRRATDIFFLGRGVSGRLGERTSDETKLTQLGLPVLATPADLAQALGLPIPKLRWLAFHTEVASRVHYVCFTVPKKSGGTRLLSAPHRTLAAAQQWIFANIVGKLPVEPPAHGFTPGRSILTNAQPHVGKNVVVNLDLEGFFPSITFPRIRSVFFRLGYSPAVATILALLCTECPRKQVTYNGKIYHVALGPRGLPQGACTSPGLSNQATRRLDKRLAGLAKKLGLTYTRYADDITFSGNEELKDKVGYLMARIRHIAEAEGFAINENKSRVLRRNAAQTVTGIVVNDRPGVSRKDLRRLRAILHRARHEGLEAQNRAKRPNFRAWLEGMIAYVSMVRPEVGKRLRDQLAALAPKGA

SEQ ID NO: 6480 - protein, 532 aa, unidentified
  source 1..532: note = Related to NZ_LR593887.1; note = Tuwongella immobilis
MNPLERLLEFLGFTKTEADTSKPAKGKPAPADAKSAAGGSDASGAKKPSGPAVAKTFNLDASDLLPITSEELKSGLRKLLRSGGFRFVGRGMIPHGDERTRLINRALLSEGFLTAEQLEAITQVAVEFEELQKALARIEGQVNKSAKKAVEADKEEKARIKAQKKAEALAKKQKHAADVAHRRETDIIFLGRKVSAKLNDRKGNAELLAGYGLPAISTPAELAAALGLSVAKLRWLAFHTEVATRMHYVQFQIPKKSGGTRLLSAPHQSLAAAQEWIYREIIQKIPVETPAHGFVTGRSIVTNAQPHVGNPVLINMDLEAFFPTITWQRVRSVFHRAGYSPSVATILALICTECPRDTVEYAGKTYYVATGPRGLPQGACTSPGLSNLVARRLDKRLGGLCGKLGLTYTRYADDLSVSGPAEINEKVGYLMARIRHIAEAEGFQVNPKKTRVLRPNTAQLVTGIVVNAKPSLPKKELRRLRAILHQAQKNGLDAQNREQIPHFRAWLAGKISFVRMVRPELGAKLQAQFDAL

SEQ ID NO: 6481 - protein, 536 aa, unidentified
  source 1..536: note = Related to NZ_CP042425.1; note = Limnoglobus roseus
MGFWDFLPKLFKPVPSESPPPSPSPIPAEPVAETFVPVPPMPVAEPPAAPPPGPIAVAPPPAAPSFLPITRDDLLKQGEEVRRTTGWMFFGRRDLIPPTSDPRTLLIDRGMVTQGLLTPDELAEMHRVGDEHAKHADRFRQITIKAGQTADQAVEADRAARVAIKAQKKAAAAAFKQTRADAVAVRRATDIIFVGRDVSAMMNDRSSDAERLKAAGLPVLHTPSDLAAALGLAIPQLRWLCFHTEVATRPHYVQFEVPKKAGGTRTLAAPHAKLAAAQEWVLANVLAKLPTEEPAHGFVPGRSTVTNALPHAGRDVVVNVDLEGFFPAVRFPRVRHLFRRLGYSGAVATLLALLGTECSRKRVVYDKQTYFVAIGPRSLPQGACTSPAVSNQIARRLDRRLAGLAKKLDWAYTRYADDLTFSAPPGHREQVGYLLARVRHMAAAEGFALNAKKTRVQRPESRQAVTGLVVNAAPAVPRDVVRRVRAILHRAKHEGLDAQNRTGHPNFRGWVEGMIAYVAMVKPTQGEALRKQYTAL

SEQ ID NO: 6482 - protein, 353 aa, unidentified
  source 1..353: note = Related to JAFATI010001137.1; note = Planctomycetes bacterium
KATDIMFAGKGVSALLGDRASDADKLAAAGLPVLHTPSDLAAVLGLTIPMLRWLCFHTEAATRIHYIQFEVPKKSGGTRTLSAPHRTLAAAQEWVLTNILSKLPAEEPAHGFVPGRSTLTNAAPHAVRDVVVNLDLEGFFPSIGFARIRHVFRRVGYSGAVATLLALLCTECPRKRVVYAGTPYFVATGPRGLPQGACTSPALSNQVARKLDRRLAGLARKLGLTYTRYADDLTLSSGPGFRDRVAYLIARVRHIAADEGFVVNAKKTRVLRPESRQLVTGLVVNAAPAVPRHVVRRLRAILHRARTEGLAAQNRDGHPNFRGWVEGMIAYIAMARPDTGRILRAALEELPRS

SEQ ID NO: 6483 - protein, 543 aa, unidentified
  source 1..543: note = Related to NZ_JAALJH010000005.1; note = Aquisphaera sp.
MNILRRLLGWILGHTIPPAPPWPKVPAPPPPPSPASPERPSGPEPEMLGAAGPAKPVEKKDRPYGSIPEDYRPISREEILEAAAGRSLFSNVWFGRRDRIPPADDPRTALIDRAMATQGFLSPEQLVEIHTVGHEMERFRPTVEGISHQAGLAGAAAVEADRAERARIKARKKAEAEERKRLRAEGIALRKREDITFLGRRVSGRLGERTSRVEDLERSGLPILATPAEVARAMGLSVSRLRWLAFHAEVASRVHYVQFRVPKKSGGERILSAPHRSLRLAQEWIQLEILRKLPVGPEAHGFVPGRSILTNATPHAGKALVVNLDLEGFFPSIGFPRVRKVFEHLGYSGSVATILALLCTECPRKAVTLDGEMLHVATGPRGLPQGACTSPALSNQVAIRLDRRLAGISAKLGFTFTRYADDLTFSGDAEVEAKVGYLLARARHIAEGEGFAVNEKKTRILRRNNRQEVTGLVVNERPGVPRDEVRRLRAILHHARAEGLDAQNRENRPDFRAWLLGKIAFVRMVRPEVGDRLLAELRQLDAS

SEQ ID NO: 6484 - protein, 536 aa, unidentified
  source 1..536: note = Related to NZ_CP042997.1; note = Aquisphaera giovannonii
MNVFRRLFGWLLGRRLKPAPSLPASRPAAPGSPQSPMTVAPTPAEVVAKKGRSYGLDAGDYLPISREEIKEAARGRSLFANAWFGRRDRIPPADDPRTATIDRAMATQGFLSPEELAEIHAVGEEMERLRPTAEHVGHQAALAGVAAVEADRAERARIKAQRKAEAAERKRLRAEAIALRRREDIVFLGRKVSARLGERASRVDDLQRAGLPVLSTPAELALAMRVSIPRLRWLAFHAEVATRVHYVQFRVPKKSGGERVLSAPRSSLRRVQRWILDQVLKNIPAGPHAHGFVAGRSILTNATPHAGKAVVVNLDLEDFFPSIGFPRVRKVFEQAGYSGAVSTILALLCTECPRKTVTYQGETLHVATGPRGLPQGACTSPVLSNHVAIRLDRRLAGVATKLGFAYTRYADDLTFSGPSEVDAKVGYLLAKVRHIAQEEGFAINAKKTRVLRRNARQEVTGLVVNDRPGVRRDEIRRLRAILHRARTEGLASQNREGRPDFRAWLLGKIAFVRMARPEVGERLLAEFHEIDRGRSA
